United States Patent Application Publication US 2021/0254056 A1 - sequence listing, part 17

SEQ ID NO: 35389 - DNA, 5191 bp, Homo sapiens
cgctttggccactatataacaaagtactaaaaatgtataataatgcaaattcactaatatgtttattaaaatataaacaagtttattacaaatctgtagctttattcacaactaacatccttatttttgtcctatatgcccacgtttgtcctcaagtacaacgaaggactgagagagcatataatcccctctaggtgtaaatgaacgtatttatttcgcttcaactcatgtatgaaaggattaaaaaattattagtccccacaacttaattctcccaaagagaaggtgccaagaatgaggcacctttagccatgcataatctccacccatctcatcaaataaacggaacagtgatgaacataacttgctaagtaagctcagccgtgtaacaagaccctagattcccctcccttcttcatcctaccagaacattatccttaaggttttcctaatcagcagtctgcgtctaactaaccctaactatccagagtcacctaacatatacttatttccttgtttcagattcccattacgcctatcttaatgggacaactgggtccgaaattatgcatgtgtttttttgttttgtttttgcggtgtacttattatccgcactttatcattaaattcctgaaaagctagaacaaaacaaatccgtgtcattcactatgtgcatcctctctgcttggggacgccaagggtttcaagctgctgcctccctgccctggtctctgcttgccgtatccagcactgggtaagcgcccaggttctgctccgggactaaaactcatgatcttctggctcaggttctgtgaactgagtcattctggcactgagaatattccgtgactcagcaggcccgaaaaggaggatgtcagaatccacataatttcgagtcttttaaaggcaagccgaggaacacaaacaacacagtggaagaatttcgcagtgggtcgtgcgtacccaagggaaaaattcattccattcccagccttttcacttccttccttgccccggtaaaacgactggttacactttaaatcagcggcaggaaatcgcttcacgaaactcatctggctgctgcgaccaggcccttctgattctccagggaccgtgtcggccccatgaacgccccgggacctctgttcgggaggggctggagcggggccccgggcagcagcgggcgctcccggttcggacccacacctggccgggcggggaccctcttgccgcagcccaaattggcgcgaggccccagggacgaccccgagcgacctcctgacccggcatcgcccctctaaggcgccctcccccgactcctcccgcaatccggagtctcccaggccgcggagcccaaggaccccagcgactcccgcgcggggagcgggtctgcgaggccgcccttccctcccggcatgcaccacccagccgccctcccctcccctcctctcctctcccctcccctcctctcccctcctctcccctcccctcccccaaccccctcccccggctccccgcccacctcgcgcgcccctccccccgggtcgcgcgccgcgggcccgagcgcgagacgccgctgctcccgcccccgccgcctcctggagtcgccggggcggacgcgcagtccatggggcgcggtgggccggggagttgccccaggggccgcgggagttgctgagaggagacagggttgggctttctcctcgcccagaccccaccccaccctgccgaccccaccccctgctccttcctccccgggggcgcgcactcgggcacgcgctcggaagtcgggggtcggcgcggagtgcaggctgctcccggggtaggtgagggaagcgcggaggcggcgcgcgggggcagtggtcggcgagcagcgcggtcctcgctaggggcgcccacccgtcagtctctccggcgcgagccgccgccaccgcccgcgccggagtcaggcccctgggcccccaggctcaagcagcgaagcggcctccgggggacgccgctaggcgagaggaacgcgccggtgcccttgccttcgccgtgacccagcgtgcgggcggcgggatgagagggagccatcgggccgcgccggccctgcggccccgggggcggctctggcccgtgctggccgtgctggcggcggccgccgcggcgggctgtgcccaggcagccatggacgagtgcacggacgagggcgggcggccgcagcgctgcatgcccgagttcgtcaacgccgccttcaacgtgactgtggtggccaccaacacgtgtgggactccgcccgaggaatactgtgtgcagaccggggtgaccggggtcaccaagtcctgtcacctgtgcgacgccgggcagccccacctgcagcacggggcagccttcctgaccgactacaacaaccaggccgacaccacctggtggcaaagccagaccatgctggccggggtgcagtaccccagctccatcaacctcacgctgcacctgggtaagcggtgacagccccgtcccctgctactgctcgccagcagcccagctcccggaccggctccgtcccagtggccggcctcacgggcgcagacggccgcgtgtttgctctctgttccccggcatgggccacacagaaactcctttctccaacttcttaaatagatactgcttttaacatcccgtgagggccaggatgttccgcacgagtctctctgctttcctgttctttctgacttaacgggattctggctctctgattattctgcatttcggctgttaggattgtgatttcccccttttttttctgaagcgttaatcagaaactcccatccccacttttctctttgctagcaaggtcatcacagcgcattcttggatcggaaacaagaaggtccgccttaaacactttcgcctttaaaatgtttagatgtccttccagggctgagggtgattgctctgttgagttaagggggaatttgaggggagcaaatgccttcgctgcctatattgcctatgtgtaattaaaacataaattcacttttgaagttattgttctttatagctgctcagccttaattaagaaccacaaagcgatttgactgctaatcctggtgcagaatgaacaaaaggaagtgcactcactgtaattgctgggcatagccttgtccctgggtaaaaaggctctcctttactgtcttcccttttgctttcattcaaagcaactgtagaaacacgtgtaagtgatgtttcagaaatcaggaaagggatgtgtagaaaacttcatggcagggcagtggattgaggatggacatatgtatctggaagcaccaaaaataatgttcggtctagctaaggttttcttcatcattgagatacgtaaataggcagaaagtttcattattgtgtttaacagaggaatctatgtgtgagaaacacgtttgacttaacacttcactccccattgccttggaaggcttgattattaccagtagctggtactaatgaacttccagagagaacagactgcctcaagccattcttctgtcaagggagggtaattttgtaaggctaatatcacttaggggtgttggaaaggaacatgttgtaggcaaatggttcttttgatcatgattttgctgctctccggtacactaaactttatgtaagtatcaggattccagagaaagaattggacttaacaaaaagtactttgaaaagtgggattaaattattgtgtgtggaataagtgttagaaaagcagaattatttaacatcttatttgcagttgagtcattaaacaaatgaaacattttgaaaataatttcataaaatgatactatgaggtatctgtttttcagggattgaagaagtaaagtgcactgagttcagttttttaaaggtgcctttctgaagacatagctagtgaccgaggatttcctaagatctgtgagattgctctttattttctcctgttatattttttaagttggccaaaattatttttgaaatgtgtatctaagtatttctgtttaacttttgacttgttaaagtttctgtgttcaagtttgaatactcttgaagtcttatttttttcattttcagattttaaaattttcaaagaaaaggcgttgcctgatgtctgaaatctcagatgcctgaaattcaattgacaattactgaacaacagtctcttatttacataaaggtggggttgtcaatcttggctctcagaattttctcttgtaggcactgtgtagctaaaggttatttaaggtgatttcagaggtagatagattactcagtgattactaccctgttgcaaagataatgcggtagagtaacccagtatcagttacgttagattgctcccactgggaggcagatatgttaactttgggtcatggttgattaaaaggtcaaaagagatcttagagtttacctctaacatcactttttactatgaaatgttttatgcttggacttggttttgctgaaattttcctcaacttttggtaatattcttgctaaatgaaattcataaaactatgagtttaaaacttgtaagttaaaagttaaagtattttcttacaagcattgtgattaactgtaaaaatatgtactttaaacttctagtttaaactaacttgactaggatacttgacttgttcttggatcagaaatgacatcctggaagaaatcatgcatagtggaggaggtgggaagggggaaaggtttgtgtgtagtgaggttgaggtttctctttctgtcctccccccccctttaatgacaaggttatatgtatacatgtatgtttcgatcaacaatttatgacaagtaggcaaggtgtcatgtgtcactgtgtgttttgatgtttagcatattcactccccaactccagttactccatgggctgtagctaactaattatttcccatgaattaaagtaccgtgactgttttgtgcatctattaaatctccctcccagttcaaatttcacatacccttaaacaagtgatgcatattgtgctttgctattacagagcatgtgaagctagaaatgagtagtgtgaaagaactaggtctagccaccacttttctagcctttcttttgatgttgaactttaaatacagtaaactttaaaataagcagtcaaatcatacataagaaatgtaagtagttatgtaagtgttttggcactgacttttttaa

SEQ ID NO: 35390 - DNA, 2186 bp, Homo sapiens
tcctttggttttccttgttttttcttctgcatacttctttttatttatgttcctagattcctctcttttcatgctgttcacgcttcgtggatgaactcgtgtttgtctcaaggctttatttgcaatttcatttgtaaatttgtaaattctaaagttgtatttctagtcagctctttttccagatctaaaatcttgttggttatggtcaatttgggatgtccagagaccatattcaaaactaaattcactccttgttgtctcacccaactcaaagctcttttggtattccctatctcagtgaactacactgctgtctaacactgagtttctcaaccgatgttgcccacgtctctcctgaaagaaccatgcttgacaggcttcatgagtaaagactactctggtgaacagataggatccactgctgtgtggtcggtcggttctgggtagctataacttcacccgtttctttcccaccaatcgttactataatctgtccaagactctactcttaccttctatatccagacactatgtgtcttgaatgcttatctttctctccgtcctctttgtctctgccttactgtaagttccttactgtaagttcccattgcatttcacctggattgttgccacagcctccaaataaactggtgggctttctgcctccagttttgccctttatatttgggcagccatcctttggactgagtgatgattctaaaatgcaaatctgatcatacaattttgcagctaaaaattctgcagtggttcctcaaggttttatgataaagtccaaactccttggcgtggtgtacagggtacttaggatctggacctttttgttgcttcacgtgttcacagggctgttctttggtttggaacacttctcccaggtgttaggactccttccccagtttctctctctctcccctttctgccccactccctggcttggattaagtctcccactgacgccaccctgtaggtatttatcacagtccctatcacataggattatctgtttctttacttgtctgtttctacctttaaaccatgaagtttttgaaggacgagtcaggggtttagtaatcttttagttcagttaaagatgactaatattggttaattgcttgttatgtattagcaacaatgcaaattcctggatgtgtagtgattcatgggacattgccctgacctcattcttagatgaggtgtagatgcagagacccatgtctctcgatttgggggtaggcaaatgatggccttcttagccaagtccagtccagtcctgcctatttttgtatgggctgtgaactaagaatggtttgtacatttttaattggttagaaaaaatcagaagaataatattttgtgacatgtgaaaatttcatgaaattcaaattttagttacccataaagttttgttggagcacagtttagcccatgtaacaaagcattgtctgtggctgtttttgcacaataagggcagagttgagtaatagcgacagactccatatgtcccagcccacaaaggctgaagtatttactatctggctctcatagcacaggtttgttgacctctgttctagagcagtactttcatgttatatagtaagtcctaagtgagagatgcaagcacagagaggattcacttcactgactgtttgggtggaggctggaggcattctgtctccagtgacacttgtctggcatagtgttcataaaaatatatgtacagtgagtgaataaatgaatgcctgaattataaaactcccagaacattgaacattaacttaaattcttcaaagcaaaacttttgagcttgtgtttattttttatcagtgccatctctccattttataagatatatgtcactgtaatagctaatattaaatgtagtatgtggttttatttctgtaaattttttaaaaaagtactaaggtatggaactggtatggaattggaaaggcctatgactgtccttttttgggtaaaaattagactgttatgtgacttgaaggcagcctagataaatcttaggcgaaaactcatgaattctcacatgtgaatatgtatttctgaaatgttaatttgtatttttttcctttaaaaatggacataagcaaattttatttaaagtatatatattctgtagtttcagctacttgggaggctgaggcagaggg

SEQ ID NO: 35391 - DNA, 711 bp, Homo sapiens
catcctttaagactcaattcaaactttatttctactgtgcagtctcttggaccaggctctcctcatgtcttactttctcttgcagtgactcactacgcctattgtgtttccatagtaccctgtacacaatattacagtgcttactacactgtgtcctaacgatttgtttacatgtctgactcataattatcattacattccctggggacaagagctagatcttaatcatgtttgtattcttagcactaagttgatgccagacacacagtaggcacttattagatgcttatatgaccgaatgaatgggtgaaaagcagaagtagagaagttatcttaagttgatataacagtatgagcaaaatatggatgcaaaatcagtgctattgtgatggcaagaatgagacagtttgagaaaatatcgtgttgagaagtaggtttgtgtaaaatagagataggaagatatgatcacttcatgaaaggctttgaatatgaagctgaccaattgagatgtgttaggaagggtagccattttagtttttttgtcagaagtgacatggttagatagcagagttgcaggaaaattagtataatggtagtaggttaagttattgtagcaatccagatgtgagttaatgagggataggactagggtgatgtcgatcagaaaggcaaaaggagagacactgaaaacagcaaaccacaaaaactctg

SEQ ID NO: 35392 - DNA, 1118 bp, Homo sapiens
ggtgctccttgcacctccctggccctggcaggtctctttgctgatcttgtgctgctttctgaggagcctgtttttagaatgcttctccaggtagccagcaccagtggaccatcattgaagtaggagtgggtgttgaaagagatagggagggcattccaggtagatagtgtggacaaaggcaccaagcctgaaaaaagaatggcccggttgaataattttaagtagtttgagatggcacagtgcccggcacacagtctcttcataaatgattactcaaagattgagtgagtggacagatgaatgaatgggctagattgtggcatgtgcgtggaattaggtaagagattcttagacttgatcataattgcctagtaaatcattcttccatagcccttttataaggtaaatacctagtcataaagttcaatctgtgattcactagttatatttgcaaattatttagtctctgggcctgtttcctcacctataaacaaggtagttaggcttgagaactcctctattccttccatctttagaatagctatgattttaagtaaagggacagggaccaactagtgcttctgttgggggttcagagctgaacctcttctgctgtcctggctctttaggcatctctctggcctgtcacagaggttggatgactgggatgccttgtggatgcccagatgttcctgggatacttccagttttgtgggtgatggtaatgtctgtgtgttcttcctttgtcatctgggccgtgatttgaaggatatactaccatttgtatttaatgtctagggtggtgagataagagctcctattagattttttaactagaaatggaataaatgctgtatctagttaataattaggaaaactttactcatattttttatttggggcttaaggagaaaataaactttaatttagggattttttttttcctgcttgaattcagtagggtcttcctcaaaatcttaaatgggagttctcagttccccttgtaatgtcaacctcggcaaatttcttctgttgatatggaaagaattgttggacaggtggtaagggtaactgagcagtgggtagggatgagttcaaagaagagaaatcctacagac

SEQ ID NO: 35393 - DNA, 389 bp, Homo sapiens
atatacatgtgcaaaacttggagatgtggacactagttttagctgcagcttctgaagtggcaggatggggtggggcagggtgaggtagtgggtataactggagtcttcagcggatcagccccacttttgtcacctccctttctctggaagctaaggattccctcagctgcagccttggggcttaggatgattgataataaccccagctccacttattggtcactgagttgagtcagacctgctggggatcagaggttttgtttcttcctgttttttttttccatactcagtagctagttaaatctcaaccattatagtttgatgccagtgttttaaatcctgtgttaaacaagaaacttacgttgttagactgtgtggtaaggttttag

SEQ ID NO: 35394 - DNA, 4074 bp, Homo sapiens
atgtagtgtgccttatcaatataactttcaagtccccctttcaagtatattgccatatgtaagccactcctaggagagacttcccatagctgccattgctaggattctttgaagtcatcttcaagaataatgttttttagtttggctttctcttatttcaaggtcaatctgtttgttttatttaaaagagagattggagcaattttagaattaggtatttaagaatcagagaaacctcttagtttccttagaacagttggcttttggattaattatattttataaaatactcatatttcaggattgtggtctttttgtacattatgatgaactgccaagaatgaaccaagctagctttgaatttaaattttacctcagcgaaagcatctaatcaatatgatgtcgtagaaagtgtatgccattaaatgtttatcatttgctgtctgtatgaccccaactaaaaatagcaataatagaacagaagtttccaggattaaagaagaggatacaaatgaaagtgctagataaaatacaaaatgttattatgtgggtagtaattttttttatgattatttataacccaaattgataatgtaagtcatgagatagtataaatcaatatattattatttctggattatatttttaagacattttataaattataaaaggagcgggagcatacttgagaaaaaggaaagcttttttaaaaaaagtacaattttcttttgtgcctagaatgccaccagcaccaaggcagaagctgaaagaacttttgcagaagttacagatctggataatgaggtgaacaatatgttgaagcaactgcaggaagcagaaaaagagctaaagagaaaacaagatgacgctgaccaggacatgatgatggcagggatggtaagaggttttggtatatttgctcattggcagaaagtgaacagtgtttaataataaagatcccccacttgttgagaagagtcttttttatattgacttctgtttttcatcacattgtctcgtcaagaattgggttagtagcttacatagaagacaaagaatttggatcttctgccaggtaattttgttgcacaattgtcctgtcccaaagttactcagttaaaagtaaaacattgctttacacgtttgaggttttaggacattaaaagtatgtgtttatatttttcactgggtaattcataaatgttaataaaaaaggaatgcaatgaagttaattttcttcttattcttgttctcccagcacctttagagacaaagacaagtttcttgtatataagaaatttttgaagatggcattgtctaccaccccaccaaaacatatgaaacttacatctagtttaatttttcacgttttgtgataatgtgtatgcaaggtactatttgtaacaaaattgacttgtcaatggatggcccaaggaagaactaaggtccatttttctgttctatgctatattttgctttgaaaagactttaatggagtcacagtaggaatattctttttccagttgggtgtagcaatcacggtaatgacatacacgaacttgtggttacttgctcactttcagtggcaaagaagaggccgtcgttcactgctgccagaaaacatagtccctcagtgtgggtcattttcatcttgggatggaaaaaagaagtacaaagcctgttaatctcagtaaaaactctagggaagtgataaaggaaactatctctgtgcaaccacctaattttattatgctttttacaggtaggggggtggatgttggtttggattgtcctgattttctccgttatggtgtggctcaagtaaaaattcccataaaggtgtctgggcgcagtggttcactcctgtaatcccagcactttgagaggccgaggtgggtggatcgcctgtggtcaggaattcgagaccagcctggccaacatggtgaaacgctatctctactaaaaatacaaaaattagttgggcatggtggtgggtgcctgttaccccagctacataggaggctgaggcaggagaattgcttgaacttgggaggtggaggttgtaatgagccaagatcactccaccctgggccacagaggaagactccgtctcaaaaaaacaaaaattcccataaaaaaaatagatgtttctcacatgttgagcatatatggatttcatttttaatatgattgtagaaacattagatttaaagcatattgaaaaagaaaacagtatattctttaggagcttcaaaaaagggttttggtttagttcaaagggtgaaagaagatcttttattattttggtaaataacttctaaggaaacaaaccaccctcacatgcactatctcatttgtatttctgtcaattctgaaaggccagcatttggccagtattatttgaatctgtattgtattttttaaccagaagaatgaaggtttatagcttcattcttttggaagaggaggctggagaccacaggttaaatgcaggtgcatcgctcttggccggccctggcagggtcctttctccctccttttacactcgcagacaagcttgtggatgctcaataaggacagctgccgtttggacagagattaatcatttatttgtgaaggttttttctgccttgctttcttgttcttttttaaatcttcacattgttttgatcccaaaatgtttgtgttgtccttactcaaaactaggaaaaacaattatgtggtaagaggctcagagccacttacttaaatctcaactagatttatttgtgagaacatctgttttctgatatttagacacttcctcttccattgctgtttcctatgactcatgcacagttatttgttcaggtttcatggaatttcccaagtgtatttacctttgtttggtttttaaaatgtaaattatattgccccaataaatgagtatgtgtgtcagggggactgtggctgggtcattgcatgtggagggggagtttacagaagagaactcctagaagagctttacttaactatgaaaattttcaaagaataggacatttctaataagtccctaagagtgtcctgaaggacatgttttggttctgaaacatagtttctataatcatccttaaaaaataacttgtttctgcttaataggctttactatgaatatacctccatatattattgagttagaatgtgagaaaaggagattaatttttgaagtacaaatatagtgagttagtgagtgtaggcatcctgactgcctagtcataactttgatgaagtagaaataccaacatcctcaatatgaagatatgcagcagccccaccaaaaaaaaaaaaaaaaaaaagcaatgagaggtttcaatttcctaagttagaaaagggaagaaaatctggaaattagatttgttgggtcattgggaaaaaagatttaaagaagatgaaaacatacagtcaagactctttgcctcatttttcccttacaggcttcacaggctgctcaagaagccgagatcaatgccagaaaagccaaaaactctgttactagcctcctcagcattattaatgacctcttggagcagctgggtacgtagccatagagtcatttttgtcagtctctgaatcttttgtactgttcttaggatctgatatagtacagttgactcaaaagcagatgatataggtttacatgaatcccttttaagtcattaattaaattattaatatttccttttgctgttgcttatttttgaaagccttataaaataaatgtttgtcttgcatgacagggtctttaagagcaacttgcttctttaccatacttattatttgtcagctttacagtgtgacctgaatcatgactttaggctgtgttaatgtgacaagtacttactaggtgccttctgtggaccttgccctaagtagaacactgtggtctgaggagtttctttttatattttgaagatatattgccagctagggtagcatttatggtccagtatcattgtacaactaaacagtgatttttcttaactcatcttgctggcagtatctttaagggatttaaagtaaaggatttcaatagta

SEQ ID NO: 35395 - DNA, 1829 bp, Homo sapiens
acacaacaactgacacagccttgaaatctactaaatgtccctctctcagaatcttttgtcctctgttttgttctgatttttttctgtgtctattttgctttctatcagcttatgcccctcttctctgtgctccttcccaatttttttttttttttttgtctgagatggagtctcgctctgtcgcccaggttggagtgtagtggcgtgatctcggctcactgtaacctctgcctcctaggttcaagtgattctcctgccttagcctcccaggtagatgggactacaggtgcatgccaccacgcctgggttatttattttttatttttttatttttagtagagacggagtttcattgtgttggccaggctggtctcaaactcctgatctcaactgatccacccaccttggcctcccaaagtgctgagattacaagcgtcagccaccacatccagcctcatttttttgtattgtttaactattaattgatttgaatatttctgtctataatagctacaccaaaaaagatgcaaatgaagttcttcttcatgtgttgatttcccaccacatctctggcccaggtgtaccatcagccaaccacagaaaaaggatcatgtccctttaataaataaacggcattacttcagttctggtctggcctctaccgctccctgaaaactagctgtgggcacaccacatatgtttctgcataaaatggaagcttgccacttcagccagggttttgcttcagagaacattgttttctggagtctggccagcctcagagaatttacccagacgatccaggaaacactgaaccatttccatttatggacattttcctttaccaattaagaacaaaggggagttaaaaaaatttttttttcctgattgctatattttacatttaaaattgtaatgtgaatgctgacataattagaactatctggggagattttttaaaaggcagggaactgggaccaacagccctgtccattgctggcatgttaacagccagtacttcagtttttatcataagtgagtttgaaagaggatgacatgccagacattccttctgaaagtaaactaaggtaatgatggaactcaagggaaaaatcaacatgttacttataattctatttggggggttgggtggggagatgaccattctgtgaaatgatttatacagcactgtagaaagaaaagtcccctgggtgatgactgtgagctgcaaaagcaacaatgaacaaaggggacttccagggcctcagccttcctggccacacccggtgggaatgccccagtccttttccgctctgtggttggagaacttctacgtagagcattatcctcaccaacacaaggagttacactctaaatggacaaatttggggaggatcagatgaaaattcaagcgctcactttctagaacaaaagtctgagatgggtttaaaattcatgctcctatgcaaacatttcaaaaagcatcttttactttttgtaaattgccaaaacaggtttccagaagagggctcctcctgcaatgcttgggtgatgtctctgcccaaaggtctgagctggccacttagtgctgatccaaaccagcagagatggttttgtcaggcctggttttatcacacaacttatgcaaacactggtatgtttccagtggttgctttgaggttgcacatttgaattaaagtatctgaattatgaaatatattcttttgagattttctcttttttatatcagtttattgagacattttgtatacaatccaattttaagtgtacaatagagtttttttttgtgtttttttttcttttggaga

SEQ ID NO: 35396 - DNA, 1745 bp, Homo sapiens
ttgaggccaggaattcaaggtcagcctgcccaacacagcaagacctcgtctctacaaaaaattaaaaaattagctgggtgtggtggcatttgcctgtagccctagctactcaagaggctgaggtgggaggattgcttgagcccaggggttggaggctgcagtgcgctatgatggtgccattgaaaacaaaaacaaaaaccaaccaacaaacaaaaaaacaaacaaaaagaaaacgatactcagtctttatagggaggttggccagtcaataggttactttatgagttgctaaccctggtgagcaggaagttatgtggaccaggagagaaacccttggttcagcctggagaaaggagaggttgaccctaaactggagggtggagaggaccctgttgtgactctccgactgacttgtcttccttgatgtcctttaagccggagctgattcgggctgctgccttatttctgagttagcgctcttaagattgggcctcccagtttgaggaaggggcgggctgctgtctacctctgtgaatctgccctggaccaccccgggagagaaggagggctccggggaatctcgcacattccaggcaaaggctcccgggccgcagcctctgtgccacacccttggcccgggccaggtgtgcgccctcctcgctgcgagggggagcgggcggctgcggggagcgattttccagcccggtttgtgctctgtgtgtttgtctgcctctggagggctgggtcctccttattcacaggtgagtcacaccctgaaacacaggctctcttcctgtcaggactgagtcaggtagaagagtcgataaaaccacctgatcaaggaaaaggaaggcacagcggagcgcagagtgagaaccaccaaccgaggcgccgggcagcgacccctgcagcggagacagagactgagcggcccggccccgccatgcctgcgctctggctgggctgctgcctctgcttctcgctcctcctgcccgcagcccgggccacctccaggagggaaggtgagtcggcttccacaaggaaacatctcagccctgggctgagaatctgcctttctctgcagaccgtgatggctgaacgtacctccgaggattcccactttgtccagaaacttgttagagctcccttctcctcccctatctggggctcctccagagacggattttaaatgagactaatatataaagctatctgctttttaaaaatagtaagacaataagctgtgacaaaagagggtcttccttaccttaaaaatgttccttcttgatgtcttttttcgaccaaggggccgctatttaatcaataatgtgttgttatatacgttctttccccagcgtgtgcttttattaaaaggttttggtggcaatgtttcccatgactgtgaacaccacaaagattgcaaaggaacctcttcaataatcctgtaattgatgtttcaaatttcggatggaaaaatgagccttaatagtattagcaatacccttaacttttgcatcacgttacttttcatagtattttcatgtaatattcattcaacaggcacttactgggcacctgtgtcatatatcatttgatcttatctagggcacctagttggctgtcatgtgttagacgttaagttcatgtaaacaaaactttgtgagaacctagcaactcttaactgtaagcatgtgtcagctatggcaacattttatgggtgttttccttgtcacttagttctatgg

SEQ ID NO: 35397 - DNA, 606 bp, Homo sapiens
gaaccactgtgcccagcccatgttctaaataagaaaggcacaatgaaaaatttgtagttattttgagattgcttccaaaaggcatccagggcagggagggcattggctcattgggttagccagatgaagaacctcgcaaggactgctgaacagtgaatttagctcttgtacgtgcatagtcatgtacttggtacaaatttcacagcacatgacagctgtgtggcacatctgttggagatccaaaaaatcagtttcacaagcattggttgggaaagattcagcttggcactagttctgagaaaagccctgggactttgaattgtgtgcaaatgtaatatgctgtaagttcactgaaatgttagtctttgcccatgggataaaaatatctagtcctgttacaagccaagctgtttaaatcacacttgcagtactggtcatatgaagaaggatactggaaattagaatttgttcctaggatggtagtcaagaagaatctagaaattatgacataggaagtggttgaaagacttggagatgacagatctgtagtccaacttgaacaggaaaagactaaggagggagatgccatagctatcttcagattca

SEQ ID NO: 35398 - DNA, 1277 bp, Homo sapiens
ctgtacacacagatacatacactgtgctgtattcattgtggacagacagtaaagacaagttagtaaatataaagggggagagagaggtggttctgtaaataagattttttttttaaacggttcatttgtctattatctttctggcattatctacttttctttgctagaaagtgtttaacagcatcctgtgataaatattgatccacttaaagcatacagccttattgcatggcaatgacttagtgtagtaggtctgtggaaccaactgatagctgcagcttgaaagaatctaaaaatgggcagattctggtgcagccatgagttgctggtagagtggtttgggagtcttatagaaaactgggtgaccctgtggtgagataggcccatatcgcagcagtcaccccccaaattcacctaagttgctgtcacaatgtggtttgactcagattagtttagctttgttgtgtggaatttgcatccagaatcttttggatttagcagtcctccctatgaatcaaagaacttcataaaaaaattaaaagacaaattattgcattttaatgggcatttaacctctctgaagagctcctattgccttaggtcatgcagcttcattgtgagtcaccagagttgggtcatcccagtgaaatgatcagtgagaatgaaactagaaatttaattggctcagcttgaaagcctggcctgaagacaaggttattagtctcagggtagaccaggaacctgctgcctagcacagaaggatggtaaagaaggatttaccatgtcatctcttctgtttcagcatgtagtctactgcttgcccagtggtaagggcaagtgaaactggctccttctttttatttgggtaatagatatcccagactcagtgggaacagcttggcaggaagtggtggagcccagtattgatttatgtcttatatgatagttaacatgtgccatgtgccaaccctgggccaggcacttttctaggtgcttttaatccagtaattaattaatcttcacaaataactaaagagggggctatgttttttcccatttcacaaatgatgtagcagagacttagggagggaggggaagaaacttgtccaaggtcatagagctaaggggcagagtaagagttcaggaccaggtttgttgacatcaaaggtaataatgtagagtacagtggtgggttatggagccaggcagccagggtgcaaatctggacacaaccaccatcatcattaggtcactctgggcaggttccttaacctctt

SEQ ID NO: 35399 - DNA, 782 bp, Homo sapiens
attgggcttcgactcccagacatccggcctaggctagcgaagtctctgcctcacctccccagcaggccctgggaccccagtgacatggcctgagccctggatcctaagacctcctctcacttttgtgtcactgggacttctgtgccccagcctgaagtcctcttgcctgtctgcaggctacagtctgttagagaaaaagtccaggccagatgaggaaatggggctctgtctttgggatgggaggagagggactgcggaggtgatggcccacaggtggggaggaatgacttgagttctgtgctcggaagtcagggcagctctgcaagattttttcctggccagttttggatttccaaaaccagagagagattcattgtgtttgccttgagaaaggaaatcccccaaacaggacgatgggggaggaatttctgagggcagagagtttctagaactgagaagggagggtttagggaggccaggacagaatcattgcacaaccctgctctccctgggaaaaaccctcagtccttcctgccttgagccagaggccacgggctccatctgctgagagcttgtagagacacacatcaaacaagtcccaaactgctgacctctacttctacctttgctgaactccctaaaatccgatacaggagcagaggtttggggcctgggagcctggggcaggaaagagccaagggcaaagaagtacaagccagctatggatttttaacatcattattttgttgttattatttattgaatcatcacatcagctctat

SEQ ID NO: 35400 - DNA, 2075 bp, Homo sapiens
gttggggaggcctcaggaaacttacaatcatggtggaaggggaaaaatggaccttctttacaaggcagcagggagagacaaacaaaggaggaagttccaaacacttacaaaaacataagatcttgtgagaactcactcactcatgagaacagcatgggggaaaccacccccatgatccaatcacctccctccctggacacgtggggattacaggtccctccgtcaacatgtggggattataaatagagatcagatttgggcagggacatagggccaaaccatatcagtgtgtgcatgtgtacatgcatgtacatgtttcccatggttttgaagaacagatttatgacaatgaatatcagtatcacattcttagtgctccaaattactatctacctgataaaagttaggaaagtagaaactagaaaatattaaaagattatgttattttagttgggtgttttaagaaaaatatggcaacttctaggtaactgaacagactttgacatgaaatatgttgctgttagattagggacccacaagatgatttcagtaagtactgtgcttcgggtagtaaagagatgcatgaacactaaggccttctgccaataaaataagagaggctacggtttttgtttttgtttttcaatacttttcaatctttcctatgagcatctcttcttgtcttctccagattgtgtccattaaatcagcagataagaattttaggtgtggtaatttctcagaggtatttgcttattgggagttgggggaaaccttgaagatagtaagatttcccttagtaaatattaggagaatggagaagtgaagggggagagaaagctctgaatattattccccaactgtcacctcagtgcctcccaaatcagaagtttcttttcttcaatcttggactgcaatgattcccgactattcttcaggctaaaagactccctctttggagtgaatgaataaatatacacttggcaaactgtttgaaaaaggctactgacccttgatctaagaaatcttgagcaacaggagacctgaatttaaatgtcaatttgtatctgactcactatttgaagagaatgaattactcatttgattgaatcacttaactctatggtctgaggtgtggtactgaagaggaatgaatggctagcttcacacatattgtgtactgagtatgcaactgataataaatgtgtttctgctttgatgagaatgatttaccaagttcctaattgtgcacaggatttataaacattcagaatatataggataaatattaaaataaattagggcttgttacgatgtcatggcacaggctgtctattattataaaaagggaggaggcctgctatgtattaatcgtcaggttaccaaagctctgggtaaatttggtaagaatgttaagagtagcttctcagcaagtactgtgtttgattgaaaagaggccattccatctacttggacagaaatgtggttatattagcctgttttatgtgataaaaggtttttgaaaagttttaaatctctagcattggactcacaatgtcctaatattgtgttcttttctgtaatcagtcatgaataaagaaatctatcttctagcactggatgccaatagatttgaatgtgagttcagacctatgagtattatagacaaagactagattgagagctgggtacagtgattcacacctaaaatcccagctacttgtgaggctgaggcgggaggactgcttgtggctaggagttagagatagatagcctgggcaatacagttaggctgcatctctatttaaaaaaaaaaaagactagatagagtattattttaaaaaataatgttatgctgtagtagttctattttactctttttagcttgatataaaagagcaaaagggactgggcaaggtggctcacacctgtaatcccagaactttgagatgccaaggcaggtggatcacttgaggtcaggagtttgagaccagcctggccaacatggtgaaccttgtctctactgaaaatacaaaaattagctgggcgtggtggcacacacctgtagtcccagc

SEQ ID NO: 35401 - DNA, 4319 bp, Homo sapiens
ggggggaaaaggtgaacaatatctattgcaaaaagaaagatgtttgtaattctacaagtttgttgactaggacaagtggaaatagatgaaaatggaaaatgtgtattaaacagtatataaatagaaggtaataatttttctgagtcctattgatttttgaaggtaattttaatattagtatcaaagtcttctaatctctaaaatatactactattcttctatttagctagagatattgtaaagctattgaagactcttataagattcttaggaaagctgctataaaacacagactttattatttctgacctcatgtgttcctactttgttcttaccccaattactgcatccctcatattgcatcctaatcattactctgagctctctaccagcagttgggtttcctcaaggcagggaccaggtctctttcactgtggtgtccatcataaccagaacagtgtctgaaatataataagtactcagtaaatgtttatggaataaatcagcaaacactaacaaaaggattcatctttctgatccgtttctctatttccaaaatgagaagatagtagtaatattttcctagattgcttatcaggaatgtatgataactgttcatacactctttattggagatatgtgccacagacataaatggctattaccatgattagtaagggggtaattattacaatttttattctggttgaaatctaaccaattaaaaaatctaaccaatacacgatcacactggtctttaaattaaaaaaaaaaaagaaaaatatctaaccaataaattttcggaaagaaatgtaggctatttgaggtaataggtagtaggagtgtctatccttgggcgctcatggtagaaagaaaagcagaaccccaccgcggaaatgagaataatccctcactaggtggctctctttgccgtgagtgggcggcgcgtcggggcggggcgggtgattgggggcattgtactgccgcaagcgctgcgtgtcacgccgcaccataccaggcgctggcagcatgaggggcatagtccactttctatttcgttaatgacaatctgtccttggaatttatttcaaagcaggttgtactttcgtttccgctaaacttatacctgatgtttcaactgaacattggtatagtcttattggtgcaggtctcagagaaggatcttgaaagtgcctcttcacctggcgtagaaaaagacagcaggaatcaggtagccaaaccagaccaaaccaaatcaaaatagcccattaaaatccttattttaactatcctatgagggctgcattcttggaaggttttatatagttacatatcctaaagtactttgggatagctccttaagtgactccacaatacgaaccgaaaatataacttgtaaaacgtcaatttcttcaagtcatggatgatgaattttccagctatttctcatacacttcatattattattgacttcgttctttatttcagctttttggcccgaaacctgacacaaaacacacataataaatatccaaaaagatttgttctaagaatgaaacttcttttcctagactcctttcaccagacagatgtatctagggttcgttcttcttgatcctcttttatccgatgttttcctctctaactcaacgacacagaatgacgacttttaaaacactgcagacccgtgagaagagaaaggttgcagagcagggaggaacttggaggtctgcctttaataatcaagcaggatccccactgcggggtgcctatcagagtgatggcgctagtcagccttccggcttgtccccggcttaaatgatagaaaaccacgtgttagccttctaggatgtgttcccaccctcaccctggcctcctcgcggcaggctcgcgacagctaggtcaggagggagtacgcgggtggggtggatttgggggaggggtcgactcgccagaagtcggctatccccgtcggcagggaaggcatcgcggctgtcgtgtgccgctctcctccctcagggaccccgtccaggcgggatcccgcctcccagagcccaaggcagttgtggggaaaccccttgcccttcctcgccgcttggcgctgtcgcctcgccctcccgactccagcccgccgcccgccagcctccaggccatgcatcctcttcgcaggcccagccctctccacgcccggctctgagaggaaactacggaggtggttcccgctcgcaggcgggtggaaaagcccatggtgaatgcctcggggtgtccccccagttgctgtgggaagtgggaagggaggaggaagtggacttcaccaccggggagaactatatcgattcctaacttgggggaggcctttagatggaagggaagccaacggggaaccctgggtggtttcctgggaatccattggccaaggggagggtgaccctgtccgcacacatcggttactatgacaatataaccacagcctccagttgccatggcagctgcctatccaatccgattgtcttctcttcctctccgggccccaccttatcccctccaagagtctcccagcgtgcatggggaggggctgcagcgaagaggagagggggtccttcgagtcactctctacgcgcgagggaagacaggcgttgagggactgctgggaggaactgtaggaggaaggggcggcgtttccggtggggaagagtggaggcgtgcaaaaaggaagagggaaatcggcaggagtgataagaagggggaagactttgagtgtaactcccgttcttttggcctgggtgttcccggtggtgggattgggattgcccccttgcgcgggaggagaagggtggattggcaggaagccgccaagcgccaccagccggtctctcagaagccgcacaggcgccacacagctcgttgatcccaaaagggagcgctacagagaggcggaaatcactgagggacaggcgctgctgaaatctcgcgagagggaccccctccctcgcccggtcgccgacttcctctgcttctcctctttcccccgcccctcctccctccccctcccccccgggtcggagtgtccctgcgccccacgggccagagcagcagcgagagcagctttccccactccctccccctcgcctcattcacccccacccccctgccgagcgaggaggagccggaggagaggaagatggcggcggccgccagcacccgcggtgccgcggggccgctccgaggagcctgagagacccacggaggcttcgcgggaagacgcggcggcggcggcggaggatgagcctgcagagcgcgcagtacctccggtgagtgccgaggccgggctggtacgtagggggagcgggccgcaggttggggcatggagcaacagacaccgaggtaagtccggggtggcgggggagttgctgcgtcctctcctcgccgggcaggtcggcggagactgcaaggggatctgcgggagggggcggaacgggtatgggtgcctagcccctaccgcccgggctgagctctggcgaagccggctcgtcccggtgcgaggagggaggttggggaagcgtgagaatgtgcgcgcgcgcccttggtctcgggtttgctagcgaggggtggagagaaacgtccggggaggcggcggcgaccccgagtggaggtgggtgtggaggagtctgatccccgtggcaggggactcgtggtgtggcgtgggattggttggagcgatgcatgagtagaggacggggaggaagtctgcacacctggggtgttggggcgggggaaccgcggagggcagacagggggagagggagaccgcaggaaactggagcttgttcttcattctcgggttgggagtattgaggaataatgtcatctgtagttagttggcggtgtggggaggcgtgaaggggaatagatggggaagtgaggaaagagggaggcactgtggacaaggttgggtttttcagaagaaactgggttagaatcagtgtagtcggaagataccattctgagagtcgtgtgtattcattaagagtggtgtaaggaacttgtatgtcagaggtagagtgacacatgggaatagtgtgtgtgtgtgcgagatgtgtgtctggggtggggggcgcggcgattgatgcacatttcaggatgaagatgtagataggttgaacttagtacctgatggcgagaacatattgaatggaaggacaccagcttttgtgtcagctgaaaggttccatggaagctgagtaagagcttggaggcagaggtaaagtgggtcaaaaatcttgatagagaaaagtaaggttgttagatcctgaaattaa

SEQ ID NO: 35402 - DNA, 1390 bp, Homo sapiens
aggaaaaggactattaaaatatctttttgtcagctctagagtcacttaggctaatgtcctaagagttcatggataatctcgtgtcatcttgttcaaggaaaagtgtgttggggggtgaatagcttgtatatttactcagtaaaaggtactactcagttctttccattattaacagatttgtcatcatctatattgtgtatatcagtgtctgctctgagttactgtattatgctcttgaattggcattgaaaacataatctattgtgtgatgaaaacagaacatggagcaatatcaggctatctgtaccatttaccttttcttagacattgaacaaccttagtaaatagtcttagggtttgacctttataggggacctttggctgcccagaaactttaactaagataatgtctgctcatttgaatgatggtcttgatagatgagaattagtaatcttttacacttctttttcttgccataagtgaattaaagcagggttgactaaatctattagttagtgattaacaatttaactagggatgaggagctgatagtaaactctattcttaactagcctgtaaactcttaggagcattaactcaaatccaggagattctctttgcaaaataggattgtggtggctatagatgctaatagcaaacctaaagaagagtgatgattattccattgtgtagtagcaaaacgaagtagcccagctagttatgggaaatatataattgaaaagcccattattaagttcacctactgagggagtttactgtcagttattgcaatcataatcccagtgattgcaaaggttaatgtgccttgcatgactctggcagacagcatggccccaattttgtattatgtgtagtcatagcctgactttctgattacattctacacccagtctctcatctgacctctttagcaatttaatcctagtcttctaagtctttgtttacattaaatgactaatgtggattgctcacaaaagtatcttaggaaacagtctaccgctcattaaaataatactgtcatggcttattcggtcaatatattgagagaggagtaactgcagaataccaaagcaactgctagataatcagctgatgtgagaattctgtaaggacatttgtgggagtccttacagagactcccttacagagacaaaaaagaaagaaaaagttgctttggaaaaagagatacagtatgagagtaaacagaccaacttgacagtctgttatttcaaatgggttggcttactgtaaggcatatagtttcctgttatatgaaaaggcagaaatacaaacaaaaagcaaagggcaaaccattcttttttttttttttttttagcccttttcatttcatgatattatttcaaaact

SEQ ID NO: 35403 - DNA, 1096 bp, Homo sapiens
gcttgcttcatcactttgagagaattcttaagaaagctgtaggttatgtcaccctttgtttttcatcttacagaagaaggacttccttttcttcagtccttcctctttacttcttcagaaagcatgtgccgatagggagtggaaaacatccacacaggaaaaaggacgtcattctagattcctgactccagagagctctggcctgcccccgtcagaggggactgcagccagtgcgaaaccgatctccaacctgaggtcagcatcctggtccccagggtagctatgttccacagaacaccactgcccctcagcaacaaccccttgccatgtgggtggctgtgcacgtggacagagggccaatgggacaccacgtagctgcagccaagccctgatggccagccccaccacagtcaagactcccatccccatcatatcattcctttctagcctgacattctagaagacattcttctaggcattcctttctagcctgacattctagaagaagcctgacattccagaaaattcaacaagatttagaccctgaccccaccttcatcttcttccctccctttcttgccatcagctcaggcttggcgcttggatattctatttatggatttgaatctaacttacctgaagatctctggggttttcggtctgggtggaggctcagctgcctattgaacattcaggagaagtgaaaacggaaaaggcaatgagggaaagcaggggagagacaacaaacggctaatggtaatttgagcattcttccagaccagaaaatcaaataacgcatttctgactgatgagaacactgtctaggaagagggcacagtcaccctgactaaacactgggaaataacacctcccaccagctccccaggtacaggtttcactagcacagcaattcattttgagccagagctagtttctggaggttagcagtcacacagcaacatggtgtcacaagaatgctttgaccttgagctctgtccttttcccaggacagtttccaaaagctctgttctgtaattaatgtctactatgtcacatgacacttctgagtatttttaaattaatttaaaaaaaattt

SEQ ID NO: 35404 - DNA, 516 bp, Homo sapiens
gagagagtatcaacatgtacatcagaattaaaatatttcttgactcatatagattcacaaaagctccaaatggagtttgataaagacaaatgtaaagatcggctcctaagtttaaaaacccaactgcccaaacatcggaagatgacaattcttgacaattcttaaaagcagtccatcagaagaaggcctagccatttggattgactgcaagctcagtatgagtcaacaaaatcatgtggttgccaaaacagctaatgcaatcttaggctgcattaacagaagtgcacccaactcttgtgtcagatggttcttgactcaacaacctgccctagccagagacatgggtaatctctctattggccagagcaggaaactggcaccattccccaattcaaaacaagctctcaaagattgtcttctgttcatagcaactattatctgtcatccagggctctcgttctgaactgaccagtgttcccatccatttccccagaactcttggctcagattagaaga

SEQ ID NO: 35405 - DNA, 594 bp, Homo sapiens
agcctttgtttgtttcatggggtgttagtcctctgtcctgacattcccacctcctactccaggctgacttgagcgaagggttcatagagtgctgggtaccacctcctcagctggcctgtggacactcaattccacctctgtccaaactccaagcagttttctctcagctgcagtttgctctgtagccatttcatccttagaattcctagcacgcaaaaggtttgcagaatagttcatcacactgcagtactattaaagccatatagttcatgacatagtccagggtcattaaatgctgtggaagtcccctttcacacagaacactggactttctactttagaattgattgtcatttgtcactaaacagtttctcatacttctccgcctccctgtttggattgtctgcttagtacaatctgcttagtaagtggacatctcttttttttttaatggagttttgctcttgttgcccaggctcgagtgcaacagcatgatctcggctcactgcaacctctgcctcccaggttcaggcgattctcctgcctcagcctcccaagtagctaggagtacagacaggcacctgccaccacgcc

SEQ ID NO: 35406 - DNA, 5368 bp, Homo sapiens
tactgttatctttggtttaaagactgcaattaccagatttagaaaaatatctttgcatccacggtaaaaatgaaatttcaacgacaatctttacaacttgtaaaaaccaaagaaattttccccaataaaaaattatgttacctagataattattatgcatttacctaagttattacttactactattcaattgagattcttgaagctcctaggatgtatgaatagctatggacaacggggttgatgctatgggcatcattttaaataaatacgtaaataggttaagaattagtaaaagactgcagagaatgtaagttgcacaactgttctgaagggcaatttggcaatactgcataccaaaagccttaaaaaaaagtgcattctttgatccagtaattcactgctagcaatttactcaaagagaacaattaaaaatttaccaaaaaatattgatttcagtggtttacaataggaaaaaaaaagtcagtctaaatatataacaaaagattagttatgtatacactgcagcttatccatatacaagtgttaaaaatgctataaacttattgcgaaggaaagctcatgtacattgcatatagctgaaaaagcacgttataaaatttcattcttaaaaaaacaaaagggaactctgtaacaatacagcaaggccccaaagtagtaactgttatctctgggtgctgggaccacaaaccactatctttttaaccttctcatatgtctgagctttctataataagtatttagtatttgtatggttttaaaaaatctttaaaaagcaattacaatctgtttatttttgtaaaggtttaacttatttttcaaacctttgctcaaattcagcctgagtggtctcctctaaaaacacacacaaatgatttcactatcgtttgaacttactgtatcttaccatgcagcattatcataactacattatagggctattttttcacgtgaaatttttacctatcaaactacattataaactcttctatgtcaaagatagcaaacagttaaaatattgatttttttttgcaactgcagaggattttactaagaataagatatcagcagagatcactgtgttgtagtctgcgactcaccttcactgcctgactcttggtgttgataggggggttcttcagagctgcctgtagggcagctgtcatgtttcctgtgatggaagttaagggtgtaacagcaaaggatggcccccaggaaagcattataaccactggttcttatgacttgatttacatataaaaagaaaattactttggtcactatgttcaatactggaaattcaatgtgttggtttccaggatgttaatcaaaggcaaaatatcaaaagcaaaatagaacattagacttttttttaataaagcaaagactgtttcacccttggttctaactatcaagtgaacaccttgatagtctttcatttcccagtgagatacatatgcaaacattacctagagtggtgttaaagaaatcctaaaatatatatcagaattattagtcccccaaatgaaataacctattatcaaccaaaatatgtcttttcctgtgattctaattgaaaaaataaagaccaaacttttgctagaaccatattctgtattatctgaaatgctggtagaacatgctggcagattagcaatctgaatgatacacattagcaatctctcaatattgatgaaaagaggcatcacagaagatgtaataattcatatgtcccttaggtggcagcttaattttttgctttagatattttctctcatatttcacaaaggttattcaaactgtgttagaccatacctattaaattcaggctctctttgaaagcactagtgagttagcaagcatgagaaacagaaggccaatcagactgtcagaatgtacaaacattcccctaaaaggaaaaccacagagttcacttgttcctccaactctagtaccccaccactagggctgtctttcctggctgtatgtaacggtaagaagagacagtatctttatattttaagatgaactgatcaaaaagcagatccactgatatggatacagcagtaccatttaaaagtcaccacaaattacctaaaatacactggggtttcataaaacaccatctatccatcacaaataatgtttttaggaagcatgttcaccatttattttctaaagaaaaagttcttacacaaaatctctggttgacaagctgttattttcaaggctgcagggatttctagagaagcatgcctgatgtagattagctcattttttataactccaagcacttaagtatttaaataatgcaaaagagcaacagctaattaattgtgaaagttgtggcaaagcactatctatatattgataaatgtctaatgctctatttaggtgcctttaaaaaaggatattgttgccattaaatattttcactctcatatttccccactataacaggacattgttgagagtcttccttatgaatacacccaagaattagaaatgcatacaaattcagtgtctgagattttctaaaactacagcttcggtttttttgcaacatttacatttttctaaaaaagatgtaatgcaaatgcgaagccaaagttatgaatattcaaatatgcaaaaacagaaaccgggaactgactgccatattttaactaaaatggaaacaattttaggattacaaaaatgattctgctttatacgaatgactcatcttctatcttattcattggggtttattttaaatatttccaaggattctccacacgcattccccgttgttttttctattgtccttttcttagcaggtaaaaggctccaagcttccttctaggagttttgtattttttgtattcattcccctcccccagttaacaaattctgtacaatgtatattttgccaaatccccttcttcttcttcttttttttttttttttaaaaaggccaatgggctgaaagcacagggaccctcaattttcgaacagtcccatctccccccgccccccggtaaggaataaactaccttaacgctaccaataacaaaaacacaacaaaaaacaaaaccactaaggaaagatgcaggttccccacaatcagaaatttctggagctaatgtgaccccaggaaatcagagttctaggaagaaaaactaaggcgctcggcaccagccttccccaccagccggggccgccttccccagcgccgcgagggcgcggccggcgggaccagttcccgaggcaggcaggcactcgggtgcaacctgaggaatctgggggcgtggaaggcgcgcgggggagggcaggcttccaagagtgggaccctcgcgtctcctgccgactgggtaggaaacgggggcttcccccttgccctctcagagcgggcgatcccaaagagacaggttaagccgcaggttgagagggcagctccgcgccggtgccccgcggatcctgcaggctcccgggtcccaggagaagggcgggctgggctgggctggggtggggagggcggtgaatgcaaggatattgccgcaggcaggagtccacctcgccctcgtcgggcccggcctggccgtcgcccccatcttcttcgtccacgaacttgttctcgtcatattcatccacgtccaccttccggaagcgggccgacgacactgtgttcttcgacatcccaatcccgaccagcggcaaaggcctcttcttggcgctgcctctacctcagcaagcccagcccagcaacccactacccggcgcctgattcacttccctcttccgctctgaggcgtcgccgactgccgcggctcggaccgttctgggcctgcgcgctagccccgtttcttcctcctcaggttcgcgctcccttggcgcctcccacgctgcccctgctcttccacggagagcgcgcgcgagggaaggagcgcgcaggacacagcgcgcaggcgcgggctctccgcaggcaaggggcggggctgggcgaaggaggcgggggcgagagggagggccaaaagctggaccgcgggcagaggtaagaagcgattggtcgtccgattgcgtcacgtgattctcggtgggggggttcccatagaaacgcttttctgcggtccagtctagggggtctcagattggcggggatgggcagcagcggcaggtggccttggcttttgctgcagccgtcaacgacctatcatcggggtcctgcgtaaggtccggctggctgggacttggctgtgggtgggatggactggctgccggaccgagtgccctgcagttggtaggagtatgaggcagagtgatgcacacccgggcgcccagcatcgttctaattgccggagacattgcctcagactgtgcgctgctagaggctgcgttcctgagcaggaagcccgtttcctgggattggaactacccttcttggccagcgggaagtccccaaggacggagtcgaaaggtcaaatcttatctgtcagtgctgtgtgacagcatcgcaacgggatctgcagaacctgaactcggtatcaaatctattgggagggaggggaacgtgtccgggcaggcgctggggtcgggtggcaaaactggggtgaatttgtagaatttgggaaagggtcattgacatcttaaaataggtggtcgtttggagcaagaatgctcgaaaggggtgagggtaggttaggctctctagtgctgggggaaaacaaaatgtggaaggattggtggaaaccagacctttaagatttatattatgatttgagatttatatgattccatctaggccagatttaaaaaaatatttgacatccccatttctggaatgtaggagataaaggcactaagacgaaggaaatggtagttgtgctgtgtgtattacactgaagaacaaatatttgcaggataaaattaatttggacatttggctggacactgctcggtatgggtccagtttagttggacctcgagcagaagactggctgttgccctgttgtgtaccacaatctttggtttccagtgctgtgttgaaaagagcactaggcttagaatcagaaaactcaggcttaagtgttgactcttccactcataatgtttgaacgagacatgtcacttaaaattctgtctcagattcctcatcactgaaatggagctaataatgtgcactttacaagattgttcttaggattatatatcacgaaagtgtttccaagctctaaaattctacataaatgtaaaatgcatgttgcttgtaccattggttttgggactagtcttataaatttcttaatgatatatggtgttttatctccttcctagaagagatggaaagattctgaagggcagaaacagt

SEQ ID NO: 35407 - DNA, 1035 bp, Homo sapiens
gcaacctccgactccctggttcaagcattctcctgcgtcagcctccgaagtagctgggattacaggcgcacaccaccatgcccagctaatttttatatttttagtagagacggggtttcaccatgttggccaggatggtcttgatctcctgaccttgtctgcccgccttgggctcccgaagtgctgggattacaggtgtgagccactgtgcctggccaaagggaaacttttatttggcaaaaggagaagttcacataaactgcttggaaacagacattggttttggatactcaaagtcagagttggcaccattttagaggaagagatgctgttactgggcaggtattgttttgagagcattttatctgaattgctgcagtcctacagaatttcttattttagaaagtccttgagacaggacttccaaaaatgtcttttatctcgtccatgcaatcatgaaccctactcctttgtgctctcctggctctagtttgtgtttgacaaacagtgatttcatcctggtatctgcaactttcataaacctttatttatatattagtacttcaaagattaaaaaaaattgtaaatctcttgcctcaagaaaaagatttagtgccaaagaataagtcttatttttaaaatattgtgaatgagacttgtttcatttgatttttttaatggcttatgatgatataaaatgaaagctatggactttaaaacatatttatcctgtattctttcttagcactggtgtcttttattaatgctaacagtcgttttaaggttgcatctcttatcacactgtataatatttgaggtaatgataatttacatcttcttttctaatatttctgtcacctattttatcttgtgtttgctagaattgtgaaaagagtgttgaaaaattgagtgctgggctcttctgctttgttcctatttcaatttcgttggtatttcaccagttgacattatattgactttcgctttatgacttttagaaatgactgctaaaattatcaaatgccttttatgggg

SEQ ID NO: 35408 - DNA, 726 bp, Homo sapiens
ttttcttccctacacgaagcatttccatttctttccactcatccatatgtatcacagtctcacatttccttgccacactgaacacagttcaatgaatctagtttgtatgaaaaattgggacctggaatcaaaaacaatgtccctagctatgttctaactgaaacaggggcaagtagaactaccctgttcttggttagcagaatgcacttcactgcattttaatgcagcctgaagtgattagatcgatgaggatgtgtcacagagactccagagccagaggcccctgggctgtgtctcatagtgatgaaatacacagcccaggggcctctggctttggagtctctgtttagtcagtgtaagcctgcagataagctgaagagtaaccaagggcaagttacttctctatgcctcaatttcctcatctgtaatataagcatatttcaaatttgcagtattttataatatttttggattttttttgtgagtattaaatgagttaatacatgtaaaggacagaaaagggcatataataagcacttagcaatcccaaatatttttaaagcaatatcagcaaattattgattcattgaacatttcatcaactcagacatgtagagctttcagcatgtgtataaatagtgtgattatatgtcccattgtgcccagggtagccctagtttttacctattgtcctggcataattaatggtatcccctttcattctca

SEQ ID NO: 35409 - DNA, 1882 bp, Homo sapiens
ttttcaattgcttttcttataagtcattttcagttgctttcctatggcttactcatcatttgtagacttggtcacgttgtgaatgagttacttcatggtatgttcaaagtcatttaaatatctccctctgttttgatgtatgtattgagtgtttttcaaggctataaactcccttaggtttggccacaggaacaaagtgtacaaaaatggagaataggaagaactataacatccatactctcatttagttgaattataaagattttagctgtcttattcatcacatatgttggatgcccagtcttgggtgctgtgagctgtgatatctgacaatggtaccaatatttcagaggcagggaagcctggtcatttaacacattcactgtggggtcagtagctcaggaggtaatagggttcacccagtgtgtttccttcacatgtgttgatgtaacttaccctgaacaatgtttttaaattcatttttaccatttaaatactactggtccagactgagtaagcatccttgaaactatattgtagtcccatctacagtcctacatcaaggcttgttccaaaattgctccaggtcgtagacttggactttaactccatctttatctctatgcccaccttacagagtcctctaaggaatgttctagagagcccatctttctgtataatcagtctatttagagtggagcaagtgatgaaatttaatgtgaaagattccttgattttcatattatcctattgtctgaagattctgatcaatctaataaatatgcaggttaggcctagtctggttttctttatccaggatcccttctatccccagctagagccactagatcactaaatcaatcgtatgtgcaggctgcctctgatttatttccctcgctgctgctggcctgcccctgccttttagccctgattggaatgtttcaatgtttgctttgttctaatactctgtcccttgtactctcttttaaataaccagcctctgactgtcttggttcttgtttacccaccttttcatcagccccttcctcattcttcaagcccaaattccagcttgaagtctgggttctacaatctgttgacagacttcctcgaagcttatgatctgcattcctgaccttcctaggagtgtctacctcacaattttctgatgttatgttgtgcaatgacacctcattttgtttgtttttgctgttgctgactggaccattgtatatcagatgtggtgttttgcctgccagaccaagccttcccgtattgcatgggagtatactagtggctgtgaccagactgattttaagttctaatccctcttcccactcctaccctcaacctgctcagacctgacaaagtaatagggaattgcccacccatttaagtcccataaaaagccatactgcaccactagccacttcaattatgatgagtggttttatgggaagaaaggaattgtaggctgatgatagtagctttgttgagttggtagcactggatccagtctctgagggaaacataatggttggatttcaactttgtagtattattccaggagcatctgtatagtatcataaatatgggatctcacatgacgtcttcctgtgtctcagaaaaatggacagaaagcaggtttcaataatcttttttttttttttaatttgactttaagttctgggatacatgtgcagaatgtgcagttttgttacataggtatacgtgttccatggtggtttgctgcatctatcaacctgtcatctaggtttgttttttttttttggcagagtctcactctgtcacccatgctggagtgcagtggtgtgatctcggctcactgcaacctctgcctcccgggttcaagtgattctcc

SEQ ID NO: 35410 - DNA, 650 bp, Homo sapiens
tgagcttctgaggataaactgaggcttgtaacatgctagcccagtatctggtgtagtaaatattgaatgcactgtggtggagagggttgtgttgtcaatgttgctgttgttattgttgagacctaaaggattgctatgatctaaatcagcttaatttccttcaacttgataaaaattagcctgtgactattgaactggatgatgctctcctaatggtttttgcattttgccttcattcagccagttaaagctggtgtttacagaattgtgaaacatttgagcctgggacagtcatgtgatttacagttttgtcttgtttcatgctttccagcaacataattactgaactttttatcgtaataaaaatataggcaataaaaaaggcagtcccctggaattccctctatctctcttagaatgctaaaggatatttttttgtgatctcagctctgttctgttaagtatcctctcccttccccacgtctgtctttgcagatttgtgaccagacggctgcactgaatggagactaggaagggagcccaactgttttccttgtgttggccctctgtgccgagcagggattgttgagcaaagcagggattgctgagcagcgtttctccagggagggtcacagggtagtacaaaccca

SEQ ID NO: 35411 - DNA, 733 bp, Homo sapiens
cttaacctctcttttagagttactatctttttcctctctgagttgcattcttattaatcttaggtctgccttccaattccgtaattctctcttcagctttaatctgtcctttaactcaatcattgatttttaaatttcacttattgtattatttacttctagaagttttgttttgttctttaaaaatcttctagtcattttttcaatgtcttgcttcctatttatatttttattttttcaagacatatttgtcaagaactgtgaaggctatgagattttaattttttaaaatccacagttttgtggatgttgaaagaagacatgagactcttggctaagagcaaaagactttattactcacagcaagagcagcagccagagtgtcaacatgtttgttttggttttctatgttccaattcctagaaatgggcctagatagatacctgcacaggaagggaacattgaccttgggaaacttgccattttatagtaggtaataaacaagctggcattttgtttaagggggaagtattagctcatctctcaagttttcttgctacaagcccaatcctgaaaaataatctgggtaaagatcagccagggccttgaatttttggcatatatagcaagacatgtaggaacaagagagatccatgaagtagtgttgcctaacaatattaaatatagtgattttgtattctgagtgtggtaattctaaaaactgtgggtctca

SEQ ID NO: 35412 - DNA, 608 bp, Homo sapiens
ctggggtcattctgacttaattattctaaaatcaaaatagataataggcagataatggaagttttttggactttctccttccattgttttagcgaaggaagaagacacacacaaatcctccatcccacactcagttctattttggcacctggtgaccgtcaggaaaacctgataaacttgaaagtgttgtttcccaatcaccttcagaactggagaaacgctttcatgctgactttatccatgggactgaagaaagggagagtgtgctcacaagcacaaacaggaaagccttacatcacggagtggcgtggggaggagtctgctcctcgcttgctcgctcgctcgccgcgctccctttgtggcccgagtcgcgcgcaccggcggcggcgggggcagcgcggcgcgtgtctgtgcgctgcggtcgctcgggaccgggaccggggcgaggcgccgcggggctgagcccagcagacattgcgttggcctccgagcagggcgcatcatgcagcgttcgcgcaccggagagaaaactgagaatgaaattgctttggcaagctaaaatggtaacgagagctctctgccttctcccgaggcttctctggtgggga

SEQ ID NO: 35413 - DNA, 674 bp, Homo sapiens
gccaccactgcaggttatgaggtgcttggaactattaggctttgaagaaagtcagaaagaggctgggacaggcttccagtgtgatgttgtatcctctcactggggtgctgggtgacagtttccatggtggctgacccacttggagcttctgacaggcattaccctgaagggatgcctgacttcatcagtaagggaaaggaaatgttcctcagcaccaataaggaaagctgcatcagctccaaagaaaatagacctaaattccaaacaatacctgctgaatttcttatggatgggggtcccagagagagggaaatgcaattgcatcattggaagctgactgccaaatactctatatctcagatgacttcatctgccaggaatgtttgaataccaggggcactcctccagctgcggacctcagctcccttcagggcctccatgcctggctttgtgctggagtgggaaacgctgtgttggagcccagctctccccactggggctgcccctggctctgagcctaattggggaaccggtgggaccagtcattcattgtttccaacacagggactgcaaggcagagctcatttggcaggctgaggcaggggagagggagattgcctcagttcccatgtgcttgttttacccaattttactcctgcggaagaagcaagctc

SEQ ID NO: 35414 - DNA, 607 bp, Homo sapiens
aagtaactagaaggcaaaaaatttttttaaatgcagaatctaagaaacttggggctgagaaaattctaagtccagttgagctctctctttctacctcccttagcttgcctgttatgcaagcagattgtgaaacttgagttcatatgtgtatgtacctccttaacaagctactctgcaaataccaagtgctggcagttaggtgggtgagaggccctggaatattccttctcagcaaaacatctagaatgacagaggccaagcctgcctgcaattccacatcctttatttggactaaattgcacaatctgtcagtcagcagtatttattgaacaccaagtaagtgctgacttctgaatgacacactaggtaaagatatagcttagttcattttatgtctccagacatttgttgaatgcctaatatttgtaaagctttgaacctgcttctagaaatatgaaggtgactaacacaaacactgtttcctggagtttaccatctaattggggtatatagacactaaacaacaagaataaatagtcaaataaagacaactaacaggttgtgaacaaccatcagaggggaactagcatagaccaaatattatcct

SEQ ID NO: 35415 - DNA, 1019 bp, Homo sapiens
catggatgagaaatgtgtagttaatcagaaaagcatattaactgtagtactccatttcttaattgtccttgatacacatcatgaaaatgtatacagttggctctactagcaaatgtggaaagtggtgaagctgcttaaaggctgtatttcccttgagcaagtcacttttatattctgaatcttattctcctcgtctttataatgctctgcattttgttcacaagacagttgtggaattaaaatgggataagataatatgaaagttcatgataagcctcacagtactaaacataccgaggtagcagcatactatgttgattcatcttattgtcatcagccacaggctgagccttggccatgtgcttgctctgggaactcgacagtgggaatcagggagcttgggttcctgttctaggggtgctgtcaactagctgtgtggacctggagccccagttttctccctgggtctcaggttcctcagcagaacaggtatgggactagttgatgtccaaggcctttctagcactaatattcaatgcagagccgtataatctggggtacttctcttagaaacttctaaaaatacagaactttctctctcactacgaaatctgactgcagtaggactgaatcaactgcgttggcaaggctttcctccagccccgtaagcttctgacttctttgggaacccatattgcctccagtttctggtgtctgctgccacctgctggttaacttctataagaacagctaaaacctagggaaatagaactgctttgcctcacgtgcttatagagtgattaggtcacactgagtcaccgataggcatctaccactgatggggactcagagtacttacaccagggatgagacacatgtgtgctgtgggctgttgtggaggaaataactgcagtctatcagtcttgatatctacctctgctttgaaaattgcaaagctgttggccagcgttctaatctgttttcttctggggtgtgtttactcttccagctctctgagt

SEQ ID NO: 35416 - DNA, 818 bp, Homo sapiens
gggtagtccagccgctccaggcagccgaggaagtgcggcagcgtgtgcgccgcgttgcgggcgaggaccgccacgagcaccgtggggctctgcaggggcgactccgggaaaaccaccggctcctctccgtcgtcctccgagtcccgctcggcgacgaagcgcgctcggcagccttcgcggagcagggctgaggagaggagcagtagcgaccaggcgagggtggcagcagggcgcgcagccatgttccgggccgaggcgggcggcggggaagtcctggcgcgagcgcccggctgggctgcctgagggcggcggcggctgccggggagcaaggggctgcgaggggcggccgggggatgcggcttgccgcggccggccggctcacacactggcctcggcggctgcggttcccaggaccctcccgccgccgctgcaccgcccaggccccagtgcgggtgcgcagcgtacctgcagccgctggcgctcccctgcgcctcgggctcgcagacagtagtggccgaggggctgtgtgccctgagtcctgaggaaagttcctctagtccaggttccgctcgtacagctgaggtctgtggccttccctagagccgcgagttgtggccctgtctgccaatgagcctgtgagtgtgtgtgtgtgtgtgtgtgtgtgtgtgtgtgtgtgtacataacggtacaaccccaagaaaatttattctgcttttgcaaaccgcagactgaagcccttcacagtgatgcaatgtatccagttttcataatgcacctattgactgagtagagttctaaaatgaaaagtctccccaact

SEQ ID NO: 35417 - DNA, 2146 bp, Homo sapiens
tctggtctcagttcagatcttttgtttttaactgagctgctgtgattctgttttgggtggttcaggatctctcagagatgtgggttgacagtttggggatccactctctgactccttccttgggatttcttaatctcttcagaattcaaaattttctgtcttcacttttctgcttccccagacaagaataactgataagttttatacatgcatccctggtactgctgagcctgacttctggactgcactttgccccaagctaaatgccaaagagaggagaattttcttgtggagttcttgatcttcaagcaagcttgcccttcctaccagtctgctgttcacattccagtatattcagctttttgtattgtgtccaagtgtagttcctgatcttcaagcaagcttgcccttcctaccagtccactattcacattccagtatattcagctttttgcattgtgtccaaattgttttctgctgggggatggtccactagggtcttagtctatcatggttgaaaacagaagttatgtcctgcctgggactttggattttgagtcacccttgtcctggtcaatgcgatagcctcctaaccagtctctgtttgtgtccttgctccctccagtctatcctcaacatatcagtcagagtgatcctatgaaaacgtccaggagcctccaatagcttcccatttcactcacagtaaattaaaaaatacttaaaatgtgctactctgcctgtttgaaactcctcatccttggcttccagatcacatgcttatgctagtttgtatcctacctttctgaacactcgttcagcaactcgtgtttcctctaatcctgaaacgtgggtccaccctgaaagtatggttctactttaaagttctatgtcagggcactgagtaaggcctttcccgtccccagcaatcagaaaccaggaccccactgctgaaggcaaagaggacgtatgtatcccccaactttctcagagagttatcggcagcactgacttaaagaggattaagagcttcagggcgcaggctactctttaatatttttcacgttagaatttgctcagatttgaataaacgcagagcgaaactagagagcgttcgcgcaggttctagctaccttggtcagaaggaggggctgatgcaactttcctcccagtttctgagccctctcgcactgcagctgcgagcctcggggaagcggaacccacaggcgcgcgcgccgctgcttctggccgggcgcgggtcgtggtgcaccacgggagcgccgcaccggccggcatggaggagcgcggcgattccgagccgacccccggctgcagcggcctgggtccgggcggtgttcgcggctttggcgacggcggtggagctccttcgtgggcccctgaggacgcctggatgggcactcaccctaaggtcaggaggcgcgagaggagcagggcgccgtccaggcccctaacccaggcagaacactcccaggcagctctctttctttcttcctcagtgggagactgaggacgcgcgccaccctcaccgagggggaccggtgtgcacaactgccagcctcaggcagcatcggttttgtttgtttaaacaagttgcactatctcaatcccccagccaaagccattttggaactgagagccagacagtaactccgcccctctcaagccggagatccctaataagcgctccactagttttgctgtctaggtaaatcccctttgggggataaatttatttaatcctcacggtaaccatgcaagacaatttgtgggcgatggataagatctaggggtccatagtgataaagatttaagcacagtcacgtttacacttagccttgggcccagaatgcatctttattttgaaaaggtgcagattcctaatatttcagatttcttcgaaagtttgaataggttcttgctcaaagcagagctactcacattttgcgtgtatttttctagattagcagcaggcgagatcaagatagtcctctgcttacttctgcttgagacattactgccttgtacaagtacggttccaagcagtgaatagacagtgaatggagatgtgggttttgtaagaatctcaaaaactagtctctacggtactttaacagaattgcactcttct

SEQ ID NO: 35418 - DNA, 498 bp, Homo sapiens
gcctctatttttgttacctaagatgatcgacataagacagagcagctggagaattaataactcaataatactgagattaggcagctaagaatgagaaaagtgtcctaaatagaaattgcagcaattcagtatttcctcgctgagtaggtagatgactcaatacacttggtaaaacattaaaattgctctattaagactggaatgttgtgttaatattgttacatcacagtggggaatggtttatttttgttgagggtggtttatttgcaaatcaaacataaagcctgaaaggaaacattacttttcattaaatagacggccagccgaatgaacagagaaggtgagtgaatttattctgctgcagcagcccagggcttggagggtttgtgcttgtaggaaaattctgcccccaaagagactttcatattccatcccatcagtgagaaatcactgttctactgggcttttcattgccttgcttttttttcccattatttt

SEQ ID NO: 35419 - DNA, 1467 bp, Homo sapiens
acgatcccagctcattgcagcctcaacctcccaagctcaggtgattctcccaccttagcctcctaaatagctgggactacaggtgcaagccccccatgcccagctaattttttgtatttttagtagaaacagattttcaccatattgcccaggctgttctcgaactcctgagctcaagcaatctgcccaccttggcctcccaaagtgctgggattacaggcatgagccactgtgcccggcccttttcctttgtttttagcagtaaccgttatggttacttatagcaaagttctgggccacaggctatgaatcatcaatgacagtgaccttcggggctttgctagctcacatgacactggttaagtggtttggtttcattttgcctgttttcagccctgcacccaagaggttgcttaagctatgagaacaaaagtaaagataggaaataactatgatataattccatatctcaagtttatttttagctaacgggccttgtcttgctcttcattctgaggcgtaaagtctcttaggaagagaaggaatcagaagcatgatgcagagtttgacaatgactaatttgaaacggagccatcttcattctttgtaactttaatctcaatttctcagtttttctcaaattttctactgtaagcaaaccttcacagaaataactcctcttagagatcacagtgagctatgtgctgtgtaaggttttattagaacaagcacataaacaaaaacaagtggctgtaaagcccagtgagcccagtttatagagaagccattgacttgcctgcagaacctggttacatttggattctgccacagagtaaccatgctacagggtgacctctgtgggctctggtttctgcgtcttgggagtgagtgggtggaactgtgtgattgctatgggagtgttgagtgctaatgttcaaaggttctatttacctgctccccacactatggacaattcactcaactgtgtggtgtcagtttctttcctgcagtggagccattggcaagattatatatgattattgctttgttgattgctctcagaaaaaaatggtggtggtggtagtgttcagctattaaaagctttatggtccagagttgaccaaattgttaattgcattgtgatatttactttttcaatgaaaaattagaaagaagtatcaccaatatcttctgtagcttcagaacattaccatgagcctgaaggtgagaaagcttgaagtgtgtggagttgtatctctgcttccaccttggctggctggtttgtaaatttatctttcatccactgatgcttaaattggtgctgtgcagctgctgctagtcagtgaaggattccatttgttggctttctgtttaaaggtttgtggtagaagtcagggtagggtagattggtcctgttgtttgaaaaggataatgaaatatctaatagaagacagttataaacaaaat

SEQ ID NO: 35420 - DNA, 640 bp, Homo sapiens
gcagctttcctcctttgtttcttgccttgtttcccatgatgcaattgttaaatggccagcatgttaaaatgaaagacaatgtgcttttaactctgatggaactctgaaaattaaagttattcatttaagaactattggttgagcaaatactataaactggattttactaagagatataacatgtaatatgataatgattgccctcatttggctcacattctagcaggtaataaaggtaataaaaagagagacaaacatgtactgtcagggaaaagtgtcatgagaatacaaaaggggatggagagttgacaggatggctgtttcagagtcatctgtcagagaaggtctatctgaggaactgacctttgagcaaaccatgagaatacctgggaacagaatgtttcaggcagagaaacaacaaagccaaatttctgagagggagctggctagtggattccaggaagaagcctgatgcccttgtgccagtagggtgatgggtgacaaactcacagaggcagtccagggccggactgtactgctctgtacactggcttctgttctaaaggtaatagaagtcaggagagggttttgagtgcaggggagtgatgaggtctgactgctacgtagggaatagactata

SEQ ID NO: 35421 - DNA, 914 bp, Homo sapiens
tttaagataacgttgaaaaatgcagagcagtagtattattgagatcatgtccttactgatatactagcattttaagatttgagagtatttccttcccatgtggctagttattgggaataagaaattaggtcaggctaaaagccaaagaagtgtttcttgaatacaggctaggattgaattgtagtaattcaattgaattcaatctcagcatttgtcgtgggttttagtcatgttcctgttcctgtcacggctagggccttcagcaaactttacatctcagtaagtgcagttgtcttttacaaataaattgcacggaagtcagttaacctgagcaagtgaacaaaggctgtgattgtattgctgctgtttctcttgatactagatcttctgttctttgattcattactattagtgttaaagaattaaatattaactgtacattgttttctaaacagagtcatagttgttataaagctaatttcacttttcatagcagtgctccctgtttggcaggttctacctgttctgtgtgtcatctttgcaaggacttttgcccttgtgaggtaaccagccgtagtatagggccccaaacagattgaacgtttgtgtgatgaaaactcatacacttgtttaattgtggattctaatcctgtctttcacatgtctgtgtttatgtgtttcaggaaaaaagtgccagctcaaatgtaagacttaaaactaataaagaggttccgggattagttcatcaacccagagcaaagtaagttctagtttctgttttccttatatagtcggccttccatatccatggattctgcatctgtggattcaactacccatggatcaaaaatattcaaaaaataataattctacaaagttccaaaaaacaaaatttgaacttgccgcacaccaag

SEQ ID NO: 35422 - DNA, 675 bp, Homo sapiens
gctggccgtgtccggggtgaaattggaaatccagctgcctagtggccagtgggtggggcaagactgtcaacgagatttacagctggcttacacatgccttatgtcctctgagttgtagagttgtaaaagttcagcagtgtgtgcacagctttcttttggttggcagagattcaggatcatggagtactgctctcataattgaagacgtgtttgttattggcagagaaccttaaaaaaggcctttacctcagcgatgcttcctagccccaggcttgcagagaacacagagtggtgttgtggtctatttagggacaaagaaggtataaagtccagagatgagaaaactgggtcagccctcagaaactgcagcagccacgcacacagaagcctgctggaagacaggtctctctccgtccacagtgcccatcatctgagcctgggctgggatgactcaacttagcaaagacggacccaggaggagtgctggttcttcagtctttgtactggccccatcctctcctcactgtaatgtgaggaagcacctctgtgtcagggctcacctgggcatccaaagcggccacgcccacaatccgacagcccccaggagcaggtccagggatgatgcagcccccttcttggtcccatgtgatgtcatcctgctttgttatcttctta

SEQ ID NO: 35423 - DNA, 2436 bp, Homo sapiens
tcacatgggagaatcgaggtctgctactcgtcttgctttgtgccccatctgtgcctggatgccctactacatctgcttgactcgtctgggctgctagccggggtgttgtggctgacatcctttcctggccttacacacataatagacacatccctaacggcgtgtgcctggtccagccacatacagccaccacatgtgtcacacactgtccccctcatccatgtggacttgactggcatttcagcagctccactgggatgctctaaccccagtgtgtggagttggggtcccttcatctaggttgacccaggtatagcatttttagcattgcctttccagtcttgatgattcattcattgaactcatttatttctggagcccctggtacactccaggcactgcgctaattgccagcaaagcacaactgaactaaatccaccttcaaggaacctagccataacgagggaggcagcatggaagtaccctacaggggaaagtcctgagtgctgtgggagcatctcaccgtggcagccagcccagttttggcaatcaggggcttcctgaaagaggtgacatcaaagcccggatgtgtcagaggactgagggagagtgttactaaaggactttcaggctgagaggatagcacaggactcagcccaaaggagggccagtgtggactgtccagggccagcctgcagtacagaggctggagcttggacttgtagagggagagagaagagcaagggacgtggacggggcagtgagccaggctagccacagagggttcccggggctttgctggggattcagggagcataaataagagctttaggtggtgctgtgtcctctgcagcccactgctgaggtcctccagacaggtaaggtgtggtcacaatcagggccggggtttccctgctcactgcggcagtgcaggggtgcttgctgagatgattcatcccagggtgtcctctgtcccttacccagccccaactcctcttcctctgccaaaagctatttgaattcaaggactttaacctgggccggatctggtttggagacaaaggggacagctctgggtcagcatgaccttctttagagccactaaggcgaaaaataccgtttgggaccaggctggcctagacccagggatgagaatgcaccctaaaataaatatacgggaagcagcagagggcttccctgtctagtgtgtgatcctaactaaaggcagctctcttggacagccttcccctggattaggtcacatacacctggtggccaagcctctgctgggtcccaaatacacacccgagtcctgccaaagaaaggagatttttaaaaagcacagacaaattgtatgcaagtggaaaatacccataggcctagacagctgtggagggaagacctcgtgggtacctggaggctgccagagctgggagctctgcaggtatgagtcagggaaggctcagagacaagcagaatctctctatggagacaacttgcagtgccttttaggttttccaaataacctcggagttcagagcattgggtttttttctcccctccccacccccagaaaaataattagaaaaatgtttaggagaaaggaaaagaattagatgcatcagaataccagctataagccaacactgtttccagaaactcaagaaaaagctcaaacagaagacagttcccctgagaggctggaggcgttggtgctgaaggcaattttcctagctaaggggcactgggccttgctgcaccttggggctgaccttttttgcaaaacacccacccctgccctcctggcatactcaacagcaacgccagctttctggacccttggaaagatgttagctcaaacacccactttttccagatcttcctcttgctcttcactgaggaatttgtaattctgaggctagcgatgcccactcggatattccgcaggcccaggtgtttagattagaatttgtccagcggtaatcctgatgctggaaaccaacaaacatttggcctcatattcacccatttaaaaactagagcccctggcaggtccccttagggccatgtgttcatggaatataagccaagtttgccttaggcttgttcatggaatataagccaagtttacctctccccattttctgccctggcccacttcccactcacctccacctcattgccaggaagggatcaaaatgcctccatgccagttgttaatggctacatatttgcccttcccaagggtatttgcattttatttaggaacatggccttatattcaaggaaaatctagcatcaagattacgaggcatcacctctcaatcaggtctgggaggtatcttggggcattgctcttctgaacacctgcagaggcttcctcaggtgagtgtgggagcccggaagggtggcctccctaaccactctgcctgcaca

SEQ ID NO: 35424 - DNA, 1275 bp, Homo sapiens
cgcgcacacacacaccatgtgcacacacacagtcctgtctatgagaccttggacaagtcatttaaccttccggagcctactaaaaacaatcattttctcatgagtttgacttgaggagatcccacaggaagtgcttaatgaacaaccttctgttacacaatgactcttttttgtttattcattctactcattcagctgacatttgttaattgtacagtgtatgccagggcctgggtcacccacaaaggggctcagggatgtgtgaatttaaggaattccccactccaaggtcaaaggccagagtggcagcatgaagaatgaggccagtaccatatagtttctcacataccccactgtcaactataactacctggcatgttttagaggctgaaaacatatggattctcccactgcactggccttccaggatttaccgaacagaaatacgcacacacatggacaaacggtctcagggcactttgtcaaagcatgaagccaaaagctgtttccctctgctctgtcttcactgtcgcatgagcctgttcatttctgacaagcgttggtcccatcagcccagccagccttccgccctccagccttgctcttgggaacagattgtcttcatgatttccaactggtgtggtgagaaggagggagggagggaggtcaagccaaggacaggggaaggagttgataactattcctaggcttcttcctccaagccatggagctggaagttcagatttgctgctgagttttatgagctgtcaaataaggcaaaaggaaacttgggacccaaacttgttctttcagtaacaacaaacctgtttcttccagcagaggcttacttgaaatcacaaaggccagccaagctgaaagagctccctaactccacctaccttcccctgtctctctctctcacacacacacacacacacacacacacacacacacacacacacacacacacacacacaaagctggtctcccgtacctctgactggaacttggggagcttccttagtctcatgccgaagaggagtcaagcttaggagacctctggtctgcttcttggtgctccctgaatgcttgttagtgacgtcagcttccagtttactggtaacagctggactgctgccggaggccagtaacctggagttctcttgcttggaagcaggtgatgggaagtgggatgtgagtgatggagggaaaaggaagctcaactccaccgagcctcaacacttgatggatggggcaaagtgaggaaacagacca

SEQ ID NO: 35425 - DNA, 2662 bp, Homo sapiens
caacaattgctttcggatcagatctcactcatcatctttgccctggatgaggctctattcagtcttcttgggtgtgttacaatttggcacaaaacatcttgtccacatatatgttccccccagggctgcctgccccccccccacccaccagaccctcacacacagcccttttggacttgccacagctctttccacaaggactcagagtccctcaggggagagcaccccccagagttttgagcaacattgactgactggctgagatgacctgggacagcaggtcccactctgcaaatgcataagaagaatcactgaggaggcttgaaatacacacatacacgtgcacacacacccacacacacacacatggcctctgacatctgacccctcaaaaggtctcatttgtaactactggagtgggggattctgacaagtaccaagtttgggagccgggatctacagtgtagtaaacagtggcaggtacagagtagagctggaggagaatgagagcacgcagtctgttgcagacagggatttcataagactcagtgagttcttcagtgcagtttcagacatgcctgccaataggtctccctccagaagttggttctccaagagttgtatggctcaaacaaatggtattaaccatggatagatgctaaagatgaatagaggttgagaatctgcttcctcaccaccagaaagagaaaaaaggaggtgtcacttggtcagagccaccttgttgattcattgatggtctcctttgggcctctgtcatggctgcacactagaatcacctggggagcttagacggcccatgtccagacctcaggtcagttgagtcagaatctctgggcatggggcccagcattggcattgtaaatatcatctcacctcaggcaaccgagccacagggagtgtttgagaacaacttgtccaccctgcatgccactgagttgggcaccagcaaacaaagctgaacagactaaagcctgcctctgaagaacttggagatgatagggtgcaggtttgcaaacacgtactccaacgggctgcaagagcccgggaaaggaactcaaaagaatccttcaggagaaggtggtgagaataggcagccacgaatgagtaggttctgtgcagggactccccagtgatgcatgaaggagcgtccctcttgttgaaataggacaagagagtgaaccaacccctacaagaccaagagttcaggctagggaaaagcctcaattcagctgggtcccagatatgcttttgctcaagccatcctgaagaaagaattcttgaagctgtcttgacaggggacctgctaacctctgctgagaactcccttactgtacaggagttttatccccctgagctaacctcaggcaacagcccagacctgtcctaccctttcctgaaccagctgacccccatccctcagaacacgccggccgtgggaggcacattcaggctagaataggcatccaggcaatgagccccttccctataagacatgaccaacaaaccacaaggaaagcaaatccccaggaacacttttgtatgaaggagggatccctggcttaaaggggctgaggacagtagctgcttatcctctctgcagggtcccctccactgaataaacagaaaagcaggacttacacacctgatgcctttggaaggggcattaggggttgttactataatgggggctgcagtggttggattcctggtaaaagatcatcccagtgagtttggtaattgccaaccggtatgttacccaagacatatgcatcctctcatgtggagcggccaggctcatggctggaatttcaagcacttgctccaattgtttgcagagttctggtcattggtatgctcggcacttggccatcaacttgacgctaggttctcatggcttgctgtcctatcagggactgacagcttggaatacaaccaacagagaaaatccaataaaaagccattgtagagactgatctgccaccatcctgctccctagtggcccatctagggggtggggatgctgggtggagtgctggctgatttcccagaggctttttgtgtccactgaagactcctctggacatttcttgtcaatcacaaactcaacctggggcccacaggcaagcaagtctcccattatcagactggaatacaaatggggttttagatgtaaagatcaggtttgatggcatgtgatgccatcaaacatgaaggagaaaccccttcccaaagctccatcactctacaagtgaaaattcaagactctaacaaggctctgtcttgagttcccaccccctattcccaggctttgcccaaaaaaggaaaaaaggaagctttaaatcaggtcaccctaaatcctctttaatccttgagattatccatctggtatttgtgtatttgtgtttctgccaatacagtgggatttgcgtgccctgggccctctctggttcctgctacaagccacagaagtggcttcaaacacctgtctcccctttccccctttagaggtaattggaaaagaaaagcttgagtagcctccaaagtagaaataagtagagtcctcagggtaagtaagaagaccccagggcacagtgaggcctcttcccacattgaaacatggtcagccctgagttcctgccct

SEQ ID NO: 35426 - DNA, 753 bp, Homo sapiens
aagtcggctttttctaaagttacgtctcctgcccacgtgctatagaaactggattgttttctacttcattttttaatgaaaacataacattaacaaaataccctgttgcaaaattttaaaaacaaaaccaaaaagcttattccatgaaggataagactacatataaccagctaagtaattccacaaagtgtaagttattgagcaattgcttactattcatgacaattccagtctttatcaactatttggtttgttggtggggagggaaaggggtggggcattttctgctttttatcatgaatcattatttgggctttaaaaaatgcacaggtaaacctaatgaatcaaagttcagttttctgaaaattcccagagaaagcagtcatataattgtgtatttgtcgtttatagctctagattcttaccctacccttactcaagggtagagcaatctaacaagcctaaataattgtaatttcactttcataaatgatctcaaaatttgagctgaaatttcaagccaatttggttgaacttttccagttaaaaactaattttggtcaaaaatgatttatccaatgactcttttacaaataagtttttaataaaaaatgaagaaagggtagtgatagtcaaataagattcttgtggttcttaacagacttgatacttctcttccaagtctaatgaacgtgcaacatactggagagagcctggctctgggatcagacaggcttgggtttgaatgctggc

SEQ ID NO: 35427 - DNA, 2444 bp, Homo sapiens
cttttttttctattccttaactaaccagaaccgtatccttgtgttttgtattatatttactaatctgatgggcaaaaaccagctagctcctcgttttaatctgcatctcctacgtttatggaggttgagtaacttttcatgtttatttaccacttccatttcctcttctggcttaaccgttcatgcctttctcccatttcctactggttcttcgcttttttcttattcatgtgtaggacctcgtgtatgtattactctgaattaaatggtgtaaatagaattgataattttaacacacttccaagacggataaaaactactgaataggtatacttgagacttttgaataatttccccccaaacattctattatgaaaatacagtgcaagaaaacactgcaaggaaatagtaaaatgtgtaaagttcaagttccaatgaacgcccccttttccgtaacaggtgtaaacatcatttccttaactactgtgagatcagcaacattttcccagttggaagctcacttgcgcgagaaagctaaccatgcttcggtcgacaggcagccaaccgcagaactccagcgcgcagcgatgcgggctgtagcccccttcttgggccactgacatggcagccgcgttgacacaccgcgcctggcttcaaggagcctgcacatgtcaccggcggccagggcgacaccccgtcagctcccccgaggtcaggtcgcgggcggcggttcccacctccccggaccctgtccacccctctagggttctcgcgcgggaagagccgttccaatcgcgacaggagaggccactacgcgaccgggtcgcaatgacaggcacccctcctgttgtcagcctcaccgagaaacccaccccaggctgccagcacccttacccaagcttctgtttctcctccctactcatgggctcggcccccgccgtccacacggaggtggccgacaccaggcagaacgcggccgtcgccgccactagtctccatcgcgctcgctggggaaccggggacccacagccccggccgccggcttcgctcatggccccgcggttccgcgcacgcgcagctgctacgcccggccggtgagacacattgctggacgctggtggccagggggctgctagccgtgccgagacggggcgggatgcggagtaacacggacggccgccggcgccaaactgtttcccgaagccaccaagccggtccccagcgccagcgctgccaccgccctccgccctcagtatcccggagcgcctcccccagctttccggtgtcgtagtctaggaaaccgcctccccaacgttacttccgggtagggccgaagccgtagagcctcaggaccaatggagacctcatgggagaggggctgtctccggcgactggagagggcattggccaggagaagtgagacgtggacaaaaggcgggactgggaagggatctctcgcttcgacccgcctccgacccgcggagttgccccctgaggactaccagtcccagtgtgcactgcttcttccccggctctcccgcgagccgactcggagccgtgtctctcgcttctacccggggtaggcgcgctgcaccctgggacttgcggtcctccgaggtcgccagtggttgctgggatcccacctccccctttcctcggcgccctacagtcaaccctgtctcggtgggctgcggagtcccgggaaacccgtcagctgtttatctctcttcctcagaaagttgtttcccagagagctggctgaatgaggcgcactgtccccatgtcagtgctgctgcgttagggaatagtgttggagtagtcgtctaccctcagggaaattccaaaacacagtaacagcaaaatgaattgagcctttgaaggcattgcgctaaggtttttactcgcaatcatctcatgcactcttctcaactctgatagagtaagtaccaccatcccccttttgcagacgagaaaacagaggcttagaaaagttggttaacaagagctcgtcacactgctgtattagaatccatccagcctctgattcggaagcccttgcatttaaccaccgcgcagtactacaaggatgaaggagcacgtgggtcctcgtacatgattaataatagttacctcaaaagctcaatgtaaggagagctgtgtgggctgcaaagaaggtttaatgaaggagattggaacttgcaatgaattttgatgaccgagtcccaggttaactattggtaaaatgacacatcggttcctcttgaaaaaccacattgtttttctagtgtggtcattcaataggtgcggagtttaggagcttcgatgtgatctctgtgaccacagtaaattacttacgtgtcctttaagcagtattcggcggtctttctggaaacgtttcttccttgacttttatcaccttacctcttacctcttaacctcttacc

SEQ ID NO: 35428 - DNA, 1680 bp, Homo sapiens
tccctcgctcaaacaatcctcctgcctcaaccacccaagtagctaggactgcaggcacacaccattattattttttgtaaggatgagatcttgctatgtttcccaggcttgtctagaactcctgggctcaagtgaccctctcacctcagcctcccaaagtgctgggattataggtgtaagctaccacatccagcccaaaaacttgtctttagtgaaatatgtacagaaaattctttgattatattctggagtacatcctgccaaatagtgcccagtcctccctgacctacatgatggataaagttagggcactgatgttcatccatccaatgcagtgaaaggtactctcttttagggttgaaaaaaatctcttagctttccagggggtgcaagaagccctgcattgagcaaagaaaggaagctaggaagctccggtgtgaggtcagcctgggctgggactccacactactgtcccagggagtcgggcagcctttgtggggctgggcactgcctctttggcttcctgccttactgggcagtgcatctggccatctgccccttggactttggactttacttaagagaaaactcaacaagggcagaaagcccaattcaaaacgtctttctgcctgacagcaggccccaaatagccccagcacagcagtgttctgggtgtccagttcccacatttcccgagcagcctgacgcatgccaggtcctatgcaccagggatattaaagtgactcaaggaggcaggaagccattattcaaggctgtgggtttctagcaggaagcacaaatgatgactaaaccctagtttctgtcttttaagagaggagccacttggagagacaagaagtaaacctaatttcaacacaccatgctaaatgccaggatatgagtgagcactgcagaaagcagagactgggggagaagtggtctttacttccttcacctgtggtgggatccctcaaagacatgaggatttaaacacgccaagaaaagttgcaacaattaaatatgatattatacatatactgagtattattcatgtttatgacctagaaattcttcatgggagggctgaaaagggtgatattttaatttctggttaaatggttgaactgtgtgtgaagcaaatgctctaaagaactgacataaatttactcgatagtgatgatctaaacaagttctcaacaaatatgttgagatctgatgttaaaatttggggaggggccaggtagctcacgctgtaatcccagcactttgggaagtcgaggtgggtggatcgcttgaaatcaggagtttgagaccagcctggccaacatggtgaaaacccatctctaccaaaaatacaaaaattagccgggaatggtgccgcatggctgtaattccagctacttgggacgctgacagaggagaatctcctgaacccaggaggcggaggttgcagtgagccgagatcacaccactgcactccagccttggcgacagagtgagactccatctcaaaaaaatagaataaaataaaataaaaagtcggggagggaaaccacgatgtaatacttgggactggagattttaggaaatgatctggtatttttctgaaggagaaaagaacaactccttttaatcttttggaagcaagtctcttccattttcaacattaatggttatagg

SEQ ID NO: 35429 - DNA, 1777 bp, Homo sapiens
atttcttttaagcttagttcagctcttttactaatataaataaatcatccgtcttttcccctttaacaaacaaaagcaaagagatacttgaccaagtgttatcccctgacagtacaggttgttgaggatcttttacctccaaaagcaccagagcaggaatctgtaaaatcagctccgttgctcttcacgtaccctgatttgatatctttttaaaacggtcttaaatgttgtggtgactgaaaacaaatgtggaataagaacaccaaataaatgatttcctcttaggaaaggattcaagggccaaataaacctagagtttaatacatagtctggaagatatttctgaagccgagggtgggggatctggcggcggggcgggggaaagacagtaaattggtaagataaccaaatgttaggtagcggttgaaggcaagtttggggtggggggtgagaagaggggaggccaaatacgcccaggaaataaaggagataacgagtcaggacttcctgcagtttcagttcggtttgggttttgttttgtttgttttgcagcctcacgctctctactgagtccccacatctctgagggtctccctaaatgagtttctccccatctgtaactttcgggcagttacaaagcacgccagtgttcctcttttgcttcgcccctctccggggcgggaagggaacggcatgacattgtcctttttgccgctgatgaaatcatcctgcaagtgctaggatgaagtgcgagcgaagctgcggccaacgccgcgctttccaaagccaggccaacattactaagagggaaattctgctttagctgccgggaatccccaggggtatctctagaaacgcgggatatccccgctgctctcttggcggccagttcagaaaccgctcagaactcagtccagggcaggtactggagggcgaagtgcgccgggcgggggcggcactgaccccgaggcggcgggagcggcgaaggcgccggcgtccccacccgcatcctgcacctgcctcgctcccaagccctcccggtccccggtccacacccgcgccggagcgcgccggctggggcaggaaacccgactcgcgcgggcgggctgcggtcggggatccccgcgcgctacagggagagggcccggggcgcgccccttggggccccgaccgcggcagccagcctggtgcacgggtcagggtgctccccaggcccccgggcgggcgggcgtacctcggatgtaagcgcacttgccctcgtccagctggctggaggctgagccgcccatgaccgcgagctgcctgtgctgagcgcggaaactgcccggtccgcgcccgctgctagctcctggaggttgatccgacggcgaacccggctctgaaattaagagcaaacttccttcgagaggcgagagacaggaggcaagaggcgtcgccttctggggcgcctcctccaggtccgcgccttctgatgatccgtgggccggcccgggggctgtcttcccgccctcgcctagctggtgagctccgacgggctggcaaccgaggaggtcggccagctcctcctcctcgcccacggtcacttcttgttttcatccctttggggcatccaagaaacaccttggaggaagtggaccatttctcaagtgactaaatctctgtgagctggaactttcccagctcacatccttcgaggtggagctcaagatcacgttgccttgtaagtgttgctgtccaagaagcaacagttcttcccaagcattacctgggagcctgt

SEQ ID NO: 35430 - DNA, 1651 bp, Homo sapiens
actggagactaactggctgtgttttaggtaatgattacatctattaatctattacttcgtaaatcctcaagttcagaaggtaacactggaaggggccaaggaggtaggaataaagcagcagcaaggtaaatagtaagagctgatgaccacaatcagaatgttaagctaagtttagagtggaaggtcattttcccaggagcaattacacttgcagttttatcctgcaaggatgaaaagtgtatgtttgttgtacgagagcggaagggtgccgaagttcatgtgaagttctgcaaaccaaagcctgatgaggatttccgccgggtgggacaggtttaagaggacgaactcatgagaaagaagtctgagcccaaaccccagaagccggccaggaaggtgtaaagggtgggccgaagccagggcagaagaacccaagcagaaggttgagcacgaggtggctgcgccgtcatccgggcgttgcccgggggctacgtcggaccgcggtgggcgccgggggggcgtggccggccagcccagggcggggcggtggcgcgggttctccaggccaacacgcggcggcgcaccctccctcgcgccgcgggcctccccgcgccgtgcacgtcctcgtcccgcgcctccgcccctcgctcgctcgctccttcccgccctccccgcagcgccggccgagccggcttcccctcagtctctcatgaatattgagcggcccctgttgtatttcccgagctccattgcggaagctgaggctcgccatattgtgcggcggcgccggcgtccgcggcagctgataccagagtcttgctccggccgcggccagcggagccctgggctggggcaggagccggtgagtggggcgggcggggaggcgaaggacgcggaagcagcgggccgggacacgcgtctactcggcagcgttgcaggcgactgacgggggccccggagtgtggggggggtgtgtgtccgcgggggtgtgaagggacatggcgccgccgccgcccccggccgctctcgcggcggagacggcgggtgaagcgggttctcattgttcccgtgtcttcgagggtcgtgggagggaagggagctggtttgcggaggacccagtcagcgaagcgccgggattccttccttcgccgcgagcctttcgctgccctttcctctgcgcggaggccggcgctgcggcgcggtcccctcgcctccgggggcgggggccccagcctctctgcagccctactccggaggcggacggagtggaatgcgagttttttctctgggctttcgcctcgcagctagggatgtgtgtctgcatcgtgggggtggggtagggggcactttgtgcagatatcgctccttccttctggggggtcggagtcggggttccagtgtagaggagctcctcgacctcggggttcctcggggagaccccttcagcttcacacattcctggagtgccgcctcctgctctggagtatctgttgctgctttctaaaaccgtgagcttacccaggaggagtcgtggggggagggggtgtcttggttagtttctgcgggaagattcgcgttttgaaccgtgtcgtttacgctgagatgctagtacccacttttgccgggagcccacgtcctgctggtcagaatcgtt

SEQ ID NO: 35431 - DNA, 2129 bp, Homo sapiens
ccattaattctcaacagtctatttctgatggaatggagtacaaaactcaattggtatttatgtatgggggaaaacatccgtaaatttagtcgactctttcctaaactactactcagcctcaaaatcttttcggaggcaagctgctagcgggggaaaagaaaactgaaatgagaaaaactcatctccttgtggctgtcgaagcagaaaagctagttgacagtaatggtttagaaatgttggcagctaggatctactaccgtaaacaggttgcctcggttactatgtcacatttgaaagaacttagttaaccatggcagactggactgcgggaaactaccaaattatgtgtaacttcctatttttgtaccttaaaaagactcccttttaagaaaaagcccttaacctcattatttccttctatctgcagcattcctgctctccgcatatccctcaccgtgacatcctcgaggcttatgaagatgccgtctcccattctgtaaccctgctttagccgctacacgggcccctctttcctccccaccattttcctaaacctgccttgccccataaaaaccatcccggtgaagggcctcccctacttcccagcaaggcgcactttctctcttctgcagcagaaagatctgggccttctgcacttactgcttttagcctcctcaggggcagaggctagggacggggacagggccggagcctgggccagggcaggggctggggctggagccgaggccggagtcggagccgagtccagagccgaatccggggccggagctgggaccccagccgagtcccgggccggggtcgggacctggacctgggccacctccacctcctccttctccaggggcagcagctcctcctccgccatattctccatagttaccgcctccgtgccaagcccgcccggggacccggagcggggctcacggcggggtcagagaactgacgtgaatgcccacagggctggatccaaggagtggggaagcaagtggggagggcgggatgcgtgcaacagacaaaagatgaagaaccagtgaccaaatcctgttagtagaaaacagaaagccagaggcagcgattccagatgcccgtccgcttccctttccccgaggcgttacgacgccaccacaaactgcgcagaagcgtactggggacggcgtccaattgggtaagagggttcggtttctacggtgcgtctccggcccaccggccaaccaccaaaccgaacaaagactacagcacccaggatacactgcgcagtctgggggcggggccggagttcaagcctcggaggaagtaaatgcaaatctaagcgagcgctgtggggcggtgagtaggtagtgcggatgcgggcgcagaactacgtttcccagcaggcatacagttggtggggcggggtgtgtgtgtgtgttgggaggcgggggtccctctcctttggcttggggctccggagttgccactgccgccggcgctggtaaggtaggaactgcggggtgcgttgacgttttgctgggcaggttccccctcgtcccccgccccaagtatactggcgggcgggcggccggccggactggggactcaggagtcacacggacctgggcggggcgactctgtgggcgggtccggggacgagccagctccgtggagggtgtggttctggcccggcttgcctccggggctgccccttgcccggtgttggggtctggtcggttcgtgcggagcccgcgggcccgcggcggtttactagcagctgacgagcttgcctgtccatccagctgacttggaattagggtctgttcttcatttcgcaccctcacctacaccgtgacccgaacactcttttcctttgtttttatttttgctttagtcttcatgttgccagtatcagcagttctgcggtgtggccagtggatagaaattagttgttttgctctattttgctttgttttcaggcttttaataaccagagctctgagtgggtagagcttcggggcatttaattttgatgcgtttcagatccccaaaacatatgctagcgagtcccctgtcccccgtacttctctccccttcactcttagtgcctacttgacattcgagcctttcttgtttct

SEQ ID NO: 35432 - DNA, 2904 bp, Homo sapiens
aagcaagaaaaaatcccaccttccaaaagcaagtagccaaaaagacactaatttaaaactaagactaaaacctgaaatgttttgtcttggggggaaagttagaaaatcaactacaaattaagacaatggctatagaaattagtatctattagttaaccagagatatcatctattaggaaaacacagaggaaaaccattccagggctctctttggtcagtggctcaagttccgtttacctctggctaccaaattataagcttgataagcagcctgccagctggcgttaaatgatactagtctcaattcaattctaaagtccatgtttacctcacgtccagacttaacaaatacaactactctttcagtatctttaagacagaagtgtcagcaggctttagcctaaaagtaatcatcagtattttgtttttcctaaatcaatcactggtgctagaattattaaaagaaagcatggcctgtggcagtctagtccatgctgtacttattcatctgttaagagtggtactaggcttccagagttgtcatctattagtagacagaagaccacgacacactcaacgaacagcttgatgccaaggtgttctaacgctccatcactgcacgctccatcacaaaaatgcgcccttttggacatctgatttctccttgaaatgtcagctgtctcaaaccaatagatatgtccactacctattgggggaaaaagtaaatgtagttctcaagtagtggttcaagttaccctaggttcaaccctcagcctgataccttcctatcatcaagagcttataatcagagacacttaaccaaaagcgtggagggacggaaaaagagcaaatcttgccactgatttctttcataaaaaagaaagagcgtcccaggccttcctcctcgcgcagccaggccggcgcccactccgcaggctgcgaggcgaggcccccagcacccgcacacccccgccccggattggccagccccgcagtcactcagtaccgacacgtcagggcagccgctccctccctcctcccgcccccttctccccgcgcttggcaagaaaagcgggcaacgtggagcgggaacaaaggaccccgcggcccacggcgatcggggactccgtgccaccctactccaggcccggggctggctgcccgcccacacgagccgagtctcgagagctcttccagaagagaatcccaaaccccaggcaaacccgaggcgaggcgtccgttcctgacagcaagaacggggagtcccgcgccctccttccggcgggtcatccccgcccgcggcgccctaacccaggccccccaaaacccttcgaacaaaaaactcttgttcctcccagcctgcctcacccgcgccagtgtagcaaaggggctccagcctccgcgctctccgaggcgaccggcgcccgctctcggccgccaacgcaacttggcaaccatggcagcgctggagcgcgggcccagcgcggcgcgggcttcacgtcccagagggcggcggcggccgcttggggctgcctcccctgatgaggacaccgcttccgcgcctcccaccctcttcccatccgccggcgccatcccttcttctcggattctagccgcgccgtctccctcatctgtcgttcgtagaaccagcgcgtattacctggttcatctctgaagagatggaaacattcatttctagagcttcgatgggaagcaggaggaagcgggcgggaatcggcccaacggaaagcgccagaaggcggcggaagacgggagcggtcaagtagaaggacgaggggccagtccgtggagactgaaaggaagggggagcgccaccgagaactcgcgggaactcgctcgctcgccgatacagccgcgccgaagcagcaggcggagaaactgcgcccagcagctctgagcgaccgacctccacgcgcgaccgggagacactgcctccgccgccgccgaccgctcgcgccgcaccccctcgcacgtcaccacgtgcgctgccgccgccgacgcctcccagcccgcttccgtctcgaatccatctgcaaatcacaggcgagctccataaagatcccactctaagccccgccccacccgcggccccgcccacatcccgccccgccttcctccctggtctactggggttccttccttctcggtgtaactaggtcagcgcaaggtgatcctgaggagataggcggcgctcggggggcgccctcgttcctcttatcgcgcctttgtccctccctccgttccttgccccgcaccctcactttcgccgccctgtgcgttgcctgtcccggaactggttccctcaagccgccctcacctgttctgacttcccctcgaggcacaatagcctgagagatcagacgtgggagattagattgctcggcgtcagacctacttctaggcaaccccccctagactggagctgctcgtcgtggacattaggatctagttgggcatgagcccttaacttaagggtcgggggggaagtggcgggtgcggagaggaggcgtggagagtgtgaggaagaagagaggcactctgagaagaagtcgaacaactaacccctcatttggcctggtttgggtgagaagattgagtcacttggggaaaaaaatattggagaagtcagagaaggtgtaaatcagtggtgccacaaacaccagtttacttccacttttcaccccccgggtctgttttgtctgcgtgcagctctcctcgtgtcggagacgctgagtcagttctctactggtcttgccctcttccggaaaaagaaaacacacctgagaagtggtagttcctatcctaacctactggggccctttataccaggtgccaaacttcattatccaccccaccaccttgcccgggagggagatctgtgaa

SEQ ID NO: 35433 - DNA, 434 bp, Homo sapiens
cccctgcaatagacaacaggactcacagaaagagacagcagcacgtaaaataaatttcaggcttgcgaaatgacttcagtttttggtgattctcctttcttgcatttgttttggctcaatttttgacccttttaatttttcttcttgttttcctagaatccaaattagcatattggctttgttctcatgactgtcaatatttgtcctgggccatggccaaggaggaaagtgacagagggcagagactatctagtgtcaaaagcagttgcaacagttccacattggtctcagatgtttgcaattctgtgtttagtgttgttgctcactaacagctgaagtctgaaaagggaaggcattttattggaggaatttctcaggtataggcacttctctaagacctatgcctttgagattctgcagactcccttcacaat

SEQ ID NO: 35434 - DNA, 493 bp, Homo sapiens
ttaaagattataaatattccattaaatgaatataccacatttttaaaaatttatcttttgttgttggaaaacgatgaatcattttttaatgagcaagagtaaatcgctctcttaacacacaaaatacgggaagtcataaaatgtgccaaaagcctcttacttaattttttttggcatagtgcttgtttgctttcagttccacgttgacttttcgagaacatgggccagtggacataaaggccaatgctattttcatggctttgtttgttgacagaaggttacaggtgttgcttctgtgaatctacagatcattttgggaaagcactaagccctggcctcaccagaggtacacaggaggtttaggacattgagtacgctttgttactttacttggctccaggttcctggttgagattctggttggcttgcaattaattgcaggaacatggaatgtctaccgtttgtctaagccttccattttccttgacagctc

SEQ ID NO: 35435 - DNA, 642 bp, Homo sapiens
actgtgccgtccttttcacccctatttttgagggttccattatgatcctttgtagttttcctcacatggggcaccacctgccagggtctgacccgcagacgtaggctgcacgatggaagaataacatactcagacactgatattcagtgaaagagcggctgggggctgggctgtacacagaaaaaagttgtagcagccgtgtgccccaactagctggccctgtgggcatttgttcagcacagatttgatgacaaagactttgagtcaacacacctgtggataattaatctggtcgccctcccccggagagagcagtcatgcacccgtggaagatcaaaggtcagtcttagaaccatataagtaaacaagctatttaggtaagctcccccacattcctttgttatttgctcttctgctatcaactcaagataaagaggattaggctgccttcagccaaatcttttactgaagctatgcaaacctcctggccttccaagaaggtttgtgtctatttcttataactttataatttttcccaccaccttgactgatcccctacacagaaacaggaggacagatgtgaaaactggaagaaattacaatttctccaagacatggagagattaggtatgagggagtgat

SEQ ID NO: 35436 - DNA, 884 bp, Homo sapiens
gatttggcagttctcattttttccccttggtcaaaaactactcaagttctgaatgcaaataagagatctcagagcagcctcaagtactcaaaacactgaacatggctctataaaacaacagggtataatgagctatcttggtttccaaattgggtctgggattttccaaattttaccccaaatactgtccttttggctttaatactctctgtaccagatatatcagaatgagagaatcaagagtaaaacaaacttgcatttcccaaacagagaatcaataatctttttggaagaaaattttaaaggatatcaatcattaaaaaaagcaagtctggaaacgatgatgtgtcactcattatgcaaatatcatgctaactcataagggtgcttttcagaccagattattctactttcagacaagcccaccatattagcttcattgcacaatatttaatctctgtccttgaagttcacaaattaacttgctctgtgatttcctccttgtgatagcctctggctgtgtttttactgccttaacagctactggcaggcagcttgtctcccacattcactacaaagcaaacaggaatttggtcccagggtaattggctgttctccagcataagaatgcaagttattcatgagctttgtgagcttgcttctgactaacacagactgttttcactagggagcacagggacaaaaagagttgtgaagttttgagtcttcaggattattcctttcaagtatgtgataacctgtgattcttctccccaactattttctaaccgtccccgaccttttccacttcctttcatttcgtagtgactaccagaaatttaccaaggaagctgccatgaaataacatgtttcttttagaaata

SEQ ID NO: 35437 - DNA, 1190 bp, Homo sapiens
atgggtacagcaatttgcattttaaggagccctccgtgtgattctgatgcatacaaaatttgagtacaactacctagaaaaatgaaaaattgaacagcccctattgccatctaagctagtaactgatcatctggcccaaccatcctacttgcactccaggaatcacttctggataatgtttctcactctctcaggttcctctgcaaatcagtcatggtgatctgaaagcttcctacacatttttgttttgagccggtgttgctatttttgcacaggctgggctgggactcccaatcctcccgcctcagccccctagtagctgaaactacaggcctgtgtcactgcacccggttcaaggatagatttttatttgtttgctttgtttttagagatagggtctctcaacgtcgcccgggctatttctacagatgttgttttggtttaatatggtgtcacataaacttacactggttaagtaaacaggcaacatttgaactaaatttaacttcaatgttttggtggtctgcaaaaggatattgtgcttcttggttaacattttcatgtttctccacttctgctttcgtccagaacaggaagcggaagttctaaactactgcgaagtcctctcttggtatttccggcctcgctgagaccagaaagcagcggaagggacaaatgtttcttgttagagtcccaatttgatttctaaatcaaggtgtacaggatcaaaggtctcttaagtgcaggtcccaaactttgatcgttatgtaaataagcaacttggagctctccttcacgacttgtaacacaggcaggtgactgagatgagatcaatcagagctgaggaatgaggggaaattcccacctaatagctgaaagcaacaatacttgagtttgtgcttgccttccctttcaattttctaaggtataggtgatcaaaattcttaataaattgaagattgaaggccttagaatctgagtaagctaagaggatatacagtttccacaaatgagttctttcattacaataaaaaataacagaggaactttaaggcattcgtttgctgccaggaatttcagctgaggttgtgggttggggaagagggtagttaatttaattaacttctgttttatgatctcttaagataagtaaaggcacctggaagtagaagaagccgagagaaaagatc

SEQ ID NO: 35438 - DNA, 672 bp, Homo sapiens
ccttgtcctttctacggggcttccatcctgtattcacattcccctctacagttagtgactacctagttcttgtctctcatttccctcagcagcccctttcctcttcctgggcttcttgccccttcagcgttgtcctcccttccttccctgcagtccagagtctcagaggagatcaaagagcgatagtgtggctgcctcgcagctgagagaattttccagctccccctcctggctgggccgagttgtgggctgagaggcaggaggctgggctggggcgtcttgacttttggggggaattaggaaagaggtgtctaaagccgcgttgtacacaatagaaaaacaaaattccctttgtgctagtgtggtgtccctcggtttgggtctttgccacacattcttgaaagccattgtttacactagcgttttgcaggttaggaacggtgccggtgggaaccgagctgacaccgtaagcgcttccctgggactgaattgaccctacaatcagtggagggaaaagtcaccctccgggggggcctccagagcaaaggagggaggacggcaactggccaatcaggaggcgaggccgagccaggcttcccctcgtcgctcgtgagctgcaaacagtggaaagttgggaacctcagtcgctggcccaggcggagagcagcggcg

SEQ ID NO: 35439 - DNA, 1481 bp, Homo sapiens
aaaaaaagcatagaacataaagcaaaagtacaaaaaggagattgataattgcaggtaattccatactaggggatggccaaatttaatgtagatgtgaatcatggtaggtccagttataatgtcttttatttgtctgtttgttttaactttcactgatatatcatgctttttcctctgatactttgaatgggctcttccttaatcctggaaaactttccagcctctgttgcaatagccaaccaccaactaaatttgagaaagttgcctgacctttgtccttctctcttcatatcatcatgttgtataataataacaatgcatttgctgttccaggctgtaaactccacaagagaaagacctgcttctgtctttaatttttaatatttctgctgcctaccagagtgccaggcatatagtagatttctagatacataatatttgttgaatgaatgtttgaaggaatgaaataggggaatgaagttgggatttggaccagaagagtctggagtaaaatctcagctctactgctatgtgttagttataataacccccatgtaaatggaagaagaaaggagttgtctttctgatagctttatcatgtgcagggtggccttgtgtccaaatataatgacatccacccctcgagggagggagcgcgcaggtgagcatgtgcaggagccagagcgagtgcttttgggcaccagcaggagcaaaatctttgcggcagcatccagccagtggtgtctgcgactcccaaagtcccagaaggcatgttacactgctcttttagctctgctgttgacagatggcttgaatgttaacagctcagtgggccctatgccattttgcatgaggtggctgcctctctgccagtgagggcaaaggaccagtgtgacagcctttcatatttgcactcatggctccagagctcttgtttggcatccaggaaaaatgaagttgcatgaacgaaatgaaggatggtaaatgtgggggattttattgctggtgaaagtagctctcaatgggaaggggagcagaaaaggggatggagtaggaaggcaatcttcccctgaagtccagccatctctggtcaaattcttctccaaagttacactgtcaagctgtccctctaaagtcaagctgctgctctctgacgtccaggcatagtccccagtatccagcttcttcttctctctgccagctgagtctggggtctttataggcacaggacggggtagggtggagccatgggtggtttaggaaaggacaacattccagtgggaaaacagggatataagttctcactttgggctgtggtttcaggctttttggcttgggatttttgctggggacctacccttttctgcctagaatttctctgcctcctgcccctatcacagtgtccatcatttttattagaaatgtagaacaagacataatgctgaacatatgaatttagacaaagtctgttatgaattcag

SEQ ID NO: 35440 - DNA, 1483 bp, Homo sapiens
ttggctatctgagagtgagagtatctacccaaataattacagttttaagtgatagaatgcttaacatactcagtggtctacagccaacaaaactggaaactaaaatgtcactaacaaataggtaactttaatacaatcacagctaatcatagtagttgaagatgtttattttaaaacaatataaaaattgtctctggataaatagttttaaattctttaatccatcttgtggatttttttaaaaaatactaattttattaataattggtcaaaaaacaatttcttcccaatttaagtactgtatttttgcatacataactaacttgccttttattgttcaattgtttagtaatctctcactaatgcctttaaaataaaggtttaagatgcttctcatcttggtgaaattttattgaaacataagcagagtggtttttaaccttatttgtcttacacacacacatacacacgcgagtgcctgttgaaaataaactaattgtgagccaattttgaattatgtatacattgactactgaatgttccaatagttgaaaacaagtttatgagcaatgtggttaatggctactaaatatatattgttcaggaccatgaaatgacgatcagaaaccactccaaagtttctctttcagtggaaacatatttggcttctaaaagtctaaagaccagcagggaatcttaatgtaatgaacaaattactgttggcggtttttcactgttaagctgaaaggttcagttgctgcctcagcagaatattttatttcagttccttgatgtgggagactgattgcatcagaattgggtctagctatttgattgtggtattagaaacaactttataacatgcctgaagtaacattctcaggtaactttttagcaaggttacctaagaaaatgaccattcagtttcaaggctaaatcttagaatgttattaatgacagaaaagcgaaactaccatgagaattaacaaaatggttgacatctgattatagttttctccttggtagttgaaatatatgctgcaatcagaatgtgtgtcttttgttagttgatctggggagtcgtctagggaaatgttgcttttgtaaatgattcaccacatttccacatcaaactgcctagataatatgagtcgatccaagttctagcaacttgggttactagaactctggaactattttaccaaactgattgtttcagataaaataagtgctaatggacttctgaaatttgaacttggttctttatttgaagtcccttagaatgagattgtaaaataaaatcagagccttccttgtttctccacgttaacgttatagtccataatttttctatttagtgcattagagcagtgattctcaaacttctgtgagtaaagaattacccaaggacttttttaaaaatgcagatttctaaccccacatcaagagattctgtttccataggtctagtgtgtggcctggg

SEQ ID NO: 35441 - DNA, 515 bp, Homo sapiens
aatatgtgatttttgttgaaaaagtagatattttaaataacataatttggcaactctggaaatcatatccttctctcctcatggtttttattgtcattttttttttgttgctggttttcatcgttgtgtcttgattcattagtgagtagacagaatactggcatcctgccaaattttcatatcctaatccttgaacttattaatatgttaggttacatcataaaggggaattaaggttgttaatcatttgaccttaaagtaggaagataatctctaattatctggatgaacccaatgtaatcataaggattattaaatgtgggaaagggaagcagcatatcagagtgatataatgtgagaagaatgttccacacacttcctcacatgccctgcccgttgctggctttgaagatggaggaaatggcctctagaagttggaaaaggcaagggaacagattcttctctagagcctccagaagggaattcagctctgctgacaccttaatattaaccca

SEQ ID NO: 35442 - DNA, 1386 bp, Homo sapiens
tatcttcttggcttgaaattatattcatctttctggctttttaaaaaatgttcacttgctaaggaagtagggactcttattaaatatagtaagtgcagcagagctcctggaagtgaaaaaggcaagctaaagtgatgtgctctagcttgttacaaatttacagaagtggtgttttggttttatttatctttgttgtgcttgactagcagctggagatccctgagtgaacacatgataagtatttcaccttgtggtgctgccaaaggagttattcagtttaacagtctgaacatgttgtgttgtgcaataggtaaatgagaatcgaatggcatatgtcttgcttggtcttcagtctcctgtacatgcctatttcattaatattagtcctcctgagaatttaagcatagcttttctaaaagcagtactttggtgaagaccctatcattgttatgaagttatctgccagaaacagataactgttataaaaatttaataggtacaagaaacgtctccatataagtataatttactgtcagaacccatttttggttttcactggattaagcgagaagtccatgaaaaaagagaaaaggagaatcgtgaaacttatgaggttgacgtttgtagagccagcagtgattcataaaagttgtattgctttaatacctctcaactggaatcatattatgatctcactaatctgaagtggcagtgagtgcttgaatccttccctaattgacataagtttttaaagcatttttactttttaagtaaacaaaatttctgtttacttaaattcaattgggaaaaaaaggctaaattcaggtaattagctttgtttgtctaaataagatactactaagttcacctttcagtgggtttagggtgggaaggttgcttatagaaaaagttcaatgtcagcttgtgtttacataaacagaaaacagatagaatacccctgggaaaccagacccaggtgaacatttacatgaaaatttcatgttaaccattatactgtttttaattcaaattcagggtgctaagcaaaaatataccagctagaaaattattacacaatccaataaatgacctacttttttgttggaccttactcctcaaatggtgcccaggactttgttctctcagtgtctcttagttctctgcaggttttgtttcatctcatttgttggctcctctgcttttatctttaaatagagttctcctccaaattacacccccagtatattagagtttcactttcagtctacatacatttcttggatgaatatttcttcaaacaaaatgttacatagatgttcaaaatacaaaaagaagcaaaagcagtgtatcactagtgcatgaagtgaccccataacattttatata

SEQ ID NO: 35443 - DNA, 1329 bp, Homo sapiens
gaaagtggggtaaagccttgggctgagctgacttagctctgcaatggtgatggttcacattttcattgtgggaaggaaacaaaattagtaatttaaaagaccttttccaaacatgcttatcttaaaggaaggatctaaggaaaatatcaatacattttttaagcagatttttaaaataataaaggaagctagaaaatccagtgtcaataatctacctgtaggtaactgagagcatgttttctgtgctcagagaaaatgaaactactcaagaaatgtatatttgatataatggtataagtatataaaatgtatgccacaagctaacactaggtaaatttcaaagctacctttgctagatttaactggaaagcagaagaaataaatgataccagtatgtgaatattttaaagttgctgcttcaatatactagtcaaagtctgccagagctatttaccatctcaggacaatttgttcacttcacttagaaattagaaatgtgctctggccaatacatctaaatttattttgtggtagtcattttgcttaatggaagtgttttccagatgttgcctaagtctagtcgtctgggcccttttccaataaatgaggaaagtttgatttcataggttgtcactgttgattttgtctaacctttggactaattggttcatcccactgtatttgcactgatatataagactcccaggacgtgggataaactcatctatcctttacgggtaagtgtcaaagttaacttgcttcatagaattaaatgtgttttcattagaggtgtttgaaaaaaaatgtgtaaagatagtagttggaaatttttgaaaaggattatgtttatgcaatacacctgttggaagcctttgaatttatattgagaattaagaaaaagttggaacagtaactccatgatgcttattaaattacatttctgtgacacaggttattattttccttaagataaaattttaaccttgcactgttaagtacatgccatactttggctagagttttaagataagtctattctatattggagatttcttaagaattaaaactgtcaataacgtggctgagggtgacttgatttgttctgcataagattaagtctaatggccaaatattttctataaaattaaagctgatttaaagtcttgtttcaagaatgggatggttttattattgttacatttttaaagttactgaaatgtgtataatgcaagcctaagttagtggtgagatgaaagagctgttttctgatacttttattttattttcagcaagggtacctacggtacctgaaaacaacgatggcatgga

SEQ ID NO: 35444 - DNA, 519 bp, Homo sapiens
cttgatactgtcttgtctgcttctcttgctttctcaacctcttctcattctcttttttctttatatataatatatgtatttatatacatacactatatatacatttttgtatgcattatgcactcatgtacgcaaaaagttctgaaagttgtcctacaatttactgttttatttgcatattcagactttggcattcctggactctattcttttaagatttgttttcagtgtgtttcaacattcctttgtggatttaggacagtacacctgccaatttctattccagggatggattccattgtcacatttctgcagtcatttctcagggagggttttaaggtggtgttttccaaatgacttttaaaaaatatttgagaatgagtatgcttttgttattgtttgcttatttgttgcctggaaaacctctgttcatgacctttatagttatgcccagttattttaagggttctcacttcagcagtggttgtaagcatctgcctcccctgacattttaaaaat

SEQ ID NO: 35445 - DNA, 2143 bp, Homo sapiens
aagtgcaacaaaacatataaggtactctaggcttagagagatgggttcgcagactctatcaagtctgtttcccgtctgccggacgaaggaaaataagcgtccctgtatgagcctaccctaactacaaagaaaatgctactgaacttagattcagatttttttttcaaaggcttcttatcaaactgtaaggagcaggaaagcgaaggctcaggatatccacagagcccaggaagtgaggttaacagagcggtacccagtgccaacttgatgggggaagaccagacccaaagggcgggagtcgagcccaaaaccaaggacggaaagagcatctcacttaccgctctccaccttaaatttctcatgccgccccttcaggccatcgatctcggattgctgatcagcaaggaacttttcaagtttgttctggacagacttgggcagcttgttcagctccgtgcgctccaggacttgctgcaacaccgccgccatgtcggtggggccagggaccccagtggcagcggccgacggggtagaagcggagaagaaaggcgaagaccagcaggacccagacgcctgggccgccgcctctatcacctcgctcggtggctcgcgcgcgcccgcccgccggagactcccgcggcgggaccctgggaaatcgagtccaccctcagcggcagcgtttcagcaacagcacctcaccgcccgcgaccgaagtgcgcgcgcagccgttggaagctacgaaccctgggaacccgagctcagaggctatccctgatcctcttgcgcacccaattttccggcttccagctccacccacttcaggccttgtagggctctgggaaatgtagtgtttttctcattcttttccgggagcccaatgctgcaccgccctctcagcttccgtttttctccccgctcccctggctctcctatctcggccccgtaaccgctgtccgcacggtggcgccacatacgtactcgtcaccccttggccctccctgaagagctggtgaccttaccgtcaaagccccgggatgccatggatcgtcctcgttggcggcttctggacactgagccactagagggcatcggtcccggtagggccggacggcaggctccgggataccgccacgctctctatggcgcccagaagggggcggggtggcgaccgcagtcgctttggctgaggctctgcggggaagggagggggggcttttacgtcatcaatctgcgccacctgactcccaagtccctggctttggagtgggaagtgaggtgtgggaagtaggtcgctttctgatgaattcagtggcagtgaattgagaccggagggaatctggcccctagaggctggtacttgggcccgaaacccccatctccggcggagagaccgtccgaggtaattgtctgccacgagtgcacattctgaaaacaggtaagtcagcctaagtgtagtgtgtgtgtgtgtgtgtgtgtgtgtgtgctctcttttcaagagaaaaaggaagggacagtgttggaaccatatggacagtcactccggcacacacttctgacgaacttaccttgtgtgaaacggcgtacctaaatggtttttggtggtggggaggtggcactgagtgattcagtacccgggaatttaaggacccgggttaattcttcaggaggagaattaaaagaaaccggtagcactttgagtgtagcctatgttttaaatttttcgttgcagaaacggttacctaacattatattgtttttaaaattgaaaactgttgtaactgaagtttttaaacacattgttaatttctacagtaacagaacttgtatggttccagatcataattctgtagttttaaagctcaatccgtagattgtttcgtgtttactcttatgaaagaatttgttaaattattcattgtaaataatgcattcccagtgtcgtctctctgcagttcccacagtcgtgggccttctgtgaattggtgatttagttcttatatgaaatttattctttttctctagttcttacttttgaatcatgttgtgaagccgtctaagaaatataaatggaagcattttatgatattttgtaataactaaggaaaaataaatcaacagcggagcttaaggttgatttttcccc

SEQ ID NO: 35446 - DNA, 1117 bp, Homo sapiens
ggtttaaagtcatcttacttccactgtgttacctttacgtgccactctccgtatttaactttttactattgtagtttatacaaaataggataatttgctataaatggtaaagtggagtcaatctaatcactgggcctgtaaaactgacaaagcaattagagactgattttcattttcattaggagatctccttatttcagtgttacaactcagtgtgtgataacatgtaagacaaatggtatatagattcaagcctttctgggtcatctaaatccaagtaaaaatgagcagtatatgactgatgatcaacatttaacagggctgttttctcatttagggatttagtgcattatctcatgacttatgaagacataatagctaataataatattctggtaatatatcagtgtgatcagatatttcttttgatttgttcaaaaaatttaagaaatcgccatagaaattattcatggggatgagttacccttttgtacctttctcaataacaagtttttgtatcactgttgacaaagttttcaatgttaatattaaccaatggctccatggagagtacaaagttcaggcaactttcaaattgttttgagccatctgaaggatttgtgaagagattagtgtatagtttattaatctgaaatcagttggtttaatgaagatattggttccagattttggatcaggattttgaaataaaaccagatagtctcaaggctaatgttcaggacatacaaaactctaagatatttcatatgacaaaattattttgccaaacttctgaaaagtaccctgctgggtaaactagttactctctaatagccaattctaatagagctttagtctttatgtggcaaacagagtcaaacaaaaatattcaaaaaaagatatatctgcacttcctcatgctatcacagtttatgcagacaattatttaggttggtgcaaaagtaactgtggttttgtgatgcaattttcacctcctcctccttttgccatgtgatgtgcctcttccccctttgcctcccgtcatgattgtaagtttcctgaggcctccccagaagccaagcagatgctatccccgtgctttctgtaaagcatgcag

SEQ ID NO: 35447 - DNA, 1436 bp, Homo sapiens
taacaggtttgcattgaaagttaaacagtgatttgaatttacattagtgccaattttgcttcaattttatggcggcattatttgtaccctgttgaatggtgagatgaattttctattaatgctaattcgcccctgtccccatgaaagtaaaactagattaaataaactgtaataattttcatagaaaatagtagacttattatttggagtgtggtgtttccccagccaagctcttaagattgtgcaacattttacttggttttattccatggtttaggctggcactgacccaaccagtgctcttgaaaacacatgctgaaggtcacattagggaagaatatgagtgggtgagtgagtcagtgcatgtccactaactcctctagaataaacaaatatctgtctgaccaggtattaatcaacttagtaggtggaaagcttatttaaaaaaagaattccttctagatgccagcagaaaataggttaccaaagaactgatttggccaaaacttttcctatagaattactaaaggttaaaacacttactacattctaaattaaaagaattatctactgctagaagtttctggaagccatattccttaggaacaactcaaatctttggcctcaatgtaatttatcaaagtgtctttccccaaatctcactgttaccagtaaattacaccatattactcattcctaaggcagatgagaaatgtcatcccattattgccttatatttcctagagtgaactgaccagttgtatattggtaattgcataaattccttgagggcaggaactatgcctggtgaagttatagacatatcatacatatgtaatgaatatttactgaattttacatcatgacaaattctaccacaatttcatgagaacttaaaaaataagtttgcaagaaaatattttataatggtggtacatattgagaccattttagaagactactgtgttacacaacactgttacctaagaggaaaataaattggcatgtagttatccaaactcagtaatcatttttagggtaaatgatgagatcacactatattaacatatttattaatgatgatcataaagcaatacttccacaaaaataatcaccacaaacttagagtgaagtgagtataaggtgatttactaacagatgctcaatgaggatcaaataaatacaagaaattgtaaaatttaaaattgtgagcatccaaatgttagcataaaattcattttcctttcacattttattttgaaagttttgaaatcaacagaaaagatgcaaaaataatataacatccatagactccttgtctcgattcctcaatgttaaccttttttaattttatttttatttttattatactttaagttctagggtacatgtgcacaatgtgcaggtttgttacatatgtatacatgtgccatgtt

SEQ ID NO: 35448 - DNA, 743 bp, Homo sapiens
aggagatagatacaaagacacaagggcctaaaaactttaggctgttacctaaactgagataagaatgtaagatatacacaattatctgattttcaaccagaagtaagccagaaagggaatgaggaccttaaagtacacagaacgcaggagttaggcagcctgagtttttgactcagctatatctcagctactgtgtggctcagggcaacgcacaagagatcaatttctttcttcattacatgaaagctttgaactagattatctaaatttcctttaacctctaaatgtccgtgatggaacttctgctttaaaatggggttggagaagcagtctctgaaacaagctcttccacttcctacacagacaaccaacatttaaatataaaaataccttccttattagaaaagttgccttcacaaagctctttggcaaaggttataaggaaagcaaacaatcgatacaaatttcacatttctatttactttctgcctactcacttggaaaagcaataagatgaaataaattcccactgatctgggggaaaatataactagaatgccatttttcctaagttcctttgtttggaagtttttaaaagagttaaaacaagcttcacggtttattagatattattttctgtagtgtttgaaaatgttatggggtaaaaaaagggcatgtgtttttaatgccctgaacattttctttttcaaacaaaagtcatccttcttgtgtctcggtccccg

SEQ ID NO: 35449 - DNA, 2957 bp, Homo sapiens
tgcctatagtggtcagtcgggtccacttagttcagttatctgtatattaaataataccccaaatattcccttttccagcattttatgagatacccaaaactttaattgataatgaaaataataaataatcctaagtattaataagttacatattgatatgtttagaaatatttctatatatatgaatgcattaaacaaataggtcatatgcatagcattcatgataagtatttggtagataaaaatgaggatctgaataaacttccatgtccttctcacagtggaactggtaaaacactttagctggtaaaacagtaactggtaaaacacttagccatactaatggctaataaaatagtctgttctggtgtgaatttctcttttatttagcatcttgtttttctttagtgggtaattcactggttttgtgcaatcctaatctactatgaacattgatttcttgagtatccagatattattttcagaatctagtttttcacatgctgaaagttcaagtttgagatccatcactacatggcaataatatttactcatgatgaaaatatttgccagtcactatgttaaatatcttgcatttactgtcttatatcctatttacaaaaccttgcaaggtagatatttttacttccttttgtagttgaaaaaactcaagcttatggggattttgtaaattctaaactcacacagttgggaaatggtgaactgtaattcagatgcagactgtctaattctaagctgcatactcacccaccttacagctgaggagggaatgttgttctaataacaagccttgcaaaatgtcagctgcatgctttacatgctaaccaagattacattcttcctctgtttatgtggttttctgagctctgggtaaggcaactattctctgtgccacaaaaaaagtgttttattcagttttttctggaggaaataaggctaatgctgttttctatggagaaaagcataatttccaaattaatgattaacttgaaaatggatgattcattgggcaagcatttcctataccacagcattacatgttttccaattatagtgctcaggggaggttcttagttaattcttagttctatctaaatagaagttatatttttattaatttatcagttttatcaatgtatatattttatacaatttatatatttaattaagtactacaacttacatagctaacatcaccttaagagcataatataaaataattttagctgtataaaataaattaactgagttacatagaacttaatttcaccttaagtccaacttgtcctaaattgaaggatattaaagagccctaaaaatgctttaagtggtgatttgaacttctaatggaaaatgttataatttgcatactgaaaaatatctcattgtacaaggatagtttctgtgacctcttttcaatatgctatattgagtttctcaagaaaaagggggaagaaggattttgctaatctgtctctatatctcacctggttcctgctgaaagcaatgacaggcacttgtaaaaatataatcctaaaatattatgaagctagctggcctacctgagctccaattcacaaactcaattttctcaacaccttctaaaaccaactatactagctaattttcaaagcaaggaaaatttagtctgacagtctatatgcctagaggaatcatcatgcaataattattgggtttgtagtacaaatttacccagtggatattgggtcaatttttcttttctaaatatttataaaggagtatgttagaagtcacatataagggatttatcataatacaacatttaatagacatgtgggcatgctttagccaaaatgaacatacttggctagggatgaatacatctactatttacagttaaatatttcctctacctggagagattcctgtgctggaaggcattttagaacatacagtattaatattatttctaaaaatagggtgagtagagtgacaatcttctaaaatccctgccaggaagaagagaaatgctaaatatagattgaggaatcccatcttatttgggagattaaatcatatctgtataaattattggaggcctagcaactttccaacacaagctagttaattgttacattttcaaattctatacttcctgtgtgttactttgtaatgcacttttgtaatcacggtatctttcacaaccttttccaagttccaaaccacttctatttacataacttgataaagatcagtaaaactgactcactagctaaaagagataatcatagggtaataggcaaaacaagataaaaagcagaaattcagtgtattctaataaaaaagaaagaatgctcgtctttggtttcaaagcactaaattcaagtgtcatatagcataaatttaatacttaatgttctcctataactttacattgtctttctcatgcatgaatatatgtcatctttatagccttccttgaggagagtattattgttatatctattttataaaggagtaaacaataattaaaagaattgaagtggttcaggcatggtagtttattgctgtaattcgagcactttgggaggctgaggcaggcggatcacttgaggtcaagagttcaagaccagcccagccaacatggtcacttgaggtcaagagttcaagacaagcccagccaacatggtgaaacctagtctctactaaaaaatacaaaaattagctgggtaaggtggcaggcacctgtaatcccagctatttgggaggctgaggcaggagaatcgcttgaacccgggtggcagaggttgcagtgagccaagatcataccaccacactccagcctgggcaacagagtgagaccctgtcttaaaaaaagaattgaagtgtttcacaggaattaaactcaggtcccagactagatcctttgcactttctaaggcaagccccatcaa

SEQ ID NO: 35450 - DNA, 1381 bp, Homo sapiens
attctcccccctactttttgccagttattaaatgttctggtaaatcctaactcaacaagaatgactcatgaggaaatcctgactccttgaactcactgattctggtgcattacagctatgaaatctctatgtctgcagctttctctcccaccataaggaaatctgtgatttctattttggcaggagatgtgaccaaggactcctgaggaatgaccctatagacagacccagccacgtgcctagtagtgatcaaaaatgcaaacccaattaaagcactgtcttctgataaagtcactttctcttgttcaatccctaatgttcattctcaaagtgttccaagacgccccagcaagctgcagagcagatcccaccctgcccctgggcaatcaacgtttcaggttactccttccttaagttaagtggcagagagaaacgggcgagggtctccccattgcctcagttcacagaccagggggtgtcgaatgagtcctacagcaggacagcaaacaagaaatgaggcgcggggtcagggaacgcgctcaaaaaaggaagaaaaatcccactcttcattcgaaatcaggccactgcactccggcctcgtggcgggcgacctcctcctgccagggaatcgccgctctggcctcgggctggggagcccgtcagggtgggtgagggagcgccggcgcccccgccgggccgccgccaacttcggctccctccctccgtcgcaaagccctcgagcccgcccggccgccacgcttcagcaaaaggtcgtgcgcagcggcccacactgaagactctccatctgctcccacacctgccccagctggccgctgctatgtggcccgagtgcgcaagaagccggggccgcagacgtcagcagcgccccggcttcgagacccttcggcagcagccgtgactgccgccggcgggcgctgacccatccccgtgccagtctgcagccgaccaatccgcgtcctcttgaggcggggccggagccgcgaggccccgcccccaagccgaggcctcataaatgctgcgacgcacgcccagccgcaaacagccggggctccagcgggagaacgataatgcaaagtgctatgttcttggctgttcaacacgactgcagacccatggacaagagcgcaggcagtggccacaagagcgaggagaagcgagaaaagatgaaacggaccctgtgagtatggctttcttccctctcccgccaccccctgccccacactgcaagctgcaaacgcggtactttcgggctcgcctttgacgttaggaaactagcctgagcctatgcagggaaaaaaaatcgaaaaggtcaatttgttaagtaaggttaaatctgggtgatgctcgggtacagtttaag

SEQ ID NO: 35451 - DNA, 2764 bp, Homo sapiens
cccgcgtaaaagttttaacatcgtagagtcaataacacttgggaaatagataaaaacgtactgtccaaagaagagactaagaacaagataaatagggaaggataaaaagtaaaatgtgttgattatttaggacgaaaggcactaaatacagccagagagaaactgtgaggaaagcatgtggcctctagtctagaacactagctcaagaaaactcacttcaccggaagccagaaatgagcagagagcggaaccagtgaagtggcctttcaggcccacgcagtcagcgtgtgtggacgtcccgaagagctattcacacattcaaggcgttctgctttgaataaccagaatctcgagttcctgggcggcttgagccgcagacacctcacccttgagaaggcgcaccctagggtggcttctgcaggactaatggcctgagcaatgcacttgacctcaccagcccgggataaggtgcgcgccgcagagaaggggcagtgcaaagggcaatacgtgcttaagagcttggggagcgagggccctcaagtcaattacaggatttgggtgccaggtcctgaggatgcagcaggcacaagactgacacgatccttgccctcgtggtgtggctctacaaattactgtggaaacgcgactgtctcgagctgaggagagggcagaacatctacatttcccccacccggactccaggttcctgaagtcacctctccagacgcggggcggcggtggccgcagggaaccactccatgcccagcttgggcctcctcccgtgaccccaggcccaggacggtccccttggttctcaccgaatcctttaatgagctcggtgaagaccccggggtcgctttccatgaggcaccactccccggcattgcccgtcatggccctggccacacaccgccccgatccacctctcgctctcagctgccccccgcaccagctgccgccggccacagatctcagcaaacccgccgccgagctcgtcaaccacacgtcaccccgcctacttcccgacagcctccgggcgccgtcacctgcagcgcgactgagcgcgggaggacgctctagccaccctagagacatcgaaactcttcccaggccttgcagcacccgtagcggattcggaagggctggggcctgagaagaaagggcggtgattcacagcgccgaggaggcaacatccgggatcctcgcccctctggggcggaggcggggcaaaagaagaggggcaggactcgttcccgggaaccgaacctggaatccccggcggcagtggggctgttgctgttgctgtggctgtcgctgcccgtcaggctgccttcttttgtcgtttcccagcgctgcgcaggacttctcctggcggcgctgcggatccagggggtcggctgccaggtacaggtgaggacattgcgggaggccggctgggagccttttgtgcggccccagggacgcgcaaattctgaccagtcctccatgtctctcacccgcatcccaggggttgaggctgggcaaacgccgcgaaactatcgctcttccccgtcccgcttccgcgcctgtccaccctgggtaacggaaccagcatcgcggtagggacatcctcgctaggcccggccggaccattcctcagggtgggccctttccgaagccgggaccgctcctgcttgtcggcatcgctccccacaggccgacgtcgagagggcctgctttactcctcctctttctcctccttctcccgcggcttctgcgcggagaggcgtcgcccgggatctgggttttggaagaaggatctttgtgggaagacagggtgaatttatcacagaggaataacgagggagaggagaaaggtttgtccatggggctgctagactagtggaaggggatgcggtgcgtcaagggaaaattaggttgaaaacaaatgtcgtgtattaatctaaaaacatttggaatggttctaaaactggatgatgagttaaaccaaatatttactaaatatttactaaattgccctcattcagcaggctcttatagaatactatagtgttaagattaaagtttttaagagtatattgaagtcgttaagtgtatatttactccttaaaagctacatattccaagaaagacctttggcttccagaaaaaaaaaatgttttagtgggtaaaactctgactccttccttctcaaataggtgacttgtgccctggagttagggagccttgtgctacagattatgtgaagccatgaaataaacgtggtaaattttattgagggaagcaacagagcagcttttgtattaaaaggagcctgagtacgctatggggtagaagccaaaatttgtatgaagtgttggtttaaaaaaaattttttttgtaactttcttgaagtttatctccggaaactctgccctcaacttggagactaggaggattctgtacagtatatttccttgagatactttattggaaaagtttaagaggcacagagtccagaatgattggcatcagagcccaaagtagtttgtggtattttttttaatctgtaatattgctatgaacttgaaaatgttttctgtgcaaaatacatcaaaactaaaatgtacttgatacccaacttaattaacatggtacctattgtagaaagaccaaactgaaaatttagcctttggcacaatctagaagtaagcagagaagggggttaagatgcctttcattatgttaacgtttaatcctgagagtttacataaaaagccagatt

SEQ ID NO: 35452 - DNA, 2335 bp, Homo sapiens
acacaagagaatgttttcttgggtagtgagaggaggtaggaggtgcattctgaaatattacccaaataaaagtttctggaagacaccctttcccttcaatttctagttgaccttggtaaaaactgtcgcgaactatgaatagaaacatgcacggaggaagtaagtgcacaataaacatttcatttcaacacagatgaagcacctagtcatgccacatttatggagcgcctactgtgtgctaagtaggcaaagtgctatattgaccccagggatacgcagaaaaaaacacggcggggcctcaaagagctgtcaaacacttaacagcctgtgattagcccttcaggaggggtctctagcttggtctggaaagttaaacttgagattcctagaatcttgcaaaactgatagaagctcccagatcaagtagatagcgagacagactctccggccaagtgcgcagtggcaggcgcggaagtgcgagccggcaggaccgccaggcaccagccgcgcgggcgtgggcagcacagccgcagttcccttccactgcaggtcccgaagccgctgatattccaaacgaggaagtgtaaggaaagcactatcctcggtctagccgcaggcggcatcaccatcagtcagcctctatcctaaaagctctggccattcagcgggaatcatcgccttcacttcctgcagtagggtggctaagtttagcaaacaagaatgcaggacgcccggtcaaattagaattgtaaccaaacaccagaaaactgttccgtttttcctatgtccactgcagtatttgggacacacttggactaagaatcattcgctctttcagagaaattccaattgattgcggcgtcttgtattttatgtagcaattcacagagggatggcctaagtgaacatgagtgaagtattttcaacgcgagagtcacaggctcctgaagtcagcacagccgcggagggcacccttccctgcccatccctcgagcgcctctgcgtgttatgactcagagcccacgcgctagtacgcctcgcccacccggcgccggggcaaaggggcacctccgcccaccgctttctccagacccccgcaaggcctgcgcaccacgccgcggcactcctgcccgctgaccccgtacccagaggccgcagctgccgcagctcccgcagctcccgccgccctgtcaagccagcctgccgagccgctcctgctccaaaccagccgcgtccccgccagcgccgcgcggcgccaaatcatggtcagagcccggatctgcagcgagctctactgccggacaccgcggatcccgggagcccgcctcctccggcccggcccccgccttgccccgccccgtcccgcccctccggactgcccgcgccgccgccggtcacctcctcgcagctgagcgcgtcctcccagggctgcccgagcgctggattccagcgagtgccacccacgtgtaaacatcctttagaggggagaagcggctcacttgcttatctcgagggttcatccgagccccgcctctggattcttttaggtttagggacgctcataaaggctcccaggcacttggaagcagtgcatgaggatggtggcagacatgctggggaaacggaggagaaaaaacatgaccatccaaaacagaatcaaagtggtgcctcagatgtttccaactacctgttacacaagtttttgtgtggatgaaataagagcctaaatatatcctcttataattaggcaattggtcgagacccaatgtaaattatggggatattggggtttacatccataattaaaagaaaaaatccggtgttgaaggtttactccaaagaagacaaagattatttcccaccacctgccaaaaaaaaaaaattaggaaacaaaacaaaagaaattagcacagagatgtttcaccatggctttggaaatgggcgattgctgttgacaggattatttaagccactcagtggtggtaataatagcctttgtgcgtcactatttaaggttgggggtaagcctttatttactgaggacactgaaattcatcttaaagtcaaaggtcaaatggtacatctaaaattctaaacaattattacaacaatccagagcttttttgattcttcatgttcaactaagtgtaaaattcatgttaccaaagtacaaaataagaacttgtatttctgacagttcttttccaacattcaaatgggctatgtttgattacttaataaaaggatggaagttagttgcaaaaataaatacccccaaagggtaggaattcattctttttaaagacaaatttgactttgaaaattaaggcatgtg

SEQ ID NO: 35453 - DNA, 1665 bp, Homo sapiens
tctctcaccattaagtgatgggattccacaaataattaaactcttattcctgcattcaacaaatattacgtgtccaccatatgccaggcactgtagtgaacagtatataaatgaatctagcattcacgaaaatctaggagaatacatgggaggggaatctacattgaatttgagaatctgggaaggcatatcagaggaagtaactcctaacctgcgttttaacaacccttgggttagaatggtttaaacattttttaaagagttcaacaaactctttaaaatattattcaaagaagaatatatgaatgaaaccatatgtaacttgcaaagcctaaagtattttctatctggccctttccagaaaaagtttactaatctctattctagagaaaattaagagacccaatcataaaattacccttgctttgtgataggaaccaatacagagcaaaaccccatatcactgaatcctttccaaaattcccttacaaaaaacaaaattgaacagatctagtctaacaccttcttgcagaaatactacacagatacacataatatgtggtctcgattatagcaaacagccaataaacttaactttgtttgattaaaaaatgtgtgttaaaagcagggtcggcaaactggagccaaagcctatctgtggtctgtttttgtatggcctaaaagctaagaaagattattactttttttttttcttgagacagagtcttgctctgtcacccaggctggaatgcgatgatgcaatcacagctcactgcagcctcgaccttctgggctgaagcaatcctccaacctcggcatcccgagtggcagagactacagatgtgtgccaccatgcccagctaatgttttagtttttgtagagatggggtcacgttatgctgctcaggctgctctcaaactcctgggctcaagccaccctgtcacctcagctttccaaagtgctgggatacagttgtgagccactgcacctggaaatttttacatttttaagagttgtttcaaaacaaaccaatacagaaaaatacttgacagagcccttatgtggccacaaaccctaaaatatttaatatttagctctttgcagaaaagaatctgccacctcctgatcaagaactgtgaagagtcggacattttattctccttgcaagctgacagattagtttgtaggtttcatgaatgctgacacagagacaacacacttggatcaacaatgaagggctttattactgaaagcagtaaccagagtgtcaacatatttgcattggtttcctgagccccagttgcaacagggaggcatggaaggtcagatgacagcagttactttttttttttttttttgagacactgtctcactctgtcacccaggctggagtgcagtgccatgatctcagctcactgtagccttgatctcctaggcttaagccatcctcccacctcagccccattgaaatagctgggactacaggtacacactaccaggccagtctaatttttgtactttttgtagagatggcgttttgccatgttgcccaggctggtctcaaactcctggactcacgcaatatgcccaccttggcctaccagtgtgttgggattacaggcatgagccaccgcacccaacccacagtggtttttttgtttgtt

SEQ ID NO: 35454 - DNA, 2926 bp, Homo sapiens
tggtgaaactgttgtctagtcttccagctgttccttttacggtctgtctgcttaccaagttgtcaattagagaaaaagtctacaagaagataccaggcagaggctctataattctatccttgtgctggccctgggggctgggaagttcaggtctcctcagaccactctctttgaaccaactctttgtcttgagtctccattacaaattatgcaaagacatcctccttagttttgtctttgtgttagtactttaattttatctgcttggaatcaggaggtttgtccaccccatgtttggtgaccattaacctttggccaatttataaagacatgagttacacaaatgccattttagggaacactgcagtactcatagggccttcttaattaaaacctgctttctacttgacaaaacctacttcccttatgttttcacactataatattaacttgcatgtttatctgtctaactggtacagttttaccagagacaatttgagattacaatacccactttagctatttttgacaagaataagattgttcatatgagaggtgctttagaacaaaaagtgaggaagacttcatgaggaaattttcttgcttgtctaaaaaagagagtatttaatttaacgtaggagacatctcttcctttgttttcttactctgaagattaataagtgttggatttttcactgtatgggtggataaaattgtccagggcccaagttgttctttaaatcagctattataacgctcttttgtgtgtgtacatgttaaaatgagtttttccatatctaaactttctctttttttcagagaaagcataattagccttttaaggtgataattttatatttatctgaagtcaactctctcattttcttctgtttctctgttttattcctctcttagaaaattctaaagattaacaatcaaaaaacaaaaaaccaaaacattcaattattgtgtgctcactctaagaatatatagtttagataaacaatcacgtaaaagtaaacaaaaaagtcatcaaagtactcattttggcagcacgtacactgaaaaggccatcgaactctttgtgtttattttgtgagtcctgaatagcccttgttaccgtacttaaaaggtaaaaagacaagatcttagttatttccaagataaaagaagaacttttagcatgattcagaatctttaaatttcaataccatataaaagtaatgtcaatacaatattttgttttgaacaggaccacagttaatcttctcatgatttatacttcctatatttcctatgttggttttatgagttaaataaattatcattgcttctacgacatgtttaaatttccatatataaatgtaaatatgtgtgtatacatatataaataaaacatttgtaatggtattcatgcaatgcaagagtaatacttttttttaggggtaaattttataaaattcttacagtgctacaaataagtatttactgtgagagcaaacgtggtaaatttcagatccttaactacgttcaagacattatacaaataattaatttaattaataaataatgttttgaagccagaacagtttctaagtaaaaaacatatatgtttatttccatatgtaaggaatttgtaagttgtcattctgttgtaacattaaataaaaaaactgaatagattgaaaaatcaacttttcttggatccgtgaaagagatgaagatacagggcaaacactgcccccaatattggagagagagagagatgaatacagggattcacagcttacctgagcagagactcatgagtggaaatggccacagaaccagtgctaggataagaacttctaaactgtgatcagtgaattgctggatgcttagtgtggacaagtctgagagttaaaaattccagggggattgactcaagtggttggagtggactcacagttttgtgactcatccccaggagcttgacctggttctcacagtaagtatgttaggaaaatcctcacttgttttcagcagggggagggaaaatgaatcattctgaaatagagtagaggactatgttcttaacaaggcctgccctcagcaaaaactagttaactagagtctaacctgctggggtttttttcagagcctcagtgacttgggggaaggaaaacaccaagtctagcctgctttagctatcctgtcccaattaagggtggaagcaggagggaactaagtccacagtccagaggcatagggtcattaaaagactgtgacctaatcgtagaactacagagcacttgttctcccccacaacttaccaccatgttatgaaagacctatttatagcagctcctttcacctggtatatcatgtccagctattaagaaaaaaattacataaaaggaaaaaaacagaatttgaagagacagagcaagcatcagaaccaggcatggcagagatattggaattatcagaccaggaatttaaaacaatgattaatatgctaagggtcttagtggataaagtagatagtatgcaagaacagatgtgcaatgtaagcagaggaatgaaaatcctgaaaaaaaaaaatgctagaagtgaaaaaaaaaaaaaaactgtaagagaaatgatgaatgcctttggtgggctcattagtagactgaaatggctgaggaaagaatctccaagttaaaggatctctcaacagaaaactccgaaactgaacagcaaagaaaacaaagattgaaaaaacagaacagggctgggcacggtggctcatgcctgtaatcccagcactttgggaggcccaggcgggcagatcacgaggtcaggagatcgagaccatcctggctaacacagtgaaaccccgtatttactaaaaaataacaaaaaaaaaattagccgggtgtggtggcgggcgcctgtagtccca

SEQ ID NO: 35455 - DNA, 2292 bp, Homo sapiens
tgaacttatcttaaccgtctcaaaacgcatgtcaaggacaccactgagacttctgagtaccatttaaaaaattgggtagtctggaagtgttctaaattggaccgtttggggtttctgttagggcaactttcccatttacatcttggaacacagccttttgaatatagcccttcgggattggcggggagaagggaccgcgatggaaaaagtcatcatccaaagaatgaagagggaggatccaacatttaggatattttattgacttgctaggcgcgtttaccttatcttcgtattaaccccattttcttcattaaccaattgatgctgtgagaagctatgtaacttgacgagcagtgcccagaactgtttttttttttttctggactcggtcttttccactcaaaaccaacaaaaaaccaaaactcgttcttttccacatcaaaagcaaacaaaaaaccccaaccccaaccccaagagccccactctttcaaaagggcttctccggatcactaagtcctagaggtctttggctaggcctgggtccgatctaaataggaaggtaattctagtgttccgcaaatccttgccgaattccatcccggccaaagcagggacccgggggagcctctggtcgcacccgagacagttcgttaaatactcagtgcacgtgctggggatggaagtgctgacccactgctcaggtacgcgcgcacctgacgccgcttggtgcgcgccgcggggtactgggtacgtgctccgcgcgcgcgcgcccggcaaagttccccgtacgtgcgccgtacgtgggcgcggtgccccagcgctcagcgtttcagcgagtgagtgggctccgtgcccagctgaagtctgggaggggcacttttccaggcggtcgcggctccccctggcggcggatgtgcctcgctggaggggcgcagtcaggcgttctccgcgggcagccggcggcggggccttgccttacagcgcggggtcctcggcggcctgggtggctactgcccctgctgctgtcgtaggcgaggacggctgttagtgctgctgctgttggttcgtcgcggcggcgaaggaggaggaggaagagggcgaggcgacaagagaagaaggaggcaggcgcggcggcagcggcggcgccccgagccggcggaggcgaggggggggaagatggcggacgtgcttagcgtcctgcgacagtacaacatccagaagaaggagattgtggtgaagggagacgaagtgatcttcggggagttctcctggcccaagaatgtgaagaccaactatgttgtttgggggtaagtccggcatggctgtggcccaggggtggcagggcagagttgggcgcccccaggcgacctctttcttaacccctccccccgtttcccctggggatgggataaaacgggtgttcggggaaaagaaagtttctctctagagcagaagttgcacttttagggtaaggaaagaaggggcggagctctagagcagttcatcacttaaaatttttgagaagcccaaaggaaaggtaccgtgggagtttctgacttttacagttaatttttatcagtaggtatgtgtaccagcgaagtgtgggactggtgcgcaagggatacctgaacataggtgcacaaaggagcacaccgtctggtgccgtagacgcctctttttgttctttattttttttttctcttttccaggctgctatgtaactatctccgctggtctttgcaactcctggtttatttcatctcctttcattgttggggtgggggtgattcctgtagaagagaaaagggaatcaaccctgaagttaggaccggaaagaaatttggtgaatttggaagagtcataaaagtctgtgttagagaggtcttcaggagttggtgaaatgagtgagctttacagatctaagaaatagatggtgcgtgtgatttttcggaagtgtattttaaagggaaatgtttgggaatgttggtccatgtgaagttttatcagtttaagtcattcaggaaaacttctagagacggctctaacagtcattaggggcctttttaatgatgtcactgtcattggtgcatcgcttctagaattagaaccttgagctacaacttccctactcattttgtttctttgaatggaagctttatgaagagtcgatgaaaaactagggaaatttagtttgttggttggtatttatttatttatttttgagagggagtcttgctctgtcgcccaggctggagtgcagtggcgcgatcttggctcactgcaatctttgcc

SEQ ID NO: 35456 - DNA, 1188 bp, Homo sapiens
accttaaatgttgtgactttccttgtttacgaggggataattcttatcatttgtgttgttaccaatccccaaggagagcaacagcagatttttgtgtgtgtgaacttactttcaatacaataaattcctagatgtagaaaagtaattataaattgtatatactctgaatacaactaaagttaaccgaaaggattcatttcatattagagtttatgctaaaaataaagaaaaaatactatgcaattacacaatctatgtaattattttctcactaaatgttaatttatttttctacaattaatgctttaagtcctgagatccaagctctttactgaattcctagactggtgttaaaattctacccagaatttacacgtcttaacttgagtgttgagtccctgtgtaatcaatacaatatttggtatgaaaatatttgaacagttaatactcatcatttcctgtacctaaggtgatatttaatggattgtacagtatgagtcatgatattgtgcaacaagaatcctttggactttggactcttatagaggaagaaactctttccatcaacatggctttaaatgaccctgatgctctggcctcattatcacagaaagcagaactcatatcttggcaggaaacaggaaagagaatgagaatgtaagaacagaacattcacgttagagagaaaaagagaatttgggaagcttgaagtcatttctgagagtattagttaggatataaactgggctgctgcaacaaacccctgtcccaaaagaggggggtttaaatgagatagaattttatttctcacataatagagagcaaggtaggtgagcagttcagggcaggtggcatgtcctgctcagtgagaccatctaaggatcctggatactgggacagctttgccatcattaacatgtgacttctttctctagatgtcaagcagctccattagatgtctcatttcccagccatcaggaggaggaaagagggaatgaagaacaagcttcttcctgtgggtgtgacccagaggttgttcgtgtcacttctattcacatttgcttgtgtagaacttacacaatcatacttaacttcaagaaagattgggcaacatagtttatagcggggaggatttatgccctgaaattgatggtgtcatcttttcatcttccctctctcaccattagc

SEQ ID NO: 35457 - DNA, 884 bp, Homo sapiens
ctctggagaatcctaattcaccatttaaatatacacttgctagatataggaacattagtttgtatttggaacatttagatagttatccatatatcaacaaagttgttatagtgatcaaggcagcagtgagcctcctattttcttctctgtcagacgttttgtcctaccaaacccatggctggaattgctccaaaagtggcggcaggggaatttctgcagggaagttccccaaaccatccagagatggggctggttaagattctaaagaaagaagcactaaacgccagggtgatgaatctaaggaatttattaggggaacttacagagcgctgctccagtccttgtggcggacagtgagagaaaggggctgttctacctaggtatgtctgaaatgagggagtcatgtaggaagtttttatcaagggttgaggaatttggctcagggcccggggccagtttcttttagtgttttgagcaacaacctagataactttttcagtgtctggaaatgttcaaggccgtggtttcggttcaagcctgctggaaaaaactgcagctggcgaggtcacagagcagccaaggcacttcatgatttggggtcaggacatagaaagaaagggtgagggtgagtctgggggaacctgcacagaagtaacaggtttatctaaatggtatatgtaatataatgtaaattatatgtattttttgttatagttacatttttatagcacacacatatatgtagacttcatgttttttttaaggttaaagacttatgatagttggtagtaagctaattttttcatcttctttccctgtattatgtggaagagattctttagcaatcaatcttttaagatatggactcctttttaaaaacacac

SEQ ID NO: 35458 - DNA, 1778 bp, Homo sapiens
tctaaatcttcttcttcttcctctttctttctttcttttttttttttgagacaagttcttgctctgttgccagtctggagtgcagtggcatgatcatgactcactgcaggctcgacctccagggctcaagtgattctctcacctcagcctctcaagtagctgggactacagggatgctccaccatgcctggctgatttttgtattttttgtaaagatggggttttgccatgttgcccaggctggtcttgaactcctgaactcaagcaatccacccgccctggcctcctaaaacgttgggattataggcatgagccacgacacctggccctaaatctttttaacgtccactttctgatgtagttgcagccagaaatacacattaattgaatgcttgtgacagggatcacttcagataatattttgtttatgtaattagcttcccttaattaagggtcaaacctgagggacttcttcaaccattgctatccaaactttgcattaaatgcttttagttttactcacggtaattctattccaggacagataaatcccaccaggacattctgacctggttctgtcccctgtacacacaaacagataaactcaacttcagctccaaggtcctcgtttttgacttgttcatcttttccaaggctgaattgcagagacattgcttctatctcgttttcattttattttcccttcttaacttccaactttttctttttctgatgctgacatggaagcattagcttgaaaaagctgttgataactccctatatgtctgggaagagaagcaggatctgactgggacatgtagcttttacatttctcctctcctttagcacagaaattcttgcaaaactttcttgtcatttagaaattttagtaggtataggggcttaaaggaaaggaaatagagaaaagctgttcttcattaacaggagaagacctcgggctgctgaataaaggagagcaggttgggagacaggcaagtgagagacaggagtttgagagcagtgaattagcagaagacttggaactgaaagaaagggaaagtgaaagtgctggaaataaagttatgtgtggggtaagtgatgaacacatcatatactcatacttttctttaccttggtttcactcctatcagacaaatgcctaggactgtgtgaatcttgtccaaattcatcagagaatttttttattctatggggaggaaaaatgtatggtttcatgaaatacttcttgccttcctgtcttttcccctttcaattcattctgcaccacgtatggttagcgaactgatttcctaaaacagtctttcattatgtcactttaaaatggaagaatctgtaatggttccttattgcctattgtataaagtataaacatctcattttatattttaaccacattcagcattatttcctactgtttttccacgcataccttttgctatctcccctaactctacactttttcttggctttgcatttttaaattcatttctatgaaacacatatatctttgataccaacagttagattagcgctacctgactacagatgatacaaacaaatacgactaaagtagcaatctttatgtagttattttgcctggaaagcctttttttcttattatcataataacataaatttgtgtagtgttcacattttccagtcctttatcgtgcatggtccatatcagtacttctcaaagttggatatgagcaagaatcattagtaaagcctgagagagattcctgtgccccactccc

SEQ ID NO: 35459 - DNA, 923 bp, Homo sapiens
cggacaagggaaatacagtagggtgctgaagagtactgagttcacttgaggtgaataaacttaacatactttatgaacttaaaataaggccagttagaatggttgtgtggtttttgccccaaaatgttccagctgtgcagatacagacaaaaagtggagagttgaatttaaatatgggtggcgaggttttatcaggtgaacatgataagggtagagagaggaaattggactaggcatttattataatcaatgagaatgattataataataacctgggtacagacgaaactgaggctatggcgactctgagagactttgtaaacatcaatggattgttggttccagtggggtcaaagaactgttgggccaaagttctacaggaagtgagctggtaagataggagctgggttgccagagagtgcaatacttgaaattaaatcatgcagaagacaacagttttgtgatgtggcaatttggcccagctgaacttttttttttttttttcccccagaattccttccctgcctgtttctatttagggagggtggttgtgaagtagcagccattttgtttttatgctcaaaatgttgggcaggatacttttgtagctcacatatgttgttgcttctctgctggctcatttgatggctatggggcagcagctcagcctgccaccacctctagatgtttcttcagcttctccaactccaaggctgggtgagtgtttgctccctaatgaggtacactaactttttctgcaggatgcccatgttatcaaggttggaggcagtgagagactggttgggttccagtctgtcctcacaggtttccagttgtccttacttttctctactttatttccagcctccctttttaactatatgctttgtggacttcaggctgcagcatctgacttgaagaca

SEQ ID NO: 35460 - DNA, 871 bp, Homo sapiens
tgattttgttaaaaaatagatccatgttgaatttcccacatattaaaaaagcaaggtagacatatttctcaaatgcattccacacatgatgcactttgtaggtacttataaatcctttatcttagagagtatttcttctcaagtttgctcattgttggaatgactccctgtgtaatttccacttacatttagattttgttgtttataacaatgtgttccattcagtacaaaagggaagaccatctagagatgactcataatcttatagaggtggtttagtcatagcttttctaattctgttcaaccactggagctattagctgtatttccttctcccagatccaaaccataaacacccgactgccttagcatctgccagcatcaccaggcatctggaccagtggtaacggtgtagccagaagtcacacagagttgtccgggtcacttccttgggcaatcttatcctgaccttggcactaagatctgttgggtgttgtccaacaaaagtttcctcttgtagtgagaattcactaagagtgtcaaaacgtctttgctttttgtgggtatgcttggcaggcaaccctatttcctcatttctacttgatttttctcaacctcctgactgtgtcagcaattgttgactttttggtgagtgttagtaccaatttgacttctctggatgaaatagctggatactgatttttattttactttctgttacaaaggtaactatttgtcttcttggtgacataagtgatctggctacctgcaatgtcattttacttaagctgtgcagagtggatgaacatgatacaaaagcatggttgtgttagggggacagttcttggtctgcaaacagtgtattttcaaa

SEQ ID NO: 35461 - DNA, 1307 bp, Homo sapiens
aatttcagcctggagattagattttcctccaacctccaaagccttcttaaattgtaagaaatcgaatgacttctgaaatgggaagtagagaatgacacttgaggattttggattttttttttttctttgcacgttcctctggggagagagctgcagttgtgagcatgccaattaagtcagtatcagaacacctaatggaggtctcattctcaggaaatgggacaatcttgtggagagtataatatcagcagaacaggaggaaaaaatgaattttagttagaataccctcactggaatgtaatagaggaaggaagtctgagagttgaaaaaatgccaggaatttagtaagagtctcccggtgtccctcactggggatttttgtgacctcaaagacacagagagctttcattatgtgccagaatgcctgatggtccaagaattcttacagagcaacatagagagttattgagaatttggtgacgaatgagggtagaattaagaatgcaaaagttttatcagtgggacaggcgcattaatggaggacagagataggcaaatttctcctctcctacttcaggacttacaggagccagctttgggtttgggttgcaacagtggctattgattaggtataggaaatgagagacagagagaaagagagaactcaaaggtcactcatagttttgagcattgcaaatgaggataatagtatcgccagttataacacacagaagacaagaaaacactttgttgaagaagggtgattttgatgttggatagattgcttttgaaattctggttggccttcaagggggagctctcaggcaagtcaaatttggaaattgatgaaaaaaaattaaagctagaactctcataaatgagattcttggagctaggtataagatcaccagagagggactgagggacaaaggtggaagagactgaacataagaactttgggaagagctgccttcaggataccactaagggagtgaaaagaaaagctacagagcaggagaagataattataacatgtgtaactgacaacagattcttatccaaaatatataaaatactcctaggaatcaataagaaaactacagtaaacccgatagaaaaaggggcaaaagtcttcagcacattacaaatggtatgtttgtataatggatttgtatccattaattggatccacatggccaattaatatatgaaaagatatgtgacttcatcagccattaggaaaataaagattaaaactgcaatgagctaaaacagaatggaaaaaagaatataccaaatgttagaaa

SEQ ID NO: 35462 - DNA, 1473 bp, Homo sapiens
gtctatatgtgttctcttgtgtaacacgggaattctttaaaatgattatttcaaattctttgtcaggcaatgcctagctctcaatttctttgtggttactagagtttattaggtttcatttggtggtgttatgtttacctgattcattgttatctgcgtagtcttgtggtagtgtctgtgcatgtgaaagagaaaacacattgtccagtatctacaagctgtattgcaggtaaagacctcttgctgggtccttgtgatgatgggattgtctctggaattatagtcaagtgcagttggaacaaggacatgtggctgctactgaggctgcagtgtggtctgtggttggtaggactgctatgaggtacatggatagatgtgattccttctgggtcctgaggagagcttccactgggttagtggatgggttcttgggcaggcaagactggattgggagtgtacctgagagggccttggaccatgtcacaggggtatttctaagtctacagtgaagatctaggtctgcaggcctgcctctgggtcatggaggagcatgcctcctgtgacgttcctgggcaggcattaatgttccaatcctggcttagcaggggtggagccaggacatagggcagcttcaaaatctgcagttgggccaatgttgggccagcctgactctgggagtgcaaataagtatctcatctggtgggtacatgggcaggcagtaccatttccaaaacacagctaagaaggtgtgaagctaagttatagggttattttaagacctgctgtaagactgaagtctgtagccttgccttttggggggcacagaagggtgtgggtcctgtggtgaaaccctggattgtcaggaattctctcagaccccagctaagaagggctggggccaagtaatagggttgtttcaggatctacagctggtacagaatttggctggcttgtcatctgaggcatgggtgtgtgtgattcataccagatatcttggcagatgtttctagtgacaagaccaaaggcaagtgtgactatagccaagtacacaggggagtgaggtcagttccttgtctgtggctgagactgccgttggcaagcctgacacctgggtgtgggcctatcctatcaaaacagtcctcttcagtattgcattccactagggatttgcaacctcctgccaggctcccaaagctctcacaaaggcaattttgtccatagatgactgccaagttaacactgctataggggggtggggcatgagttggggactgtctattccaacatcacctccttttctttttttttttttttgagacggagtcttgctctgtggcccaggctagagtgcagtgacatgatctcggctcactgcaagctctgcctcctgggttcatgccattctcctgcctcagcctcccgagtaggtgggactacaggcgcccgccaccacgcccagctaatttttgtatt

SEQ ID NO: 35463 - DNA, 688 bp, Homo sapiens
gtagcagggactacaggcgcccaccaccacgcccagctaattttttgtagttttggtagagacggggtttcaccgtgttagccagcatggtctcaatctcctgacatcgtgatctgcctgccttggcctcctaacattacttttaacatgactcgtcatactctttgagaggccctaatgccccatccatctttacttactagcagttccaacccaatcactacaaacagccagagtccagtcccaagtaggaattggaactcatgatccattgaaacaacgatgagtctagatttataatgctgaataatcaaccctattgacctcaatcattacgaaatgtccatgtttcccagggcatggttcatcacttggacttttatctccctatggttctattcatgctgtaaactgacctgattctgcacccttgcctaacctctctaaactacaaaagtgctttccagaaactaaaattttcttatatctttcatttattctttggacaatcccttgactctccatgagttacttagcctaaggtttgtagagactccccttgcttgtaattgcccccagccccttgctaccacttacttcccagtaagctcctgctcctttgctgcacatgcaaccatgatttatcttcattgatcattttctctgaagttatctttagttcttttgc

SEQ ID NO: 35464 - DNA, 459 bp, Homo sapiens
aatgaaactgattgaggattcacaagacgtggaaaagctaagcacaatcatgaggaatgtaggtaaatatattctgaaatgaatcagatgactagaatgacaacttatgaaatgtagcaaccagtttacttgcagaaccaacactgacatttgttacctggatgaaggtatccgtgaaatgaggtaaaaggtcaaaaagttgctgcagcactcttgctttgccaaatttttaactgcactttgctaagctcaacaaggtttcagttaacatgcagagcattgtgaaatcacaaattgcatagagttactcaaacctgaagttaccaaatatgccaattaacaagtgttgctataggataatcaattttttttaaaattacactgttaattattatacatatgctacccaagtctttctcattgagtaagaagaaaaatttgatttattctttatctgca

SEQ ID NO: 35465 - DNA, 1073 bp, Homo sapiens
cacagcgagaatacagccatctgcaagccaaggagagaggactgggcagaaaccaaacattgatctcggactcctagcctccagaactgtggaaaaaataaacttctgttgtttaagccacccagtctgtggtagttttctatggcagcactagcaaacgaatactatggccgcaaagatccatgtaagttagagcagaatagtgcaaggtgggagagttttagaagagcaagtattaaccattatgtagtatcctgatgaagtgaaattcatatcctacagaggaaagaaagggaatgatatgggatagaagtaagaaaaaggcctttccatgtttggaaatccactcagcagaaagttccacatttcttcccaggacatagttagttgaacagcagcctatggagcggatatgcaggggcatgaagtaggttaaaagaaccggttgagttagccagataagaatcaccacaagcaacgccctctccaacagacaccagacacacacacacacacacacaaagcatcctacactccctgcccacacaaacagaggaagatgagagtttgccatagatagtgtctgtatatatctttctcatacatccattgatgaggtaatggatatgtcccgaaggttacctgagggagcctaaggagacaccagaatgatgcaattagacagccagagatgactgagaagcagttggatcccaggagcccattcataaaaaagctctgtgaagtagtaagtagggcagatgtgtgtcctcagaacaagcagtaggcattggacttatggctcaccaggaagcttgccagaagatgacattagctgttgtcagcagctagataataagtagctacactgtctacctgagaagtttatgagaccagaatgagtcatggacccattgataaagggcgcttccccactttgctgcagtcagaaagtcaccaggtagctggtggtgtggggtaataggagtgggaaggagatgtggggtttggaaaagaagtctgttaatactttcaaatctgactgaaaccactcaaaaacatactttaatcta

SEQ ID NO: 35466 - DNA, 1191 bp, Homo sapiens
taacattaataataaaagaagaaatagaagaggccaggacgtctatcaatatgaaagaataagctcctaataaattgtccttgcatatgacaactattaaaaaatctatagaacaagcatacaaaggccctagtaaacgaactaaagtaggcagattttagaggaaaattaaaacttggaggaagtatcttgcatgttataatttccctgtttttgctgctgtgacctgagggcagctgtggttaccacaacagcacaagttggctaagactccacagaaaacctgccagaacaacaagcgaatggagcctggaacaaccagagccaccagacacaggaaaagggagaggcaacaaagagaaaccacaaattctgtgaatgagtgtaaacatctttggctgacctctgaaccaagaatccatggcgaagcataaaaacaatctgagctgacatttgtgaagcactaccaacctcaatggtgatggagtttgctttattttgagtttaagcaacttagcctctgctaaaatgagagcactaacattatttggaagaatacaggagaatccaagcctccgcaacataacacaatatccaaaatacgatgcagtattattcaatttatgaatttccagaaaaatgtgacttatttgcatgggaaacaaacaaaatgataaccaatagatggtagctactagacagtctgagatgttagaattagcagagaaggacttaaagctgctactagaactatgatcagtaatgtaatgaaaaacatgtttgtaataaaaaaaagaaaatttcagcagagtaatataaagtatttttagattaaaaagctgaagtttatgaagaaacacattcactatatgggctttgaaacagattgggaatgacagaagaaaggagtcagtgaacttgaacatagatcaatagaatttacccaatttgaaaaacaaagagaaaaggtaaggaaaagggaacagagttcaggaacttgtgtaacacggtaaaaaggtcttacataatataattgaattcccaaaaagaaaacaaatgagaaaaactagcagaaaatgattttaagaaataatgactagaaactttttaattttgtagaagacatacacttataagttcaagaaaattagcaaaatctaaactatataaacaaaaagataaccatgccta

SEQ ID NO: 35467 - DNA, 1815 bp, Homo sapiens
tatatatataagttttcttaaaatactcggttttggtagttacctaattgtaacacacattttgtttattatcctatatcccccgcctaaacattttaaattaaaaatttttttgctatctaaaatataaaaaagaaatcaatgtcacaccatgttctatttataatttttgcttagttaatacatatcaaagttactccaattcatttatagtcatttactttcaaatgaaaaattgcaaatgaatatctttttagtataatttctccattgcaaaaatacctataaattttaaataataataaaatcatttatgtacactaacaggtgctataaaattttacttaagtattttgtaatggaaaaaagctacctaacattataaaagttagtcacatttattcatacaaataaatttattaatgttttactagccaagcattgtactggatgttacagatgcaggtatcaataggacaaaggtctttcacccagtctggtaaaaaaagagcctctagaatctaaagtgaatgattatgacctcactttactattactaataatatcataaattaataaatattttttatttgctgagtgctaacctaggtaagttactcaaacttcatgctcctcaaatgaaaagcaaatatattaataataatattaacttcccattggctataatgagaaataaatgagctaatgctctgtgaaatgtctgggatagaataaggttcagtgaattcagtagtaattttgttatttatttatagccccagaatgagagaaatagaataataaaaatgaatcaaatatatacacaaaagtctcataaagcttttgtttctattttacaaaaaaataaaatattactgctaacgatagagtcagggattatagagagagaaagtggtgataagaacatagtgtttatccctctttcctaaggattcactaacaagtttattagcagcagacaccatccagggattaatgagtagctataatcttgtcctttctcaatgctgcaagtcccaagggttatggaagtggaaatatgggcgatcatagaaggctccaaaaaaagaagagttaggcaatttgcaaagtaaacccataatctttaactatttgcaaagaatagtcatgttgagattagttgacctttggagggttgactgccatcatttacagaaactgacaacgaattcttggaaaagcagtcagggaaaaaagattaagcactatttcagtgccagtatgtcaacatcaggctagtgacttgttttaaaggattacttatcactgagattaattgaataaaaggatttcatttgtgattatataaaagacagtgtatctgtatatcctatatgtatatatttatacaattcactaagttatgtaactaatatcatgatatgttaacatttaagacctaaattttaaaatagtaatattttgaaaaaaaatccaatagaattttctctttttatattacttaaaacatatattcatactcactattaagatttaaatggatatttaattttaaatgacttaaggattttatattttgtgaatgttaagtatacctatttttttaaagtttatgcactttaggaagcagataaatctcgccattcacatatttatctttttgcataactgtggtcaatattcacaatattgagcttaaactggacttgggctttcaaaactaattcacatagtaatttctgccttaccgtgatttagttttatatgaatgtccactttggttaatatctgttttaaagaacactgccgcag

SEQ ID NO: 35468 - DNA, 668 bp, Homo sapiens
attaaaatatcatgttcatcaacagagaaactttgtcataatgatagccctttcagtttcataataagctctgcttaaaatcaactgaaaaatttctcccttctaagagatggttaatgaacttatatccatttcatggactataatattcatagataattctgtaatatacaaacataaccatatgtgagtaacaacactgttgaaaggaagctgagcagtccatgagcattcaactaacctttctgtcaatggtacatttaattgcttataagctagtatcaaatacatcagtatctttacagaatggcctcttagaccaaaaaaaaaaaattactgcaaattacaactgttttcctgatcaatgatatttgttcaaagagcagtgtcagaaggtcaatgacacattctaaactaaagaaagttactggaaaacatagtctgtgttagcattaacctaacggacattgctcttatgactttaatttttagaaaatttgtcagagacttagcatatcagattctttaaactcaaggagattaaggtaggcaataatattgcaattaagatgctaccattcaataaaagcttctactctgtatttttttcaaaacacatgacaaaaaaattaagcaaaagatagatttctttaaatccaacatgtaca

SEQ ID NO: 35469 - DNA, 2132 bp, Homo sapiens
cctcatacaaagttcatgactcaacaagatctcgtgtagaaaaaaaaaatggtgggctgacaatagaataatagtctggcccatcatgtacacaaggtttattaattaatagcaatgttattctattttacttaccactgagcatctaatctcatcaaagtgataagtatgcaaaaataaaagtataggattattaaagagggtaaattaaaaaaaacttcaattttttgaagacttgtttgtgaataagctcatgtaatttccatgatcaagtaggtcaataagccaacttttcagttatttacatcttttaaattaaaaagaaatttactattttaaggtgcgtcttttgttccaaatgaaatcaaacttccttatcaaagaatgcctttcagaaatactaagaaaaagcaatgagatctcattgtccttatgtagcaaaatgtgagaagttgcacaacctgacagagaatgttctgtaatattttatctcactgttgtcatcaaaatgttacaaattagcatcatgccaaagtggatgaggtacactttccagaaagcactttttaattgtaagccgatattaagatagagtgaattattgattcttattactaattagaaaatgacacaatataatgaaacaaaaaaaatcttcagtagaggcagcttatacactgttgcaaaaattgtgcatgtaactctcaaatgtcacatgaaaatatgcacattcaaatcataaatggaaagtagaatcaaataattaaatctagaaaaatctacatcattaataaggtcataaagtaaggatatatctgacaattttataataatttgaaaatctaaaataacgtgtgtgtgtgtgtgtgtgtgtggttttttgtttcttttgttgtttttgttaatttggggggtgttttttacttgtttttgttttggcttgcagcatttgcaggaaaatgggaggaataatattttcacaaccagtgcaacaaggcaattattatgtaatttacaagaatgtctagtgtcttccgaaacctggccagtaatttgccaggaaaacgaaacaaaaagcaaataggctgtgagcttagggtaagaagacaaaatgctgacttaaataagtttatgactcatcacttatccttgccttttctaagtgttttcctgaagggattctatttattactctttttataaagttgacacatcttttctcagagttaaaatatttcttattgttttgcagaaatgtagtaaacctgaaaaatacacattaaatcaaatgtgtgagcttttgaatttttattatgtataaaaatttgattataaatctttaattacatcacacaagtttatataaacttttaagaaaaggtgtaatatctttgtaaacaagtaatatcttaataaaacaagtaatagcataagaggcacattgatttgaaatacaaatgaggtatgcataagaaagtcacacctaaatttgttttaaaaggtatgtaaacagtagctgttttacttggaaacaaaaaaaaaaatcactgaatatagtcctatgttgatctcatttaaagcacagctttttaagatcacttgaaaacaacagatcttttccacaagtgtttcacatgtaatctatttacttcaatagaagtcacagtaaataaatggaatgctctttctcttattaatttatatttttattttattgcatattttatgcataacctggcagtaatttaaaaaataaaaaacaccatatttcccatgttacaatgggatacgtggtattttatgcctgcacagaaactcatcccatgaatacatatatttcattaattaataggccattcctccaattttgaatatttcgattgtttccagttttatgctgttataaatgaactatgaatgtcatttcagatacgttcttagggtagattcccagaagtggagttacttggtcaaagagtagaacatttcaatgctcttgataaatattgacaaatctttttgcaaagggttgcacaaatttaccttcccattagcaaagtaagaaagtttctattttagcaaagtaagaaagtttctattttactatatcctctttcacactaaacagctta

SEQ ID NO: 35470 - DNA, 876 bp, Homo sapiens
cctattcaaattaacaaatggatgaactctccttgaaaaaactgaaggtgctggaaaatttatttgtaagggtgcacgtattccaagaggcttagaagaaaagattagcagagaggggcatgcctggaccattaaatcaacagagtatgaggatgagacagaaagagtacagatgaatgaacatattttcagaaaagtatattgtcaaacattgtagtaactagaaataatgttgtcaagagaaaattcctgtcaacttttatatcagattttattttaatagtaaatatataagctttgctagaaaaagaaccttgggactcaggaggaagttaattagcttgaagattccaaatggaatttgggttaaattttacccaagtacaaatatgattcatgatttatcacccagtctaatattcaggagactttgcccagggttccaaacaaaacattttgtttgtttgtttgggggtggggtttgcaaagatgaactccgaatggagagggtgcttccagtaggcgtgggtcccatgaaaaagagtcagcacacatgtgttctgctcagaacaaggaccattcacaggcagaagaggcttatcattcagtatttgccaagcatttattattttcaagtatgagtacaatacgatgtagaagagacttggagtctagttggagaaactgcagatatttaaaaaatgacaactcaagggagtagttataaaaatgaaataataagcgcaaaaactgagactaggaagaaagctcagtagtgaggaagaggcaaaaggaagatcagaaaattaaaaactagctataaccttaagatactatgcaatcctgttctgtgtcaaacactttacacaaattatc

SEQ ID NO: 35471 - DNA, 2216 bp, Homo sapiens
tgcaattttgagtttgattaaccacacctaaggaaaaaatgcaaattttctggaaatgatattgcataccatttgggtgtattgtacctctgataccagccttatacacatcctagaaaagcacagatagacaaaagaataagcaccaaatgaatgcaataaataccttgcaagaataagaaaagtgtaaagaaaaagagttccttatctatagcaacagttatatagagtcaaaatggagagacaaatcagagtctcttttactccctcccccagcctagtctccctctctggctccgttttccttttctccctcctttccccacttcggccctcccatttccgtctctttttcagcaatatttacagaacaatcctccaccacaccactcacctgtcgtcgttttgccatccttggtcccctagcagcaaatctcgaaacctgtacctgggaggcagagggggcacttcgctctccaaatcaaccatccttcctcaaagagtgggaaacatcaaacaacaaatggaggagaggagggagaaagaaagaaaatattgcggagtacagggagaggactaacaagacgctgtggccgagagagggatgggagaaggggaaggggacagggagggggagggggtccgcttggagccggaagctaaggcttgaaagggggctggctcctctttcccgagggtgtaatggggatgatgcaaacccaacccaggagcaaaagtctggctctgacaagaatcaacgctgccaaggaaccgcccccaggctcggcaccgcctctggtccccaggactagggggaggcgggtataaaaagttacttcgccgaaaaagacgcgcggtgcctagaaagaggggagaggggtgggagtgagcgccgcttgatggtgaagcactttccttaaaggcagttgccagatcctcccagagggcagcctcccggctactgttccctcgggcgggcttgcatccggcacagccctgagctggcgggaatcgggggcggtgggtttcggccccagacgcggccaacccggctctccccgcaatctccctgtggagatggagctggaggcccagccaatgagactccccctcattagcatagcacagtgacggcacgggggtgccttggggacaaccaatgggggcgagctaattagcggattgcggggctccagacccttctctgggaggaggggggccagggtgcttggagtgttccactatgccacgagctccctcgctttgattgccttcagtccaggtgggcgggatgaaaaaattgcacgtttctggaaagggaatccccactctcagccccaggaaaatcccatttttttctcacattctgaaagaagggaggtgtttccctgaactcggggaaaaagaagggccaccttaggccgctgaagagaagcatttagatgacagggaaagcacatggaaacgcactgaggattttacagtggtgagttgctgttactgctgtcgctgctactagcagcgttgtgggcttccaggtggcctggcctcagccttcggtcccctcctattagtggttcacacggaggaagaagtgagcccgagagaacagggtctgtttttcagtaagaaccactgcttacatgaaccctgctacacaagctatggttctatttgcgcttaccgttctttccttcaaaaactgattgcatcagagtatatacagaccgaataccaaccacctgacagcctgggccggaggataaccatatggcttctcctgcccttacttaagaaccgctctgtgtggaggaacaagcttgttccttgataaatggatacgatgtgagagacaataatcaaagaacatacagagggatttggaaatacctgtgaggtacacatacttcttcgaggtgggggtcaaggaagacattgaaaatgaaccaagccttctatattcgttcgcagcctactttagggaaaagagcaaaggtgaagcaagcagagagaatagtatgagtagaggcatagggattttttagaatatttggcttatccagaaaatagtgattaatttggcatgattaatgctcagtagaggtcatgtagcagagggtttatttaagaagctagaaatgaaggaagaaattaccaaaacttgtaacatcaaatgaaatacaatgactactgaaacctgaagaatagcagttgaa

SEQ ID NO: 35472 - DNA, 1094 bp, Homo sapiens
ggattattaaacctatttacgtcaaatgagagtgagccagttgcttcatacacatatacaaaaagtatttagaaaactaatttcataaattgctagaaaagcagacccccaaattcatcaagcactgcattcttggcaaagtttgtacacattgtctgggtgctgattgtgaaaacattgcctaaaccaaagttttgtatgtgatttcttttaaagtttctcttatttcctgttctgaggtttatacacaatagacccgaatagagtttgaataattgaagggtttatgaaatccagaggatatcaccagctgctgatttgcacataccaagaacatgaacattttccaacggagaatttccctagcttaataagaaaaagtccaagagccggtcacagcattaacatttagtgggagtgcagtgagaattgggtttaacttctggcatttctgggcttgtggcttgtggttgattttttatttactttgcaaaagtttctgataggcggagcatctagtttcaacttccttttgcagcaagttctttcctgcactaatcacaattcttggaagaggagaactggacgttgtgaacagagttagctggtaaatgtcctcttaaaagatccaaaaaatgagacttctagcaaagattatttgccttatgttatgggctatttgtgtagcagaaggtaagattaaaagagactcttttctgaaaactgtattatgaaacatttgctaatgatgcttttcacaggagtaataaaaatttgatttagaaaatgtgcttaagtattctgtaacttgacaattgagtggcttttgacattgttgagtttaaaaaatgtaagaaccttatttgaatggtatatctaaatattcatcataattatatttaatataaaatagaataaaatgttttaataaacatttctgaaaaactatgatctggaataatcatttcccttgtaattatcataaaatgtaatttacttttttgcttaggagtataaccaaaatgtattatgtgaaagcattaagaaggatgtgaatatacatagtcaataaaagccatcaaatcataatgatt

SEQ ID NO: 35473 - DNA, 3281 bp, Homo sapiens
cagttaagttgttcaatagagatttttttcctgtagttgtatataacatatattcttgaagagcagtcttttggagtagtgaatatgaatgtaggagtttttttctgacctcagtaagacaatttctggattcataataaaatttaattatatcactgcttcttgatagattaaaaagcttattcttggaggaggtttgctttcctagtttttgataggtaaccagttatgtgatagatatttggtaaacatttttaaactgaatgaattacatattattcataatttctaaaatcttttcacttagtaaagaaattttgattgagtgaccattacatagcctctaggaactgaagaatattagcaaataatacaaatctctgtttcagtcttccaatctagaaaataaaagcagatatattcttatagttatacactttggtaatttaaaaaatattcaaatatgtttaataccttttgaaaggttgaattattttcagttatattttctaatgttattgcttgttctttggcttgtaaactttatatgtagccactttttaaatgaagaaaacaattatttccttgtacatataaatattataattagtattttaaaatgaaacctttttgtatttacaaacagttccagaacaatgtcaatattacctattgtaaaagacatctttttctgtttctttgtgtaaatatttctgtcttttcttactaaatttatgggaatgtttctaacgtttcatacctacatactgtttgctccagttttacatagataccatttgtcatataagggagatttgttttatttctaatctttaaaatcaagaatcaatggcaagtttaataaacagtttaagttattaaaaagttgaatttgaaatattattaaaatagagtacatcaaagtatatgtgataattaaacaatagtgatttaaacatcttatttacataattgattattgctgacttgtttcacttttattttatttttcatcaatgtgtgtttaaatgtggtatcagtttctactggtgaattgaacatcggcactatatatgttatggtgaaaatgatataaatctgattatttcctaaaagataaagcacaactttgtatttaaagcaatgcttaggccagcctcataattttcataaaagcacatgtaatgcaaaagccaatggagaaaaactacatgaattttcagtggatatcagactcctaatttattccttgtttcccaaatactctctgaaactaaactagttcgagatgtccatcagttctattaatctaccatatctaaaaaatttttacttaacagagtagctttgatcatgaaaaatactcacatatatttcaatatttgcttctgtttatattttccacattgaatactgaataccaaattgagaagatagtttgaatactatcacaatctgctttattcaacagcataacattttagcattacttctgctctgttaagagtgaactttcttcaaaaaaaacactattcattactaagaaagaattatagccagcaggaataatttgtaatttcagctttctatttgttttctttttttaatatattgggtactacatagaacctttctaatgcaatatattgtctacaataacatttccaattgtgtaggaacgttaattgcctccttgttttaacagtctggctcagggggtcactgcaggctactaagaattgggtcagatttacaggacaaagtttaaaataacagtttctcaatcgtaccacctaatttcacctttttgaaatatagtatgaccaaggttttgaatatattatgaccaagcagattttttagatttagggtctaacaattgtgtactatatgaaattaggccacagcccagaaattccaagatgattaaagtgaataaattaaaactctactgaaacatgttcaagtaaatactggctgtgttgtttgggagacatgttttttaatcctggagatttagagtgcagaaacgttatttcaggtcccagaagactttatagatcagagattgatggattccattacagtcagagaaaggagaatagtggtctaaaatcctaaattgtatgtttgaatttcagtgtgataaataagaattcccctttgctcccccaaacccccatattttcagagatagtagtatgtgtatttatctatatggtgtgatttaaattgtgcgatggcccaattggcttcaatatctcatctcctcctaaaatactttacgtgttgatattaatattactataatttcaaccaatctgtcatttacatggaatgacaaatacactgaatacatattttaggatagttaaatttagtattattcataatttactttgaattattatcatctgacaacttccctgaaacaatttcagtgggcgggggagggtagaaatggatgttgatgaggataagaatagaacaaagtgattctggaagatggggttttcccaggtaggacagatctgctggttgaagtgctatagtgagtgctataagagaaggggtagagaaaatgcccacagaaatggcacgagcctgagacgtctgccaaggcaagctttgcttattttaaatttaggcatatcctgggaatgcatatgctactcttttgcctacatataatttaaactaaaaatgaaatatctaagtattgctaactaaaattattcttaggtagaagtaagttcccaaatataagttcaaaagcagattggtaaatgttcttcatgtgtggcctttggtttctaagatctgagccagtctacattgacccacttttatttgcttaatcctcgattgtttattctgcagtcttttgccacttttcattcttcccagttatgccttctcctcctccccacacacaccatcccccacctgcctaggcctttgagattctgccacccaatctatcccgtgctcagttaactaacgtgtactttacccatttcttcacaaaaccatagtacatggaaaggggatgatgtaattgacaaaaaagtattgcattttagcttaaaattataaggagtcataaaaagatagctcagaggaaataaagtaactgaacatcaaaaaatgaaacaataaaaaggaaagaaaaaacatttgacagaacacttttatttcttctgacattttaacttagccaagtttttcataaaccttgttaactggaaatgtaatagatagaaaagtgattattcttccag

SEQ ID NO: 35474 - DNA, 944 bp, Homo sapiens
aatatttctaatttagttattatattctgttcagaaattgtgatggattaggtaaggtacaggccaatgacaagtgtaacaaaaatggattttaatagagtagaagagacagaccctacatagaatctgccaataaaaataatgagctagacattcaatacagactgtagacataactctttcaagattctggctttgaatctaataggaagatcagaatattgcttgaggaaagttgtgcactgaagggataattaaaagaaaaaagatggaagacaccagagcagatacagcaaaaggggagctgcaaaggctgaacacatgacttacatagttgccctgagaaaatgcgaggggaaaggactcacagctactgtggaggtattgtgctttggtggcaacaggactgcttacaaccttgtgacaggtggcaacaggactgcttacaactttgtgacaggagatgggaaggaaaatgagcagtaacgttggaaaatggtagaagctgatggattctgttttgaagtatgagacatggtcatctgagattgaatagtgtgtgggcgaaggaggaggaagagtactaggtagaatagaaaagttttgaaatagtcacagctgagaaagagaatgagtacattgtagatgaaaggcagtgtcaaaggtccagttaaatttgactcattcctgctgttgtaaacacctatcataggacaggagaaaatggtgaaaacacaagcacaggtctacttatccagagattttattctaatataagacagtggaaaactaaaaagagataagccaaatatccaagtaataaaaatatttaaaatatattttatgtatcactgtgtacagagaaatagaaaatccaataattgagatagaaaataggagggaaggaactggagatctgttttacataggaagtcatcgatgca

SEQ ID NO: 35475 - DNA, 783 bp, Homo sapiens
agaggctaaggttactgaagtggaacactgccattttctgtcccaggtatttagtgacaccaatttatttcatactgctctagtgtcattccacaacttttgatatgtagtttggctggagtagggagtttggctggagtagggtgagtataccataaaagatttactgtgttttttggaggcaggtggggagagggaattattgccaaaaggtgggttattttatgtatttatttttttaactccactctgtattttagctaagagaagcagctttggaacttctgaagtctgtacatctctgtggcccccaaggattacttgttttaaattttgttttaatagtctaagtttatcatgggtcaacttgattctttcaaggcttatttttaagcttttaaaaggctggtttagcggctgcctggagcggagcgctgcgagagctgcgcggcgcgcccaggttccagccggctccgctccgggtcccccagtgctcgctggctccccgcttgagccagcccgcccgcccagcgctaggggccaaggagcgaaccgcacctgcgatccgattgtccggggcacgccgtagaggatgggaggacccatgaggcgctagcctgcgaaggtggcggtgctgctgctccggctgctcttggagttgcatgtacacgacgtggcagactttccaatgggaggattgtggattctgatgacataggaaacttcatcttccagacattgccacagaaagcacacagactttggaaaccagcagacctgaag

SEQ ID NO: 35476 - DNA, 1280 bp, Homo sapiens
tttgttttcatacgatccttaaataattaagttgggtattgggaagcaaaggacgatagaatattaaagtaacatggaccctgagagatattcatttatgattcatctgcttgtggaagaacttcaaacaattttccagtctttaattttaaaattagtgttctcgttgtaagaagagtatgtgtgtgataggagatagtattatgaccatttgtggaaaaaaaacaacctaccatgctcaaacagcaggattttcagaagtagaatagtgtgccagatgtttattttcaacgtgatgtcaacacggctcctatcttcattttcttctccattgcagaagataagtctgaaactacagtttctgaagcctgtttctccataacttgcttcttccttagattcccccatgagatgtacttaaagaagacttggaagaagagaaagacaaggcattatctgtcagcagctgctggtagcagctgagatcaccaacagtagctttccttgcttctggaagttttcctgagaaacatccactgcagcaccatggataattagtgagggcatcactaagattcctgaacttcagaattttctggaaatagcatttctgacctttgtccctcaatgcttccaatagttgcagaagcctttcattccctgtattaaaactctctttacttaaaaaataagaaataaaaatgaattaatgttttatgttacttttggagttggtccattactgtcactaaataaagctgtacatgtacataccagggaatcaattccagagatgattgtgaaaccactaacaagaatcattgaagcattttgcaaaactctctgaactttgatatttactaagtgaccttaaagccctagctttgtggtagtgcacttaaattcagaatcacacttggtaactaataatgaaagatttcaaaccccaaacagtgcaactgaaacttttgcattactatactactgagaatatctaacatgttgttactaatcaatgtcattctgaccttgtgggtttcctgtgctaatggacaaggtaagttgaaagagatctaaacactcagcttccctcttaaatgtaacttcgtgtaatatctaacttcatatgtctataatttttttataaatctgataggatatattcactatgctagcagaagtagcatattttgtgagagtataacagaaattaattttatgaaaaaatatctcataatttaaagaaaaaatgaataatattttctttgttttacaaattc

SEQ ID NO: 35477 - DNA, 3916 bp, Homo sapiens
taatttaaagcaaggcaagtcagcacagttgcctttgtttttcttgtagacacactctgctgcttcaattcaggcacagggcaggtagagaatttatttgcaaaggattgaggttttctaagacttggattacagatagaaaggaacgaatgggcaggagagtgtgtgcaagggactgactgacagtgatgagccatggaatctaatttagatgtggtgggaagagagaaaatgaagggaagagaatagtgaaaaagtgtcagggtcattgaatgtttggaacaaatttagtagagtaagtgagctaaaaagattgttgaaatggtctagagtgtgatgcttaatatttagatactttaggtagtgtagtaattggaaatgacaaggtttagatagactagaatcaatagtggagactactaatagctcacagggacttctctggtttcttgattggacatagctatgtgcattcccattgacttctgaaccaccataagtaagtttcctcttagtgagatcattaggctgtttctgtaaatttccccattaaatgttaaatttctctcaggctgggcactttgttgcttgcttcagctagtatcctctagtcttctctgattgtttcccactgtaatctctttgtattcaataggatcctcgggcatggacctttccaagctataaagtcactcttctccagcaggggagcagagcttccagtccacatagcctgcctgcccatccagggttcaacttctgagccacggaattgggctgcgagacagaggtggatgaaagcatccgctctcttttactgaattttatggagactttctggaaaaaatatttcccaacattatgctgtttggccaatttccagagacaaccaatggttacttttaaatttttatccagttttattgctgccttttggttgggagtgaatataccaagaccctcacatagccattctcgaagtcccacctgaacaaaatgattttgaattataattctgttcttcaaacatttcaggaaacgttacttggcaaaaattattctttttttttttttttttttttttgagacagagtctcgctctgtcgcccaggctggagtgcagtggcgcgatctccactcacggcaagctctgcctcccggttttacgccattctcctgcctcagcctcccgagtagctgggactacaggcgcccgccaccacgcctggctaaattttttttgtatttttcagtagagacgggtttcaccgtgttagccaggatggtctcgatctcctgaccttgtgatccacccgcctcggcctcccaaagtgctgggattacaggcttgagccattgcgcccggccagcaaaaataattcttgattagaccttttatagtttatgaaatattaaaactgttaagaaggtacctaattcttagtgccagttttaaaagggaatttacaactacaaaagtgatattgttgtattaagatgaggactgatgacttgcacttgcttgccttttgaaacagctgaacccttggctagaaaaaaaaaaaaaacccagggggccggcggtggggagcttcctctctcctctaaacagtccatttctgattgttccaaactcagagactcggtgactacaacaaggaaattgaacagcagttattttgcttaaataaatattacataacgagctgagaatattattgtgaagacactgattagatactatttgcttatttcacacaaccctccatgaactttgatgttttccacaaagggctttactaaactagcttccccttagtacattgaaattcaaagtcatgcttgtaactgttaatgaaagcagatttaaagcaacaccaccatcactggagtatttttagttatatacgattgagactaccaagcatgttgctcttattcagtgtaatcctaatctcatgggtatccactgttgggggagaaggtaagttgaaaacagatccgaatattttagttccttttcaaatgtatttattgattgtgtgtgtgtatgcatacaaatatttttaaatgaataaatagctgaggataatttgaaggggtatcacaatattcatctattttctggaaatattttccaacatgcaattagcaggaaaattgaatgaaattaattctctccgttctctagtttgctaagggtaaatggtcaccaaatagataatgtaaagagaaatcaaaggagagaaaatctgctataataaagatgacaaggtgaaatattagtgtaattctgcataaactctgcaatgccactgactagaaaaatcaaccccaaaagatttggccaccttcattatgttttgagaattttattttcatagatttgataatttacattttaaatgttattaaaatgaaggaattctcatttcagcctaattatcattcaacagggaaatatattttaatgaaacaatagaaaatattatttttatatataaaccagtgaactgccaaaaaattgtttcttctgagctcttccacaaatttcaaaagtgaaataatatatcacttctttattaatactataaactgattcttataacattataaactatcccattttatttcatgtggaaattaaagccactatatcaaaaggattgcaaacaaaatctctaacaaggtctaggatactgattaaactatgtgtgtacgtgaagtttcaatcattgtgctatatactctttgatttccagaaagtttttattttactgctttactgctttctaatgtttacagatctttaaattttttgaacactttcttctcagtcctgacataagagaaaaatatgaaccataaaatgctttctttttaagatatgcccttacaaatgttgcaaaacattatttctatgggcctaaaattcattttattttgttttcacttttagtactgagctataatcacaagagtgcgattgcatgagtgtatttgatttttcttaagtctgtgtttatgatatttattaagtggcttaaacatctgttacaaatggcattacacaaggatttctaaaggggggtggaagcagaggaagataagtgaaaattatgaggataatatgtagaattttgacaattcctaaccccacaaaactttcaagcttcagtccagtcccaggataaactttagtgaaattctattaaaagttgtctaggtgttaaatgacctgtaagtgtgcattacacttttgttttggtgtctatttagaaactggccaaacagcagaaataacagacgaaagcaacacttttgtacaaatagaaaactgcatgcttccagtagcaaaacatgaatcaagcaatatattgtgcttcatgctgtagcaaagaagctggaaagaatatgacaacgccacccacccctcactactacttagagtgtcctaaaagaaaagcaaaatgtaaataggcaaataaattgcaaggttttatatataggtaattgtctgtgtgtgtgtgtgtgtgtgtgtgtgtgtgtacactcatacatcacttaatgataggaaaacgttctgagaagtgtgtctataggcaatttcgtcctcctgcaaacatcatagagtgtacttacacaaacctagattgtatagcctactacctaactaagctatacggcctgtcactcctagactgcaaacctgtacagcatgttactgtactgaatactgtgggcaactgtagcacaaatgtaagaatgtgtttacctaaacatataaaaggtacaataaaaatacaatataaaatattaagaatggcagacttgtatagggctcttaccgtcaatagggtttgcaggactgaaagttgttctgggtaagtcactgagtgagtggtgtgcaaatatg

SEQ ID NO: 35478 - DNA, 1212 bp, Homo sapiens
tgtcagttttccccctactgggaggtgtctcccagttaggctacacgtgggacggggacccacttgaggaggcaatctgtccgttctcagagctcaaacaccatgctgggagaaccactgctctcttcagagctgtcagacagggacatttatgtctacagaagtttctgctgccttttgttcagctatgccctgcccccagaggtggagtttacagaagcagcaggccttgctgagctgcagtggtctctgcccagttcaagcttttccagctgctttgtttacctactcaagcctcagcattggcggacgcccctccccctgccaggctgctgcctcacaggtcgatctcagactgccacactagcagtgagcaaggctctgtgggcgtggtaactgccaagccaggcacaggatacagtctcctggtgtgtcctggagactggacacaccactaagaccactggaaaagtgcagtatttgtgtgtgagtgtcccgattttccaggtacagtctgtcacgggtttccttggctaggaaagggaaatcccccaaccccttgcacttctattttttctaagaccactggaaaagtgcagtatttgtgtgtgagtgtcccgattttccaggtacagtctgtcagggcctcccttggctaggaaaggaaaatcccccaaccccttgcacttcccagggaggcaatgccctgctttgctttggctccccctccatggactgcacccgctgtccaaccagtcccagtgagatgaaccagatacctcagttggaaatgtagaaatcacccatcttctgcatcgatcacgctgggagctgcagaccagagctgttcctattcggccatcttggaacagaatcaagatcaattattttcaatggcattttgtttttaacaattagttaaaaaaagactataaacaaccaataaagaactgtcatgcaaaatactggaataacaaacagagatttagagatacacattttattttagtgaattaagacacattctcttgggatttgctcaagtaaactgtgatcaatacattaaagtgccaataacagtatataaaactagctagtttgaaaatatttatgagattattagttagaacatatttcaattttatttttgtgtatgcttgatttattcagattatttttgtcttgaatgtcaattatttattttacacaaga

SEQ ID NO: 35479 - DNA, 1787 bp, Homo sapiens
tatctgctggtatttccctatttagacagaaaaataaaatcaaaagaaattcatgcaaaaatcatcctattatagaattaaaagtataaaataagattaattctgtgtctttcacttttataattttaattatagatgttttggtagaaaatttatagttaactattcaactaaaacacagttaaaacttatgtatttaatttcaacaaattcccaaaaatgtttattttagaaaagctgtattgctgtagcttccttctttgtatgttcactcttgctaatgctaagtgtcctccctggattcttcatcctatggcctgataatattgataatgttcctgaacaacatacccatgtacactgcctagcttccactcgcacactaatcttacacattgggcaatctgactataaagctttctaatagggagtccataggtattggtttgtttggaaagtcctgatttacatgtgttgtccaaacagttattaatagagcccctcttttactctctaagtgtccctgtttgtacaagcaattatatggttcacctactaatcactacttaatgtctccaacaaatgaataattcattgtgataaaaatcaaagtctcaaaagtaaaaaatatttatggctatttccttttcaaatttcccacattaaactctcaccttatgaacagaattaaaattgtacaagttttgtcagtattaggaatggattctagcataaatttagaattaaagttaacatgtgacttcgaaatggacatattgttaacctgaaaaccttttcgaagtatttagatcctggtctcctatgccccctagagatacaagggtttttgttttgttttgcttttctgacttatgctactgtaagaacactttactaattttgctcaaaggaaaaggtctaaatattataaaaagttatatttataaaatatgttataaaattgataatgaaaatagaagagtatattaaaacttgagttgtataaatattagaatctccatttgtatgttttagagaataaagaatattaagaattaattttaccttctgcatagagttctcctgagattatcaatatgatgataaaagtcaggtttttcaacctcatcttcagtggtgtgcttcacaaagattttaacaattctaagcactaggaacttgtcattaagtacacaatacttctcttgaggaaaaagttaataatttataacctctgtctaagtccttttgtaacgagtcttatatttcacttaaaatattttgaaataatgttaaaataacacaactatattaattgacattacttaccatgtcagagtccagtaagagcatgataactgattagggcaacaatagcagcagaataaataataaattatagcagcagaataaataatactaggtaaattttcaacctaagttcccaattgtaaattcatagagtaaagttcacttgaggccatagatctttactaatattgatcaggtaaaaagatgaacttaggaacatgagataacagatacctgatgttgaaatatgttgttgcctagactgcactccttaaagagatacagaaccatagttgtctcaatgatagaatagtattacttataatagtagtgtttgacatttagagagtttttactttgtggcaggtggtgagatcagcactgtgctatatcaacattcattcatgagaaatgtttagaacgtccatgataatggcagcacatgtaacagttttgaggtatttagcagtgaaaaa

SEQ ID NO: 35480 - DNA, 750 bp, Homo sapiens
ttattacctaccaaaatagaggaatttaactttatttactttttttggcctttgaaattttcttaaaatcctcacgtacatttatttaaagaatcctagggtgtagtaataaggtacctgtaaaaagattatacatccccaccacctgccataaatttgctgtgacttgtgggaggttaatacattcctaactagtttgtgcttagctacataatgtgctttggccaatggaatgtgggtggagatgatacaaattacatccaagaggttttaaaaagcattgcaaggttccacacaaagttcttgattttatttttgccacaaaaaagctatgtcccaaatatggggggctctatttcaattgaggttccagaattctttcatatgtgaagcagagctagttgatctgtaacttgccaactatttaaagggaaaggacactggaattgaaataagaaatcccagcaatgacaccacaatgctgtgtaaccacagtaagcttattatttattctctctgggcctcaatttattggtatataaaagccagattattacaaagatcctgttcggtcccaaagactcttctattccaaaacctggaataaactgaaatagtaatgggagaccctacattaagaaggtaagaaacctagaaaaaatgtgaaagcatactagcaaaaaactaaagaatacagacgcacaaaagatacttttaataaaaatgtctttaaacagccaattactaata

SEQ ID NO: 35481 - DNA, 641 bp, Homo sapiens
cacgaaacagcgctgcgacacactgaagcccaggtccgcggccgggaagtgggagatcttcacttctgccacctcctcgttagggttgtctagggccagagacagcgtccgtgaggctcccaggagaacgtccccgaagcaaaggaaaggagacctgcagaagtggctgagagacaggaccggcggggaagacgcctcctcctcggccgcggggccccgcagccccgcgggcggcctccgctcggtcgggctcacttcccagcagcctcgccccactcgccggttcgccatggcagattcgagacccctcctggatctccttgccccgctcccacgaggcggctccggagcggggatccgggacttacgctgaccgcttcccctcaggggcggctgtagaggtcgtgggagtgaattcggccctttttcttttccactaacctactccctagaaaacagaaaacaagcccaataaactcgcaaattaaaaagaggagccaaacaagtatggcgttttgactctgtttaaacttgccgcctccaccaatgaggacctccgggcaccgccctcctcgtcacgggaccaatcggtgagcagcatcccctggccaatgagacggcggcgcttcatttgaatgatt

SEQ ID NO: 35482 - DNA, 1724 bp, Homo sapiens
agctatccttctgcctcagcctcctgagtagctgagactacaggtacatgccaccacacccagataatttattttcttttattgttttgtagagacagggtctcactttgttgcccaggctggtgtcaaactcctgaaacaaacatttacacagataatttggattttgtgaattgaggttgtgaataataaccctggcaaaagactcctaaccagtatgcttggtttaccttattccattcatatccatggtaaatataaacagagatacaaacagggtcaccatgggcacatagagaaagaggaagtagtactcgactgggggcaattttgccccccataaaacatgtggcaatgcctgaaaacgtttttgtttttcacatctggggatacgataataagtgctactggcatataatgggtagaagccatgaatattgagaaacgtcctacaatacacaagaaaagaattacttggtccaaaatgtcaacagtgtttgggctgagaaaccttgctctatactatgaacaaagtgatattttcaacataaatatgtacaaaacactttaacttcctcacagtggacttaagataaattctgtagggccttgcatggctaagaccctatgaaaatataccttgcaattaccacatggatgctaagccatacagattttcaaggaaggagaggataaacaatttgaactgaagcagagatgtcagtaaaaaaagaacttaaaaatgcctattgatttggcaacaaggaagtcatactgataactgagcagaataagatcagaggtcagattgcaacagtggctggaatgtgaagtggttactgaggtagtcaccataaaaaagtttagaagcaaagattagaaaaataattggtggttggaggcgtgttaatcctatgtacattttgctaattatgctcaggactattaagtgaagtctcttggcactttagaacatgtctgttgtttatcatttgcccaaatgcctaaccccaaaacatgaattacttgaatgttttacacttagcaactaacctcagttaaacttggatatctaaattatactaaaaagctgatgttcaagatagcacacagcgccttcaaataaaataatattttaaatgcttagtatgattagaaacaagtttaaattctgactgcaaacatttcctaacaactgctgtcttattaagtataatatataggcagtatatttagctctcaaagagcctcagcaaccaaatgccaagattttttattaattattgttaacttgcatgtcacctccctggcctttgaattaactgaaaacaaggaggaaaatatatgcttgctgaattcttttaggtctatagagatgctacagaatgtagagaaagagaactggttaacctaacttcaattaaacaaagtaaacaaaaaaagttacaactttcctcagagacttagccaatgtaaactatgagacattttgctttttcacttacttttgccacactttctctccaaggtgtacgcttttgtaatgaacagtgagatgatccctacgaccaaaacattttccacattcttcacactgatgagctttttcaccttaaaataaagacccaaatattttcattataatatacatctcaggtttttatccccagaaacaaactatcaaacagtaagatcacatgatgtcaaatataacaggaaagtaa

SEQ ID NO: 35483 - DNA, 2215 bp, Homo sapiens
tataggtcacttggtcacactccactgcaacatttccttctgaagaatctttatgatagcctagatggatcttctcaagatttgaagtaacctttctcctcttcttcattgcagtacagcaatttcagaacaagaaacttcataagtgtcttaagtgatttataaaggaaaactagattgtcttggataacagcttctgaaggggcgtgcccaagggtttcatggtctgcaaaagagtgagaaccacgtaaaataactccatggcaaagcaatgctaaatcagccaacggcaatcatcaacgaattctttctaattataactgaatgatgataaaatcacagcttacactcattcgtggcaaagattttggggcggagaacaaggagggccgggtttagaaaaggcagccaacaaaagaataattttaaaggaacccaggcacaccttccaggcctgattcacgaacagggtgaaaatacccgggcagaaaggggagagatcttccaagatcgttgacggtgcgggttgaggaggctgaagtcgtggtttaggggtgctgggatggtgacaataaggccgtggcggccgcgagatccgagtctctccattaacatgctttcctcgggcgggcaaggcacagctcttcaggaatagagagcgtccctcagccaaagccacccggtgagagacggccccaggaggggcgcagagcagaagtggggtcaaccagagggacgactaaaggaagcagaagagctttcccaggcccgggcaaggcggagaatgcgcttgtagtcggcgatcccgctacccttcccacccagtttccctgggaaaacgccccacagatccattaccgggaacccaaggctcccccgctggctcccagcagctgagctccactctgggcgcgctcgctcctgcgcctacccacttccgggttcagccccccacctcaccaccccctcccctccctccgctccttcccctcccagagctccgccgcctccgcagccaacgaacacgtcaaccgctcgcgcagcctccaagccctcctgagagagaccggcgcgcgaccctgcgcgaacgagtgcgcatgtgcgcgcacgccgctttacgcatgctccttaagttccccgtactccctcggagaccctagctacacgccgaatccgttactccgggttttcgcagtggctcggtggcctaccccgatcgaaaccgtgaggcttttgctgagggagggcaatgggagaggggaggatggacgcagagtttagaagtagtttgccgaggtgcagtcgcacgaatggatttcatcctcactggtgtatttaatagtttgtaatctaccaaacagcaactgccagaagccagtcccagctaacctactggcgtgcacgaaagaacccagcgatgctgatctcgtttcgttatttttctgacttaaacggttaaatctaaacgcgattactaagaaaaaaaattttatacctatcattgtacacagaaaaaaaatagaaaaatgtttatataagcgtaaagctggtaggacaggaaaggaagccgaaacaaaaagtaaagaaaaatccacaaggacaacttttggagctagtgcctgagattttggatttctgagtcccaggaggtgctgatatcatttatctgcggactcgtattatgaagcgcaaggtcctagagcgtgtgattttacaggcataaggaatataagatgaaggctgagacaaaataggatgggtggcctaattttcttcccccaccctctcgtccctcccatacacatacaacctgacaactaaaagggccgcactccatggaagaactcctgcagagttggactccccaccggcaaacaggaggaggctatgaagaaacttgcctgtctccgattttcttgggaattgaaaaaataaaatttttaagcctttcatgaaaattcctagcaaaaactcacattcacatggatttgcacaaagattcatatcacctgtgagactcatcccacaaaaactagccacactgaaaagagagaaaaatgtaaaaccaagatagaaaaaggatggtagtctgcagatattgcaattatcagaaacaagtatatttaaagaaatgaagggaaatgaaaaaattatcaaaaataactaagcagattaaaagaataatttagaagtgaaagctatcattatcttagta

SEQ ID NO: 35484 - DNA, 716 bp, Homo sapiens
tgcacacatttgtaacacagtattataaatcaaagtgatctcatttgatggactagttataatttttttaaaaataaagtgaaagcaaaatgataaagtgaaagtaatacattactgacaaatagaacaaactaagacatcctttaaaggacttaatttgctctaaaagattaagactagaagacttgctaaaaggttttcatttttgtgtttactggaaataatccatccatttcagaaataagtggaacagttcaagtctaaaaagcgataaatcccaaaactatttactgattatgcatttttgagtatgagtaactactctgtcttactaaccttgtgatttgagccaacagaaattaatcactcagtaaaatgacatgtgttatcactgactttgcaaacaatcctgtcagtggcagacaccaatgtacacaatgagtgaaaatgtttgttcttgtaacaaaagattgatttcatgcatatacatacatatattatatgtagatgcatataaatagacatccaggaataaactgaaaagcgttattaatgagaagaatgctgaatttaacagtttttcaaacacctttttctatttttattcaataacagctatttttcccccaagtggagttggttcatggttataccactttaataactctggagcatttcataataagtaaaagagataagaaaatttttagttactg

SEQ ID NO: 35485 - DNA, 832 bp, Homo sapiens
tcaaacattctttatttttagatcagatgaattctatcttttttatattcttatgtattgagatttcttctaccctggtggctaacggaatactatgactggactataattcagatccactttcaaaatatatctaaaagtttaagtgctttaaagtgctttaataaagtaggtgctctaaagtccataaggtaattatgcaactgaaaatattataataatttttttgcttaattcaacaaaaattttgagtgcctgctatatgcaatcgaaatccctatgaggcaacagggacacagtactaaacagaacaaagtccccgtttctatggagcttatgtgttagtggagaaagcaaacaataaacaagtaaaataaatattgtcagagattagatctataaagaaacctaaagtagggagtgatgggggtggggagctattttagataggaggattacagaagaactctaacgtggtgacatatgaactgaaacctaactgaagggagagagtaaactcgtggatttgggaagaagagcattccaggtaaattaaacgaggcattcagaagtcccaggtgagaacatgcttggcatcttcacagagcaatggggaagtcagtgagatcagactggaggaagtgggagaatggcaggagatgaggtcagatagagaagcagaatcaatgatggagagccttctaggacacggcaaagactctaaatattattctcgatgacatttttacatacctctgaagagagtgctatcataataaactatttacctggaacatttgagaatatacaaattaaagaaaaatatacaaat

SEQ ID NO: 35486 - DNA, 1192 bp, Homo sapiens
aatatagcattgagtgttttaaagtagaatttcttgcattcttttaaaaaggtagactacaataaagtgtcaactaaaaataaaacattataaaattccaataccaatacctaagaaagcttcagtgccttaatgcacataagcagaaagaaaaggatcttgtaaaaaaaaaaatcatctactcttagggcagggtaccctggattgcttataatcataatcatgtacctttaaaaatatgagcacagactctatattaagcgaaagctaactgtttcaccactgacaatattttgttaaatgtagttaaaagagtcactaaacttgcagtaagttaaattctgtaaactgaaaaacagttcattgcaaatgagaccagttcattttcatttgaccattgcttaatccttatcttgtacttcataaagtgaaaccattcaccatttttactatacatgtgaacactattcagacctcctcctataaaattgtccacataatttctgtaacaataaagaacatatattcaaaattcaatatctccctctaaatacacaaattagtaatatatttcacatcaattttaagactcaagacgaacgcttcccagttagttgctcaatctttcacaccctccccctcccttcttccacaagcaacacacgtgcatacacttctgtgaaacagcctcagctcgcttcccaactggcagaagcatccctcaggggacaagtctttaaacctccgcactctttaaaattcaaccagccagcaggtctatagactagtgtataaacagtatagacaaaaaaaaaaaaaaatcctctctcagcttatgtcagtgacaaagcagctcagcagttgactgtttctcccctgacagtataaactgggtttacacagatcaatagctggaagtcctacctagctcccagggcttggttttcttccttaattacaggtgctattgaaactgaagtgtaaaaagaaaagagagagacttggaaggaggcataaaatgcatgcaaatagcttttatggatcctcttagcaatagtattaattgaaaattatacttccacatttattacaaaagtgtgtgtgaaggctggtattttcactacacagtgtttttaatatgacacatatacaaacacacacacacacacgcacacacgaaatcctaggttag

SEQ ID NO: 35487 - DNA, 2434 bp, Homo sapiens
aaaactcatgcctctaagatacctagaaacaaaatcaccaccgttattaaaattgctttttacctaatctcctgagcaaagtagtcgttgataaatactttagcacacacataaaagtaccctctaattggataccgttttgcaagaaccatgcatctacagttgctgcataaagaaacaccagagaccaatctaattttataagcagaatcataagaaaacatccaagacaaaagtaacaaacggacttaagaaaacaccggttatatttaatgctcagagagcactcggaataataacctcttaacctcaacgctgactccctcccggacaccacacgcacacaggcagccccaggagagtcacatctgacacactcgggggaagcacgagaacccctcagcggcggtgtcaggggccgcccggcctcccctgtcccccgaaaggcgggcgtcgacaaggcgctagtggcctctccgggaggagccgcgccaaccacggagggccggggacgcagggcgggcaggctttgcggcctagcgccgtcccgccggccggccagaggcttgggggccggaccgcacccccagcccgcccggccaacctcggccgcccggggagccggttgagcgcggaggcgcggaggagccgagctggcctgggaggggccgccgagggacgcccgcccccgacgcgcccgggcccccccactcacttggtcctgcagtccatggttacatgtcggtgtggggctgtccgtccggcccccgcgcgctggcctggaagcccgcagcccggccgcgcgagggtcgcgccgtccccgcccacgccggcggccacacagggaaagaggctgctcacagcagccgtggcggcgggcccatgtcggctgcgcccccggcacttccccgcctcccaccccacccaccagagcctttctgtgacagcagcggtggcgtggccgccgcccccgtctccgccggtagccgccaccaaagctgaggcctctcagttcctgcgaccggggccgcccgctgcggctcctgcaccttcttgcaaatcaggaagtcgccgggagggggaaggggcgcgcggggacgcgcccagcggcttcacctgggccgtgcggctcgcaagtcggagactgtggaggaggcgggggccaggtccccgcgcccgggcggccagagggtgcagggggagcgctagtgcctgctgggatggcccacgtaccgctttgccacctagccagaaaggcaaggtgccccctgtgtcctcagcatgaaccaaaccggcttcctttctgggtccagtccagattccagggcgtcggggctgcaaccccacaaagggcgaagtacctggaaaagtacctcgacctgcagtgttttccacacacatacacacggacttgggttcctttcatttcatactacaaattcagagctcaagttgatgcccctggctcttgcgtcactccagctgtggcctgcttacagctctctgaaatccagagctaccccctcctgattcaggaatgttcagacatgtgcacctgctaaatagccctgtcaagtagccaaatggtagtgccccacttgtctgcgcatgtgggaggcagacattcctataccacagactgcagtgataaccaaggactaacttttgaacacatgtacatagtcgcaggcctcatagtctggcagtttaggcgagttcagagagggcaccactgaataagcgtgggagggactgatttacacagccctaaagcacatgtgaagcaggttatgtgcactctcacccagtacttgtcataggtgtgtgatagatactttcatcagcattttacagatgaagaaaccagggagtaatggcaaagctggagttcacaccaggtctatctgatgctgattatttacttctacctcatattgcctgtctccctcctctgctgtctcatatttaggatctactgagaagacaggtagaaaagtcttatgatggacattcaaatgactgtggaaggccaggctcttacacagagatcttctgggaaaggccttctcccagctaacactgccacccttgacacatagccacagtgtttcttccaaaaggtggttacttcagactttattcatgcagaagttaagatgatgagaggaaaccaaatgtggtatgaatgtagtgtgagtcataagacataaaagtcagaaaaggagtcttaagaattaaaaaactcaagagtcagagaacctgaagttgcactcagttatataaccttaaactttcttgccaaaattgggtactacttggtcaacaggatcagaaatattgtatagccatgggcctgttagtaaaaaatgaggacgggccataactgggaaacaaacaaacaaaaaaaaaatgtgtttatcataaagtgttgtca

SEQ ID NO: 35488 - DNA, 423 bp, Homo sapiens
tcccatggaggttttatctataagtccctgactggggctgctgccttttttcagatatgccctgcccagagaggaggagtctagagaggcagtctggccacagcggccttgctgagctgcagtgggctcctcccagttcaaacttccaggcagctttgtttacactgtgaggggaaaaccgcctactcaagacttggcaatggcagatgcccttccccccaccaagttcaaacgtcccaggtcaagctcacactgttgttctggccatgagaatttcaagccggtggatcttagcttgctggactccatgggggtggtgaccgctgagccagaccacttggctccctggcttcagccccctttccaggggagtgaatggttctgtctcgctggcgccaggtgccactagggtatgaaaaataa

SEQ ID NO: 35489 - DNA, 1630 bp, Homo sapiens
caaaaaacacgtagtgatggtctatagtggcttagtcgcctttctcctgtacaactgaataatctacttttgtcctcaaagatcaattcctgccctcccagtattgaagagcactaacaaaattggtactcttcagccctccttttcttgaaacccagacggggggtaggaagatggggtggtgttaatttaatcctaacacctgaaattacttcccgggcttgccgtaattttctcaaatacaattatgtgacggtatcaagatcactttcatccatcagaaaggagataatagttttaggttggattttgtaaatattcagcaacatgaacacaacaccttttcttattcagtgtgcgattttacttttggcccttattctagggtgggccaaagaaccaagcaaagaaggctccgcttccacctttattcctatcacatactacctggaaacactcagccttttctggataggcccaaggtggttattcacaaacctcgggtcttttgatcactttctgggatcttaacagttgtggagattatactgaatgatcccaagtccagtctgacataacaaaaaatgtccacctttcagctgggtgggcgcgggggaagaaggaagagcttagaatttaagtccaaagatgtggaaacaccaggctcttccccgtccaggcagctcatcagagcctcgttagctgccttaaaagcccattttatttccgcagcgggcccgctggtgaaggcagaaggctcagtccgtccgcctccacctgctgccacggcagcgcgaaccgaccccacgcagcgatggccacgagctgcccaagaccggctcgccgcgcccaggcccgcgttggtcgcccctccgggccccagcgccgggtgctccgcctcccaaggccggcggcggcatggcggccaggcagatctgggcacggacgggtgccgcgctctgcaggcaaccttccgccgccccgccgccagcacctctctgggtaagagctgggttccgacagcagctcagcttaaccctctgccctgctaacgagggaaactgcggcggctccgcgcccagcacgcccggtaggccggagagagcggcgaggccttcggtgagcgaagagttaaccgcggcggagcgacagatcgcggagctgcacgctgccgcctgcgcggtgagactccctcctgcccgccccgccccgccgcggccgccccgggctcggcgcgcctgcgcatcccgggcctctccggacccggaggccgcccggcagaggcaaaggttgctggataccggtgcggtcctgcctcgggcgacattcgcgcacgcacacgaacttccagccccgacattttcgcgggaaacctgtgtctgtcttgagtatgagtgtgatttgttttccgatcagcgtccgagctaaactccggtcgcagtgtgggacccactaccactcttttgtggtgtatgtgtgtgtgtgttgcggaagggggtgttaaggaattgatggagaaggtggagggactgagaagtcacaacaaaaatgtgttgtgtgtttttctgcattgtcagttgaacacttagcaatccagtgattcttagagtgagaaaaaaagacattgaca

SEQ ID NO: 35490 - DNA, 1545 bp, Homo sapiens
taacctgtgagcctttaaggagattaatttgagtaataactctgtctctggcatgacatgattggtcttctgtcaattaaactcttcctttacttcaatgctgtggtctttacttgtgcagcaggcaggaagaaaccatcaggggattacaccatttctatcactacagtctcttgtatgatgttgacaaagccaaatagcaggacaaagagtgtcaaaatttttgtaatgcttggtttttgtgtgataaaaaccaggccctggaacaagttatcatagcccattaagattctactttttaaggcaaggtgctgaaaacatcgctattgtctgagaagattctacagctatcgttgcatcaaatccttttcagagataaattgcaaaatactcagagctgctatagaacgtgcactgttcaaagtacaaggacttgttatagggaagtactgtgccttgaaagtgactgactttcccttgtactcacaccaggtgacagagtgtcaaacctggcacagtccagttgccatcaatattcattaacaaccaggaaatacacagaaacgcagcccttgattttctaagcagggaaaactctttgttttagaatatatctctttataaacaatatttttcaatataacaaactatcaaaatattttgtatccattcatttgtgtaatgaatactccatagatatagaattaaattttacaaaattgaactaaaataagtctagggcttttaaaaaatgtgattagataattttaggcatattatatttcacattctcctactggttacacagtaacattctgccaggaaatttgccaaattttttgtgctcattccagtaagttaggtaggagacaacattttttcccccgaaagactgcaaacacttcatcatccattcaccagtgtgaaaacaatatttaagaagaaattctcttccacccacgcatgtactcctcaggataacagtttgtcttatgtgtaaattccttctggtgactgccacgtgggtcttgattttaaaaagcaatgagcctacactcaaaggcaaacatttctaccagtatctcgacttttcctcctctcccttaaatctgaccagtgtcagaagagaagatatcctttcctccctggctatcagaaagcagagctgtggggtgtttctcttctcctgatcaggacacattggctttcaatgtgttcacttttgaaattcatgtcacatatgactaaagttcactgggatgaaccaacactattttcatatgtagaaatgccaccaagaggctttatttagttcaaagtgcacagaaaacttctgatattctacagcatgtattgtctgtggcaccttgtcatgtcactctatcatgtatttcactatttgagtgctgtgtgctctgtgtaaatattttcccctaagattgtaggctccttccatctggggacagcaccaggtgcctcttttgtggtttttggggcctgtacctgtacttgagcatagcaaatacttgtacatagatagattaa

SEQ ID NO: 35491 - DNA, 1423 bp, Homo sapiens
aggaagtgtatttaatctccctctgcccttttgttctatacaagacctcaatggatcgtgtgatgcccacccgtattagggagtgccatctgctttactcagtctactagttcaaaagctaatctctttcagaaacaccctcacagtcacactcagcaataatgcttaattagatatctgggcatcccatggcccagccaagttgacatataagattaattatcgtacaccagatattcaaatttgtctttatgactcccaggagtgtttgggagttttatgtacatgagtggtatttatatcccttaagtatttgtggagcacttagtctatgccaggcattgttctagtgctggggatacaatgaactagacaagcaggtggatgttctggtatgaggagatagaatgtaaacatatgaataaattattaattttttaaaaatacatagtgggaagtattaagaagacaacaacaaaacagggtagtgagatagagtgcaattgggaagtggggtccgggagctactttagtaggtggtcagggagtcccctctaaagagatggcatttgagaaaagaaatgttgctaaagatccggttagctgaggacatttcaggagagtggcaagcaaatgtaaggcatagatttgattgagattattgtatctgggtcagcatgaaggctggcacggtggagcagattgggcaagggaaacagtgtaataagtaattgatatctgaggcaggcagtatccagatcacggttgaatttgtaacctgggaaaaggagtttcgctttaccaccttgttgcatcaggaagtcactgaagtgagttctaagcaggggagagatgttatcagatttatgttttaaaaaggttatcctggctgcagtgttgaagacgaagtgttgcgtgagaagagtggaagcgaggatacttgttagaaggctgttgcaatactcggagtggagagccaaggtgaagatgaaaccagtagcaacaatgagcaagagcagtttacttaggtaacctgagtacttattaaccagaggaaaatcaagattgtgatttcccaagaggttgccttcaaagcagtctctgatgcctttcagggcaagagataggacccaggaggcaggcttaaaaaattttggtaagcaaatgctaaattgtgcaacaattccagacagctattttgagagtaccatagtgccccattgtcttcagaatatatgttccaagaccctccgtggatgcctgaaaccacagatagtactgaactgtatgtatgcttagagtttgtttgtttttttacctgatagcctacatgactattaagtgactaacaagcagtgtattagtttgtttcacactgctgataaagacatacctgaaactggaacaaaagaggtttagttgg

SEQ ID NO: 35492 - DNA, 748 bp, Homo sapiens
attagttcccccagagtccggacaactcttgataagcagataaagtatctgaacctgaaaagctgaggacttgctcctaaacttgactgtgatgtggctatgatgctgctgaactatgtgaccctttctgaagcagacagctagttgccctctttgactttttaaaaaacgtgtcaaaattcttttcattgtaagaatagaaacctatccaaaaatgtatcctaaataagctaagcaaaaaagatttattgactcatataacagagcagattatggttagctgttgatgaggttcgatttaactcaatggccacctcaggtcattacattggctccattcccaggcttcaaaaggtggtttcctggaagctacaggctttttccctgactgtggcagttcctagtctcaatcctcattccttgaattatcagaggatatgctctctcttctcgaatggcttggggtgtggaaagggtagaaagaaaagagggaaagcttatttcccagaagccctttcaaatattcctcaaatcttgttggattaaaattagccatgggcccattcctgaatcaactctgtggccagtaagatgaaattgtcttattggctaaagttaacagagcccacctccagaactaaggatagagtccatcttatccaaaccaaacagcataaaatgtggaaagaagtgagtctctaaagaaaaatctgtgtgtgtttgcagaatagtagagtgaaaaggatgc

SEQ ID NO: 35493 - DNA, 1033 bp, Homo sapiens
cattattgcatgaattatttcttaagtaggaattgaaagcaaaaataataaagtttgattacgatttaaaaatctgctgtcaaaccttaaattgccaatggaaatctgtcccaatgtgtttcagtgtaaggagagctactgccaagaaggcaacagggatccaaaacctcatgaagtccctaagcccatgaagtctccaaagaggtggactaagagaggactccttatggtgtcctagagaagcagactcaaataacaaatccctgtgtaactgcaaaggtttatacaaagtggcattccatgcagagtagagaatatgatgtaaagagccatcaaacattatgagatccctcccctgcagcacataaacaaagtgaggtggaaaacaaaacagaaagtctgcatgataatcctcagcaatacaccgctttatgaaagggcattttagttcaaatgtgggaagctgtgccaaaaaagctgaaggcaggcaggccgagccaaattagaacagagtaaaaaatttgtcatacctttgtaattcacacagcagcatattcagctcaactacaagctgtccagatgttggccatctgactctttatagctgtggtctgttttttctttaaagccccctttcctccctgagttcccagacacttggcatttctcttgaagtggaacctgagttgaataaagaattagtcttcttttcaattttcagtccaatttatctttttaagagaaatattttgaaaacaacaaagtccttgattaaatttacatcatagcaagaaaattttgccaagtgattgcttaaattgatagccttggagccaaatagacctagagtagaatcttggatcaatcatttacaggttgtgtaagtttaggcaagtgatttaatctgtctatgccttagttttttccacagtaaaatgaagataatagcaataatacctaccttattgcctatgattaaatgagacaatgtattaaaacatgagccatagtgcttggcacataacaagctctc

SEQ ID NO: 35494 - DNA, 1101 bp, Homo sapiens
aggattatggggattacaattcaagatgagatttgggtggggacacagagccaaaccctatcaatcatatatctttttatttgattagaaatgtgataggaatagtagatagtacatggtgctatataaaataggaacgtaggagttaagagaaggctgccttgaggaagcaacaactaagataaacttgaagggtaaacaggaattattagaacaaaatgcccaaaagcatgtggtctgggtcactttccagctggaatcagtacaacaggaggccagagagtagggaggcatggaaggttaggttaacacaggacagtgcagagttcaaagtcttggaaatccaataggcaaaattcaaatccctggctcacctttgtactagcctctctgagcctttgtttctttaactctcataaataaataatacatagtaaaatacatactgaataatatctacctatcaatggtgttgggagaattaatttcacaatttttctactactaagttatgatttcatccacataccaagccactaataatccagaactccttagggctatttttggagtttttaatgacttatgccttagtgctgaaattgtggtattaatttcctgtgtaatcgggactttcattaataatgtccatatgaattccatagcacttttgattttaatctaagcttcataatctggaaaatatttatctcctgcattttaggaaataatcaaatatgaaaacagaagtgttttggaagaaatgaattgactttgtcactagggggagacctacccaggttttgaaacttgccccaactttcagagtggagagaatttttttctgagaagtgatggtgtaggaaaaggcactgaaaaacttagcagtcctagcaggaggactggagaggttctctctctctttttcttttagtggcttttcactgtgttgtacgtggtggagaataaactttaggggatgcgattaacaacatgcccaaatgctgaggcagtcagcatgtttgaataaatggtttgaacatggttctctaggctgaatttctggcagtgtagaggcttggaagcatcacgcaggggcaa

SEQ ID NO: 35495 - DNA, 2343 bp, Homo sapiens
tgtttgaggtataatctactcattcttggctctaatctttttgtcagggaagttaaactagtgagagacctatgaacaacagcaacaatttaatgagcacgtcttatatgccaagctttgtggttaagcactttgctttatctcacttaattctaactatggtcctagaggttggtattacaactaatctccttttacagagagttactgagacttggagaggttaaataacttgcagccaggtcacaaaattaatcactgagttgagacgacaattaaggtatggccgactccatactgcctcctagccgtctcctcgagtagttcatgccctgttaacttaagtcgtgaagctgctggtgtcaaagcattccttttgcagtttcgtgtactagggttctgggtgattttgcacatatttatttcaaagatcctccgtaccacaccagggagtttaccttctggaatgttgttgaagcccctgtcctctatgctgggacactttcatgcaacgtttgcttagccagactcaggaaaacgcctttttttttttttctcatttccctgcactccacattaaacacagaggtagtttaaatcacctggtaaaagaagatgggatcacaaacgctgtggtccagaagggaacatcagtaagtcggttcaccgcttgcaagtgggggcacttacatataaatgaagaaaaaacaagttcttaaaaagcagccgaccctgggttcttaaaaagcagccggggaagagggctcaggggaccggacgcggtgccccgcaccacgctaggcctgacaaccggaagagaggggccaggaggggctcctccagagcgacttcggctccagtagggaaaccgccgaggctcccccagctccagggagcgccggggacgcaggcgggaagcctccatcgggcagccggcctggactcacgacgcggggtggggccggcgcccgccccgcccctctcctcggggatgccgggatgtttacactcctgacagcggcggcagcaggaggaggatcgggagtcgcgggaggatgggccgccgctaggctcgcactccggacgcgcctcgcagtgcgcagggtgggtgccccgcgcctgcagcgtccgccggggcggcgcggcgggaggtggccgacaggctccgggcctcgcagcctcagcccccggcccagcgcgctttccgacggcggcgccgcgccgagccacccgcccgcccaaggtctctcgcgggcgggagaacggaaaactcccaacttcctggtgagtcgctgcccagggttcaggcgcccggaccgggcagctcctgccgggaggggccgcctgcgggagtcgggccgggagagggaggtcgggaccgcgcggggcggcctccgggataccctcgctcggggtaggtggggcggggcgcgctgcgctcgaggcggatgggggtttcggtcttgttcgttggcagcggtgggagggggcggcaggaaacttcatacctggccccggctctagaggcccgaggccgccaagggcgccgcggtaactaagaaactccgtggccacggcggcggcggcaacaggtctttggtttcgggacccgaggaacttaagcgaagtcccgccttccggcggatgctcattggcgacgtcggttatttatctctcgcggattggtgaagtccgtctgtcaggattcggcagcagcccgacttaggaaagtgaagtgcgctgggagagagtgggtggtgggagccggcagataggggagaatccgaagtggcttcagaagtacagggagcgtgagaggtctgtcggagaatgaacttgggagagactcgggattacaaaatgtcggagagagggattgcgaggcaatagcgaacattgctggtgatggtggcaatggaaaagaaattgaaaactgaggccaaagtcagagaagggtagccaaaggaaaacagagaaaagtgacaagaccgtatgaccgcagaacagtgtaaggaagcgagcacaacctagaggatgctgccttgagagctaaagaacttctgttgcctctgttacactgtaggccttcactcctaaaaccgcagcatcctctatttagtcttgcactgggagcgtactggggtcgcggagagatgatgtatcgtgttctcaccttgctgtagtcctcactggggagaaatgctaaaaaatatacttagtttacagtaagatacatgttactgtccttgcgcaattctggtgactgaactgaaaatcagaaatacacagaaataaaatgattattctcctttgaggttactgagctcaaggatgcaattgaaa

SEQ ID NO: 35496 - DNA, 1448 bp, Homo sapiens
tctagttcctcctccaaggaatttacagtttcaaggctatgcacactccctccaggcgacagcagtatgtcttgtcaggttgcattagagaattaaagtacagagtatgtgtattataaatatgttctgttcaggaccttgagctgctggtggtgtggtcgaagaatggcatagtccttgcactcaaaagctacagtatgtttgggacaaccggtcaaaccctgaaaacggtgaacagtaaaacaggagatacagttaaccctctaatgctttgtggcaactcttgttgaatggccgctgagtattcttggtttgtaacacttggtgatggccaagtgctcttgaaacagctaacttaaaatctcagcagttattttatttccagaggaaggaattctctctccctcggcgagatccagtccacagcttgcttcactcttagaacagcggcatcctctatttggtctcgcacggggaacttgctggggtaggggagaggtgttagagctttgaaaaagctttgcctctcggaggagtcaaaggggcagtaactgtatggggtgagaggaaggcctgcgaaataaaaaggcaaaggaaccgtttgaggaggctagttgccttctcggggccggtgtgtgtgcgggggtagtgttaagggggaggaaggagcccgggagcccggaggaccctcccggaggtgcgggcctgaaattccgctgggtgccgggaggctccgccctccggagtactgacggccttcgcagccaatgcgcagccaggacctcgcgttcgggagggcgggtacttcctactccagccctgggctcggagaaggccgcgttagttctttttctagggatgtctgcggaaggggcgccaggctgagggccagcctggagaaagaaagaaaggaaggaaggaaggaaggaggaggggggcttcagttttccctgagccatcctaggtgtcccgtttcgtgattcagctgcacctagaacttaactactactgaaagtttatagtagattagaagcgaagttggtcagcagactaaatatagtccatgtgactgaggcgggttttactctgaaattacctgaaaatgaaaaccactaaatgtcagaatctaaatcgttaggcgttttcacaacttcttgggaatctttccatggttaaaaatcttaccaatttaacaagactaactttatttctaagcgtacagactcattttatagtctgaactagtatttaggtttatttatttagataatacatgtagcacccaccattgctttccccctttcatattttcctgtctggacaatttcgagttcatttccatcccagtaaaacagcacttacccaaagaatgaggaaagcacatatggtatgatggcagtgtactagtagaggaggggagatttgatgcctctatagctaacatacct

SEQ ID NO: 35497 - DNA, 831 bp, Homo sapiens
agacaaagaaacataccaaaacttactcatatgtttctttgtctagtagtttttattttaagcctactggtatgactacctttgtctactttagagggaatttttgacataagcaaggggttgggcaaatttttttctttttaggaaacattaacttagtctttcaaaaaagactctcccccgccccagtaaaaaatattggaaagagcctgtgctttagcagagggcctacagtcaaggtatgtttggcctggggtagaggtacttctgacctttgctctgaaaagaattagctgtagacttacctgggtgtagctactgagtagcatagagcagaatggaaaatgcaacagctttgtgaaaaaattacacagtacactttctcagctctagtcaggagtgggttttgtgtgtgctggacttttgaccccttagccctcggggaagcccaggtaggacctgggacaatcagaattcctggctagttgccaccagctacaagcagtctcttctctttatctgaccctgctgcacatatattatcattatctgtgtttaccatgatgtggaaaagactaggcagaaaactccagggttgtcattgcctactttatgaccttggttgagttgctcattttattcagactgtagttgtcgcaactcataaagttgccttgaggagtaaatgaaaatacctttgtaaatgtatggtagcaggcccagtgttagtttcatttcacttacttctctattcttaggaccttcaggggtgggaaacacatctcctgttgtcagtttgttctgatgacaggccctgtcacccactctgcc

SEQ ID NO: 35498 - DNA, 1139 bp, Homo sapiens
ctggcctcagtctcccaagtagctgagaccacaagcacatggcatgacgcccagctaatttttgtatttttttgtagagataggttcgccctatgttgtccaggctggttttgaactcctgggctcaaacaatcctcctgtttcagcctcccaaagtgctggaattaaggtgtgagccactgcacccagccaatcagtttgttattttaaaatattttcaacttgatttgaattgtgacaagtgaaggtggagaagcaagagacagagtttaaaaatttattggaataaattataaaggtgtaaaaataactttgggaggccttccttcctcccctctactttctatcctgtattgggtctttgtagactgtaaggcgtggggttcctgctctcacgcagcctatcacagcatagacaagagcattatgtaaacaacacagaaactcattccccaaatcacttacaaggtgtaaagttaaaaaaaaaattctaaatcgaatgaggtgaaatttagagtttttaaaaggctatgtggacatgtaatggcaattgaagagaagagttgtagggtttatctaagtagttagttcaatggtcaagaaaataaagaacaatgaaagttgcagttgcctgtcctcccacacatttattttttccctcctttcttttcccttcctcctcacacttatttatgctttgcatagccatctgtgtaaaaatctcaaaaagcttcctttagagactgtgattcaccagtcattgcacagtattgcatttcttgatgactcacatgttgagtaacccatgtgcacccttcatttttaactggagatgtgtctttcctctagagttgttgaatatcatttgtaaggtcagttgcacattagttcctctaccacagaagccataggaaaaaaatcaatacatagtttccagcaacaccatataaaatgcagtacggaaatttagtagaaatccacttcaaaacagataagtcaaaaagaaaaaaatgtaaaatgcaaatgcaaagaagtaatgtctagactttgaccatattggacaatttcaggtactttcaaatctaaaattttgagttaattcttaagtatatttagttaaatttaaatttaactacgtt

SEQ ID NO: 35499 - DNA, 1855 bp, Homo sapiens
ttaggcctgaagtgatgctgcagactgcaacagccagtgtattgggctgtgaggacaaatcttgggaccaagccatccagcccccctggctccagcaggggaaaagcacggcctggagctatcaaaatgggtgccgcccttcccctgcccaggaagcttagtgtgttaggcagttgcaagtcccagtgctgactgctgcccctccccaaggagttcaaactgcttagacagcaggcagctccagctggtgctcgccatccctccccccgggagttcagtaaggcttaggcagattccagctgagaggctgtaagcatctgtgcattccagggttgggacactgggccctggtggcatgggtttacaagtgggatcttccaatccatcagttgcacagttccatggaaaaagcacagtttccctggatgggtatcacgcttactcatggcctcccttggctgtggggagggggatcccctttcccatgtggctctcaggtgggccaccacacctcactgctcttccttctctccatgggtcacgctagccttctagtcaattttgatgagagaacctggacaccttggtgaaggattcacatgcttattatggaatctccgaacactgctgcttccagttggtccagcaaacatttttgcaataagaacgattataaacataagcaaaacaaaggttccccccaaccctttctcctataacttttctccagatctcaaaaggaatacttaaatctagcaaaactcagattcatccaaattaattttactccaaagggacataagttcaattaagcaagtgattattaggacttgttgtgctgtgggtcactggggaaaattactaaagttgagcgataaaaggaatgttctgacttcaggttggcctggaattttaaaattccattcccaagaaactcagcgctgcattcttactgaactatttactgaatcaatatggctggttaatattttccttagtaaggagaaattcaatactgaaaaaaatccactcagaagactttaattgaaatgaggtggacaaagttagatcacaatccacaggaacatggaggagagctatgcaaatcagcctgaggttttcagaatgtgttcctagatgagaaaacgtctcatgaactgagttctttacgacggggtaaggcaatgttggataggagaaagactactttatactaagaaaataaaaatagcaaggaagggtgacataaatagcctggcatttttgaaaaaccatgttattcagtaagaaggtactcaaaagataagtaagacttagctagggaaaatgtggagggaagagcattttaggcaagaaaaacagagtgtgggaagaccctggggaaagaaggaaccaggcacattcgcagacctgaaagaggccattgtggtgggagcacactgagcatggttgggagcaagctgaggtcagagtgaataacgaggaggggctcacccacgcagggtctcatgggcatgttaaagattgtattttgtccttagttcacagagatgctatctgggttgtacagaggagtgatattttgaagtgattttactggatactatgtggaaaatgaattatgagaaggcaagaatgaccacagaaagaacaatagcaagaattttcatttgccccaggaagatatgatcatgatttaggccaagtttgtggtctagagcttgaaggaagataaatgaatatgaatgataaaatataagagaacttgagtaatggcttgaataaaaaggataaatttattctatagttgtgggagatatttggggaattttaagattttaagcaaggatgtagc

SEQ ID NO: 35500 - DNA, 1318 bp, Homo sapiens
tcaaggtcaattatttattaagtaggagaaaggctatataagctacctaaggcaaagatcaaaggacagtggaagtcaaaaattaaatctaggcttctgaaccccccaaatcaagtgtccaatacacaggcagatgtgtagattgttacctatcaattattaggtgtttgctctgtgccagacattaagaaaagcttttcacactttctaaagattatctcatgtaatttgcagagcaatttcattctacagatgtgggcagttaggcacagaatggatgagtaacctggccaggacacttgatcattatatgccaaagcctacatttgaatccagatctgtctgaaacatcattgcttttcatcacttttcatgtctgtttacaattgcagttgtatcatggctgcaaattgaattcatactacaatgcttatggtctcagcaatgactaattccctcattttgtccaatctgatccacataagatccatcagcattattaccagtaacttccatttctcaggaaagagttaaccagcagtctaattctgtttagtctttcttggttagaaatgctcatctctcagatagcctttctcctgcctctcacactctcaattttctccctgctatcatgtctggatttatgggaggaaaagtgtatatgatattttggcattgataataggggcatagtcctcttacttatgcaatgaccaaatacgatctttgatctcttcctgtgaccagacatcctgctgacctcaattctaaagtttgcagttggcattttgctctctctcagcttggacaaattccagggcatgcactggctgacttggctctcccttggctactgctgtgcaccctgctgacatctgactgtaacttccatttgttcctggtcatatcctaggcggtcagttccacagtcctcattacaaagtcaccttgccccactatggccacctatacctctgccaagtttcccatccagaaacactgattctttccacacagaaaatttgagggtagtgtaggaaagataaagttcgccccccaccagctgaccatgttactgtccaggcacaaaattgtattttttaaataatagcagctgattactatctaattctttctatttacaattcttttgtaataaattttaatctacctctaggcaggaagatacttccaaaaagccaaaactggggggaggttccaagatggccgaataggaacagctccagtctacagctcccagtgtgagcgacacagaagacaggtgatttctgcatttccaactgaggtaccaggt

SEQ ID NO: 35501 - DNA, 1392 bp, Homo sapiens
tcagtgtatttcaatcctttccaacaaactaaacaaactaaattttgatatctggtctttttttatttttattttatttttttttaactccaagctactgtatattctttcaaatctctgtaaatattctgtatttctaggtttttggtcctattattttagcaatatataatgacataattctgtatttaagacaatgatttcttccaatgtgattttttttccccatatggataatattctgaagggccataatatagcatgcctgccagggcaggttgaggggaggaaggaagcatggttataaacagcaccactggcatatatccactaggtgtcagtcatgcagttagcatcaatttacattcttaatcctgatggtcataaacacaaattctattaaagctacccctgattcagtatgaacataccacagagactcctagaattttatgcaatgtggaataaagtcttgtgactagaagagctactgttttgcactagtgaggacttcagtcatcaatgaaatgcaggcttttccgaagtgccattgttagttgaggacaactgtgttgggggcagttgtgatgactctaatcagtttagattgatatggtatctaaatgagagaatgatagggtatcatttcagagagttctcttgaaagatttagcttatggaaacagggaagcacaatgcagaatatttcttatatatttaacatttagaatatttcaaagaataccccctccccaaatgctgattatattgagaataaaatagtcttggggaaattgacttaagaacacaagacatcttgggttgttgctaccaaaatcaaaaattagttctattctttcagacacctgatgtattcttctcagtaaaacaatgtgtgagttttataggagaggttcttaaggattcttttagaaaagtgtcatataaggtgcttactgtttctgggaaggcagtataatgactgtctactcagttatcagattgtctcaatccagttcaaagtgttaattgtcaccgtggactatgtttgaactccttgctgtatgactaatcccaagcattagtcaccataatcccaagcattccacacaatttccaaataaatatgggaggcaaaatagaaataaggttcataaagatctttaggaaaggcttggttccttcaacagtaaaattaacgaaccaaattaagtggtctcagattttctttccagctctgctgttttgtgattctatgatgcaacatgttgttttccttaaaacaatggaaactttttatgatgagtagttgtaacatgttagttgttcttaaagatagaaaaatgtaaatatgtgttatcaattacattactcctcaaccctgatccctgc

SEQ ID NO: 35502 - DNA, 531 bp, Homo sapiens
ttaggaaatgtgggtgaactaatggaattaacccaaatgtataaagaaacttgaaacatgctgatggagacccctaaagtagagggcacatacatatgcaggcactccatttctgagccttcttaattaatctactattttctccagagctgggattttctacttttaatgcaatagcaaaataacaattcagcatgttcccagagtacaaacaaggattgtgctgatgtaatatttacaactgcatcttctctgtgttcttcttttatctcttcctcagctctgggtcttttatcagtcagtcagctaaggtcagactcacctcaatggctcagcacaccagtcttgtttccattacatttggaggcagaaaatctgaatctttacaatgctgaccttattgttttacaagctattgattatggctatcaaatttcaacagtttactggggtcagtctctggaaaaagaaaaggcagaaagagaagccacattcctctccctcttctgactgcactgacttctccattag

SEQ ID NO: 35503 - DNA, 1633 bp, Homo sapiens
aaatggcaaaggcagatttgggggttttgtctgtttgttgttgttgttttgggatgggggtctcactctcgtcacccaggctggagtgcagtggcactatcggctcacttcagcctccatctccctgggctcaggagatcctcccacttcagcctcccaagtagctgggactacagacgcacaccaccaagcctggctaatttttgtattttttgtagagatggggttactccatgttgcccaagctggtctcaaactcctgagttcaagcaatctgccctccttggcctcccagagtgctgggattacaagcatgagccatcgcactcgcagaggtggattctaaatgaggaaattcgactgggaagtagagagattcacccctaaagtctactgggtagtacatgatgtgaactttgacactgactgaactgtgttagaattgtggctctacttcctattagccggtaacctcagacaaatctctgagtctccatttcctaatttataaaatgaagatcatattacagtgttgttataaggattaaatttaaaagcagagtctatgacacctatgatagtaaacaaaactatctaccctttattgaatgcttattgtatctagactttatgctaagtattttataaatgttatttatttaatcttccaataactccatcagacaggttttattactcccagtttataagaaacagatttagagaatctatgcaatcagtccaagtgacacagacagtgagacatagagtggaaaagtgaatcctgatccacacattgctcatgatccacattgctcacatggcactgggtcagtccaccaggtaatacggagttcatgctctttcacaagactgcagaaactgatactgggaaccagtatcactgatgtaaatcactagtcaaaactgagatttgcctgagttcaatatactttgtagttcacataaatatttcagtataaatatgactatctcctctctgtccactgttggagggtctctcatgtttctgcacatcttgcaagcagagccactacaatcttttcagaacagtgaataggtcagtcaggcaagaagcaagcaggaattgtacagggagttctcctggaggggccacaagagagaagggttagccaggtcatccttaatcagaaaggcgatcagcaccacgaaagccccagcggccattgggccctacagtcaagctgtgttagtcaggacaaacttacatttcaggacagataagcatgaaccctttaagtggacagcttgtgccaagagggcttgtttagcaaaagaagctaagcaagaacatgagtaaaattctgaaagctgcaggctgtgacttcactaatgcagtaaaaacaactgttttgttggctgacataaatgacttccctactgtcaatgaaatctacaaacagtacttcaagagtagttttcctgcaagtgctgcttacctggttgctgctttgcccaaaggaggccaagctgaaattgaggaagtaactgaccaagcacctctcacaacggcatgactataagtggcccggtgttatttagtctgaaatttttcacatcttgacttttacaattgatataacatcttaat

SEQ ID NO: 35504 - DNA, 1829 bp, Homo sapiens
ttggagctggaaggagcccgggttgtcatcccaagtctatatctgaaaaatgatggaccttagataagtcagttactcaggaccaagcctctcctttaaaatgctgacaataatggatgccgacttctagcttacagtggtgttttatgtaaaacacaatgaccttttgagaaaataagactctaggaaagaaaagagctctgtaaactcaggattcaaatatcattaagtattcattgatgttattaaaaacagattagatcaataatgtatctagcatcatccaggataatttatgaaaagtagtatatggagtccctatatctcaaaacaagttgaaattacttaaaagtgtcctgatagaggtttaaatttttaggataggctagattgcaatatgtttgaaaggatccctaagggcagaaattctagattcccagtagaaaccatactctgacttcttcatcaaatagggaatttccaaacctacaggggaatagaaaggaaatccagtacagacttgattgctttgtgctctttaagtgatattctttagttgccacactgatgtgtttaagatgtattaggcacacttctgtgccttttgggggtttaagggaggactctttaaagcgaatgtatgaccacatttgatcaattcatggggagagtggaccatacacatgatggcttcagatatattcttaaatgagatagtacagtataatgcaatctggtctagtgcaagatttggcaatctttcagaagagaggagtgataaattgctgagtactggccttgggggaaacaaggagtttaactagagaaagcaagaggcacaaagaaggtctctttgctaagaaacacctcgctgatttgagtttcatttgcattaaacattctccttgtaaaatacaaatattcctcgaggaggagttactttgatcagctcaatttctggcttgatatggatgagtcggaaactgagaggagttttgctataggactggtggagtgatgggaggaaagatcatttggaacatgagtcactttaaaggcagccagatctgatggatgtaatgcttaagggactgtgtacagcccagggcagcaatgagagggggcaccaggaagaggaaggggagtcaaaccgtgggagatgtactttatcaaccaggcaatattttctagtacaactggctgggggcattgaacattattccccgtgattccttggtctccattgtggcaggatactgactcttattctgtttgaaagaacacaaagttaagagttcaaagacatgggcttggctttctcagtgtgagtagtccatttgccacatttcttttgcctgactcatcctgtacctctgccaggtagaatgattgagacctgctcctgccactcttaccaaggcactttgagaataaatgagtaaatttctttgttaagcaaatttgatgcccaaatctgaggaatgctaagatttaaaataataagtgaaaacttcaagagactgatgttcttgtagcctctttgggctaataagagtaggctggttacatgcatatgtttaagaaattagagtcttggtactgttaaagcaaactaaatatggcctgagaatgactctatacttctacatttgagtccttgtggatgaaccataacctagcttaataggcagacaaaattgaaaatttaacatagtagtatgcacctgtaacaatagctgagtgttggccaatcccagcggccatacttcaaccacttatacactgctgggtgttcaaactgtgttcaaataaggcaaaacctgagctgt

SEQ ID NO: 35505 - DNA, 530 bp, Homo sapiens
tgtagagacgaggtctcaccatactgcccaggctaatttcgaactcctgagctcagggatctgcccgccttggcctcccaaagtgctaggattacaggcatgagtcgctgtgcccagcctgtcttgtgctttaaatgaatgctttgaaaagcctatgcataattttgtaacatcatgtattgacctttggaaaatatgagttcactcagttaagtagatctttcaaatgttgacacatttgattacacaatatcaaaaattcacatttgttatcaccactactttcatcagaaaagtcttgaagtattgggaaactgccatgtttccagtgacaaatacaaattttccaaaatttaagttttaagtgaaagcttgaattgtaccgccaataacaaatactgtcatttgtttttcttaacagattcacttggttcatttttgaaaaactgtttaccaaaaatccaagtctaaataatagtagtttgtctgtcaatagtttcttcaggtaaagatggggctccatgaagaag

SEQ ID NO: 35506 - DNA, 1140 bp, Homo sapiens
ttttgttttttggttggcaggagaggtgatcctctgctcagagctctaaaattacattattccttaccactactctttctaataagcctaaaactgagcacacctgctatttcttaatgtgactcttcttattcaacaaggacagaggatcctatatcttttagcataatgctgcagcattataaattttccccaagcgtgtcatgagtgccccgtaaggcattttgtacaggtttttttttttttttttgaatgaccctctcaaaacaaagtcctgtgcaggaggattaaaaatccctcagggaacttccttcctttagcagattttccagaaggaatgtgctgtgggctcttgatttgatttcctgccccagtttacagcatcatggtataagacatgttttatccctattttttactttacaaatgatgtttgcttaaaatgaatgcctatattggctctaaaacaaagtaaccagtgatattggttggactgtcacatccacttataggtctacaaaggaagaaattgacctttggtcctgtcgaagctgctgaatttgaatcagaagtgctgagtcttttgacactgttactcacaggctatgtgaactgggtaaaaggtactgtagcagagataactggaaagaatcctgacaatatagatgttttccttccttcccagggatgggatgttgactgttaatcttccttactattccccaaaaccagcaagtggccaccaatactttccatgtgcacagacatgcatcttttctatgataactaggctcagcaaatagatctttattgcctcaaggttgctacaagctctcatcctttattatttttctaaagaaaacaatgacagccattgagccattgtgtgttgaattgttcctccataaagatatattcaagtcctaaactccagtacctcagaacatggccttatttggaaatagggtaactgcagatgtcattaagttaaaatgaggtcatatgggccaggtgcagtggctcatgcctgtaatcccagcacttcgagaggccaaggtgggtggatcacctgaggtcaggagttcaagaccagcctgaccaacatagtgaaaccccgtctctactaaatacaaaaaatta

SEQ ID NO: 35507 - DNA, 1271 bp, Homo sapiens
ccagtgtccatttatactgcttttacatacatgtattttcatatatttatctcatgtgccccttagattattcccctcttgaatacacagcctattcatctcattcttcttccccaaagaaccaaagacaatcttctgtgcacaatggaccattgtaaaagaagcttgtgcctcattcgtaaatatttttaaatgcttacataataaaagtcggtgtttattttatttatttatttattcatttctattttatttttggagacagagtctcactgcttcgcccaggatggagtacagtggtgccatctcggctcacggcaacctccgcctcccaggttcaagcgattctcgtgcctcagcctcccaagtagctgggattaccgacgtgtgccaccacgcccagctaatttttgtatttttagtagagacggggtttcaccatgttggccaggctggtcttgaactcccaacctcaggtgatccgcccaccttggcctcccaaagtcctgggattacaggcgtgagccacccacgccaggttggtgtttgtctagaagtttataatcttgtacattacatgatttcgtcaccggtagagggtcatgactgcaagttgtccaggttcttggcgttttgaacaaagaattggacaaaacgcccagcaaagcaaagaaaggatgaggctatgaaagaaggaaagcaaggacttattgaaaacgaaagtacactccaaggtgtgggagcgggccgagcagcagctcaagggctggatagggaatcttcttgggtccaaatacccactagaagtttcccactggccacttcatgctcacctcatgtaaatgaagtggtagcccgcaatcagtctgattgattacagaaaacagccaaccagaggctgaagtgaagttacaaaggtcgcactcctgtacaaacatctgattggttgcaaaaccagtcagaggctagggtgaagttacaaatttatacttctatgcaaacgaaggctcagcctgcactcagtctgatttgctgcggacagccaatttcccacctgccgctcagaaaatggtcgggggacttgcaaactgagtagcctctggtccttttgttacttagacaggaaaagttagggttttcctttcaatttcattctaggaagtcagcgtgaaacagccttaggttccctgcctccagaccctattctcctgcctcaatttgcatcccttccttttgggactgagtcccaacctccccagccccgccccatc

SEQ ID NO: 35508 - DNA, 1025 bp, Homo sapiens
aataaacattaaaattaaaaaatctattttgtttgttcattagtcccatttaaaattacccagtgcagaatgtgaaccacctagtcaatttgactgctttcctgagcatcaacctgtaagaaatcaagacagaagataattctcataaaaattccctccctagggaactcccggaaagaaattgtcagaacatgagttttctagttaaaaggaaacaatgttgcaactaactcaaatcaataaatgactacctccatcatccctgtagccacgtgtgtggaaatatgctggcagcacagccagtatttgtgctaacattagcacactcaaggaaaatcaaactgtgctccttaaggctgtcaggccctcttaaaagctttcccctcccacgatctcttagatgagactgacatctatgcagagtaatggaagaaggcaaagtcctttttcatctccaaggactatggctaataatggctactccccagataattgtatatagtatctgcctagattaacaaacaggagattgagtaaaatcgaggaaatccagtagatgacacagccaacctttccggaatcaggatcttttacatttagtgttccctctgcctgaaacccagttttccccacatatttacatagccagctgcttctcactgaagctccctggtggggccttccctgaccactccttctaaagcaagatccacacgcctgccttccacagtgatgtaaccacccatctgataataaccacacgcttctaaaaatcttgattctttctttttgctctctatcccacttgaatataaatcccacgagagcaagcacctagtttgtctagttccctgctgcaggaccaggtctcagacagtgcctggcaggaggtgggtgcccagtaaatatttgtgatctaatgagcaaatgcaggacctgagtaacccgaggcagcgggcctacagtgcctgaagtctgaagaccatttctcaattgcttctttttttttttttttttttgagacg

SEQ ID NO: 35509 - DNA, 2140 bp, Homo sapiens
tcaaaaaaaaaaaaaaatgcttgagatctattttgttgctttgtgttttaataataattatgctgtgattcctagggaaatcactttggatatgctacagtttcctcttttaaaaacaatttagatcatttagttgtttgcttaaatgtctttaaaggccttaaattgaaacaaaatgatattgagtttatttcttgtactctaaataaagatatgaactatgagccatcagacacagatcatagattgtgataaacatggggaactcagcacaagcctacaagagagtaaagtcttaaacattcaattgccaaaagattgactaaggctctgtttaattattggtgttataaaaagtgagtaatatttacctggccataatcgtattgtgtaaaagtcacttatctttcctgccaggtgccacatttctcacagttatttaaaagaatgagaagaaatctttactcagtcactcctttccaaaatgtaccattccatcatcttatataatttggcagaggagaggattattaagaaagttgataaaaaataaaaagtgccaaccctagctcaggttctgtacaaaatcagtgacaaatgcctatgttagcaaagggtacaagcaaaaatgcactactaagcaatgctttggcagtaactaactggttcagtacttataagacttctgttaaaaactcctccatatctgatgcaatcagtctatttgaatgatgaaaattttaaggtgtttgttgttaataaacccatattataaacatactgaaagggcctttctagtttgttcatgcaaggggttaatgataaatccaattttgcaggaatatcaattcctaatagatatgtcataatgtcttggaatagtgttgtcacgaagtttacactgactgtaattcattaactaaactttaacatcatcatgcaatatgggttcaggtgacattgttgaatactttttggattttggcaaagatgccttagagtcattagttatctgtcaataatttacgaatcctttctgaaatctgttagcaaatattttttatcattataaacatattcttgtaaatgtgagtcattagaagtattccatgttgtggtatcgaatgagttcaatggggtagtgaaggtgtttaaaacagaatgttgtaatggaaaatgcccacacttgccaaatggaaagggtcagatgataccttgattgagaaaaaataaatacaaaaactgagggtgtgatttgttttgtgtcctcccccccgcatggccagaacataaattgcttgttaactgtcactgaggctgagtcccaagcatctgttatttgtaccacatgtgaacattactctagcctcactttcagaaaaatatgttcatttctcacaaagtactgagtacgtatttctattcaatcagcctgatggataagcttcaaaggaccaaagtaactcattaatataatgtttcctcaacaagccagtgagttttgtaggaaagcaagagagtgacaaatggcaaatagtgtcttttaaagattctgttaggagttattaggcaagctggtaatactaccacccccaattttttgtacattcttaaaaataattatgtctgattagaggcagacagtatagcatgaaattcaatctttgtgctattacatgctttgttaaccatgtacaataaggatgagaaaaaaagcaaatcactttatttttggatttattattattaataattatttattccttattcctcattatttattatttcatttattatttaagagatagagtgtcactatattgtgcaggctggtctcaaactcctgccctcaagtgatcctcttgcttcagcctttcaaagtgctaggatttcaggtgttaagccaccgtgcccagccacaaatcactttatgatgctgtttaattatatgaatcctatgaggtcttctataaggtctctaatagtgtatgtgactaggatagaactggtgtcagaaacaaaacccaaaaacagaaactttcgtatgtcttctaaaattccactaaggaagatgtgtctttcacttaagatcccaagtcacaaagcccataatcacttttttttttttttttttgagatg

SEQ ID NO: 35510 - DNA, 3021 bp, Homo sapiens
attttgccagcattaatctcaaagcataagttttaccttttggggataaagagatagattgtgttttagccatatgaccaatgtagaaacaagctaaggttaactcctcatctaatgaataggcccgataaaaaagttggttgaccacaacatgaataaataaataaccataagcttggaaatgctacctgtagtatttcagagtgtcgatcacatttgtagtcatcacttaaagaattaatgtctgccaatgttatcatctaaaatgtatttacagaggtcagaagagctatgtctgtcctcctctatgcaaagaggtgatgacatcaaggggtatgtcacaagccaaagtttagttagcctaagttagttagctggtttgcagtttttatccactaagtctgatcttctgacccctcagttttacaactttccactctctgtgctgcatagcacctctccacttctgagttaatcatttctttgccattatctggcaagaattcttatctcttttgctgtcactttataacagggtcctcttatcaacctgcatagagtcatgtgatgagtcaaagcctatcaaaagtttccattcttctgattagaaaccatcatgaaactggatacatggtttacagcaggtcactaatgttggaaaaagtacagagtccagggaaagacttgcttgtaactttatgaattctggatttttttttttcctttgctttttcttaactttcactaagggttactgtagtctgatgtgtccttcccaaggccacgaaatttgacaagctgcacttttcttttgctcaatgatttctgctttaagccaaagaactgcctataatttcactaagaatgtcttctaattcagatactggggatttacaagagtctttaaagcacggacttacacctattggtaagtaggagtttctctattgatcatctatttattctgctactacatacatataatttaatcttgttgatggattttgcattttaagtcatggcttttcctattatgtttattaaaagcacacaataagcctatgtatatatatcacacatttatctttcttgcagttcaaaaaaagcaaatggatatttcaacatatgaatattattcattatatctagtgtttactggtgtcattctaataccctaatcagccagaaaatataatttatactttatcaatttcaactttaatattttctgataatttttaatcagaaataataagctaaaatttgaacaatttgaaacaagttaatcatattgagtgatcattgatcaaactttaacagatagctgtcaagtatttgttacttttcaacccacacaaaagtatggtgtcttattctctgcttataccgtaaaaaattttcattttattttcctggggaatgaaagtcatgcccccacctccaaaaaaaaaaaaaaaaaaccaaaaaaactagaccatcattagtaaaggatttgaagagctactgtttctcgcaacaattagtatattttgtttttacaaacagaaataagtaaataaagctactattcatttaaaaaatagagttacaaacttatgaattttatagcaagactacattcaattaattctaaaagtaaaggactgaagggaagtgattcccagtgatctgtaattatttgtctgttggaagtcaggcccttctgcctttccccagtttttgaaggacctgtgccttttctggcagcatttgcctaggctttcagactggaatttccctccgaatttgcaggggcctgtcatgagctctctgagtctcagctccattataacaagaaagaaaatcaaggcttgagtttttcctcttttttccttcctagtcagctgactccacagaatgcagtggagtcacagattgctttttttatgggccaactacaccctaaagtatatcacttgaggaaatgtttaccaaaaatgttctatacttacgaaaaagaaaacatggggaaggtaagcagggtgtaacacacaatcaattgttctgcagataacacagaaaatacaggcacaagaaagatgagagagcagcacacaaccatttcgcatctttttcgtcgggcagaaccgccgcggtgcgcaggcaaggagtccttcccggcagctccgcgcagctccggttccgcgtccggggccgcagctagagcgcgctcgggccggagacgcggactgcgcgcgcacgggggacgcgcgctcgggggctcgcgcccgcgcgggcggtcttgggctcctgctgcgcgcagccccagctggccgctgccaaaatagagttgagctgggtcgggagaccacgcacgccgatccctcacagtctcccccacaccccatgggtgaattaaagagggtaaggtaggggaaagagacgctgttgcacttttctctgcaaccctggaagaactgtgtttccagctaccgcacgcgcaactcacatcgcaagggaccgaggcggtacactctgagcgtaaacagagaacacctgcagctctggaatcggtcccaccgcagagggctgggaaccggaggactgtcggtccagcccataaggggctgctggggactaaacctcaagaaaagtaccgaagaaggctctcccctggcctcagcgagactaccccaacatcctaaacctgtgcaggcacttccgggcgccggattccgggataacaaaattccagtcaatttgccggtaaaagagacctctttcaggatcttgttcgcagccacccgccccttcccaacccaagcacatcccctccgcctcctggtattgcagccccgcaggtggttgtgaggtgtccgcacctgcaacatcttagtgaccctgaggcggctgtggcaccgggagacaatctgtttacctcgtagcctccacgagggtgctaacggtcgttcccagggtgaatggctggacggagccatccaaagggctgagggagaggaacagagggcggtgaggagcctt

SEQ ID NO: 35511 - DNA, 4900 bp, Homo sapiens
tcatccgacacactagcaagggcacacgcccacccgcgcccccatcccttcttcttgcttcccctcagatcgaggaaattgccgctctggctgcttctccttcgccgccacgctcagacagaggtcgcttctgactagctgtaagacccggctgcatttacatccccccgccccgggccagggtggggtgggagggggtgaggcggggtgaagaggttggggcaggccgggggactggagcctgagcctcatccttattggctggcggctagtgtccgacctgagtccggaacccgcgtccgcattcactgtcttcacccctcaatccagccttcccccaacccctggccctacttacctccttctccccctcgtcttcccccctgtccttcccagcaccgtcaccctcggggctgggaagggccgttctcggtcccgcgcggggagtggaccaggcaggagagggaggttggaacttcacaactccacacttgcgatagtgagcaagagagaggcagagagagatagggggaaggggcggagaggaggggagagagaagggaggcgagagaaagaggagagagacccctgccgatcctgagccagagggcggtggagggaggggaaggagtcgcccgagccgtccgggagcagtggcagcggcacagccggggcggcaatagcagccccgcggtcgcctccgctgcccgccgggagctcggcggttcacggctccgcgccccgggcagctgcgtcctcgccaccgccgccgcctgcgcccttgcggagccgaaccagagggccgggacgctgtcttcctcgcctccttttttaaccctgacctcctcctcgcagcttgggggcggctccggagctgcgagaccggacagggctcagaggtcctgcccggcagccccgaggaggcggaggcacgctccggcgaggcgagagggttgggttagcaggcatcccggtcgccccttccttcttttcgccggagttgaatctgtgctgcccgtgtccaggtgctgggcttccggaccgacacggatcccccatccccgcccgcggtcgccttgtcatgctgcccaaagtggagacggaagccctgggactggctcgatcgcatggggaacagggccagatgccggaaaacatgcaaggtaaggaggcgccgcgcggcgctccggctcccgctgcttccccacccccgggctcgccctgcaggcttcagcctcccgccccgcgcgggcgcgggagtagccccgctgggcgctcgcagccgcgggagtcaagccccctccccaggtgcaggcataaaagtttatggctcttgaacaatgcggggcagaggtttttccaagcaacgtctaattggccgcttctaattaaggaaagagaggcttccagctctatggcaacccaagcagggcagcttcaggctaaaggtactttagaataataagatcattctaagaaatggaatgtctcactggacacccgaacaggttctctgtcattggaattggtgtgtactgtacttcaaccagtactcttgtgtggagggaggcgacccagtctaggaaagtcaactacagaaagaggtgacctccgaaaggattgtcttagcgctattagaatacatgtgaccacaccaaaagcccaggcggacacccgcagccagctcggatttggacaattcaacattgctggcagaactgaagggaacaagttaccccaaccccatcccctgtacgcgtagtgctgagtgagttgggggtgggaggacagcggttcgtttattgcccccttttaaaatctgagatctgaaaatatggaggtcccattcgttttcccagctcttgattgccaacaaaaaaacaaatcccgctggctacattttctcctcattccaaaatagcaaccctatggcttgtattaagcccttcagaagtttatctcatttgctctgggccagggagggaacaatgctaggaaaagtcaccggtgctcttccatcctcgccccttccagggtgcaggatgtgcgggccggcgggcctgtgatcccggaacgcttcctgccatccccttgcgcgaacttgaaaggactgggaggtgttgagagcagagttcagggctggtgcactctgcggtgctgagtgggcggcgcgcccgggcgctcaggccgggggacctgtagtcgccctaccgcggaggggaaaatacgtagctggagggcgtgcgccgtgcgggttgtgatccgttaccccatcggtcatcctggggtctccccaagcctctaggtagggctgtgagagtcccctagagctgaagccccggaggctgacctgtgggtctggctgctatgggaacccggttggtccaaagaagcctttcttccgggcacctggaattccagtttagtgtggggcatcggggaagtggcgctggggggctgggttgggggacctcagccggcagctccggagagggcctacccttggggtcgctgggtgaggccggcacgattcttggctccaaaaggaaagtttctgcttcttgttctggcgcgagaagccaaagacttattttgagagcggagagagaaatgttattggtaacgttttctttggaaagttcgagaggggtcttctggacacactacctagtgcccccaaaccagagaagtagtttttctttggtgcctgggctcagaagtcgccactcactcagcccatggttcgaaatcagcatgggaagcgccggggcaaggcttcgtcggagactagaggcctgcctgtcgggaggagcccctgggggatggggaccccattctcctgcttgctctggttcccacctgggacgcctccgtaggagcccagaaagacgatccactacatggtcccgggacagagcagcgcgcccaactttgagggaactttgtgcgcctctctgaggccctagctttccaaggcaccgccgtccgttcttctttccctagaccgaaactggggaagagtgtgggcgcttctttgccccgatgagttcgcctccccaaacgcctacttcggctgcaccagagcatctgggaaactctgaaaggtgcccaggcctcacacagcagcgtctccctactcagcctctgtctttgggttttttcaagagagtctctacctcatgcctcggtctttcttcgatgtcgggtccccgaggtaggcacggagtccctctgaaagcagttgcctatctgtgcccctttggtgtaaagttagagtttactttgttgggggaaggggaggtagaaaagatcacagttgggaaagtgcgcttttcgccttgttcctaaaacatgcctcaagactgtcatcgcgattgttaggagagctatcaacgtctaggggctataaaggaatttctgaaccctcggcccttcccaaacccccaggttcctaaaaccctagtgggggtctcttggggctgggattcaggctggcaccgctgggaggacctcgcctagcatccctttattaatatttcacgaaggcaggctcctgccttctctggagcctcttttctcggaatgttcccaaactctggctaactcactcccctgtgagccatcctagggctctgtggcccgggaagagacgcgtcaactccgcgggtctgcgcgcagtccttagccgcaaagtgctgcaagtgacccccctgacggccctttccgaccgaagagctcgggaaccaaagagaaaaaaaataactttattttcaaaagaacaagtcatcactgcggcgatactgtggcggaggactttggcgatggggtgggggctatttctctttcctttttggtaaacaaatcagaggaaacttctgcccggccgtggctttccatcccccacctgccccaccccctgcaaacgccactgattaacttaaaacaaactcggctgcgtgtttgtgcgccgttgggtagcaggaggtagagcctaggcgagagcctggtgcgcccacgggtttcgccgaagagtgcccgggggagtgcgggcagggtcccggctgcgcagacctgcgggtgcccgcccacccgcgccccgcgctcccatacttgacctgtgtggatgtggagtctccgggaaataccggatcaggcacttcctggggtctcctggtcactgcccttcctgtgcatagtttgtcatctttttagctgcgaagacgccttcgtgggtctgcgtccggagcaaggcggttacccgatcccggcagtgagccgcgccgcgcgtcgtggcggcctgatttctgtttaactttaatagggcgatctcgaggtgtttatattttgctatgatgatcggaaacatgtgaggttcattacagggcttcaatactttgaaaccaaaacccttctgtgtgtcttttactcttctggtatttttccccgtacgggcgtcctctattttctttttccttctttttattttcacagattttcaaacgtaaggagatgaaagtatccagaatagaaaagtactgtcaatacggaactgaatgtttcgattatctaacagatctgaaagttgggagcctcaggctgtttagttaaagtgggctgctgctgagaagcgggtttctggggcttcagtttctctgtcggacagagtttgcaaattggtgctgctgtccctgtaagcaaggtgcacttgcagcaaaccacttcaagagggagggaataaagcctgcgcttgtttctctaccttaggcgaaggtgacattttggaatttaacttcatagggatttaaaagaaattctaaactgtcaccttatgcaattcatgtctctatttgttgctttgtggagttatgagacttgtgtttaaaagcggtcagtttaaaat

SEQ ID NO: 35512 - DNA, 666 bp, Homo sapiens
aggacataatagacaagaaacagtttttttcctcccctttcttcagaagtagtcttccgcatggtttaatgtgctaacataaccccggttccaatatttcaaaagatacagaacttcccagcatgatgataaagttttcctgtgttccaataataaaacctcaacgtaccagtgatttccagttcctttgtggctcagcaacttgtgaagaccaactaagtcctaagtacccagcctgcagtatcagtgtgggagtcggaaacagatgttcacgggacaatgccatttgttgtcactgtcgatactatgtggcaactttcccaaatgaaattgtttgtggatggaaaagaatgtaagcagtgattcatgcccaggaatttttttttttttttgtctgcaggctaaccgtatcttatttgttttaaatcgcagagcattagtggattaaaaattttaggttaacttactattatagtatctttttcattttttgtcctgtacttctaaaaggagtgactaatttaggtagcttactgagaatagtaaataccttacttgatttgagaattcaaaagcagctgacatcttttcagatttagtgttttaactattgagtaggtacagagttgccatttaaatgaacagcatgacttgcttagcattttt

SEQ ID NO: 35513 - DNA, 607 bp, Homo sapiens
ttcatttatgattatatgcaaatgacttgtgttgatttaaagcagtagttcccacaccttttggtctcaggacgctttgcacttctgaaaatgaggactatggagacctttagtttatataatgtattgggagttaaaaacagagatatggttacaaatcaagcatccacaaatacacattccatttgtcaccagagtgatgatgtcattacatcctgtagcctctgcacactcctgacaagtggagggtgaaaagggcaaataacatcttggtgtaattggaaaaatagttgtaacctcttgactccctggaccatactcgtaaagccactgatttaaatattatcactcctatgggtgtctactctttcattgggattaaagattgatgccaaatgaatacattttccaaccttgaattttcaaatcagtaagtaagatcagggacatccaggggaacaaaaacccttctcagtgtcctgggatttctctcccagtggctgtgagactgtactcctggaggtagggggcatcagtgagaccagggccagtttgaggacagcacagatgtctctaggtaactgacaaacagacacaggtttccctg

SEQ ID NO: 35514 - DNA, 767 bp, Homo sapiens
gccttcctgctctcattcactcatctatcccattagtctcagtaaaatttgtattattattatctgaagtagttgactatgtgcagtttttaaagaatttatagcataggcacctttttaaagtaaggactttccttgaagtagaaagttcccctgtaagagaactggcaaaatgatagttgagacgtcactttgtgtgctctgcaaataatcccaatgtgccccacagagttcaacagtgtgtcctgcctccttccagctcagggttcaggttgcccaggtactgacccttctttcacacattctgaaacagaaaccacaggagttcttacaacacttgatgtttaaatttagtgcgtagatgccagcacctggctaaagcaggtagacagtgctgtacatgatgcaagagctttcctctaacacacattaactgtggctttttcatgcatagttgactctatataaactgattgacacctttgggggtcatctttcctctgactcataatttttctcactcttgaaaaaggtttctgtacacccagtattctctagttaaagctgaaaattcaactcatcatatttacacaataaaaaaaatccattctgccttgtttttaattgcaaattctactcaagggactagttctcctgcttaggaggcagccctgtgccttctcctagagaagcaagtgcagtcaattatggtaatgaaatgtcaataaatataaaaatttaatacagtctgctctgggtgagtggca

SEQ ID NO: 35515 - DNA, 1505 bp, Homo sapiens
tatgcttattaattctgaaataagcattatagtctaaacatcataaaattctttttgcttggtagctgcataaaagttggttttgaaacagcaaaacctgattttcctattatgtggcaattctccttcctgaagctggtcacaatatttgctttattgctggcttcctctaaatatgattacatactcacccacacacacactgccactggctggactgcaaagcctagtgaagcagaacatttacctcacatctttacccaagagcattggttaaattgttcttcatgaagtcagataagcaaaagaaatatcccagggttcttcgtacaattagcattcattctcagtgtttaccttttcatatgtaatattctaatttagaaaaacactcactagacacttgtcaaataactgcacatatcttcatactaatgccttgctgatatatatgcacctgagggtaatgctggcaaataagcatttcctaaaatttatgtaatcatttgaaattcagaaaggattgattagcattcaagagatgccactgttcaatatttacaccatagagatttggcagaagcaaataatggcatataaagttgatgcttgtcttaattaaatgcagtataataggtgttgtggattttttttttcttccagtgagcaaagcagtttagcaatgaccagatgtaattcattttggagttctaagtttgaacttaatcaatatgaacttacagccatggaagaagtgattatcatttgttatttgctggcacaagaatataattgcctaaatagcatttatttaagcatatttctgaataccttatgcctaaaaatatttgtcatattttagctgttaatgcttatcttgtcattttgctaactactgctatttagtgagatgatttttcagagacatattggccaggcaagctaggaataaccagcaagaaaaatcaagtgagaatgccatgtgctcttggttgatgtttctcgctgctttagctgtgtcaaccactctgttcaaatctcagaatagagtggctgtcttagtaccagctcagaagagcgtagttggttaacgtggttagcccagatgctgcactctagtggactctggacaccccagggcctcaggtctgttctacaatggaccaaatcagtgactcacatctgagtcttgcattagatcttctttctagtttactgataaaaatctgataagtcttatcttgagttgtggctgtgtttggttaagaaggttaaatttcaaacagaccaatccaaagccaggagagaagaacaaatagaagtacaaggcctctcatcagtattgaaacattaaatcacacaaaatatattgagtggccactatgcagaaccattgtactaggcaagctatgaaatgacaacatagagtcttttttttgtttgagatggagtctctctctctccagctggagtgcagtggtgcaattttggctcactgcaacctc

SEQ ID NO: 35516 - DNA, 611 bp, Homo sapiens
aaacactgaaagttcagtgtaggtataattgttttagagttaaccctgtgtatttaaatgtcaaaaaaaatattcagtgaagatgagtagagggttgggagagagaagagagatcataagatatcacaccagtttagaagtcttcactattgatttaagatttctaaaaaggctctggaaaggcagaatgcaggccttcctaatgccccaggcattttccaaccatgtctctaatcacataagaagaacatcacccatgagtcataggactctgggtactcttagaggtcagaaaccgctgcagtgcaagtcctttcagcctaatcgcctcttcactagcaacgcccaggttccacaagagtgctctgtttcattccaggacccgtgggagttaagaattgaaggtagttgattttttggttggttcatttgtttgtttttcctccctgttgtttgctgttctcagaaatgacctgctctctgagctttcttggagtgtaaggcatttcaattctagaaaggtggggctgggaggaaaatggtctccttgactgcaaaccatctagctgaaatgtctttcactcatcccactggaagggggaaaaaaagcc

SEQ ID NO: 35517 - DNA, 1759 bp, Homo sapiens
cctggaataataaagaccaattttccttaacactgaacaggaagtgtatagtttagtcactcaaaataaatattcttgcaatgctttattgctgtttcatgtaggcatttgttttatgttaagttaggaattaataattcagtgactaacagactgtgattgtggttttgtttgtagaaaagctaagaaccaatctaagaaacattgtatgtttgttgctggaaaagagagaaaggggcaaagggggatgaaattagactaattgctgagtattcccttgagtgagtttgaaactaaactatcaagaagggaggaggcttgaaagcactggagtctccatgcccttcctgagttgatgggagcacagatcagacctgagtcggccccagaaggcactggggatcctggtccaagctccatagacaccagatcagatcccagactgttcttaggatcatgttagtcacagccaaggagagacaggagttgtccttccaaggagacaaggtgtggatgcctgattcgtgtctaacttttactttgcagagcacgcccactctctcgtctcacctgacccagcagcagccccctgtcctcggtgggcttgggcaccctacccctcagagtgtgaagcccagcccagggagctatgcgtgggctggggcctctcagtactttagtaacaggaattgaagtccctcccgctcccctgccaccatggacatctcccgcacggaagccgtcacaggctgttcttcctcacctctccttcttcccacatggcctcagtatccaagccctaccagttacttttcctatttttctccccagtcagtctcccccttccttccttgcagatttggagcaggcctttggcatttcttgccttgaattatgcactagcctctgggctgatctgctatcaatctgaacataccccaaacctcactccatagagcacccagagccatctccctaattcaaagctgataatgtcattcgctcacttacagtcctccaatgcctggtattttcaggaaaaagtcaactcctactatggcatccaggtctttcctggcacagcctctgcctaccttcccagcctctgcctgcctcccagcctccccttccagcctcctttccaggcccactggtgtatcaaccacaccatgagcacagcctgctccttcctgttcactgttctccaatggtctagccaaaaaaaaccaggcttagagaagccaaggcaaggaggctgcccctccccatccagtacacccccatctctggggcccccagatgtctgatgttcattatgctctggtctcattgtgtttgtttcccagggtggcccttctaaactgtgagcgaaaggtcaagagcagtgactcagtcatttataaaccactggcccagtgcctggcatagagcaggcacggcacatgatttccacaaaagaatcgaagtttcccgagttgtggaccatactgctccccagtggtctccttgacttgaccatgtacatcttcatggggcccagactgggataatccagtgtccatccaatatgctcttctatctcaccctgtatcacaaacatattttatgtttgcttcaggggtgattcacatgtgtgactgcatgtcagctcccactctaagtatgttgttcatccaaaaactagacagtgaaagtggcatcacgccattcatatgaaatgtttagcgtcattacacaacatcagaagaaagagctgcga

SEQ ID NO: 35518 - DNA, 1788 bp, Homo sapiens
ctaggtatttcctggattttgtgagacataaatgcaatatctagatacatatgccttccactagggagacattagaaacctttctcctcttggaacctgtccacaggttccaagacctggagcagcacccaggagatacaatggcatgaaactcctgctctgaggacaatctttgatcaagattacaaaacacatcacttttggagcttaagaggaaaccttttatccctccaaaagcatccaaaacccttgaaagttacaaggcacaggaaaagtcactgtcacaacccctgaactagtaatggtacaattataattacccatcccaagctgaaatgagtgatactgcatggactgaccggggtttgaatccagactcctccacttactgtgtgaacttggccaagttccttaacctctcagagctactattttttccatcggttataaaataatggaataatactctttcagggttattggcagggctaagtgagccaaggtgtatcaggcccttagcaaaagagaaaaggcttaatcattggtgactattgtaattattgctgtcatttgtaaataaaagtggttgttatagataaaaatattggagactagagaattgtggctcagaacttttagttatgtgaatccatttacaaaagagctaccaaagaatagttcaaagtccaaagctcagattgctacatgctaattctttgccatacccctttttgagaaatctctttgaaattttgggtatataagctaatatggcatgttatgaacaatatgttattgcttctctaaaaggaattatattgtatatccgcaggatgagactcaccactcttaggctataattagttcatgtccattaaatagcagttgcacaacttcctagtaatttactggtagcctaaattataaggctgctatttgaaaatgtttttgcctgagtcatttttccctctcagtctcacttaagtctgggtctcttaaactagaataggaattagctgctttttgcagatcagagaacagattctgaaatcatccatattacgatatcctaaatttcaccaagggaaagagaaagtttatgtgacaatcaagaaagattatggcaaacaaattcacatggaattggctttaacaaacctttttcatacctcctcagaaacaacagttgtaagaaatatcattagtttgtgtgtgtaagaaatattattagttggtgcatgacatttcatgttaaattgattataaagacatcgattaggtacagtgtacactgttgagcaataaaatttaaatcaatgacagacgctatccaacaatctttaaagagagcagcatcactttttaataagaagaaaaaaaggaatgctaggattgatatcactctcaatgccattgcaagaaaatacacttttgaaaatcttaaaaagatacattaggaaagtgaaaagcatagcaatcattcaaaaaagaaatagtatcatataaaaatgaaatgtatttgcatttattcagagaatctaaagcaaatcaatactacatcaattacaggtactagaaattgaacagtagctggttaacaaaagagcatttacactattctttaacatggcattggacaacatcaccacaagcacaacctgaaaattgagtgaaaagcaaacacactgattgtcctatctgatctgcacccataaactgtatctgatgaattttaatgacattaaaaaaaccgatgggtaacaatatattaacccatcagtgataagg

SEQ ID NO: 35519 - DNA, 1502 bp, Homo sapiens
agacagtgagaccctcccgacaggacaaaccactctgccgttatatgtgactctctggtccctgcatcagtcctggagaaacccagtttatttacaagacctgccttccaccttgagagaatgcaacacatctgggggacagtttacaaagaggggaagtcagctaccgccatcagcagacgtgagaccgttagcctcacacaccaggctgcaaggcagggcctgttatcacaaacaagctgtttgctcactgtttgaatctatttctggagactgtttacctaaatgaaattacttatccactggggcagggttcaaagctcaaaagataagtgcaatcggctgttaaaaagatccaagcttgggaaaatgagggggaaagaacaaagtcagattaatcccaggggaagaaagtctcaatgccatagaaattacatggcattcctttagaccatcaattaattttaattccaaaagttcaaaggcactatttaaaggaactaattaatagctaatattctccccagggtgatctagtctggtttacaagagcaacggcattgatgggctgaacgttcgttccttctcttgctgatcattacaggtaacgctagcctgagtccatggaggacagatctgggaattcccatgcatggaataataatgacacttactagtccttactcagactcttgctaaattttagttactctacctctggggacgtggctcaccgcagtcatccttgaattacgctctgtggaaaagtggaccctaaagtcgagggtacatcttgctctatgtaagttctagtattgttgttctttacataagctactctaggggaaagttcttatttgactttttttaaccttaggtgcagagtgttgagttcatcatactcccacctccattcaatgtcactgggctgtacacgtgccttctctttaatattttttaaatttccttttgatcttcctactcactcccatcctctctcctcccacacataggctgctatcctaaggtgtttaatgtttattttgtttgtctggatatctctgtcttgtgttcatgtatttttccttttgctcataatcctcttacccaagtattacttttattcctgttacaatcaggtccttgtccatctgcgttttcattgtttacgcattgtaagtaatatccatgatagaatatttgtgtcctgatttttaacatttctataatgagcttttcttttctttagtctttgatagactttttttcttatctccctgcacccccagcaggtgaccactgctaacagcatgggcagggtctatctctccacacgtcttcaggatcactcaatcctttaaactggtagttacagaaatgtgtgtgtgtgtgagagagagagagagagagagagagagagagagagacagagagagagaaagtgagagagagagagagagagaggagagagatttggtttaatgaactggattcgtaatcca

SEQ ID NO: 35520 - DNA, 1052 bp, Homo sapiens
tatgttagatggtgcccttagtttgggctgtgataacaaataccacagactgagtggtttaaacaaaaatgtatttatcctagttctggaggctggaagtttgagatcagaatgccagcacggttgagttcttggtgaaagacctcctcctggtttatagacagcttcttcctgcatcctcacatggaggaaagagaaatcatctctctctgtctcttcttatatgaacactaatcccattcatgaggcctccctcccttatgacctagttatctcccaaaggcctgacctcaaatactaccacattgggaattaagatttccacatgtgcattttgagaggacacaaacattcagtccatagcagacagcaatgttttaaattttgccataggcaagtccaggacagaacctttggaatttcaaacctccctactcctgctactaataaccattccctacaggccttgagctaaaaatatcctccacattgggtaagctggaagaaaaataaatatttacccaccatgaatgactcctttgcctaataaacactgtgtcaaacttggttgctttgtcaagaggcagtaaaaaataggactccaggtgaggtggctcccctacctataaactcagctactcgagaggctgaggatggaggatgctttgagcccagaagttcagagaccagctggacaacatagtgagacccggtatcttaaaaaaagaaaaaaagaacattccagaacatttgagccatgaagacaccagcacaacaaatatttagtatcaccatgaagtcagtcatttacaatttaaagctattctgtcctcaagagacaggaaaattgaagctaaagggatgctaaaagatggcagggaatgtaaatatgccaccttaaaagggtgagctctgccgaccaaggaccaagagatcaaactgggagatggttcatttgtccctaaagccagtttaatttcagcaattaacaaaacagtatttcataaaacgaacacaacagtttagtatcaacaattaatatcaacaattaa

SEQ ID NO: 35521 - DNA, 2117 bp, Homo sapiens
gaagtttgagaccagcctgggcaatatagccagaccccatctcaaaaacaattgtgcatttctaatactcactgagcccctgctatcccctggctcagtgtacattgctctatatctcctagcaaacccaggagctatgtatgaactgaaaccctggttaaatagcttggtcaaagtcacacagctcaggtgggggaggctgggtttaaaggcaggctgctgatgctatgatccatacttgaggctactgctggccacaggctccatctgaggccctgtagggggtgaggggagaaacccggccccagagacagggtctgaaccctctgctgccagccagtagagaaaacagtccctcacccacaacgtggggataacactgcctaccacaccaggcagtggaaagaattaaattaatttaaataaaggagacagtgcagagtacctgacacgcaataagcactcaatgagagctattattagaggtaactctccctgctttcagtctaatgccatgtttcttatcacttaaggtgatcaccttgttgctctttaaaatattatgtatggttttctctaagatacatgtaagtgtaaaatgcagaagaaaagcatgcggggacgggggcgggggggaagaaattccgttttctttattgatcagcctttcccccaaaatactttctcaaggaattattaaatactcaacatggcgctgcactacgttattttaatttaaaaaaaaaaacgcgtaccaaacaacgaagctcctgcccttgggagtttatacacaggctatgttaatatttgcaaagggccccgagtgtctaagcggctaatgaacgtcttgggtcggtttcctcaaaatccagcccattgtttccccggtgagcacgatccgaagccttatcccataacgcactgtagcccgaatctttctgccaacaaccgctgaaactaccagaggttaaagcaattaacatgagatgcaacctcaccgtggcgcagctccgcgcgcccccggctgctgcgacccgggaggggggagccccggagcggctgcgcccggccccgcacccccggcagagcaggttagctccccctgggtggcaagcctttgcaaaacaaaaccgaaaatgagcgttcgctctcctgacagtcttgcctaaaagaacctcgtctatactgcaaaatcccattaggtacacaagtccggtcggcattgtcacttttagcgtgacttcaatttacacattcaaagaatacctgtccggagcatgggacctggtagaaaggttaggctctctccgaaggaagttcaactcaggatttccctcccccggtgctgcacacaccatcaacggcaaaacctcccctcccagttgcagatctagacttgctgagaaaggtgctggagatgtttccaaggtcatccccagcaccgcgagtccagccttctgcaccacgcagatttttaagaggagatgcctatcgcccgtggggagtcaaaattagaacctcagtttcctttgtgctgtcaccctactggtaagaattcttacactgtagatgcactgggtgctcagaattttatcgatgatcttattatggaaagctattaataagctccaaatcagagacctgctctggaaccacggagcagggagcaagggagaaactgctatcttttcttcaaacgctcggacctagcacaagtacagaacgtagtggctgcaggctcggccgtgctcctaacagcgctgacagctggattggcggacgcactccagcatcactgtcaggaattaacacgttcccaattttcactgcacccttccactcttgtgtgaaatggagtggaatgttcttttcagcgttcatctctaaagggagaagaactatttctcactatgtgaatacctcacgggggattcccattaaataaaactgcttgatgatgacctaatttgttcattcaagagaagaaactcttcctatccatacattattgttgttatggtttccgttgttaaattatacataaaaagcctcagctgaaccaagcctattttagaaataaaaatgttcttgggacatgaatcttaatgagatcctta

SEQ ID NO: 35522 - DNA, 3703 bp, Homo sapiens
atgacaccaacctaatgaccacagtaattcattgtcctgtttaaagagattatttagcaaagtcaaggttaaaaccatgtaacggaacaaattaaggggtgatattacaggacctccatcacacttttggtatacacttcagctaagaaacatagctatatttaatattcctctaatttttaatttttttccctttgtacattttaaaatatcataggagagattgtttgaaatcttgtaagaaaatttttttccagaaactttagccaatacaacctttgcttttttccatttattttttaaatttcttaatatgaaaaatttaagattaagacaatggctcttttcatgactaaaaacagcatttcataagggtctgaccaaagttatagccccatgctatcatgtaattcacatttattggtggagagcggggtggggggtcaatttcaattttttaaaatgacaccagggttagaaggctcccgtcagtgagctttgcccctatgggctgagggcccctgaacacactggagaaagcaagggcagcccagtgacctgtgcagagaatttgtatcctgtgttttaaagggaaagaatatgaagaaagaaaagttcattctgagatgaacaaggagtgtggtttaacctgccccctgtgtaatcactccgcatatgcaatgaagggaagaaggcactgcatttttaagagctccacaatctcccatttggtgacataggatgtttgcaaactcctggagggaagggttactgtactcaacccacactccctgtgggccatcaatgccatttatttgtcatgatttcagctgattaatatgtaaccacagaggcaaaagaaataatttcacaatctgcacgtcgcagcaattttcaaattcctttaggttgaaagcaatcaccagcaaggctttctccactctgacatatttattcttcctcttcagattcaaaccattccaaaaagtgagcaaaaaatacagcaaaagcagcctgcttgtctacagtatttacatgctttacataccctaaaaatatatagcttattaatgactgattttccaacctcttcaataagcttttttattagtgtgacaatttttaacttgtaagtgtcaagccgtctctcactgtgcgtgtctcctttatgatatttaatataaagatagaagagtatttatatccctcacaataagagaacgaattgttttaaggttatacagcctagatgtgataaagaaagaaggaaccttacaaaatgataaatattttcattaaaaaactttaaaactaaaagttcaaagatatgttctcctctcttatttcttgtcaaaacatgacttaaaacccaaaactaatctactttcaattttattccatatttcagtgctgtcatagtactcagcagagagtattggaatacgatcattttttattttggtgatgttaccgacagctttatttcacaaagcaatcttatactatgtctaccagtggcagggcatagaggtcaaatagtctagccttacaggtagagagcttattaaatggcacgtctattaaacccgatggacaacataaagaaacattacagcaaaatacttttaacatagttcaatgaagatatggctcaaaagggtagtaaataatttaaacggagaccaatagggaatttgttatattttttactagcatcttcaaattatatttcaagcagagtggttagaatagagaaaaacacaaaagcttacaaacctcatgtcgtgggtatttcctacagcaaatgtaaaaggaacatcaacccaaatccaaatattaataaatcaacaattctatcacagagttcatttaaaacaatctcagcataaatattatatcactgtgaactaaggaaacagttttttaaaaattaccttactgtcttttttatttttgttttggaagacagtcaattttaaaattctacttatggtagcaccaattcatgacaaaacctcacttctaagaaaaactgcaccagaagaatagaatagaaataatatggaaaatacgtgtttacttattacatattatttggtgtgaaaatctaaattagaaaataacatgtgtgaattcatagttgggaatttctttttttttcagatatccctggtaactctttggttatcaaaaatcaagctgattatctttttaatcacaatgtttttctcctgtatatgttcaactatatttaggaaaaccaaaagaaaaagaaaaagaaaaagaacagaatccatgaaagagatcgcgacttcttatccttatatacaagctgtgatttacggccaaaataactaactgaatctgtaacttttaataagtttatcataaatgctatatctcttaatcctgaaattgggtctctggtctcttaccaggaatataaactacttgatcaaggattatcagtggattcacctagtaggataattaataagatacagaaacataaaacatgagttgttaaagtttacaattaccttccctcacagcatcgctctaaacgcactgtccttgcttcagcacacagtaaatcatctacctaaatgtatttgcacccaatcattttttaaagtcacaatctttgtagtgtcaacttgtcaagggtcaaagggaagaacaggcaagattcccaaatcaatctgcttgtagaaactgtctcatttcatttcaaattacctgctgtggttgaagcaggctatggacaaactgcctcctccataaaccatgacagcacaggtcgaacttatgtgatcattcataaggggcaagtcatgccggttctgtcattaactacttttaaacggctgtgcagggttaagtgatcttgcagggcagccgcagatataaatactgtttggacagtttaatgtcaagagacaactcctctgggattaaaactgtgtaacccaataggatggttgtcgatacaaggattaaggtactttggtccagttacttgaagtcatgcctttacatgttttgtccaagtgaccctataggagacctcaaatgagtgccgttcatctacatcatgcaactcccagacagcattctgagaatattaaaaataacttcaggcattcagaggctcactctcccaggtgttcaagagtttacgtttgtccttgtgaggctgaccagaaaatgagagcacattgctgttgggagcaggtgccttgcagcagccttacagccttgggcttccagagctcatgatcaatgggaatatcaaagacccactgctgtccataacatcagggaagttgggtacagtaaattgtgcaaaaaagagccatgatataagaaaaaggactgaaatgcctattccattgcttttctagtgcccatcccttgagataaaccctataatgtctaaagataacaacagctagtatttattgagtgcttaggatatgttgggcactcactgtactaagtgctttgtatgcatgactcatttgaatcttacaataaccagttgaggaatctattattgacccctgtttatcataggtgagaaagctacagaccagagcaggtaatcatttgccccaagtcaaagagccagtagtgatgaagaacaggaacaaatactgtgcctgactccagaactctcactacaatggtatgccgcctccac

SEQ ID NO: 35523 - DNA, 666 bp, Homo sapiens
tacatgtagctcatcactgaaatcaacacagagtttccctatgtttaatgtcaggtcacctacacatgtgcatgtggtaaatatatacatcattatattgagcactaccaggaacagaaacatctaatttctttttggtggaaaatacagaaaattctttcacaaaaacagagaaaagaaaaagaaaaaacatacaattttgggtttcctatgaatttctgagtagaaaaacaacatctaaggttactattttaaaatcaaattagataactttttatgacaggaaactatccgaacaatgacaccttacttcctgtaaactatgagtaaattccacacattcccatgtttacataaccacagcccagggctacaattcccacatcttagtcacataaatatgtgtttcgtttatcattagaaaataaacatgctttatattctgaggtctaacttaatggtttgaacaatatgtaaaagactaaacaaactaaaatatgtgaaacattaacacttgagaaaggtttacatggtcccagtttacttccacttttactgagacatcactgctgaataattgaaaggctctcaaaaaactccaatctaattttgtgttattaatctgaacatctttcctaacaaagttctttcatcactggaaatatg

SEQ ID NO: 35524 - DNA, 802 bp, Homo sapiens
gcgcacacacacacgtgtgtgtgtgtgtgtgtgtgtgtgtgtgtacacactatgtgcattttttgggggaaagaggacacatatgtttccccagattttcaaatcttccacgaccctaaaaaagtaatttaattctcatttggtcattttgtccttcctgcttcacagtaacctccaggatttgtccagatcagtgcctccttagtgcctggaaaagagcctggcacaaaacaggcattaggttgttgagttcaactggatagagtcaacacacatgttggtgtttaccaagaagagaggggaaagttttaaaaacaaagaaggaaaagaaaacccttcattctttcaaattaaagattgtatcacaacccaaacaagaacaaaagtgaaagtgaaattactgtatttttttttaaagctttcagcccagcctactggcaaggctaagattgtggaccaggagggatcttttgcagtcctcagtctgcctctgactccctgggatcttgggtaataagtatctcaaactcgctatacctcatttcctatttatgcaacatggaaaataattcttgccccttatctaccaagtaaggagactgtaaggaaaacagatgacacacaaaatgctttttgaactcttcattaggcagagtctttacaaatcttttcgtcagagagtctgtggttacaaaggcccactcggctctagtggttgttttgatgtcctgccttctttcaggtctaaaatacttccaaatgtgctcaaatttagcattgacataagaaaatcttgggctgg

SEQ ID NO: 35525 - DNA, 1807 bp, Homo sapiens
gctgagatggcgccacttcactccagcctgggtaaaagagcaagactctgtatcaaaaaaaaaaaaaaaaaaagctgacaaatattagtcatatttttaattgtcttaccttttaaaattcccaacaatatcctaacttttaaaagttattctagaacatgaccttgccttctagttcctgtttatagtgatgagctacacatatctttgtgcctgaaacaaagacttctttgccagactctgtgcctgctaatttccttcaattcattcacagagtcttcactgcaactcccgtaagtagctactattatccccattttacagatgaagaagtgtgtctatgagaattgttctagtgataaacctgagacttaaacagagtcctaatactcatgctggattgtccattgttataaagagctgggtttgttggttggttatttggagaaatttacacatgacatttggttatgttcaaaagaatctcaggcctggcatagtcttcatacattcagcaaacaacagttaggcatcgtgtcaggtgtgggcaaatacaaggaccacccacagctctctaccctggaagtaccttccccacccctctacagggtagcagacagacaaagaggaatcatctccaagagatacaagggccacccacagctctctaccctggaagtaccttccccacccctctacagggtagcagacagataaagaggaatcatctccaagagtttcttctggactttgctctattaactgtcccattgccttcaggggcacatgcgtaactgtctgaactgaaacatttccactgctgattcagaaatgtgttcaccctaattatgggcacagaatgctctgaggaacacaggtgggaggggctgtctcgggccctctggatgccttcacagagaatatggcttatgagctgaaggttgaaggatgaaaaatatgtcacaaagcaaagtgaaagggcccagggcagcatgtgctgggcctgccatgtccagcaggggaccctggggctgaagtaaggccagaggtaggagcaacagggggaatggggcaggtggggaagtgggttgtaggctgggaaaagacccagaaggggattttatgctatgtgaggagtttagaattcaaaagatgcaaaagggaacaaacaatggggggttttttgtgtttgtttttgttatttgggttttgtttgtttttctgtttgtttttggctaaagaaggaacaaagatatctgtaactggttgtgatcaattagttgtaaacactgttgcacttgaccagccccagccgtggtttttatgcagaggagtcataggaccagattggtattttagtaatgctcgtgccagggtagagaatgggttgcacagaaggcacagggcttgacagatcagatcaaaggctgttgcaacaatccaggttggatccagtccaaactaatggtgtgatcctgccattaaaaaaaaggaactcactggagaagtttctgaggttcggggcatgagctttggagtcaggtgggctgaatgctggttctcaacctcttcttagccatgtctgtaacgtcatcaaaacctcaccttgcttatttcatatgagatgaaatctgctgtctgggtcattttgcaaatgaaattggggttcatgctcaactgcacaaggttctcactccatcagtggtgacagtgatgatgatgatgatgatgataatgacagacaatactttggtgactgattggctttaggctgagggtaagtgacagaagagtacaggatacctcc

SEQ ID NO: 35526 - DNA, 2893 bp, Homo sapiens
tctgtctcaaaaaaaaaagtaaagaaagaggagtcagggctagaagtacaaattcttgagccatttgggatcatgtctgaagctgtgggaatgaagtttcagggaacactaatacatatggcatattgagaagaaaccagagtagcaacgattttgttcaaaatgaaagctctgattcaggattttcagaaacagagagccgttaaacaaatgtacattgagagcaaactacatgccaggcactgtcctggagctggaaactggaacatacaagccaacccatggaaagctcacattgtcacagaggagacaaccctgtaataaacctggtaccccaaaagagggaaaacaccatgagggaagtaggcagggtgcaggcagagggtgaagatgttgaatgcctgggggaggcccaggctagctacaggggccaggtaaggcctccctaggagaggacatttgagctgagacctgagactaggagagcattaactgaggacttattaagtacaaggctctgttctaagccttttaagtacattatcctatttaatccttacaacaacccaatgaggtaggtgctgttattatcctcatactaaaaataaggaaacttaaccacagaaatgttaagtaacttcccccacacagctagcaagctggcacagaagaccctgactcagacagtctagcttcagacagcccgtgctcttccccgctgcacaaactgcctctcactgtctgtgataaatgctcctattaatagaaaatgagttcaagaaggaaaatgcgatcaacagtgatcacagtggttcagagcacaaaggcttcatctagaaataattttaagtgcttggtctttgctatgttactacttaaagtgtggaagcttcatagagaattggtcagtagccccagattcaagtgtcagcttcgctattctctaatttcgtaacctgcggacagacaagtaatgacctctacgaaccttcattcttttcaccagtaaggtaggtctaatacacaactccaaacttaccatgaagataaagagattcaatccacatacatgacaatctctagcagacaatgttatcttcaggagatggctgatgctggggaaagtttcccagtacagatagcacaccatgacgtcttcgtaaaaagatgaagctcagagcaggtgcagcactgaaaacaggacactttaggtgacagcctacagactgctattctgagaaaagatcttcaaggggtagaaaaaatcacttttagaactccaactggtcttatcaatttttaaggaaaattaaatttgtcatatttgccattgtgaaaatcagctcaaatatacaacaggaaagcttatttcactgaaactcagttcattccagactcaataaaaaatgacaggcttcttctgtgttctaccttttcctcctctactttcctctttccagacaataaagtattgtcccttgtgaggtagaaacaaaacagcaacatgaaaacaaattctaatagctcatgggaaggacagacatcatgatcccaaagtgctatgttaaatgccttaagaggcaccactactgtgcaatggtggtccagaaagagcgcgcccagccagctggatcaggaatgattatgaagagaggatttgatcacggctttacagggctttaaagggcaaactacggtttcctgcagtggctttggtagagagcatccacaaggccctgagaggcatggctttgcctgcctttgtctcctacagcatccaccactctcctagccccaactgccagccacaagggcagctctgctcctctcaggatcctctgaggccacccctacatgcagggatctgcacttgctcaggatcagaaatacttctggtctgtgaatgagcttcacactgctggtctcaaggggaatataaccttctctgtaaagccttcgctgagcacctgcccctctaaagttcccacctggacatgccccacatccacccccgtcactcctccacacaaactcattaacattctattttactttctttatagtacttataaagtactatggaaaattatcgtgctcaatttttttactggattattttctgcccatccccatcctctgctaaaaattgttaagtcccataaatgcctagatatggtctttctttttcacccttatattcccagcacctggcaggaagtaaagagctcaataaatatttgttgaatcaatacaggaatgcagaagagcatgatcaagttgcagaggcagaaaagtaaaagctgagtttgagaaagtggtaagttgcacgttctggtccagctgggcatggatagatgaggtgggacaggttgcttgcagaggacttggggcagtttggactgagtagatagtgcagagcttctgagagtgtttgaccaggcaaggccctgagcagtgctgtccttagaaaggattaggccagcaactatgaataggatgaactgaaataaagctagaaagcccagggaaaaccatttgttacccctaaaattggcaaagattaagaagtctgacaagtgttggaaagtatctggggaaacagttttccaacagttgaaaatcaatttggtaatatctcttaaaagttaaattgtgcatattcaaaatgtagcaatcctgcatctaggaatcaagactaagaaactattgcctatatattagtgaaaaaaatataaacaatcatatattcactaataaatggactgataaaatgtggtattatttatgccatgaaatgctagacagcaaatagccgggtgtggtggctcatgcctataatcccagcactttgggaggccaaggcgggcagatcacctgaggtcgggagtttgag

SEQ ID NO: 35527 - DNA, 4687 bp, Homo sapiens
ctagcattttgggaagcagaggcgggaggatctcttgaggccaggagtttgagaccaggcaacattgtaagatcccatctctacaaaaaaaaaaaaaaaattagccaagcatagtggcacaaacctgtagtcctagctacttgagaggctggagcaggaggatcacttgagcccaggaggtcgaggctgcagtgagctatgatcatgcactccagcctgggtgacagaatgagatcctctctctctaaaaaagaaaacatttatgtatatttaaatccataaaacaatactacatattaactatgggtacatacaaatatatataaaatattaaaaagtatacaaactgaacatgggctctgggaagtgaggacagaaggaggaaatggacttggaattaatattcaaaggcaacttgattttatcatcaatgttttgttttatttctttaaaaaaattgaagaagatatgacaaaaataataacagttgttaattttgaatgatgggaatatagtagcgtttactgggaatcagaagagagatgctagtcacagatggaaaaactaacaggatttcaggactgggtgggttagtagagggtataaagttgccagaaagaacgaagaataaaaattatattctttcttttctttaacaatgagaggctagccacaccattaaaagaactaaaaaacaatgagctccactttagaaaggtttgtcttattaatgagacagccaaatcatggccagcaaaaagtcagaattcaaaaacccaagctggcactgacaagctatcctgcaaaagtaaggaataaaataggtgcctcattcaatatcctcaaaaaaaaatttttaagacttttttaaggtccatagagagttcactttgtgtatttggcttgtttacaacatatatagaaacccaaccacagtgtcctatactcaacaattgaaagtgaggttactaaattttaatacacatttctagaaagcctgggggtctgactctgaaaataagccattctagtaagacaacttgttaagagtttcctttcagtaagcaacatcgactaacagagcaaacaatgatccaaatttacactgttcgaattaaaatttcaagcattaacctctattttgaaatcaatctccctgtctttacataaagattatcaacttccaattatcagaagaatgcagcttatctttattaaaatgtacccccccaatatttcatgatatttacatgtttgcatagtactttcctatccttttgtaacatgttttgcaactcctgaaaagtcaatagtcttagctcttctctaaagggggaaacacaagagactgagtgactagttcagggtgactcacaggcagagtcaacattggaactcggaacactgagcctggcattccaagttcccaaaaccttgaggctcttgctaatcccagcagaattttcttctttacagggctgtgcttctttgaggcctctgagactagaatgttagtgtccaaagctttctctttcaaaagtagtcaatagtcagaaataaatgttggcctgcaagttcaatctttttcttttttttgagacagggtctcactcagttgcccaggttggagtgcagtagcacaatcatggcttactgcagccttgacctcctgggctcaagcgatcctcctgcttcagccttccaaatagttgggaccacaggcataccccaccacacccagctaatttttaaaattttgtagacatgatggtctcactttgttgcccaagttggtctcaaagtcctgagttcaagggatcctcccaccttggcctcccaaagtgctgaaattacaggtatgagccaccgcttctagtccatcttcactttttaaaaggcatagctaaactgcattgatacaacctaatgatctccctaattaatgtaactttgctggtaattgtttttttagagtcctctgtttaagattgggttaaattcaaatcaaatggtactgtttaaactgtttgctgttttttgtgtttgttccccgttagtgctatcttggacatgctgagcttctaactgccacagggctgttttgctactactgaccttataaagccaacagttagtgactgtgtatataaggatttaagagattattttaccagaataaggttgctttgtagccatccggtgtaaatggtgtttctttccattaacaaattgaagagctcttaagcacctgaaattaaataacagcttaaaaaataaattaatatacaaaaaatttaggtttactgacaatatcagattatttcccattaaaaaaaatcacccaactcttttttctgatgcctttcacgtgggacttcaaaaagcttttccaaatattttcactatctgtagttctcattctaattttgtaaattaaaaaaaaaaaagagccaaataactgacccaaagttatgcagtcagttggtagtaaaagccaaataagagctcaaatttaatctagtcgttagaatctgccacagtgtcctcttcgctaagttgtactactgcctcattttatttcccttaaaaaataattgtttgcatatcagttaaactggtcacattgaaatataaaacacgccagtattatcaagaggtcctttcttaaagcaacaaaatacaatcacctttgtgctaaaaataagctataaaaataattgtgtaccttataaatttatctacaagttttagccttcattatattcattaattaaactgccataaatcttcctttcctattgctaagatattcttaaacttgcatacaaagcaccaaaatgcacatcagccacaacacacacaaattcatcactcaatctcggtccattactcttgccaaggtcagtatagaatattcttgaaattttcacttgtagaatgaatagatgttttgtaaggattatctattcaggcagaaaaaaaggggggaggggaagaacacaagaaacaattagctattcaactggtactgagcaaattccaagtacggaatcctttgtttgtttttatcttgtttttgtttttcttacctaccttgggactccagtccacgagaagaaatacatcttgtgagatttttgtacagcctttctacaaacctccgtagagaaggagacgttgttgtcagttttggcttccttttgcagtcagggactgggacccagagttatctatttgcatttcaacacccttcttttgttttcggtcccacaagaggctcaaccagttcaaaagcaggtaaggcagttagatcattgtaatgaccctagaaaactcaaaggagaaaacttttgcaaacaatgtggttattttagcaaaaaactactacttatttcatcagtcaagcctacagagctcaagctagaccatcttgttaaaaatttaccttaggttgttcttaattctctctgtgccctagagagagaagaatgatggtggaaagcagggttagagaacagagaggaggagagttctgcatccagaatctcttctgaataaacaaatatcgctaaaatatccaaatattcacaggaatttacaggtcacattattgcatttgattctgagagcaacagcctctgtcatttctgctgaaggagcattcctatataactctaacaaaattaagagaaaagaatactttctaggtggagagagttggagaggacgggtaaaggtgcagccatcccagtgtctgaaggacactcagacacaaatgctgctggtgtatacttcctgtcacacccactcagatgactacatggtcaagattccagaatgtgatcccgacgacagctttctaagcatttaatattccaagaggcatcagcagataaaaatgtgcagagttgcaaatttttaatagaaaaatcccccagggtctatgttgaaggtcagtgtttgggaaaaggctatattataatggggctatggagtcacagattagagacggaagggaccataaggttcatttcctcaaggtccgtggttacacagctggtttgtgacaggctatgagctctctggggtctcaatctcacgctcttgagcttttggttaccaaacctgcttagatgagatccacagtgaggttatattgtaaaaattctaagacttggcaagtcagcctataatgaagatatatatgcatagacttcaaaggactgaccttgtcatcacctacaatagctctgccgcaagattactgattcaggcattcagcttttggataagcatctttccttccaacttgcatgacaacaactccaactgctcttagaaatattggggcctccagtctattgatccatctgctttctcccaattcattagccttcagctgttttcactttccttcttactcaatttttattccatggtctgttattactatatcctttttgccaatcccttaaactcccttcctctctgttttttctacaaacctatctaggaaaacgacagccctcattgaaccccgccatctcctttctctttgcttgcacgcaacagtcaaactctgctggaggtgatcaaaagcgtagataggttcatcatcaccaacttcttatgggccctcaatactaacaactacatttttgttttatttttaagaaatggagtcttg

SEQ ID NO: 35528 - DNA, 2218 bp, Homo sapiens
aagcaatcatgccctgctctaacaactgtgttacgtttcttttttcaacttattttccaagaattatttgaaactttctccatcacccgcaagcttccaatacacccatctttctctctttactccttcatcttctgcttagatgaggattctctagatctttttccacccagatccctgctttccctcctgcttcaaggtgagtgagactcctccacaacaagggaaatcccttctctttggccttgtattctcttctctcatcatcacccacaacctttttgtcatttttttctcatatcacatcattttcatcagaaaagcctattggttctgccttcaaaatatatccaaaatccaataatttatcatcatcatcactcctaccccctcatcgaagacatggtcatctctcatctagactattaatggtctatcaactttcaccattgcccccttacagtctattctcaacagtgatctttcgaaatcataagtcagagcatgttcctcctctgcttaaaaccctccaatggctttctatttactcagagtaaaagctgaagtccctacaaagacctttaataccctaccagcactgtccagtagaactttctgtggcaatggaaatgatctacatctcactgtccaatacagtagccactagctacatgtggctactgtgcatttgaaatgtggctagtgcaattgataaaatgaatttttaatttttaaaattttaattaatttacatttaagtagccacttgtggccagaggccaccatattggaacactcagctctacaagatctattccccatccaccctatccacctcttgcctgagcctataaaagcccacaacacactataaaaactcctttgaagtcagatgatgtcactcctctgcttaaaaatctctatagtttcccattttactcaaaagccaaagaaagtccttatcttgatttacaaggcctcatatgatctggccacctcacccatctctctgacctcagcctctagcttaatctcttccttgttgactccactccaggcacaacattgccctccttagtggaacacatcaagtatgctattgcctcagggcctttgctcatgctgttttcactgcctggaacattctttttcccaatattcatatgacaaactcagagctccttcacttccttagtaagcactctgctacaagtgtcttctgatgagaggctgatctgaccttacttgatctgaaagtcctatccaaaacaattccctcccacttgatcactctctatctccatactctgtttgttgttgttgtttttaagtagagaagtagtctcaccatgttgcccaggctggtcttgaactcctaggctcaagtgatcctctcactttgggctcccaaagtgctaggattataggcatgagccaacatgcctgctctctgctctttctttatagcacagatctccatctatgtttctttacttattacttgtctccatcagcaggggcagcatctctgttttattcacagcagtatccctaatacctgaaacagtacctggctcagagtagggtcacaaacacgcacacacacacacacacacacacacacacacacacacacacggctgaatttgatgagtgaatacacatggccctatggtgccaaagactatttacaagtctcaacactggtctacaacccagcactctcctgctgctattccctggggagaggttgggactgggttcctctctaagtatagtatcctcacttgcaagagggcagctgggtgcttaaactgtatcagctctaatcttcaccacaatccattttaccagtttggaaacagacaggttaagtaaactactcaagctcagctagagtgaccctcaccctgtttcttatgaaggggtttccacagtcaatagaaaactcttctacaggcagctacaaagatatgcattgaagtgaccacatagcttcattataaatctctttactgattctatgccttcatagggaaaaatgagaataactacttttataacagactaaatgaaaattaatttcagagagtttatagaaaatggccaggtgcagtgcctcaagccggtaatcccagcactttgggaagctgaggcaggtggatcacttcaggtcaggagtttgagtccagcctggccaatatggtgaaaccccatc

SEQ ID NO: 35529 - DNA, 3549 bp, Homo sapiens
cctcaaaaaaataaaaatacaaaatacaaaaagaaaatgaatgttatttccactttcatttttactcctcccctaactggcctaagtttttcttaccaaattgccattagattttcaaaatgctatgctaaataaaatactgttggccttcatgtttgaaaatgatgttgctgagagtgctattttttaagctagaatttttacagtcagcaaataaagtaatggtcggtaaattcaagaccagttccacagaatagattgacttccttttaacctgctgggcaagagtgaatgctatttttttttctatgtttaacatattcatgaggagcagggatagagtaagtacattcaagccacaggtagtcaaaataattttttgccattggttttaattatatatgccatgatatcttctggtagaaatgacaaactataaagataggtttgtgcttcacatcctattcttttccattgttgcctgacagaagccccaatgaatagggaaattacatccttggctacaaaaatgggcatgcaattagaatcatccaacggacaaagaacctaaaaaattttagggattttggcactcctgtttccaatatctttgcttcttagaaggaaaaaactcaagtcaagcaatttgctgcaaagcacagacactgtgacacattcagcaaggaccaaggtgtcctaatttccctgcaatcagtgttttctttttttttttttttttttttttttttttttttttttttttttgagatggagtcttgctctgtcacccaggctggagtgcaatggcatgtctcagctcactgcaagctccgcctcctgggttcaagcgattctcctgccttagcctcctgagtggctgggattacaggtggatgccacaacacctggctaatttttgtaattttagtagagacagggtttcaccatgttacccaggctggtcttgaactcccgacctcaggtgatccgcctgcctcagcctcccaaaagtgctgggattacaggcatgagccactgcacccggcccagtgtgttttcttcggaaaccaatgattatcctccaattggtctggaagagagagagaatctccacagaaaacctgcatataactcttctggcactgttcacagttaagaattgcaaattactttacaaaattacttctctcaaaatacccagacacctggccacagactgccaacctaatactaaaataggcaccttgatcagctcacgctgtgactttaaccattcagctgcatttgaccacagcgacagatatctttgccaaaagaaatatgaaaaactctgggagctgattgcaaaattgggattggtccaaacttttccaaagtgatggctctgttgtctggaatgtctcacagccaggacatttttctcaacacgtcagctctatataatgaaagcaataagaagaaaatcagatgtgcacagagcttttctctctctgcctaatatgggaataataattaactgtccaaaaatgtaagcactggctcatggctgatgattcacctttaaagttgtgcaaagaaaaaggccaaaccttttgcaaagcatgtatcagtcataaaaatgtctacttcctttgacacagtaatcttattgctggaaactgatcctaagaaatgatccaaaagaaaagatgttcactacaaaatatgaatcaacctaaatgcccaataatcagaaaaatgttagctatagtacatgtttctaatgaaatactatattatcattaaaaataaattatgaagactgtcacaatatacagaaaatagaggatgatattaaattgaaaagcagaatacagatgatatatgtgcattatgaatataaccatgttcaaatatatttgcacagaggaaaaatggaatagcagtattatgggtgttttttctctttttaacattttgtaatgttgatctactgttttatatgtagagagagaaagggtctcactctgttgccctggctggagtgcagtggtgcaattatagttcattgcagtctcgaacacctgggctcaagcaattctctcacctcagcctcctcagtagctaggactacaggtgccagccattgtgccaggcttgttttaatctttttttaagttatgtacaatatttcatattcctttctatacaataaaccagcacataaataatttttaaattatctaaaatagctagctcatttcaaatatttgtcctttaaaaattatgagcaggacacttgcccaacatttgacaaccagcagaatatccatgccagttttgcttcaacccctctgaccactccaaagtcaacatagattcacctaagcccagaatatagtcggatcagaaaggcacatggctctgcccctgaaaaactcctggctcaggccctcccctaaagaaaccagccaggtggttccatggggatctgggtcccgagcctctactactatttccagggaagacctggtttgtgaaaacctctgggtctacttcctgcagccacccttgtgctctggaaggcaagtaagccatttcaatatggactttggatcctggacccaaaggtagaaaaatacacagctatgaggcctttgttttgatgtttgtttctcaaaaatggattttttcacacccagtacatgtggggagcagctgttttgtagacaaccctacagatctccacagaaagatgaagaggtgggggctgccccacttgcttctggtctgctaccaagaagagttaatcatctccccaaatagtgcagggaatgagttttaaccttgaatatacaggctttgcgctcacagatactggtcattaatgtttatgcatgaaaggtgacagtttttgtttggtatacagagcattgaaaaggaaaaaggaactactaatttctacaggtttcattgtcttgagatcaaatattcatagcaactcagaaatctgtctagagaaatgtagctattgctaagctaatgcttagtaaactcaaatagaccccattttattactgatatatatgaattatattgtttcaaatgcatgcttttatcaataattcttcaaaggaaaaatttttaattttacagaatctttttttttaatctatcaagctttttctaaaccatcatacctatgttgctcaaaaattgttgagacccggggtcaaggagacattcacattggctttcaacggaaaatgtgcttctctacactaaaatggccacttaagcaagactgtggaaatgatttatctcacaatgtttaaagttggatcctgactccagctatgtcatgactgcacaatcagtcagagacaagtagttacacgctcctaaataaagaagagcactctaatggccaaatgagttgagcatctaacatactaaaattaccttaataaaagttaaattacccacatccaaaagaatacaaaaatcactcgcaataataatgtttaagtgttaagaacagcagaacataaaatagatctatttacgtca

SEQ ID NO: 35530 - DNA, 8998 bp, Homo sapiens
aggttctgcactagtggctcctttaactatgacttcaccacatgtgcgcctgtgcttcaacaatctatcagtccttgaaaaatactgttggcaagtgtcacacttatatggcttttctccactatgtgtcctcttgtgtctctccatatggtacttctgaataaacttcatgctgcactgatcacatccaaatggcttctctctactatgaattttctcatgtctctgtagtaggtatttctgaatgaaacccatactacactggctgcactggaaaggtctttctcctgtatgaatgaggacatgtctccgcaggtgataggagcttcggaaagcagcactacagtgatcacagatatgaggtttctgacttggggagaggatggcaccttctccatctccaaccaaagaaggtttggaagatgcacttggcttcctcttggctttgattccctgagattctggctttggcctttttgcctttttgacattagtgtcctgctttggctcctcagtgccatggtggtcatcagtcctgctactgctgctgagtaatacgtcacggtggtgctgggctggttgctgctggacatgctggtggagaatactgaggtcctggatgacgccgtgactccccccttcaccgcctcctaggcctggagacctctcttcagctccagcgaacagccccccatagtggtggtggtgatggtggtggtgggactgctgctcctcaggatccgcgggtttctcctgtttgatgctaaccaaagactgcaagaacccccaggaggtcctctgcgaggggaaggccgcggctgacgccgccggctccttcttgaaagtcatgtccggggctggcggaggggggggctcagcggccggggctgcggaggtagaggaggataacacgcattgcgggggaggggcggccgaccccgccggccgggtgaagctggtgaccgggggaagacggtggttgaacataaccataccctggggaaaggtgggttccatctctgccctcctgccgctgctgccgccgccgccgccgccgccactaccaccgccgccggagccgctaccaccgctactgccggtacctccgccgccactcaggaacccactgccgattttcataccccggaggaggcctggctgaagaaaggaggaggaagagggaagagggaggaaaggaggtggaaccgggccccgggccgggaccaccgcagcgctaaggaccccgccgcgccgccgcccagaccgcaacgcgcccagcactaattcccagcccagtcgcctccggcaccggcacgcatggtcctgcgactcttccccaggcctcgccctctccctcctggacccaccggcaatacttacgggtcccgccgccgccgcagccgccgtcgcctccagttaataaaaataacgccgtcctctccacaatggaattaaaagcctcccgtgtactgcgcagccgcggcgcagtgtctgctgggaactcctcgacccggccagaggggagggctaaggagccagggcgcctgcgccgcagcttccgcccggcctgcctgtcaatcactggggccgttgggcggaggcgggggagcaagggcaggggaggcggggatttggagccctgctaaaaaggggctttcgaggcgaacaggcgtgattggtgggctgcactgaaggagatgaaagtggttgagggtttctgggggaaagacgctcaggaggtggaacccaaggggcgggaagttacgggggactgtactacagcgtggcgtgggagatgcagagaaaggggctggaagagaaggtgagggaaactgaggattcaatgttagggctttcttcactctaggttttgcaatccaggtcttgaaataaaattcaaacctagaagtggatcattgagggcacttttgattctatcaagaagcattcaactccaaatgctcaacatttattaaaacaggtgcttatgttatccctttgaatttggaagcactaataatgggcgcatatcctttgcatttatgggaggagcctgctttgaaaccgcaattagtggtaccgttgcaacaaaaaaaaaaaaaagaaaaagaaaaaaacttgtcttactgccaaccttcctgaaggctactggaagaggaaaccgagcgtaatccaggtgcagcagtcctgtaaaacacgcccacacacatacttcattatcattacatcttatttaaatgcccccgtaccttagcctggctaatcagtctgtttgccacgttatgaatgcctggccctttatattgtttatgaaaaattaaccaccaggccattctaagagctctgctaggatcaactctttcctcgccagtacagaataccgagaaactcattgcaaatttagaaatttttcttgtaagggaaaattatgaagtaaaatcttaaaatcaaagttatatcaacaaaatcaaacaacaaatatttattcagtgtctaatgtacacaaggcactcgatttcatgttaagcatgcagaaatctaaaccagacactttcctagcaaaggatatttataaatgagaaattttaaataaaagaactagaactatgacaacagcttatttacatagtatgttttcttaatgaagttacatgtacatcacaatgtttctagctaaataacttctcataattaaataataaattctctgggaaatttcacaatcgaaaccatagggattatttactaatacttatggacctctctcagcctgccctaaaaattttacagacaatatttaatgagaattttgagataagaagaaattgctttttttctaatcccatgaaacaacatgtaagtattccaccacttaaactgacactttaatactgtcaagtatagttgtgatattgtgaaatatatatttggactttgaaccgttttgtggcatacaactgctaaaaatccttggaatctgcaaagtaataaatgtctttttgtatgctaatgaagcgactgatgatggctggcaacccctaggtagcttcaggatgggggctggtcaccggaaagaccaaggcaggattagagtttgggactttcagtcccaccccccgacctccggggaggagagagggattgaaggttaagttgatcttcaatggccaatgatttaatcaatcatgcctgtgtaatgaagccttcataaaaacctaaaaaaggacggggtttggagagcttcctgtaagcgaacccgtgaaggttccaggaggatggcgcacccggaaagggcgtggaagctccgcgccccttcccacagactttcccccatccatctcttcatctggtgttcatcgatagcctttgtaatgtccttaatagtaaaccggaaaacgtaagtgtttgcctgggttctatgagctgctctagcaaattaatcaagcccaaggaaggggtcatgggaaccccgatttacagctggtcagtcagaagcacaggtaaaactacctggggcttgtgattggcatctgaaatgcggccggccagtcttgtaggcctgggctcttaatctgggggatctgatgctgtctccaggtaggtagtgtcagaattgaattggaggacaccccagtggtgtctgctgcagaattgattgcttgctcggtgtgtggggagaaacccctacacatttggtcgcagaaatcttctgtgttgattgttgagtgagagtataggagaggctgagttgtttttttgtttttgtttttgtttttttctacaatagctaagtgttaaagactgaaagttcaaaaacttaaggcagtcgtaaaatattagtcaacgcctgtgagaaatgaggctgtccctttattcagggtgtcagtgtttaatggtaagctgggatgcatataagctagtccaagcatgaagggcagtaggacactcatatgaaaagccaactttgttcctcagttatcaagataagaaacctgtcatttctctcattcactctgtcagccttgagatactccaagcagacttacctctgtgttgtacaccccatatatcaggaagatgaagagaccctgtaaaataaaatggaggggaaaagctgttaacgctaatcatttcagcagtagaaatacctgaaataaactttcctgggaacagacaaaagaagacacacttcatcaaggtcaatttattttcctatttttcaacattagaaggtgtaccttgagcatttatatgataacatagcaagcacatcacttataatggttgtgctattcaattctttagaagtacaaaataaaaataccatcccaagtacaaagaatattaattagaaaaatcaatataccagttctgaaagatagctgggtaatgaaaaaattaaactcaggaaatgttattaaagtaatcatagaaataacactaagcatcagtatttccaagcactgttttagactgtagcaactagaatatatttgttacaatcttcaacagggttaaaattaaaaaaaaaaaattataaagcagctaaaagaataaacttaaggtaataagtatgaataggttttgaaataatacttgaaataccagctcgagataaaatttcacattaccatctgttgtgaactgcatacatttttattgtaatctatatatgtaacaaatattccaaagatgttgattagtctttagctttagaaaatgcttaattaattagaaaatataaattcacttttaactctaaaatcttaacttttaaaagaaaataaaactatatgctttaaacttagagaaaacagacagcaaaaaattttcacttcagtgaggaaataaaaatctacattgtagtattcttgttaggtactaacaagccaaatattaaataggagtctgtactaaatctagaaatggttcaaatagttaagtaatatgattctttcaaaagtaaaatattaaaggaatattttaatatttgtttatctctgaatgcttagattttacagataatggaaacaatcccagaacaaagagattgtataaaactagtgattcttgtttttatttagtttctttttaaatagactttgttttttacagcaattttagttttacagaaaaattgataagatagtactcaggctgggcacggtggctcttgccagtattcccagcacttttggaggccgaggcgggcagatcacctgaggtcaggagttcaagaccagcctggccaacatggtgaaacctcgtcgttactaaaaataaaaaatttgccgggcgtggtagcacatgcctgtaatcccagctactaggaaggctgaggcaggagaatcacttgaacccgggaggcggaggttgcagtgagcagagattgcaccaccgcataccagtctgggccacaagagtgaaactccgtctcaaaaaaaaaacaacaaagaaagatagtactaacagtttgcatatatccgatacatccccagtttcctctatttttaacattttacattagtatggtatattcattataacaaatctaattcaatactactacctttataatttctgaaactaaaactgttgcaatacatacatttgttttaataagaatgattaatgaagagttatgaacaataaacaatttccattttgataataaacttttaaaaattcaactatagctacacttttttttactgtgtatacacgatgtcccaaagttcaataccaacactcactttcctccttccagtagccttggtcaagatccatttagtgcagactaaattcaagccactcagtacttgagtttagtactcattttataggctacttgtttgctccaattctggataattctaaatagttaagaaaaaaaaatcttttttctgatttatgtaaaaactctaagataattaagagtccctcttccctcaataattgttaattttttattccttattttgctgcataaataaaaatttaagagtaagtcattcaaattttaattctatttatgagataggaatattttgctttgtacaatagatgagttcctgaacaaataaaatttcctgaacaaataaaatttcctgaacattgaacaacatgcattattatttccgtataagaaacccagctgtttatgtgaaatctatatgatgctttgaaaatcaaagagctaaccaggtgcagttgttcacacctgtaatcccaactctttgggaggctgaggcaggaggactgcttgaggctgggagtttgagacaagccttggcaacatagcaagaccctgtctctaccaaaaatttaaaagttagccgggcgtggtgctgcatgcttgtagtctcagctactcaggaggtgagaggatcacttgagcccagaagttggaggctgcagtgagctatgatcgcaccactgctctccagtccatcctggcaacagagtgagatcctatctctaaaaaataaataaataaaaagaaaatcaaagagcactttaataatggtataatcacccttgtaatttatctgtcttgtaagttttattttttccccacgttttggtaaactgagaaagtagagtatgcttcatatttttatttactacactaccacgttacttattatacatttttaattttaatacatttaaccttaaatgtaaaatgatcacaacaaaaatattccttttgaaaataggatttagaatttaaaaggattttagatacaggcagcttccatctcaaaagcttttttctctttttgcctgtcctcaacagatgtacacctaacagcatggtaaggaagccccagaaggatgtttctaaagaccatgagggagtctgaaacctgaaatcatgccaaggactctctgcttctctttcacttggggtgtctatctgatgctgccacaaccagttgaaacgtataacattaacaataaaaattagtttttttgtaactaattttatgccccataattgtatgccccacacatgatgtcttttttctccattaattttaccaggtattcacagtcatgatcatttagatctaatgccacagaacttcataaaccctttactactagaaaaacatcctattttctcaaagggaagaatcacaacagaaacagctaaacataaacatcttaagccatactatgagccacttttaaattcctgcagagaggatacctttaaaaacagctggaaggaaccaactgccaaacttcaactggcactgtgatttctggaactccttatagcaacattctgtcctactaaagagtcaatactgaaagtatgtcacatttctgaattgaatgatctctcatgtctgttaggtggtttctactattccatttatagaacagttcatctgtaatgtattaatatatgaagtattttctatagaggtacctatttctcaatgctttagtcacagtaaaaataacattaattgggcaggaagcatccaaagtgtagctggattcctgtagcatgcgtgtactttatgggcaggggccaggagttgggaaagaacaccaggatattacatctgatactgtacagaagttaaaaatagaaactaagggaaagagaaaaaaacattcttgatgatttcattctcatttatctatgaaacattgaaaactgaggcgactttgtaaatatttacactgttctagaagtcttgagcattatctgcaaatagattcagtggttgacatcaagtctgttgttatattgatctgtacttttacagtacacttcatgattgttacagaatcaatcttttttaagtggtaatattttctttcttggcaacagaaagaacaggacaggtgccccatacatagcacattgcctcctcaggaataagaatagtattaacagtgctaatatctggatagctctctcaagcactttcatttacataaacccatttgttcttcactacaacattgcaaaggaggcagtgtgagtattattagctttattcttatatatggggattttgaggcttgctcaaagtgccacaatgctgacaagttggcagagccaaggattactgtttgactcctaataaatgctctttcacacacattgtcttaaatagacaccttcataactcttttttttttttgagacgcagtcttgctctgccgcccaggctggagtgcagtggtgtgatcttggctcactgcaagctccgcctcctgggttcatgccattctcctgactcagcctcccgagtagctgggactacaggcgcccaccaccatgcccggctagttttttgtatttttagtagagacggggtttcacagtattagccagggtggtctgcccgcctcggcctcccaaagtgctgggattacaggcgtgggccaccgcccccagccaacaacttcataactcttaagtcactagcttcaagataatgcaattggtgagacttttcaaagctcaagtttattaaaagcatattgcagtttgattagctcatagggttagggactcagtatttagtaatagggcttcaagtaaccctggtcctccacctagcaagtacaacaagaaatgcagttggtaacaatgattttcagtagctatgggccagtttctgcctcttgtactttccttatagattctcattcaatgacgtatactttctggttgctgggaaacttaccttttgccatcaaaaaaaggctgctaggtaaccgtattgtcaaatattcttattgtcatcatttactgaacttttttgaatgtatgttactatgctgtgtacttttatgtatttacaaatcctgttccaatctttctttttttgtttgtttgttttgtttgtttgattttggttttgttttgagacagagtctcacttgtcacccaggctggagtacagtggcatgatctcggctcactgcaacctccgcctcccaggtgcaagcaattctcctgcctcag

SEQ ID NO: 35531 - DNA, 516 bp, Homo sapiens
taattccagttccactatggcatttgttatgtaaaataaataaaccactattttaagggctactcaacaaataaaaactgtaaatttaggggggttggagtttgccttgtttgagatgaaatatattataaccctaatcagttttcaggtgttgtaactgaagggctgtagagagtaaataaactagaaaaactttcagaacagaattcttttttttttttttagcagaggtctctttgttgcccaggctgaagtgcagtggctagactcaggtgacatcatagtgccctgccgcctggaactcaccctgggcacaagcagtcttcctgcctcagcctcccgagtagctgggactacaggtgcacgcaactgcacctggctcagaacagaatttaaagggattggcaacaaaaaatttcttctacagctttttttttttttaagttaaggtgattgaccagatatgaaatagggcatactagatatagaagtaccattttacagatctatgccaca

SEQ ID NO: 35532 - DNA, 631 bp, Homo sapiens
aaatgaggactgtctacagaatacagagatgggaagatggagccacaaggtgacagacttgggcctgactggtcttctctcttgctgttgtgaaagaatctatcctggtgttagaaaacacccaaaacaggccaccctgtgaggaagcctctaaggatctgagctgatcaagggcctcttaccaatgtcaagtcagcagtaacagcagaaaacctgggctgtttgaatgggataaaatggtcttggctcatcacctagacacttctccctccttgcactccttctaaccaaaaagataatccaagaagagttatctatttgttgtagtatccagagcaagatgatctttgaactttaccctctttatgttgtggttatttttgatggagggaatataagtgcatgccaactccacaggcattgcacaacaaaataatatgagccactggaaatgccaatgagcacctgcttgccaaggtcttatgtcagactttttttttttttttttgagatggaatctcactctgtcgcccaggctggagtacagtggcacggtctcagctcactgcaacctccgcctccaaagttcaagctattcttgtgcctcagcctcccaagtagctgggattac

SEQ ID NO: 35533 - DNA, 1412 bp, Homo sapiens
ccatattggccaggctggtcttgaactcctggacttgagtgatccaccctcctcagccttccaaagtgctaggattacagacgtgagccaccgcgcccagccggcaaacaaaaatttacctatgattcaataaatggttttcccctaccagccttcccccaccacacatatacactttttctgattctgttttaccataatgatgacacaggtgcttaaccagctccgtgagctattggggtggctccttgccttgatttagtcttgtgcccacacactgacccatgcagacttagccatgcatccagcacaaattacgctattttacatgtttggtttaatgtattcgtacctgctagacattgtagccaaaagattgtttgctgcctaatcctagccagctcttagggtgactgcctaagcctgtattgctggcttcacaagtttttttgtttcaggtaaataaaaatcaaagagcgttcgaggcagccgcattgactcaccttgcagacaagcaagcagagccgcagagcagtgacccgtgcccagcgcctcgcagctagagctggattggaatccagggctttgcaggcttcctgcttcactcaatcctctttctgttgcctctggcctcaaggtgttggcctgggaggaagtagcagattaaattccatgggcacgaagtccgtagctgacgaatacttaatatgttgcagtttcacagtgaaagttggcaagtccagggtgggaacatgccccaagcagctgagtcttctggattttacttctgttctttgcctctcaatttttgattttgttatataaaaagcaaatcagtaactattgcattatattctgcagtgactcaacagcgacacttaattcagccaaccaaggtttactgaactgctcgtggtgccgggaaccgtgctgggataggatacagggaccaaccagtcctgatcattagcttagccagagaggtaaactgactgacaatcaatctgccagggatcaattactatggaagctcatagtgtgggcccctaacccagactgtgggtctgaggaggtctcctggaggtagtgctatcctaacagagacctgaagggtacttggaatccagccacagaatactatttaccatctcattttactctcatgagaattctccccactgtaggcaggatgggtgttgatttaaaagaaaaaaaaaaaagtagcctggcggggtggctcacgcctgtaatcccagcactttgagaggccaaggcgggcagatcatctgaggtcaggagttcgagaccagcctgaccaacatggagaaaccccatctctactaaaaatacaaaattagccggacatggtggtgcatgcctgtagtcccagctacttgggaggctgaggcagg

SEQ ID NO: 35534 - DNA, 842 bp, Homo sapiens
ctctcccacctcttgtggtgagttctgagcctctccatggccatcctcccagcccaggccatcctcccaacccagcctctccatggccatcctcccagcccagaccatcctcccagcccagcctctccagcccatggccagcctcccagcccagcctttccatggccatcctcccagcccaggccatcctcccagcctagcctctccagcccgtgaccagcctcccagcccagcctctccagcccaggccatcttcccagcccagcctctctagcccatggccatcctcccagtccagcctctccatggccatcttcccagcccagccccacctctccagcccatggccatccctcccagcccaggtcaggctctgagcccaggctctccagcccatggctatacttccagcccagcctctccatggccatcctcccagcccaggccattctcccagcccaggagtatttctggaaatgctcccagcccagcatttccagaaaaggaaaatacagccaatgctgagagtctcaaaggtcactcagttcagacctgcagaaatgtttttgttttatttttttacttgggatctttcaaccagtcagcctgatgctcttgtttgatttccatgtttgttgtagtgaaatactgataatcaaaaagttattctacatgatgagctgttcctcctacttctttacagtttctccattttccaaaatttctacaatcaagatgtattgcttttataatcataaaaagttaaaatgttaacatattctgacagaaatataggaattattaagacttttttctaggtggtggaattatgggtaactgtt

SEQ ID NO: 35535 - DNA, 2287 bp, Homo sapiens
gatctcagctaacggcagcctccgcctcctgggttcaagcaattatccagcctcagcttcccgagcagctaggattacaggcacctgccaccacacccagctaaaaaaaatttttttaagagacgtggtctcgctatgttgcccaggttggtctcaaactcctaggctcaagcgatccgcccacctcagcctccaaagtgctgggattacagccatgagccaccgcgcccagcctctgtttgtagatattttaattagagaaaaatataaaatttcaagcccatcaaccagttctgctctataataatcaaaaactatctttgcaataaaaaaagttataaaaaaaaaagtacttacccctagaatcactctcaaatgtaagatcagggaactccctctagactcaagggtgcctgagaggccacgtggtttttagactctcctggttcagcttcaccacctgatgctcttcccttccacctagagcttttcgcagcccacaaaagatgtgctccatgattccaaaacagaaaggcttctggttaggagagaacactaaggcagcaaagtaagccctcaatcaaaatccctcattcactagcactctttagaagtagaaatcattgggacgcccaaatgcttctgaaaaagttctgtggtgcatccaaagatcatcccagtagtttgtttgccttaaaagtatttgttaaaacataaaaactgtatgtctacgtaagtgattttcaatcctagctgcatattaaaaatccctgaagagcctttagaataggccagccttcaggctccaccccattccaagtccatcagaatctctggcatgaggtcctggcatcggtagtatttaaaagctcccaggtgattcttatgtgcgtcagggtggaggggcactgctgtatgtgaagtgagtcattttcctatctgcccttcaccgcaggacatgagtaatcctgtgaaccagccacagctgatgacagtgttcagcattctacatggagctcaaatcccccaacccctccttttaagcgcttgaaagaattgctcagaaaacttatactacaaatatattttaaaatttagggcttaggagtggactgcccccagtagctcaacgttttattactcctgccttagtcacccatttcttctttctctctgccttgctctttctcttctcctccccctgctgtccctcccactctcttccatcaacctgcccttagcactgtaggcaggctgcccacctggaggctccaggctgcagagatcagcccttaggagaaggtctggataaaaagtggaacttgtggaaagggcatatcatttataaaatttcttgctttactgcaaaaatgtgtgcttcactgctttggaaaacagtctggcagttcttcaaaaggtaaaacatggagccaggcatggtggcttacgcctacgatcccagcactttggaaggctgaggcaagggattgcttgggagttgggagttgcagtgagctatgagtttgggtgcagtgggtacaacgtatgcctgctcggggaacaggtgcactaaaacatcagaaatcatcgctaaagaacatacccacacaacaaaaaaatcacctgctccccaaaaacaattgaaaacataaaataaaaaatatagcaacccaataggtatactccactgattgtttgtagatattttgtttttgtttttgtttttgtttttttgagatggagtctccctctgtcatccaggctggagtgcagtggcatgatctcggctcactgcaacctctgcctcccaggttcaagcgattctcctgcctcagactccagaatagttgggactacaggcacgtgccaacacgcccggctaattttgtatttttaatagagacagggtttcaccgtattggccaagctggtctcaaagtcctaacctcaagtgatccatccacctctgcctcccagggcacccagcctcttttttttgtttgtttgtttttttagaaacgtggtctgtctatgttgcccagggtaggtctccaagtcctgggctgaagcaatctgcccacctccacctcccaaagtgctggaattagggagggagtttgaggttgcagtgagctatgattacatactgcactccaacctgggtgacaaagcaaggctctgtctcaaacaaaaataaagaaaagaaaaggtgaaacatggaggtatcatatggtccagcaactctactccttgatatatacccaagctaaataaaaacatatatcca

SEQ ID NO: 35536 - DNA, 2060 bp, Homo sapiens
gagtgcagtggcgtgatctcgactcactgcaacctctgcctcccgggttcacgacattctcctgcctcagcctcccgagtagctgggactacaggcgcccgccaccacgcccggttaattttttgtatttttagtagagacggggtttcactgtgttagccagggtggtctcgatctcttcacctcgtgatctgcccacctcagcctcccaaagtgctgtgattacaggcgtgagccaccgcgcccggccatcgagctttcaatgtttactatcagaagtgctttggtctgtatttaaaagttcggtgatatttttgtgaccaggaatatgccatgggaacttcactcttgtttatatcaattaacctgtggtagaattggttttgctatgtgtcgtttcacttaaagtcacagtttccaagaatttatcaacgacatgaagtgagtacttactgtagtgatattttacttggaaaatattctcctcctgtggattcctgtggattagaggaatattgaggggaaagggctaatattttgaagtgatgaagtcttgggcttcagtaccagcatgaaaatgtggacattttgaaaaaatacagataggacttcgtgactaagcagatatggagattaggaagagaaatgagtcagtgatgacagcagggctttgactgagcaggactgggggcgtggtagcaccataggcaatagggaagtcagaaaggaggaactaggctttctgtagggaagatgataaatttggctttggaaatgccgattttgaggcaaaaagttcagtgaaaagttgaagatatatatcttcaactatagctagctagctagctagctagatagaaaggagccagggcacaagcaaaaggatgggattggagattgtatgtgtatatatgtttttatcatgtaatatttcaaatacatcaaatgtaaatcaaatagtaatgaactttcatggcctatcacctgactttaataatgataaactcttggccaaacttcatccacagtcctcaccttgtattattctgaagcaaattctagacatggagatagggatttaaaagtatgaagcacagaaaatatagatttggggaaaacctcagagaaccttaaagcaaactttctcattttacagttgagcaaagctaaagattagagaagtaattaatttgccctattaaaaaaacaaaactggtagagctgtaaacggaatccagttatttgcaaacagctttgccaaggggtcttctttctgcgatgaaatgaggaaagtaaagctgatgtgcaaatttttcaaagctaaaatttatttgtaagttactatttgtaaacattacaaaaataaacactcgtcttatgctttatttgtaattttgtcctatatcatcacacgtgcaacacattataaaatataaaataggttctcacactaacagtagaacaagagaactgtgtttacttaattatccattggttggttttcacactgtggccctagagcctctgaggtcattgtaagtatgccttggcggcaacaaaagagtcctatctgtccggagtcagtttactggtggctgccaggaaagtcaccttggatgacacgttacctcttgtaccatacctctgtttatggagtaaacttcatattgattgtggtgagtagactgtataacaaggcaataagagatgcgttgatattaattccagagaagggcacaacccaaataatattcagctgccagaagaaaatagtgtagttttactggaaaatatgacaggtcgtggatccagcttagatttattaaattaatcagtgagtcacagtttaaatatgtggcaatgatctttgtaaagatgttatgaaaccaaaaaaactaaaaaaaaaaaaaagaacccactttgacttgttgaataaaaaggtgatttaaaaaacgtgcttgggcctgggcgtggtggctcccagcactttgggaggccaagatgggcagatcacctgaggcctggagtttgagaccagcctgaccaacatggtgaaacct

SEQ ID NO: 35537 - DNA, 2485 bp, Homo sapiens
ttccctccttccttcccagatccaggagataatcaactaagagccaggcacccttttaagtccaatataaaacaatttacaacctgctctctctaaagtctatctaagagcttcctctgcacaataaaacttggtctccacaatcctttatctctagcctgaacattcctttttatggatcccaggtctttagataacctcaaccagataacgtttacatttaccgattgagttgccccgcctttctaaactaaaccaatgtatttcttaaatgtatttgatgtctcacgccttcctaaaatagataaaaccaagctgtaccccaatttccttgggcacatgttctcaggacctcctgaggactgtcactggccatggtcacttgaatctggctcaaaataaatctcttcaaatatttttcagagtttgattcttttcatcaacccatatctatacctttttacaccaaaaacatgtctttgcaaaattacagttattgggaataaggcttttaacctaatctggggactatcaaatatactaataaatatttttcttaaaaaaattctttgtttaaactgccagattccaacttccagaaaaattccaacagaaatgcaaccgagggtctagaattactatcctaaatctccgaaaatgtacagggggtggcgggcggggcagggacggctctaggtgagcaggaaaaagcttggaactcagtcttccaatggcgaaagggaacgtgctcctgctgggcgggacggcggacggctggcggcggcgcggcctccaattctcgccaacgcgccccgcacccccgtgcactggcgggccctcccctcgggcgttgcctcccacccacgcccggcggcaccgcaccccgaggcgcttcacgtcacggagctgctaggagacgggcggggctccggttccgggtagaggcctgggacacggggaactgtaaggatgggaggaaggccgcgcaggggcaccagttctgccgccgcggcctagcgccccaggtcccggagaaggggcaccagggcggccaggggcccaagcttccggggcacgctcacccgcgcaggactgaggccgcgtccgctcccgctcccgctcgggccgtctcccccttccaggctccaggccaggcttccgcccgacaagccctgacccgctcgtcaggactgcggcccggggttggtggtgcggagcggagcggagcggagcgtagagtagaatccacttccccgggttttgggagggggccgcagcccgctttccgggcggcggggaggcggggccaccgcgggggcggagctcggctgggagccggcagtggcttgggagggagggagggagaaggagaggggcgggaaggctcctcgcgttttccacgcccccgcccagctctgggctggtggtaaatctcggaactggtccgggctgggcgagttctggacggaggggcacgtttgggaatcctcttggaagaatttacgtaatcgaatgggctgggactggtggaaaagagttggaccgtccggaaagaagcaggagggcggcgcgggggcctggcacccttagaaagtgggaagtgtgagtgtaaaagggaggggcacttctgcccgttgggcccaaaaacccttttctggctttagctagtagagccactcaaaatttaaacggagtcagcttgatgtggcatatatgataagctggataatatttcctgcaccaccgcacccctccccccaccccaacaccaacaagaaaataacacaagtcacggttcttgttccttgtgggctgacatttccctgttttgccaacctctggagccacgtgtcccaagcagcttgtagttgagaagtgatgggggagaggagacagcacgggagaggaaggagggaagccagcttatattcaggtgccttaagtatttaaaaatattttcagtgtaatagtcgatgcattcaaaagagcatatttaccaaatatgtaaaatttaaagtatgctaatgaaactatcactccaccacgttatcagtatttagcatgtatctatgcatctccaggattctactcctggcctcttagctcaccaccactatcttcagttttgtccctctttgccatttttagtggttttatcatatttggatgcattcctgtgtattggtgtatttttcttctttttgagctttataaaaatacatatagcctggaattcgctttttatcactcaacatttgtttttttggttcatccaagttgttacgtgtagtaacagaacatttatttcttactgcctagtcaaaaggaagttttctcctgtcaggaatgtattcaatactgtagcggataggattataaatgcactttaagtattttctttattgatgggaaccacacagactaaatgtatcagacttcccaagttcgtaggtcacatacctataacagaactcttttcctgggt

SEQ ID NO: 35538 - DNA, 2404 bp, Homo sapiens
agagataaaatttaagtggagagcactgagttaagaaaatatctcgatatcatgaaattaacacaggtttggagcccccacagatcctcaatcctggttaagttccatgtatgacctaatcaactccacctctctttcgtggacaatcagcaatgacatctacctctcaggattattgcgagggctaaatgagatagtgcaggtcaagttcgctgcaaagtgtgtgtcacataatgaacattttaagtaaatatcaactcttttcgatgaagcactgtgtaagtagaatacgaaagctattgccaggcctctccctcctccctcccttccttttcctctctcagcagtgcaggcagcagcagccaaaagccagggacgtggaggatgtccactgaagcgagtactccagagcgatgattaaaaggcagccgccccgaatcccgggcgcgggcggggagcgaggctgggcatgctcagtgggccggagacgggagggaagcggggagggggcgggggcgggggcgggggttggggggggtgggtcggagccgcgcgaaggcgcatgctcagtctccgcatctgctccttcatccagtgccgcagccggaaaaccgcagcggcggcggcggcggctgagggggaacgatccagcgagctgcagaaaggggggcaggaaaaaattacaaggacattactgataagacaggaactgagagcttgggattcgcggcctctccccggccaccaccttcgccgtcagcaagggaggaagacccgggagacggcagcggcgacggcggcaggggaaggaggagacggcgacgggagggagcacagaggaggggacgggccggcggcggcctgtgagccgcagtgattttgacgttttccgctgctgcgtctccggcgggcaggggccgggctgcgctgggtgggccagctcgccccgcgcttccccctcgtcctgctcgtccctccgcccacccggggcctgaggggtctccccgctccgagggaaggggagagggaggcgagggcgtgcgggcatcgcgatggcggggacattttccacaacgtgattgttgaaggctccccccatcccccctcccttaaaattccgggcccttccagcctccaccctcccccaagcccgtgtgactaaaccgagacaaaggggaggcggcctcgctcacacgcgggctcgcggggcgggtggctcggaggggcgcgggcacggggcggacctcgcgcggacggacggacggagacggcgccgccacattcctatgcccgggagcggcggcggcggcggcggcggctcccgcgggaggcggcaggcgcgcggcgcggacagctgagcttctcctccgtcggcgcccgggcggacatcgcccgggccccgatggtttgagcttgcttctccctccctcccgacccccgtggtggcgaggccacgccatgtgaaggttagggccgggacatcccgaggagccgcggtgaaagatgggggatgctgcagaccccagggagatgagaaagacgttcattgttccagccatcaagccttttgaccactatgatttctccagggccaaaatcgcctgcaatctggcctggctggtggccaaagcctttgggacaggttagtggtgtcaccctttccctcccctcttcctcctgatgtggtccacatctcggtttttgttcccgattctcgaatccctccctccccgtgcctgtcttctcgtacaggttaagggagatgatgggaggctaggaagagaaagaaaggagaaataaggaaagcaggtttggtcttcaatgaagggcacgtgaatggtcaggtgggatttggccagattccttttattggatggcaaaatgtcccccccatcccccagtgagcaattttatgtttttacatagagtggttttgatttgtggtattttcttcattgtgttgcgtacatttctgcctcagtcataattgtgattacaccaccaagaaatctgagttggtttctttattattgcaagaaggtggatggtgcatagtactatattgattttgacatttgtaatgatggctgctattcaggctccgttggatgtaaggtggcctgtgtcgagtgcagtattaatttttgttgtcattctttaaggctgtatcagccttctgcacgcatgttaagttcttattaaatcagttatttaaaaccagcgttcagtttgctgactgtagggtgcagttttcatttcatattatcagtgaggcatattcttttttccaaatgtattttggcttcataaattaaaagaaacaaaaactccctactttgggaagttttttaatagatgagtttttcgaaggcgtgtgctgttgacacagaaattgtatagtaca

SEQ ID NO: 35539 - DNA, 4696 bp, Homo sapiens
tcttgaggccatgaagacatgactcttgttgttgtcttctttggggattcctccatgggagcccctttttccctgctaccctcctgccccccggaagtgcagaggcccaggagctgcctgctggcaccagttgcacgggattagttcagggaaggacttgctcacctgctcctcccctctgactcaagtcataacaagtaacctggttcccctggcccggcagcctgggagggacggcaaggtaggcaggtgagccgagacggacggacggccagcagctccgtcagctggagagagagcacaggcctgtggcttgggagaccctgaggcgacatgtgagggccctgagccccctgactggaagcaggggctgtttttcaactcctggactaaagcccagaagcaggtgagggcgggggaggtggaatgggtctttggggctgagagcaggctggcctgggagtggaggagcccaagcagtggccatcacccccctccgacccccacccccgccagcctatgtctggtgtgtagggatgacagaggggtgctggtgggcttggacgggagcctgttcttgtggttgcctaggccttagtttccaccagagggagagcaagcagagatgagctgggacaggcaggcctgagacctggctttgggggacacacttgggatagaggaggatcccccatggcccggcctgagggaaggtgctctggagtttccctccctccctctgtgccccttctggtctcctctgcctttttctggggacattgttcagccgggtgggctgctttttagggcccagtactggagcttgaagaggcccaggagggatccctgtgttagggagggggtggggatgttacctgaactgcctttatctaaaagcaatgccttagacacttaagactcatagcctcctgggtgggggtggtgccctcgctctcacctgttgactctggggcaggttccctacagctgtggagggcggcctcggcagaggcagatgtgagggtccgctatgtggctgtacgggtttccttcttggcctgacattgaccaagaggtcgagattcagaccggggacctggaaaggctttagacactgtgcagtctttattgtgcacaggaggaaaggaagccccgggaggcctggtgacttccccaaggtagtacagaccgcagcagaaccaagccttgagcccacagccaggggctctgggcatctgacgctgttctctttgctctacttggggcagcaagtcatcccagagaggacccagcatcaggctgggaccactgggaagatcagtgcctcccctttgatgctggcagtcagagactgggctgagctgggagaaggggaagctggcggagacgggaggcgtgctaaggtacccctctgtccctgtaagtccccactcctctgcaacagtctcagagcccctgagaagcaggggctgagttggcccaactttccaaggcaactacttagtggttaataattaattagcaagcgtgactaattaatggcttcccctcccacattacttcctcctctgtgcaaagcagacacactcagcatgctagctgagaccaccttgcttcctacctctggctgcaccctgctcttggcttctggggagggtgggaggatggctagggtgggtgggaaggggtgggggtgagctgcctgctcctctgtcctgttcttatctctacgagggatagagtttgggacagatggacagtgcagagctaatagtcatcctaagtatcctgcggggtggggttccagaatatatggccaatctttcagaactttggcatgtttgcaaaggcctcccataaagttaaaaaaaataattctcccatgcattctctagacttccttgaataattgaaattccaaagtgcaaggtacatgttgctttcagggctttgtgtttgattgttgctgcctgtggttgctgtgttgtttatgtaggtctataaaagttcttgatcgtcctgctcttatcatcttgatgggtggagaggtatcaccagggacctggctgacagcagtcccctctccctgttggccttgctttgttaccagctttcccaaggccgacttttctgtcgtgttggctgcctgaggaggggtggagctcacctcccccaccctgcggccccgcgctctgaggaggcaggataggctccagacagaaactcggaaggacttttggactcttgctcaatgggctgactcagtgaggaggtggctgagctctctttccagacccaaccacctgcatgggctccgcccacccctcccacccctgctgcagccagcagctgccaggccctggccagctgggaccccaaccaggggtgtgggttggtgaggagggagagggggtgggcacaggtgttatctgggtgactggtccctagctgagccgacacaatgggatggcacctgtaccacccaagtgttctccaccccgaagcaggcagaggagcaggtgatctcctttctgtccttgcacagcttctgctctagtcactgcttgcccctctcctgtcaactcttggcaaccctgatagacacagccctgggtctcccctggctgtggggtgtaggggatctaggctgattccccttcagtggtctcccaggagtaattgatggcttgaaagttgtttgagggctttgggacagctctctggcatacagtggctgcacatatctgcagatgatgtgaagttcagagtccagggcgccaattcagagagtgggcgtcctggacttcggaggccccagaccagggccttggccatgtgcctgcccacttcttgaagtgtcctcagccactggggcgtaggacatgcctcacacctcctgggttcttgggttgaggatagctgtgtcccataaagatgtcttccccttcctcctttcttttttttttggagacggggtctctctgttgtccaggctggagtgcaatggcgtgaacatggctcactgcagccttgacttctccaggctcaggcaatcctcctgcctcagcctcctgagtagctgggactacaggtgcacaccactatgcccagctaagtttcattttggagagatggggtctaagttgtccaggctggtcttgaactcctgggctcaagctatccttctgccttggtctccagaaatgctgggattacaggcgtgagccaccatgctgggcttccttcctcctttctttgttatcccatcccattttttgtccccttcctttttatcctgtctctgctcttttccttcttgcccttctccccagtcgagcggttcttgtggctaccacagctgtcgacccccttaggcctagaggactttggcccagaggggagttaggctgggcccctgagagcccactgagaacagggtttgctggtgaggcccacagccccttctctaggtcagcacccccagtgccagaatctcctgccccagatggttcctgaagcacagtcctcccttccactcccctgctctcaagcatctattcagctttttgtaaccaagatggttcatatctagcttttttgttattgttctcttttctctttaaagctggggaagctccaggctacctacacaacctggcccaggctggtcacggtgtcccccctccctgctctgtgccctctccttccagaaatccaccatggagagtaaggatgaggtcagcgacaccgacagtggcatcatcctgcagtctggtgagtgttcagggaaatccccctgccctagtccctagtccctggtccctggtccctggccctgactcctgagtcctgagccctcaggcactagggctggctgggctgagactcccaagggctgagaggaaggggagggagaggcctctgctgggaggagggggaggttctggaagggctggagcctcagggacatgtggagttttcctccctggagaaaactggcttggagttttggttctatctggaagagggatctgcaatgttcaactttagccccagctgagaagttgaaaaatctcaggcaggcacagtggctcatgcctgtaatcccagcactttgggaggccaaggtgggcggatcacaaggtcaggagatcgagaccatcctggctaccacatagtcccagctatgtgggaggctgaggcagaagaatcgtttgaacctgggaggcggaggttgcagtgagccgagatcgcggcattgcactccagcctgggcgacagggcaagactccgtctcaaaaaaaatatatcatctggccaatgtgaaggtcttgcctctctgtttggccagacctgtgggcctagtctggcctagtcttgacagaggacaagaaagaagaggcttatgtgtgtgtgcaagagagaggggtagtggggagagggagagagagagacaggaagaagaaggagaaggaaaagaggaagaagaagggaggaggagtggggggaggactgcaccggcagaactccctcccctgcactcccccaccataggtcacctggtgggacgaccctcccttctgagttgtaacatttgtgcagccaagagacgtggtgttttgtggctgtgacacaggccacagcagccagcctgcaatttgtgggcaggcatgagatgtgtgtgtgtgtgtgcatg

SEQ ID NO: 35540 - DNA, 888 bp, Homo sapiens
attcttagttatgacaaattgttatctcctgagggtagttgagttggggaaacagccaagaatcacttgaaaccgactttcatgaacacgatggtaatcaattacggtaataaaattttgcataaagcattaggtgtgactacaaagaaggagacaagattgcccaggcatcttataaaaagaccttgacaaggccaggtgcagtggctcacgcctgtaatcccagcactttgggaggccgaggcgggtggatcacttgaggtcaggtgtttgtgaccagcctggccaacatggtgaaaccccgtctctactaaaaatacaaaaaaattagctgggcgtggtggtgggcacctgtaatcccagctactcgggaggctgaggcaggagaatctcttgaacccaggaagaggaggttgcagtgagctgagatcaggccattgcactccagcctgggcaacaagagtgaaactccgtctcaaaaaaaaccccccaaaaacccaaaaagaccttgacaagggctttagctagagggaaatttgtccacatttggatgagtgacatagttcttttggaatgtatcatctctggtatgtttgttgagaaggatttttgtgctttttaggcaaccttgctataaatgtaagaacaaatgttctgttgttcttggagtctgtgggggaacagagatgcaaaactttggtcctggtcagggtacagtcttcaagagatccattactggggttctcattatccaaagataaatgatgccctgcaaaattaccacctgaaacaggttccaacattttgtataaaatagtggaggaatcaatttatcttgataaataaaattaaaagtataaaaataagttatttttatgcgaacaaaat

SEQ ID NO: 35541 - DNA, 1086 bp, Homo sapiens
ttttgtatttttagtagagatggagcttcaccatattggtcaggctggtcttgaactcctgaccttgtgatccacctgcctcagcctcccaaagtgctgggatcacagtcatgagccactgcgcctggcctaggacccattttttttaaaaaaacattttatttatattcaattcctcaggaatctactctgcattttgttccctccaaagattttatgtccgtcttcctccaagccactgctcttcacaaatgaacaaaccagaacacagcagttcccattttccagtgggtaaaactgaggcccacaaaagacaaacagggaaggtgccccatgacgaagccagtggatgaattgcatcagttcctgccctgccctttgcccccagggttgcaaaaataagcatgccaggcacatatcacctctgccacctccctggcccaggcctgggccccgcctcacctccacttggaggttttcaaaagctgagatccaatcaggcaggcaggctgggtggtggagggggaggtttccggggcctgtggttactacactccacttccttatgatgacataaaccctatttctgcagcaggaggccaccaccaagattctcaggtctccacacagcccacatgaggccctgtatgggcctcagtttctgagatctgtaaactggacacaggtggcattgattggcattgactggctttgggactcggaaggcaccccaaatacccattcccccacagtttcttctgtcttcttcagtctttctctcccaagccaccactgctcttggttcaaaattcagacagtcattgaccaagatttcagagtagcctagaactagggaaataactgcagctagagaacccaaatgggagagggctggggtgcaatctaacattgtcccttgggtcccttggatcccccccaaacccctacctatcccctacttaaccctgtagtatcaacagatggatgctgggctggccaagcaccgccaagcagactaaaggaaggaagcttagggaagccaggcagagataagaggggagggggctaggcaacactgaggtctcc

SEQ ID NO: 35542 - DNA, 1130 bp, Homo sapiens
taaccctgggcctgtgtgtaactactccaagcatcagctcccacatctcaaaatgagaataatcacactcacttcattacaggactattatgaggtttaaatgaggtaacgtgggtcaagcatccagcacagtgctcagcaaaaaatagatgttaatttccttcccatttccctcggattctctaccccttcttcaatggattcttatcctctaactggacagaagggcagatttgtcataaagcagtcacgtgagggataagaagtctcacatgagtgtgaatgaggctgggggtgggggcgtagtttatggcaatgaagtttgcatggcacaagtggtcagtgtcagatccagagggcgggagaagacagatttgcagaaaattatccatcctctgctaaccactcagtgacgggcctcggggttcagggtcagtgtttacaggggaggagggaggctgggcatgctgggtcctcattgtacacaaataccccgggcctcaacctcacccatgtgccacactgtgccaagggtgttacataacatttctcttttaatcctcacaacaatctatgaggcaaatactgttctcgtccccattttgcagaagaggaaatgagctcaaaggtcacttggctagtgtatagtcattagtgctgtctccaaatatttccggctctctgccttctggcacaaggtaggactgcatgttctcactctttgatgctagctgtggacatgtgaccaactttaaccaataaaacgtggcggaactgatgtgcgtcagctctagtggaagcattaagactctggcaccctcacacctatgttgttcatagagtgtaaatgagaaataaacttttattgttaaaccactgaacttacaagttgtgtgttgccacggcaagcctggcctaccctgacacagttaggaagaggcagagccagagttcggaggcctggtctgtaaagatgccagatggcgtaagtaccttccagagactgacctgcttgcctaagacacacaggagcccctttttgggctacttagagccctgtggggcaggggaggagggtaggcagcctccctacccttatctctttccccccgatttgactgtgattttgc

SEQ ID NO: 35543 - DNA, 1258 bp, Homo sapiens
atgtacctatatgcacgcccccctcccccaaggcttacagtctgagggaaaaaaaccacagtccccacccaacctgggacaaaactagacgacctcatgggggggatgcggggagggagtaaccccccctcccaacccaggaagccagagaacgccaccggggcacacaggtcgcctctgctgagtctgtaggttcggtctgggctgagcgccagcagcaatctggcctcccatcccttcctctgggttcctttctcgaggagtaagcgtgctcccaaagaagtcgctagtatctgaggccatctggtggagagcagtggcatggtaaccgagggctcaaagtcgggctcgcatcccggggactcgcagagactggactgcgcctgcggcaaggaaggacggagcagagccacctgaggccgagcgggagccagacccagggatgaccgtcctggggagcccctctgcaccccggaggggacgcaggacgcccggagcagtcccaggccctgcccctcgcttcacccacggagctcctaggtctctatcgtgcccatcgtacccgctgccctgcacttccgccccaagctggtggaggagggagggtgtcgcagacacgggagcgccgcggacctcctacagtcaccgtcctgcggcgcatcgcgggtgacccaacagcctcccgctgctcccgaaagtgggacggggccggcggatcatcctccaagccgggggcggccacaggcccgatcaatgccaggattcctccgactccaagaaaggcgacggggagaagcaggaggactcggatgactccggcaccagggaggagggcgcccgggcctcgccgtcgccagggcggtcgggacggggggtggcgggcggcgcggggcagggcccggtgcccgggaggccgcgggaagcggggggcgtcgagccgtcgggggccgagctcagcagctcttgcaggtactttatgtagcggatggcggcgcgcagcgtctccaccttgctgagtcgcttctcagccagggcgccggggaggtggccgcggaggcgagcgtagccctcgttgacgcacttgactcgctgcctctcgcgctcgttgcgcttctggatgaaggctggctcgaaggggtattcgtagaccccgaaggcgccggggaagggcacgtaggggaacacccccgcataggcgtcgtagtagggcggctctgctgggcccgggtacagcaggaagggcacgttgcccaggggc

SEQ ID NO: 35544 - DNA, 1705 bp, Homo sapiens
caagatagctcattttttatgtgcaaatactcccaaatccaaaaatatctgaaacaaaacatactttggtccaaagcaaaggaaggtatggagaacttagataacttctccaaacttccttgctggaagtccaccactgatctgtctgatcagagtgagccagtgctctgtgccccacccttcctcactcctcacccgcactatccttagggaggccagcagccttgaacctgaaggaagaccactaaaagaagtatggcccataggtgagtgagaggcaggcttaaggagcagctggctacctctgagtcagccctgtagacagggtggccgtgcactgtggtcgtgaccaggtgctgcaggctcacctccctcaccttgttggcttcagctgggggcaccagcaaacacccgaccacagccaccaaagataagagcttcatgcttatcaggcttgctgggccagcaaagccggacacctggaaaaagagatacggagtcggagaaggggaaggtggccacaccgcagccagcacgctaggcccttaaccatccggccaagtgggaatggggttgggggctgggctccaggattccaaggcctgctaaacctggtcgccaaaccctgcttccctcccgcccaactctccggctctccgccagccacctggtgagcccggcagaggggtcctcgaggggacaccgctgccaggggcctccagttccttctcaaggcccggctctgacccgcgcatcacgtcccaccgccctccgccatctccgcctctgcccgccccgcagctcctccccgctcgggcccgacgggaacttttgggtgcgagtctgggacccctgctccgacggcgaaggccggtgcccaccacgcccagaggtcttaagccggactgggacccccaatagccccgcgacccccgtcccctcccccaatgccgcgtccacgaacctacaagcccgctgcagccgcaaaagacccagttgtccccgccctctcctagcttctattggttgccagagcagccccttaacccgaccgcgctgtcgccatggcaacaagacccgccttcacctgggcggggagactcttgcgcaagggagaggcgggcatttctcaaacccgaccaaaccagaaaagggaacgtcagccttccaaactcctggggaagggtcttgcctttgtgtggcctgagaactcccactgcggtgcttctcccttccttgtattataaaactcagcttgtttcatcttgctgttttagaaagaaagcgctttatacactgtaagctagtaacgtcaacaaaaacgatacgagattgaagggctttgtcctcattcaaaatctggaaatgttatttagggatccacgtctttgctgcagaagactttctgcgcggcaacgtctctacccctacacacacctctgagaaggagaaatctagggttggcgatgggtggtgtgggctgggcctgtgaagagtgtgcacaacagcgtcctcagcctgatccccctaccccatgctggtgctgggcctggcaaaatggggcaaagtgtgcatggccaggatgcaggggtgagggtccctggctgctatgtggcagatgtgaacttcttgccagctgtgaaggaaaggggagtcatatgaattcagggcaccagacccggagtgaggacaccggggctttggc

SEQ ID NO: 35545 - DNA, 2848 bp, Homo sapiens
accagaatgcatttagaggacagtggccagtatggtgtatggtaaaggcctcaaaccctgccacatgaggaacagctgtaggaaatggaacattgtcctgggaaagaaaaatcttggtggtgatagcagtctttggctctctgaggggatgtcatgtggaagagaaatgagttgcccagagaaatttcttgctatcagtgagggtgttcacacattttttttttggatgagcacttgctgaagctatttcagagggagattaaatatcagatgaaaagtttgatgaatgactctgagttcccttttaactctgagatcctgtgaatctggctatgtgaccttgacttggtcactgaacttcttggaaccttagttcttcatctttaaaataataggtagactaaggattctttagtgctgaacacaatctactgaattgcttcccagagaagctaggtggtgttacatattcccaatcttcagctgtgactcctgcagttaaggtgctttggtcttaagcaacagaaactgaccgtttaaggaaaaaaaaagagtttgttggaaagaagtgggaaattcatataatctatgaaacgactgaagaacaagacttgaagaaggcagaaaccagagcttcctcccctggcatgccatgggggtgcattggctgtgatggatttttcccttattctcaggtcactattcagcattcaaagtccagatgacagaatcagtcccttggacctaagttggcctcaagcctgctccttggcaggaaggtcaggacaccttgattatcagcccaatgtcatcccccaagatgaaatcaaaagctattactagaacaagagccaaataacatgtaccctacaacctccacccttttctcttccatttatgacagcacatcagactcaagagagtgagcagcattataatggaaataatcttcaatctatttcaatttacctttaaaagtgaaaaatgcactcatctggatgctcagtttttaccagtagtagcccacatgacatgtcataactgggtgctgaaatgctgacaagtctgagaacacgactcccctaggagacagacacgctgacgggcttgagcattcacaaacagatatcggatgtctgctatgtgtcaagccctgtggtagacaccgagactcattaagtcagtgcaaaaaatggaaaggttaaatatttgccccgggtaaacgcaaagggcaagtgtattgcatcagggttgaacagggtggcgccggccaaagagggattcctttcaggcccgggcctcgcagtccaaacgtggcccgccctagccccaccccctagtgaccgcacactccagccgtccaatcccgtcaccaccccgtccagtctccaccccgggaggctccactccgggtccaggccgcctggggcgtttgcagtcctctgtgggaggtggcgtcccgcagaatgagaacatttctgtgccgggccagcaggtgttacctgagtaagattgagattctctcaccaggcgacaaggcttgttgtgcccgagacaggcacagctcagattccctccccgtggtaattaacccggggagaaatgtaaccaatccccgagactcgggcctccagccagccgcccgctcgctccgtccttccccacccgggagccgagcctggaaggattgcggggggcggtgcggcaggtggaggtgggagagtttgaaatggatcctggctgggaggacttcccaggccccctgccggacggcgggctaaaagcgtgaggcgaaggtcgtggaaagcccgctgggacccaccgcgggggtgcactggccgctgggtcccaggcgccgcggcgatttaccgcgcctggaggtcaccgctccgcgtcccagggaggggcaggaggctgggtccttctgatcccagaagacatagcagcacggagacactaatccgctgtttttacacataaacacttcacacgagagagattacgtacctcacattgcagtcatagagggatctgtgggtgttagaggctttcagctcctgctctcgggtgcattgtgggacagagcctagcagggagggagcagaggccgcggcagcctctcgggttctaatctcccacctgccgctcgccctagatcatgacgtcaccctggacctcagttttctcacctgcgcagtgggttaagctaaaacctgcgcctctctgccttttgaggataaaactgagactccgaagagtgttcggaaagaacacgtcaggagtgtgcaagggtttctttgaattgtggatctcacatccctgtctggcctgcacgtttactcaccaaggaatgccaatttcattgttttttgtttgtttgtttgtttttttaatggtgataattgacttgaaggaaaccaagctaattacttggctggatgagtgtagagaggcaggggatgaccaggtggaagagggctgctgctttgcaaagattctctcagggaaagaaggaatggaactaaggcctggagtgtgattttttttttttttttttttttttttttggtaaagattcctgtattcagaaccgctcttaagtctgccgagtagagtaggagactaggaatcattttgaaccaaacctctcatttaacaaataatgaaaccgaggcccagataggagaaagtgacttacccaagggcacgcagctgttggccagttggctctgggatttctttgaggctgattgaaactaccttccttgacctggactttaatttcatctcgcctaggctccactccatgtgaaaccaggttttaggatttgggcttttcccccaaaga

SEQ ID NO: 35546 - DNA, 762 bp, Homo sapiens
agcctctgcatatgctgcattctctgctgtttcttccatcttctccacatagctaagtccttctcatcctgtcagctcctccaggaaggctcctcagattgctcttctcccccagtttttggctggtgttcctgtatgtgctcccgctgagctctgattgatagtcccccactaaagcctttgttatgcttctctgtgatcacttgtttcacctgtatcttccactagaatgtaagttagactgaaaactctgtgaggacaaggaccccagcaccttgcacaatatctgatctgcagaagtagctcaataaatatttattaaacaaattaatgaatttcactcacatcagtgggcagaactttcctttaactattgtgaaaatgaatgtgtccatcacattctctgtaaacttcccaagaagtttgagagagcaaaggtcctttcctgtggttatagaaccaacctttccctttcagcttctgttcctattagtatgtgtgccgcatgttgcaataattgtttgaacagaggcaggcatcttgtttcagtgggatttcatttggagaggaaagtgatggaaggaatattttcctggactcctcctggaaggggaacttcgtgtctccctttattcttaagcaccatattatttctccgtgacttagttccccttcataagtatgaaggtatacccagagctctgggaggccaagggaggaggatcgcttgagcccaggagtgcgaggttgcagtgagcgatg

SEQ ID NO: 35547 - DNA, 702 bp, Homo sapiens
agggcctatatagcttctgagcatctcccgactccgggctcaaaagaaactgccttgtcataaagcttctgtgatcagagccgtgtccttgggtgtggtgggctgtggaaaggtgaaatagaaggagaggcaattctggctcttgggaaattcccaggactcagaaggagacagagtgtctgcaagacagactgagacctaaaaactgaggtgaattaatgcagtcacatagaaatgccacttaatatggtgaccacaggagggcagggaggtcagcattccaggcaggagggagaacgcagtggggacgagaggccagcctgcctgagttggagggaacacgctgggaggtcagcggtgagagtgttggttggtgtaatgctctggatgccgggaagagttcagatttgtcataagccaggctctatgcatgggcaggagagtgccctcttcagcatggaagagcaactccactccaaatccagcctgacagagtctgtttctaatagaagagtctgagtcaggttgtccggcttggggcttccaggagacagttccaggactcgggtctcctggctcccctgccccagtctgcctcagggtctcccaactcaaggtggctggctcctccaaattgcctcactgctacttacccagcattctagctccttttggactctgtttctgcacctgagaaaatgg

SEQ ID NO: 35548 - DNA, 723 bp, Homo sapiens
tattgcttcactgagactgtctccttgcctataaaggaggggttggcctctgagagcttcctgacttaatgagggacaggaatagaggggagctttcagtgtggggttaaaacaccccacttctccaagaaggaaggggagaaggggaattacacaagcaggcggcaaagcggggactggctggggggctcctagctaaaagcagcttttcctggctcacctcgggctgtgggacccctcaaaagccccactggtctcccaagtgaagaaacatgtctctcagaatgctctggatttctgtctggctgtccagtctagcctgctgtctggcagagtgaccaactctgctctcaggaaattgagtttccagcctctggaatgttctgatccatgggataaccagacaagaggttgtgtgtgtgtcactgtcctttgtattcaaacagccagacgctgccagcagattgctatctgagtgtgggggtgtggctgggagagccggcattggcggtgaagctctcccacctgcagcgggcgcacgtgcactgcccgtgcatcctcttctggctgcagctgctctctcgggacctggaagacagtgtttggaaacgtgtggggacattttgcaatgactgtgaggcattactagcatttagaacctggaggctggggcactaaacatcctgccatgcttgggacagcctatacaaagaattgtcctgc

SEQ ID NO: 35549 - DNA, 4686 bp, Homo sapiens
gccaagatcatgccactgcactccagcctgagtgacagagtgagactctgtccatctcgtatataaagaaactgaggctcaaaagagttaacaaccttcccacgatcgcacagctaataaaaacaagaaaccaagatttaaacctaggtcagcctctcaaaagcacctacgcttaaccatcataccaagtgccagaaaaggtatggccagggagggctggccctaacccagagggagctcaacagctgaaccttcaagggagggaacagaggcccaagagggcatctgaaggtgtggtattccctaccccaggacaggctggggcccagggcaaagcctgggagcctgggagggcagaggtttggggaaaccccgtggcccatgcaacattgaccttcaagccccagagccaggcccagggtgaaacctacaggcccgaacagctgcggaggctcagctgctcctactagctgaggccacagccccaggcagctgcctaccactccttccctctagacaaccctttcccccacctcctggccttcatctggggacacatgtccctctcggtgtctccatgtaatgctgctatcctcctccccactccagacttcaactccatcctttggggatggggatcctctttttctcttaaataattctaaaggacattctgccgttactcactagagagcttgttttgacctctaccctgggaactttcttcctgaagtctaacttccatctattctgcagcaactgatggcagggatttaagtgaagtggttgttaaaagtcatatttagcagtacaagccattttcccaaattgaatcatagacagaagcccattatacaacagattaaggctcagctgccctgcttaaagctgggagagggtgagaaggctgccccagatgcattttgtggaaccctggggctcaaggagcataatttgcaaatcttggggactggggttagggaagggaggacagaggagggttgggggatcatgcccatgaccttggccagtctcctgcacctgagcagggcaggccttaagttccccttctgcatggtcactgtggggggtaactcaggtctcttccagccccaaaggtctagggagaggtgtctggagaacccagggcagcgattggaagtaggagggcggctcaaggcccaggcagggaaatgattaaccactggctgttcagtcccaggcactctcagatccacccctcaccccctgcagacaggcctggcccagcctcactggtcaccaggccagtccggggagaaaaggacaaggcctctgaccagggcacccagccagccagctcaccactgcccccccaatcccagggttggaagacttgaatctctgctccatgccaaggatgggctgcaggctggcccccagctacccacccacctctccatccacctccccacctgggaccgtgctgtcacaccctagcacggtcctccccagcccaggaggctctgttgacagtgactcacagccctttcctgcctgcccgctgaggcttgttcacccagggagcggagcgggagcggtcctctgttccaggtgcctcatcagggtgactgttggcagcagctgcgtctgcccacagggctctatgagggctgggacccggcagggagggcaggccaggggcccctgtggcaggactgttccccagagcttcctggcacttaccctggacatcttgtgggaacttggctgtagccacatgagtccatgtccatctgagcagtggacaagcttaggccagaccttgctcccattttcaaagttccagtgccccagctgcctccccacacacacacacccccccatgcatatccaggcatgctttcagacacaaaatcacatatatcccaccagactatgaacttctgaagaaggagtgtctggtttgtatttttaacccaatgcacagtactgaggtcttcaataaacagttcaactgaacatatgcagactgacaaactcaagactcagcaacataagaaccagctccccacacagatgtgtcatctcttcataggccataaacacacttgtccacaagtatgccacacacacacacacacataagcatacattcataggcacaggtaggcccacatctagaagcaaagacactcccacatcaacccccaggcacactgacccacatgcaaagtccaagaccttgactcctcagccgcaccctcagcatagaccttcctctatagcagcctgggtttcttttccagagcactgagttccctccattcgtggggcttaccttttcccctctctagagcccatgggctgcccacagtgcttcagagcactgtgaggtcttgagggtctggggaggtggccccccagtcccaggcgatgagctgctatggagaggctaagcctgagacaatgaggtagttctggagcccttattaagggagggcaggagcggggtagaggacatactagagcactggaaaaacctgtgaaagatgccttgctggggaaagcctacaggacccaaatggctggagggtctgcacctggcagagatagccctggctcaggaaaggccaagacccaaatgcccacctgggaggagctaagaggctaatatctacctggctagaaagggatcaaaagagcaggctccagctctgggctaccgcaggagcctcagtttccttagggacaagatgggggacgggggcgcccagtggaggaatgaggtgaaaatgctcacagggggccttcttggcagaggtgcagggtcgctccaagagaagtcgctagaggtcaccaatctccatgaggggtgctgccttctgaacacccgccttccccaggcctctcggaccctgatgggatgtccagcaggcaggggtaggatgcctcatccccgaccctttaggagaccagtgtacaagtaaagattgcagcagcacagatggggatggcaactatcttaaggttcccagcccagatgccaccccaaaatgccatgctgagattctgagcgtccttagtgggagacgggtctgcttccctccagtcctcttcactgacccctccaagacggctctccctgctccccctcccaagaggggctgtgggacacctcccaggggtcctctccgccagagacacacgggggcagtgagagaggcttctctcaggaatgaggcttggaggttactcctgaacacctccacaatcccccaaaacgttccttcctgcttccaccttccacagggggggccatatcccagcgggcgtccagactgaggaccagccttcccctaagcaccctgtgtggggcctcaggccccgaggggagaagacccaccctgtaacctcaggggtcccgagtttggccccaatcctgtctcccgcgagtcgcagcaagaccaggatccagcctcagtgtcagggtcccaggcggggaggaggccggtgccccgaggagaggagacccaaaggctccccgccgaccccccgcccctcccggctccctccggcgctcacctggacagcgcggaccagtccttcctgctgacagccatgctgcaggagccccgcgtggccgcccgcgccccgccggccgccgcctcacctggcgcccctccccttccagcccaggtgggatcacatggccgcttatctcacccccgcgcgccccggccgcgctccgatttgccgacccgggaatggcctctgggatgtgggcgtcccagacaaagccgcattgattgcagcccaggccggcccggccgcgaggccgcaagcactgggtggaccgtcggacggatcgcgggaccgaacgacggacgcccggggccggcgtggggctggtcggctgcccggggcgagggcgggagacttcctgctcagaaccagtccgaccagcttggcgctgggacgcctccccgcgctgtgccgcggcccggggtgccgaggagctgggctgggggcggggacccctgccgggaacccgacttagcccggagacgctcaagagcaagaagccgagcggaaaagttagcgcaggtactgtgatctcgggtctagagcgcccgcgccttcggggccccttcgcagggagcgccctccccactccctggcttcggaacccacccgggcccaccgtcccagtaggcctcgctgagatgaatgaggcattgctttctgagctgcacacaaaacatgcccctggtagacccagccccacccaaagggagaatcttagactcaattcagcaaacatttgtgaaagcacaaatatgtcaaaggcactgtccttgctccctgatactggactttgggctagagtggcagggtgtataataagggcagaggaagctcagtttttcttccccaaggaaagattaaacacagatatctaggactcgaattttggagcaccgtgagacagctcaggcacccctgacaccacctggctccctttaggtgcccatctgggctggtgcggggccaggtgctttctatccaggaaccagcctcaggtgggcttgggctaagagagggtcaggcgttgagcatggggaatcttatcttccctgatggatctgaactgcagggtcagcgcacagttgctgttcctgccctgagaggaaggaggcacagccc

SEQ ID NO: 35550 - DNA, 2367 bp, Homo sapiens
taaatgtctatcagcaggaaagggaatgaatggtgttttcatcatttcatcatttcatggcagtgaaaatgaatgaactacaattatcaatagggatgaatttacaaccttaacattgaaggggaaaaagcaaaatgcatgcacttaagtaaggtttacaaaaagatccaaaactgaatgatgtattaggaattcataaatacgtagtaacattatgaagagaaccaagagaataacaaacacaaaattgaggattgtatttacctttgtggagaggaaggggttgtgattggggagggacgcataagggcttcaaaagtatgtgccatatcctagttcttaaaatgagtggttggcagatgggtgttcactttacgattctttatacgtacattaaaaacgtatgcgtgtcctggttacttcctccagggacattccaccaggcagggcttagcacaactgggaattccctggtcaaagtcagggaatttcaagatttttcagccagtggttgggcaaggggtcatctctctcgtcccctccctcgaggttctgaggagcctcagaacagacgttcaacctctggaatcccccagaaaaaagactcatagggcagcttcccctttctcggacaggacagagtggagatccagggggatccccagccccaaccagctggctcgaggtcacatcctgatatttcagttctgttcccattcatgtgtctcagctgagcaactgccatgcttgtggcactcttaggggaagggaagaaatgaatgaggtgataagacccacgccctaaagaatccagggcagtaagctccctggctttcggtttttacaaactaataatattgtgtaatataaatactgacattgtgctgccaccattttattttgtgaagtaagagcattagaaaacaattgccacctactgtcctcctattccataagtaagggctaatttaatactccagtaataaaacaaaggcatgcatgcttttagatcagaggaaggtcgtttccactgaatacatttagctttatgaaaatctcactacatttgtggccctggtttcctccttgtggggtggagcagttgaaatttaggtcacaaagagccagtcaggagaagagcatctgggaggcactagtacaggggacacacaggtgtctgtgacactcagggcgggcagacaggtcatcaccctgcattctgcatgcccacgcatacacaccatgctcaccccttctgatgaacaggcacaagcgttcacacacacgctcctcccccaggggctcccaggttggaacacctcccctgactgccaggcaaagccatacctctctcctgaacccagggcaaagggccaggctcacccagcctgtgccaaccagtgagagaggccaatggttggcactggagccagttggggtgctgagttgaggccagagatgggcagcctgttcagatccctgggcgtttgcctctggccaggagaccaaagccctgtccacatccaatttcctcagactgggagtctggggacctacttcctagctccagttaggtttgtgaccttgagcaagtcaccctccctctctggtccttcggacattgaccgcagtgctctgggccagtgctatggggttttcgaggctcaccctgctcagccttcgtctcaggggacccacaagccagcctagaagtgtgtcttggaaggaagagaaaacccttgcccgtcacctttaatgaaagacccacaggcagacaagctttggggatgtctgaggaaagagacctgatgggggtcaggagcagaagctgccattagcactggtcccagcgaactgtcctgggcttccgcagcttggtcacccacctggaacgaagctaacccccccgcccccggctgcccagcccagagacttgtggggagtatgactcacttcgcggggggccattgtggctaatgtttaactctgcccctccttcagcaaggcactttagccccagcagcccttagcgctgggccctgccctgatcatgcctgctgctgagtgggctcagacacacagctgagcttggcctccttgcgccgtggggaccgggcaccctgtggggaaaggtgggagcaacagctggtctcccaagggctctgggacaggcaagagtgtagcaggtggcatcctgccctggtcattcctaccaagcagagaggagcaccaggcccatctccaccagctgcagagagagggggtgcccacccagctattgtgtgctgattagtaatagatatcccccaagtagcaccctatccctccactctcagccagggccccatgttggaggaaggcctcacc

SEQ ID NO: 35551 - DNA, 2396 bp, Homo sapiens
atcatgaggatgggttttacaaggcctcctgtccctggggcagtgggtagggtggccaactaccacagtttgcctaggactgagatgctcctccggatgcagaacttccagtgttaaaactggagaattccaggccaaccaggctggttggtcagccagcaagcagggcatgagtgctgcctctaggcctctgggaccaggattgccgccacatgggatcacagcttctgatcccttgagcgtttgtccctgcaggctaaggtgaccctgtgcccaggtccttagacaaagagcatctcaggccaatacagcgacaaggttctgaacctggaacaccatttattcccccagagttctcactgctccttcataaccaggaaggagtccatcggctcttctaggctattttcaccacaggcctagctctcgtgagcatgcacagagcctcccaggtcatggggcacatctctgggtcctttcctgtagttaatctccacccttgtttcaggacttggctccagtcatcctctccatgaagcctcccctacccccagcccacagaccattcccttctctgccctctcggggcttgatcctcaccaactctctctcttctgacctcctttctcccagcaaaatgctgggttcattcacttacttatttactcacaaacagtaagaatctatttggtgttgggttaagagcacttacctagagtcccactgtgaccacattgactcctggctccaccacttagctgctatgtgactctgaaccagccacttaacttctctgggcctcagtttcttaatgtaaaatatgggagtcgtgataatcgcacctacctcacagggttgttgaaacgttacatgatttaagaattgtataggctgggcatggtggctcatgtctgtaatcccaatactttggaaggctgaggcaggtgaatcgcttgagctcaggagttcaaaatgatgaaactccatctctacagaaaatacaaaaccagctaagcatggtggtgcacgtctgtggtctcagctattcaggaggctgaggtgggaggatcacttgagcccagcagcaggtcaaggttgcagtgagctgagatcatgccactgcagtccagcctgggtgacagaatgagaccctgtcttaaaaaaagaaaatttttttttacagttcttgggtcaatatcttgcacggagtaaacactatataccacttgtcatttttattattagaatctactatttgccaggtactctgaggcaccaggaatatacaaataacaagtgcagaaactgaccagtctagttggacaggcagacgcataaatcagcaatcacaaggcagtgtgactaatagaggaggtatggcagcacagagagaagtgagcagttactcagcctgccttgtaggcagggcactcagagaagcttctcagaggtggtgacatgagagagagctgagccagtgatacagaagcatgtagcaagagtgggggtacactggcctggcagtgtgaggcagctttcccaggtcctggaatgggggtggattgcatgctggggccgggcgtggagcacgtagagacaaacactggagagatagccctgatagtggagagaagacccttttgacaagtgggcatcctcccaatgcagtggggaaagcgctggcagttttagcagaagaatgaattgaattctggacagatcacttcggtgaaccatggtggacccactgaggcaggagactgagggaggtgaaaccagggctctctgtgcagccttacagtatgttcctgtatagccagtcttgccagggtccttgggtcctggccctggtgtgacagctgcccacagtacctatacatccccaacagacttcaggattgcacacggtaacgccctgtctatctgcccctactccttcctgctgcgattccagctcatggactctcactctggctctcctcactggtctccattctcacccttgcaacaggctcactcttgctaaagccttagctcccaaccccagctcaccctgaccacagcaagcccatcccttctccctcggtctccccaccccacctcatcggactcccagctgcctggctgagacttgccctgtctcatgttcccatggatgactcacgtatcgggtgggggtgaggccacgctggggctgccgaagcatggggagagttggtggcaacagcccttccctggcctcacaggcccaactgagcaaaggttttccatctcatgcatgtctgctggcactatcagagcctgtttgtgcccccaaagaggtcttgaccctactctgaggtctagccaagccttcccggggtaagggcctttgctccttcttggaaattcaaagt

SEQ ID NO: 35552 - DNA, 1966 bp, Homo sapiens
aattcaatgctcaaactttatgacaagcattcaacctagagggaaagagggtcggcctccacgatccgcgtccccaccctcggttgtcctcagctgccagaaagccgaagtccaggagccctgctctgcgtggaaagcagaggcccacagcctggggcaatgtgcaggccaacctccctctacttccttccacctgagtcagggctgaaccaacttgaaagaaggctcatctcacccaggtatccccctcccagggcttccatcttcctctcacacacctggatcacattctggaccggccaacctggtgcctcaggggaaagtccggatctgctgggttggccactggcccaagcctcccatgccctcagttggccccaggaacctcccccctaagatgtccggctctgaagtagaatgctagtcctcattctctctgtaggggaaagagaagggagggaaggagagaagagggcccagtcccccgggggcttacctgccttgacctcagcactgaggtggtgggtagcatgaaggaaagatggtgcgcccggtggtttaggacacgagggtcccggtcccgaggctctgccgggcccgcactgtctggatggcctgctggttcttgaacttgaccaggcctagggtgatctgggcgttccagccgggatcttccagggggcagcggaagtcgatctcgccgcccccttcggtcaccagcgtgaagtagatgtggcgcccggtgctctccacgcactccacggccttgatgcgggcgaagctgagctccttgggccggccgcccgtgcccttggcctcgaagagctgcagcccgcgttcggtgaggacgcagcgcttccgcttccacagctgcagcagcccgccgctgcgcttctccagcacgccctccttgagcacggtagccgtcgccgccgccgtcatgggcgccccgaggttcgcggaaagctccaggctgcggcgggcgcggcgcccctctcggccccgcagcgcaggattctggcgccccgggctggcaggccgtgcgcgctgcccacctgcgccctgactgctccgcgcacccacaccgcggccctcagcacccggctgccggtgaggtggtgtcggtgcccccagcgcgctccgcgcccaccgccccgcttcagccggcacccgctcctccgctctaccccagctggcccagcccgacccgcctctgccagatgcctccgcgcctccctaggccgtgagccccaccgcccgcccgttctcttgctcccctgggctctgtctgcgcgctgggcggcagctcgcgggatgtgcccttacatgttccgccgctcgcctcctgcgccgcccgcccgcagcgcattcctaccctggccggccctcccctccgcgccgcgcaccagctccggcagggccccgggggcggggccgcagcgggggctcagtcactcactggaggcgcagggcgcggggcggggagggccgggactgagagggggctgcttactcaacagcccaagccttctggctgccgtctgccgcttctcggaaccgcagctcccccaggccttgaatgaagggggagatggcggggaagggagggggaaggcgcatctcctcgattggagagcgcgctgctagcaagggggtgggcttgcttggcgaacgcgcagtggcaccagttgcatgttaggcgtcagacagctgctggttacttggcacgccatggggcccccagcctctgcatcaagcccatgttgggttcctcctccatcgcccgatttctctgtgcagcacccaagagaggctgtccatcgctgcctctgcttggacagttcacctgctcctactcctacccccatgcattgcgcggggaggcctgtagagagtagccagtgccaacaaaggagagctgaggcttgaggtcattcatgccctcctcgtagtgggggaggaggga

SEQ ID NO: 35553 - DNA, 919 bp, Homo sapiens
tttgacctattgcaagtccccagtctgtttctctggccactggacggcccccaacccctggctgtgtttttcctcctccactggactcactgggctccctggtgcctccatcaggaagcgctgaaaggccaggggatctctggtggggaggggcggactcaggcagccgacagctgtcttcaaatctctgaagcgctgtcatgcaggagagggattagacctgttctggatgactctaggggacagaaataggaagttccaggaagtcctctctaatcattagaaccgttcagaggcagccccagctgcggggcggggcggggcggggcggggcggggcggggcgcggagctgttggcagctaagtggttgaggttgagcggccgggtggaggccggcacctactaggaggctgggctggtccgcaggttctcaagcccggctgagcccgggcaagcgtcagagaatcaccagagcagcttgtcgaatacagattcccaggccccacccaggccaaccgaatcagaatctctaggggtggggctgggaatccatttttaaaggcttccccaatgattctcagaataaaggttgggcttggaggcggggccggggctgggcgtggcacggaggcgaggcgcggggagggccggaccttccagttgttaatccctgtgttcctcactccgccacactcacctccactgatctaagtcgggggatcgttcctcgctgggtgcccccctcacttgatcttagccaaaaggtcgagaagcgattgggagcccctctcgaataatttctgtggcccttgattcagggatcactcccacacttaatagcagctctaacgccccccaacccccgctacccaagatctctatcctcaccctccagtcggcctcgtggtcttcctgtcc

SEQ ID NO: 35554 - DNA, 1397 bp, Homo sapiens
acgcgtgcgctgtcttgcgcaggagctgagtcctcagggtccacagagagaggaggagggcgtggggtgcgcggaaacgcagcgcctgccttttgccctgaccccacagcaccacctggtgtctcccgggacggcgcaagcgccgcgcttgcagatgctgggccccctccccgtcagccgaccctccttccccaagtgcctcccctgcctggtgttcctccttccttgatgcgcccctctggctggcccttcaccgtccagtgagtgcttcctggcctggccgcagctggcttacagcctactgcctttacccaggtcttattcccaggaggtgcgtcagggccccttgcccaccgtggggctgcactgaaaaacagtggcccgggagcaagacagctagtggtgcaaggcacaggacggtcgccgacaggccctcccgatcagccagcagagggcagcctctctccagctttgggccccaaaggctcccatccgggccactcctgtaggcccctcccagacagaagggtccacctgggtgtgtggaaccagccgtcctcctggctgcggaaacttgtccggagcacctttcgtgggccaccccctgtgctggagccagaggggttaccaagatggagcccttgaccccgattgcagaactcccagccagagcccaccctgggctggcattccctgaactcctccagctcttctcccggtcatcttgtacttttctattgctctgcaccattgatgggtgttatgcatgcataggtgcctttctcagagtccaggaggggcctctgtcaaggccactgttggagctggtcatctgggaaataggtacacgaggccttgttgttattaaagcatctgcttttgttttgaaaacttagtgtgggcacattttcgagaagggctgaagcaaagcagcacagccccaacgcatcaggcaggtatgcctaagatgaaggatgccgcaacccctcacatgaacctatttccaaaaaaaaatgtggccttccacggacttgctgtgggggccctaacagcacagcaggctgagccaggcccctccaccacacccctcctaggtagaagtgagctttctagatttgacgtgaaagttcctctggttgagtttccctcttaggctggggctttccgagctgggagaagttctgagcacagttttggggcctagctgagcccctccaagtccaaagtccatgcaattcccaggcccagatttgggggtggagaccagacaggacaagccagtggtgtttggctggtcgggtcacttcagacagtgtggttcagttggcattgatactgagaagtaattggtccttagaaaaagcaggaacgaatccactttgattcatttccaccag

SEQ ID NO: 35555 - DNA, 1921 bp, Homo sapiens
aaacagtgtgaaaaaagcctcctaggaggctctggtaggtctgaaccttgaaaatctctgccctgggggtatttggatgggtttttgggagtccacatcccatgaaacagaatgtatatttttgggatcacaaatcctttgaaaatttaataaaagctatggatcttcttctaagaaacagacaggttcccatgaaactttgtatataatcttcagggctttgtggaccctctgcagcccatccacgtacccttactttctgttctcctatattagagatacagattgatcattgccactccctatgaattgcccattgtccatcaatgctggggatgttactgctcatggctgatatgagctccttggagactggaaagcacaggtacatgcaacccacagggacaaagagaagaggttaaaccccagtgctcaggctgccctgagcagagctaggtcaccaatttaaaagttctggaatccacatttcaggaagatatctccccccatccctctcatgcccagcagccaccttaccttcccagcaccaatcaccttctccgcagcatagactgcctggctgcatcgggggcagcgctcggagccaccaatcttctgggcaaatttggatgcattggggttggtggtgggcctgtggccaggggctctgcatggagaagggcatggggtgaggtgacttacactgtaagtacaggtggggctggcactgagagggcatgaccctaccttcatctcatgccagagcagcgcgcaattctctctgccaaagtcacaaaggctagggcctctagggtcatctcccattttacagatggacaaaccaagcctcagcacaatgttatttccattgtaacatcatacttccctcggtcacccagttaaccccagaatcatttaacaccccatttgctaagaattgccctcctctgcccctcattcctgcagctggtctattatcagattctttacaggagaaatctgctgatgaatcattcccactggggcaatgaccttggctgaaacttggtaattcatccatcatttccgtccaccccccaggccgaggagcaagccaggctgactgccaacagccaccatttacccagaggccagggagtgccgtggggtgaggggggtgtggtggggctgatgacaccctatggcatttcgaagaaagggaaatgacttcttctcagtagtgagagatagcagggctgagacagtgaggctggtgtggcaacggtgctgccctgagcccctgatctggctccgacactcactagccgtgggaccccaggcaagtcactgagcctgggctggattttctcatctataaaaagaggaggcaacatggtgaaaccctgtctctacaaaatacagaattagctgggtgtggtggcacatgcctgtactcccagctactcgggagcctgaggcaagaggatcacttgagcccaagaagcagaggctgcagtgagccaagattgtaccactgcactccagcctgggtgacagagcaagactccctttcaaaaaaaaacaaaaaaagaggaaattggactaagtgattcttggggcccctcccagctctgactctcatacaaatatagaatgcacgctccttgcagggaggagcccagcctgttttagtccctgctgcatccccagctcctgcagcagcctgacacatagacactgctctgtgactgccttttaaataactggttttctgagccttccattgcttacccaaaaatggttgtaaatacacatgaggcctaatacagggtgggggagagagctcaagaaaaaggttgggaggggatcttttactcactcctcgtgcttgatacccagcgactcccccttgtcagtgctgagggtgcctgcgccctgcccg

SEQ ID NO: 35556 - DNA, 7765 bp, Homo sapiens
tagccaggaagggtttcaggcagtgcctgtggatgaggtcctgtccccctctgcccacaagaggacccctccaggtgaccctgcctgtggggaagaggctcagctggagggaaccctggcaacaggcagggctcagtcttcactccacctcctccctttctgcccttctctccaacagccaaattctgcctgtagggaggccgaattgccttaaaaggaaacctgtttctcagagttcatggagtgccttagagggacacttggctccttcttaattgccttcccagctctccggcacagaggccctgcagaaggctgggacaagagaagttcccaaggtcagagttcaggctgtacaggtcaatggttaggaaaacaagagctgggattcgatcaatatggatttaccccttcctagctgaatgatcttgggcaagttactttcctttctgagtgtcaatttgcttgtctctaaaatggaccgtatatggactccctaaaattcagctgtaaggattaaatgaggaggtatggaagtgatggccagcacactgtaagtgcccgcccctctgactaccactcacacgactggaccagtcatacgtcgactccacactgctagatgtgggccagccatccacatgtagctagtccacatatggaaggagcgaggcttaagaagtaccatgccaaatagggccaggaactcctgattcatctgctagcccagcgaatgagtctgggacaagttacttgcccttctttggggtttagctccccccagctgtctgtgatgtcccatttcactctgttgaccatctcaacagagaacagagcttgaattttctactgaatggctggaaacacctggtcagctgttttcctgaaacggctggcggctagaagcctgctgtgtctgctgctgcatcttcctagcctggctgtcccattaggactgtacccagatccccagttaggactgtacccagatcctcagccttgagacaagaaagccaaggtggcagctcttacagcagcagcaaaaggagaagaaaaaggtcacagactctcagtcaccccaaatctcatgaaagtcaggctcggctgggtgtggtggctcacgcctgtaatccttgcactttgggaggctgaggcaggcggatcacttgaggtcaggagttcgagaccggcctggccaatgtagtgaaaccccatctttaataaaaatacaaaaattagccgggtatggtggcgggcacctgtaatcccagctactccggaggctgaggcatgagaattgcttgaaacaggagatggaggttgcagtgagcagcgatcttgccactgcactccagcctgggcaataaagcaatactcagtctcaaaataaataaataaataaataaataaataaataaataaagtctggctcaggtgacaggttgaaggaaccatcgcagagatgtaaaatccctaactgccagccaccagtgtctgaaggcaagccccttcttatcaaacccttcaaaaccatcccatatctttatttctacagtggaaaaatcccatctctcccattccaaaatcatttattccctagggccaaagagtgactgacggcacagggttaaagtccccatccacttgctccagtagaaacctgtcagatgtttatctagctccctcgcattagctgagctgcttggtatctgccaggtggacaggagggctggcatcccttccaatctgcagctcggcttttgcctccacgccccagtgtccagagagcagctgagggcagagagaggagggggctgggctggtcagggctcagagccaagtcttagaagtgacacctgagagctcaggaaatcagcctctcctgaagctcagggtcacgggtagggggagaatggctgccatggagatggggcaggcttggcctcagctttccatgtcccacctcatgtttccttcagaaccgtgcacatgacccgcctctctgaaaaggtaaccagcatcactgagctaccatcaatccaggccccatgggcctccagaacttgactgtcattctaggtcaggaatccttctctctattgaatgagctttctcttttcaaatccatgtccagtggcccttgtgagactgtgagctgacaagggcggtatatgtctctccctttccccacttgcccccagtgccttctagagcagagctccctactcttggagttcagaagtttgcagggcgcagtggctcattcctataatcctagcacttggggaggctgaggtgggtggatcatttaaggtcaggagtttgagaccagcctggccaacagcgtgaaaccccatctctactaaatatacaaaaaaaaaaaaaaaattagctgagtgtgatggtgcacacctgtaatcccagctacttgggaggctgaggcaggagaattgcttgaacccggaggcagaggttgcagtgagccaagatcgtgccactgcactccagcctgggggacaaaagcgaaactctgtctcaaaaaaaagaagtctgaaggtcaacacaggtagaaatggaggtcgatgacttctttgtagtatttcaaaacttctacaggaaatcctgtattataataaagcctcatagacaaattaacagatggggtttccttgcttttatccagatctgtaatgatgttggttattccatgctgaacaaaatggtctgaatgatttttctttgattaattttttacaagttaaaacacattagcacttaggccttaaaaacacaggtcgtttgcagctgacatcccaggaagcaccaacacacgccacccctgcataaagaaagccaggcacacagtcgggggtagggggtgctggctgcctagctggggctgagctccagctgctaaccttccatttcttcccctgttgtcaccgctgaagactcagacgctgccttctggccctggggaagcactggaaataccagagtctggaaatgctagctgcccccgtatttacacactttaccatacatgggaattactcagtgctggcgtcagacacattcctgggtagctgcgtagtacaggcacgtcattaccatataaattcttgacaactagaaacagcagtcggaacccaggacccctccacctcaccttctctgccctcccctcaagttttgctagctctctctttctcaagcacgctcttttccaggcttgttttctttctgcaaacctggctctgaaactcaaacatgcagagctggtgaaagcatatccattagtggctgggaactaactctcaggggtcccctctgctcctacctggccatgcaacagactgaaaacccggaggtcaggagttctaaccctgatccatccaagtgaaagatatcttccttaaatagtttataagccactgtaaagcaccttgtaaagctgatgtgtttcacaaatggcagatatttccttagtgagttgatctggaaaaaggaaatgtagaggagcaaagaaaaataataaggtagtgactgagcatacgttttggaaacagtcagcttatgtttgaatggcagctccacaactgatcagctgtgatcctgagcaagtttcttactacctctgagcctcagtttctccatttgtaaaatggagagcatcagtagctacctcataaattgtccaagataacacatgtgaagtatttctcacactgtctggtacactgcaagtgcagatatctggttatccttatcttaaggagaggccaactctaacacttatcgttcaggtttgtatctcttttgatatttgacaatatgccctgagtaatgccaaatggctgacttggaggaaaaagtcttattctcactagcacctctttggatcccaaaatatttaacgcatgtgtcttcatctagcaagccaacgtttcacaataagctaggcttacatacatatttaaaactttaacaacctgccagaaaagccttcccaatttgcttcccacaccagggatggacagtgaattaaaaactatgttgctaggcgcagtgggtcatgcctgtaatcccagcactttgggaggctgagatggtggtggggacagggaggggatcacttgaggccaggagttcgagaccagactggccaatatagtgagacgctgtctccaaaaaaaaaaaaaacaccaggccgggcgcagtggctcatgcctgtaatcccaacactttgggaggccgaggcaggtggatcacctgaggtcaggagttcaaaaacagcctggccaacatggcgaaatgccgtctctactaaaaatacaaacaattagctgggcatattggcagacacctgtaatcccagctacttggaaggctgaggcaggagaatcgcttgaacccaggaggcagaggttgcagtgagccaatgtcacgccattgcactccagcctgggtgacagagcaagactgcctcaaaacaaaaacacacaaaaaagcccaaaaaaaacctacgccttttttctctcacctgcttgtcaatctacccaagtggaaaaactggctagtaactatttgcaaggtttatgagtatcccgtaggccaactcagctgaaagaccattgctaccccactcattcatcaaatgtttgctgatcactcagtcaagtgtcactacactcccaggctgcaactctggcccagtcaggactcactagctccagaggcagatgcacatgtgtgcaattaaaagagcaaacacctgggccaggaaggcaggtgctaagacagaccacaggcaaataggccacagcacccctgtttttcccattttattagcaggccaattgcagagttgatgggccttctctttagtttctctcctgcttcttcttccccataccctccatcctgggcatctcaggccttgcagacagttctctcctccctctcctctaacccacactacaccctctgcaggataaacttccttcctcgtctgactgcctccgccccggatatcctctccaaggcaaagagtcattcactggaagaccgtgagcaggaggaggctggatttaggaaacaatgggtaaaagctgccctccagcagctgagggctgaggacagtctctctcaaaagaggtagccagaaaccagctggagagtcaggaggcagcagttgagtgagagcagttgaggggaggctcagtacccatccccaaatcccacctggggaaaatccccaacatgcagtctgagaggacagagggagacaaccagcacctccagcctccttagcttctgggaggaaggcaagggatgaggggaggacaagaaagacagtaactgagagatcactcctgtgttggaggttctgtgtaatatgctccccaagtagcatccctgaaagaaactgagacattgagaagttaaatagtttgtccaaggaaacctgcgcgttaagtggcaaatccaagagtcaaaactctgccttccaaacaatcccaccaagactccaagccacctcttcatgatatactgatatactttctaccagggcccagtggatttcctcggtgccactgtgatagtatcccagcgtggggagagcctgcccattcattcactctcagggagcagctggtgggtggctggagcccagggctctaggcagagcctgagcccactattgctccagccgattcctgggtcctggttagttcacaacagcaccagaaccagaagcatgcaaaatattctctagtctgtaccagtagatacaatacctgcctcagagggctgattgttagctaacacattgtgatttgctttaaatgtgctcaataccagcccctttatcacttcccagctttcaaggactgaggccacaaaacactgactgcaggctctttcaggtttcagtaaccatcaccacctagcaccaagatttggagtggagaggtttccatgcagttatttcacaagagggaaaactcacacctgcgctcagggacacagatgtccaaggtcaggcccagatgtttgccccaccccgcccgcgggcattttctccccagcaggagggtgagggagggggtggcacggatgccctcatctctctgccatacaatgagcgtcagtggcgcgcagaatcgccgattgttctgcccgacttgcaggcggttgcggggagccgggtcgccctgggtcacgcacacgcggaagtcaactgtgtccaggaagcccaggaaggcccgggatggggacggacctagtgcctccagaaaagagcagcactgcccgggctaactgcggtcacttctcacagttccccgcctgcgacagccccggggctgcggcggggctggcaagaccgggaggcgctgagtgcgtgcccaggcgcccctccgcggcgggcagagccgcgcgactcagggcgcactcacctggcagctggctcggcggcgcaggggcggcaggcgctctcggaagtggcggctgggtgcgcccggcctgcgcgccgttttgttccgctccgcggaaggcgtgtcccgggccacgccaaccagtgggctttgcacactgcaccactccagggctgatgtcatggcgcgaagcccggcggtgctgccctcctaggccccgggaaggccggccggcaggggcgggggcaggagtcgccgactctgggggtgctccgagctcgtgctgcggtcccactgtgcgccctgtcgccgccaccgcggaaaacgtcttgcacgtgcgaggggcatttcaggagtttcctgtctgtcaggtgagaaggcggagatatgaccttagaggtcagacccatgataaacttgagcccctaacgaaagggtgtctcgaatttacttgtcctggtggcagagggtgagggacacattttgggcgccagggtaagacagacccttccagggcaggtctgattctgcccatccactcactagctgggccctgggcctagacagcccttctgggttcagggtcatctgtgaacggcgtgtaatctacagggatgtgaggggctaaaaggagatccggtaggacccgcagaccttcagcagcacccggcatgtaatagacactcaataaatgtaactcccccctccaacagctcttgcccctcagtttttcccagtcttccctgctaccctaaggacaacacctggaaaaaggtgttctcccgcaaaagcagcagttctgaaaagtgggtgcctccatagaggcttttctctggggctccaaccttcagtaggacagacacaggctcaggccactcaagctgcccctggggcagtttccaggggacattctgtccacacctcctcacccagtccccagcccttcctgagtgccccgtgcaggcatttcagggagcagagaagctcacagcctccagctggtcaccctacaccccaggtggcccatagatgcagctgctatgtcttccaccctgggcaggtgtcaagggttcaggccccaaccggcttcacttaaagccctggtttgctgaatcaactttttgccaggaataaagttaagcatcttatgatctagaaaatgaagtatttggccaggcactgtggctcacgcctgtaatcccaacactttgggaggccgaggcaggcagattgcttaaacccaggagttcgagacctggtgaaaccctgtttctacaaaaaaattaaaaaaattagccaggcgtggtggtgtgtgcctgtaatcc

SEQ ID NO: 35557 - DNA, 708 bp, Homo sapiens
tatttttagtagaaaccctgcaacacggcgtttcaccatgttggccaggctggtctcaaactcctggcctcaggtgatccgtgcacttcggcctcccaaagtgctgggattacaggcgtcagccactgcacccggccttggcaagactcttgactcctctcctccatcagggtcgattatattaaattacactgacagaagaaaggattggatgacttttgaagaactatttcaacccaaagacaagctaaggaaacattgagttcactcacctggaaggtcttggagggcaggaattgtagcttaccctcctttgtagccacacagagccttacatggagtaggtgctcagtattttatgaatgtgtgcgtggataaatccatagtttgcaagaaaccacgaataagcttgccacctgctggtgaacttgtgaaagacacctcgccgcacctcggctcccccaagtggccatacactgtaatcctaagaaaaccctcagcttggacaatcctttctttccaaggagccctttgttacaggaagtcccaatccagaccccaagagagggttcttggatctcacgcaagaaggaattcagggcaagtccatagagtaaagtgaaagcaagtttattaggaaagtaaaggaatgaaagaatggctactccatagacggagcagccctgagggctgctttttgcccatgtt

SEQ ID NO: 35558 - DNA, 804 bp, Homo sapiens
aagtggcggtggcgggtccccgggcaaaggaaaggctcaattgtgcaaaggcttcctgccctgccagctcgcgggtccgccaccgagcagccgcctttctgcggccagcctgggaggcgggacgggaaggcgaaggcagcaaagggttacgggaatagctttccaatgacaaagtctggaagggacccatgcctccgcccctctgcgggttaaactggcacagtgcagggggaggaaagccagggcgatcggacggattctctcctcctgcccgccccccggccgccaggcactcccctcctgggcccgccgtggaggcagccggcgtgtgcctggggcagcgggtcacgaggctccgccccggccgccgttcccgaggggacggcactttgttcaggatgccgcctccctcctcattgtggggccggggccggcggctgccctagtgcggggcccgaggctggagtgcgcggcggacgccaagcctggtgcgaggggccgaggcggcctggggagccccgggaaactttgtgctcgcgagaagcggaccccgcacccgcgctgcccttggggatgcgcgactctgcgcggctgcggcgcggacccggagcccgggcgggcaggcgctccggtgagtggccggcgcggggcggtcgcgcggtcgcggcgctgagggtctggcgcttcccgttttgcgaggcttggctggcaggtcctgcgaggccgagaccaagtctcggggtaggggaggttggtgcccgagggaggctgtgggctgggctcgggagaggcgctggaataaat

SEQ ID NO: 35559 - DNA, 2560 bp, Homo sapiens
acacagaaagccatgcctgtaccccctgccaggatctggggttcagagggctcaatggcacatgtccagggcctttgagagggcccattctgttggttgtctttgggaaagggaggaggaaggtgactatcatggcccagggactagcctcctggggacactgtcaatctccacttcctgacccccaggatcccagcattaagttctcttcactcacccagctcttccttctctccctaccagacccagagtcccagagaaagaggacagtgcagaatgtcctggatctccggcagaacctggaagagaccatgtccagcctgcgagggtcccaggtgactcacaggtaagctcgagctgcagagagggtcatgccctctgccttcctggctctccaccccattctggagggcagggcccccgggtccctccacacctctgccaggtcagccaggtggcctgatgcgtggagccactgcagaaggaggaggaaatccatttatctcaacaagagaagcttggctttgtcttctgtctgcttgtgcctgaacatttcatttcatttcagcaaatcagcttgaaaatcactagcttaggagccaggaagtggaagccattacacagctcaatgtgtgatctttgatagtcagtctccttcattagacctctgtctcctcaatctgtcaagagaaggtttactaaatgctctcttcctgttcctaagtctccattaaactaggggtctagaatcaattcccttctcaacacctgggtcttttcactcttgtgtcagttaggtgccccctggcctcttctacgagccactgagggaggcttgagtgctcaacagggcccacacagtgtcacccagctccatgccctgttaggtgtgtccccctagcccactccctgcagagacctcatagcctccagctgcatggggcactcagccttcccacggcacctctctctggagcaaagtcctggccacaggctctgctgtgactcagaatttcccttgctggctccttggactgcccagatgagctcatgctgtcagctccaagtggggcagagggctgggctaagctctggggacagcgggaggcagaacagacagccagattgggaaatcatggggggtgtggggcaggaaggctgtgtgagggctaggaagcctccccagttagactggaagtagattcctctccaactcctggggctggaaaattaagagcaaagttgggacacaggggcagtggaaaaggactttctttagcccagggtgtggccatttgggattctgaggatgggaccacacccatggacatatttacataccaccaatgacaaagaactcattacctttctttttttatttttaacataggctttttaaaaatattttgttattatttttaaagaccgagtctcattctgtcgcccactgcctcagcctcccgagtagctgggattacagctgtgtgccatcacgcccagctaatttttgtatttttagtagagatggggtttcaccatgttggccaggccagtctcaaactcctggcctcaagtgatccacacgccttggcctcccaaagtgctgggattacaggcgtgagccaccgcgcccggccaactcactacctttcagtcaccccggtgcattgtgggattgcagcaactctgatgtggaactgcacttagtcttaagtagctttcagccgttggctgtagttcttcctgcttagatgacccttctccttctccttccttgtactactcctccccctatccccagcccatgcccgcatcttggacactcagccctttactcccagacatctcgagtattttaaatggtaagataaatcaaaactctctggggattacctctgctcaggccagcagaaccctgactactgaaagggaggtgaccaaggaagtcctggaaaaaggtggatggtgggggctccaggacccccttacatctgtcccttactgccatccctcatagccccaagcccccagcaggagcccaagtgaagcagggatctggcagagcttggcttatcagtttaggacccagcggatgaaatcttggacatctgccttcccccatccaaggaaattgttggaacatctctcagcaccaagtcacccaccagcctcatgccaaagacaccagaaagtgcttagttgctgagagggccacaccccaaatgactcactcacaggagtaggagagaagtagcagctccagcctcctggtgccactgactcagagcagccagcccccagtccctccgttaagccggacagcttgaccctaggcaggcgctattggttttctgcttctagtgggaaaggggaggcttcaatcaagccttttgcataatgctgactggtttagggggagcgtctagggcctctggcttctgcctccctttataggaaaggaaccaagagccccggagctggtttttctgtttactgtggacctagagccacttcctctcataggctttggtttatattattcctgttccacactggtagc

SEQ ID NO: 35560 - DNA, 1253 bp, Homo sapiens
aatgtggtttaaaataggggctatttgtgacccagacctctctccttaaagccctctacatctattcccatcccgcctcctctctcctaacacctgaaagatgcatgaatataaagtcatatatcatgaactttattccaaatgagattgctaacttactgtgcaactttaggaaagccccttaacctgtctggggctcagttttcacacaaatccagagatccttgcagagaaaggtgcagttctcgttcaggcagcaggaggcgctgtctctggaggcttagattcattccccgccctccgcccgctcccgcccgcctctggtgcgcaggcgcggcttcgcggattggccgcgcgcgggggccgtcattcggtggcgggtcccggccgcggggctggcgggctgaggggagaaaagatggcggcggcggcggcagctggtgcggcctccgggctgccgggtccagtggcacaaggattaaaggaagcgttagtggatacgctcaccgggatcctatccccagtacaggaggtgcgggcggctgctgaagaacagattaaggtgctggaggtgacggagggtgagtgaggcgggaccgtcacgaggatggctcagccgcacaatccgctgaccgcagctccgtaccggctggggacatggggagcctgagccagttggagatgtgggcgccgagaagtggagcaggaagcgagagattgatgtcgctggtggttgtgaaagtccgagagaggagaggcgcgcctgaaggatagggtcgggggaggtggagcctgggagtgggggagggagggtggagacttgaaaagatagatggagcctagaatctgcaggggacggagatggagctagacttggtgctgttggaggaagtagcgcggtcggggaaatattttttgagtccaggaccaaagtctttcgctgttctcttcaccagctggattgtactgggataagagtagggggagctattagtaggagtggtgaagggtagggcctcgaaaaggcggctatcaaagcttaatagatgtcatcaaacaagtttctgcctctgagttataaacctagctagttgtttgtactcttcgtgttttcccagaaattaaatgcatatgcgattgcttcactgtcctgaccatacttaacgtttattttaaaaataatttgcccttattaaatacctttgtgcatttctgtttggaggaactgatcatcctttgtttttgattctttg

SEQ ID NO: 35561 - DNA, 3104 bp, Homo sapiens
gtataaggtctggaggaatgttttccactggagctttatgcaattatggaaatattctgtgtctgtgctgcctaaaacaatagctactagctgcatatggctgttgagcacttaaaatggggctagtgcaactgaggaactgaattttaaattttttaaaatgttaatagctatgtatagctagtggctactgtaatggactgcataagtttagagatcacagatgaaccctccaaatgaattgtcaagtttgtgtataggagttttctgtagacatgcagtaccttgtactcattgtttttccaacacagttcccaattgaactgggctctgccagtcacttttaacctgatctaatagcaggtggacttttatcccttacaggcaaaaattgttatccgggagctattgcctaatgggttgagagaatcgataagcaaagtgcgctccagtgtggcctatgcagtgtcagccattgcccactgggactggcctgaagcttggccccaactcttcaacctgctcatggagatgttggtgagcggagacttaaatgccgtccatggagccatgcgtgtgctgacaggtaccagaagcccttttccctggtattggtacttggatctcaagcgacaggagtattaccagaagctatgtgatataatggcctggaccagtaggaattgctgctgatgttattcctccctcctagtttttatctctccatctaccctccagctctattgtttttttctagggaattaagtttgtatagtattacttctactcccaaacctaccacttacagatacagtattagcatagtgatggagtattcagattttggatttttgtagtggcttcaccttgatccttcacttaccttctttgagcctgagtttccttttatataaaattaagatgatagtagtgtctgcatcaaaggagcttttggtatagtttaaatgttagctaatctatctttattgacttgttcagtaaagtttagttactatgattatcattattactatatattatttgtccacttagttcaaccaaggcaaagttaagaattgtaaaatggatttttatagaagtatttaaaaagaagataaaaacagtatagccatgtaatcctgaccttcatttagccagttagagaatatgtagtctcagtatcttttccttctctctgttctgagaagttgataaaaatacttcaacttttagttcaaagagatttgatggatatctcttctaaacctgattaagctatcaatccctcccagaatctgctttcatatatccttagggatggcctgagtttcccagtcctttgcaagttcctccctgcttcttattccctaaatgaagtcactactctgttttgccttcaagaaattcttacctggactttagtcatcctgtactgatcctttagaaatcatctttctcctttgttcatataggtttgtagaagtcccaccaatatcttatctctttttctatgacctgctagcttacctgatatgtattcttgcttagttgtgaatgccaattctattctttctcaatctcagtttactgaacttggcacataggcccaattttgctagtccatgtgatgttaatggtagataatatcaactctttgtcaaatgcaaatctttcttctccttttgtttcaaaatgacctcttctcagaccccagctgcctttttgaattacccactatattcgtattgattgcctgtgacaaagcttcagtttttagctcagataccgaacagacttaccaaaaagatcagaatgttccttgctcagattttgacttctctgcttattgccctttcttctgcttaatgactcattcattattcaggtgatttcacacacccctctgcatggaattggccttttaggattctttattcaccacttcatagtgccaggatatcaattaacagatacatgttctaccaaggaaaggaagcctgttccctctcagtcttccaagatgaaattcaggttcttttgacaaacctagagagaaaggttttgtacatttatcttgatttggatgctgaagagctcttattgtgtttgactaaggaaattactgttcagtgagatcacttttctgccagccacagggaaagaactgttgggggaaatttgtctccttttgtaatggagtcaccagacatggagtggctagcagccaagccccattcccaaatacttgctccaaatattttcaaacgagagtagactgtactctgacaacaaaaacttaggcatgcatgaagatagcaggacattggtggttggacagaggcccattaggagaatgggactgattcttttcagagtttttcaagatactataccagtttccctttaatgaggcttcctattaaacttatctatttatagatgagaaccaactaaggctcatggtgtaaaggaaatgcaaatatagcagctaaggattagaagatttgatccaccagatacagctttttcttcgttctcaaagaagtttggagattgagatgttgctggagtcctagaatttttctgacttgctgaatcacctcagaaaacttttggaattaaacctataaagtattaataaattgataccagggatgagtataggagagtaaaaagcagtcaagcactttattagcagaattaaattatactgtatttttcataaaacttgttattatgccatctatcatatttgtttggactaatttccttgaatttctaaataaaatagaacactcaccattcaaagctcagactttatccttgaggaggaaattacagctgtaaagaaaattcaaccttgagtatttgatcttcatttgactcgtggggattgatattgttcaaaattgtggagtaccttaatcttgaaaatgccagcttgcgtttgtagctgtgtatcttcccccaaaatgtcccaagtggttagctttatttttagttttatttatttatttatttatttgagacatggtctcactctgtcacccaggctcaggtacagtggcactgttgtagctcactgtaaccttgacctcctgggc

SEQ ID NO: 35562 - DNA, 778 bp, Homo sapiens
ggggcagtgagagccaaaagacctggttccccaactaagccatgagacttggccaagtcctggtgctgtcctaggccttactcttcctagctgtggactgcaaggagaattaatgtgtccaagaccctccaggaaggatctgacattaaatcagagtaaagaactcagggtcctatggagtgggggaatgtataattacctgtctgcaggagttgggttgccagaggctgggcaaggaggaatagaaaaaaggagggcagagtaatgtagagtgcattcctggagagcactgactgaccagaggcaggaattaggaaaggaatggagtttcccttatcttggaatggttcaacaaaccactggccagacaaaagtggaggcaggagcctccacggccaaacagcatgggtggggtaggaccagggtgggatggagcctccagggctcatggcccaggaaagtaaggaaggcctcaggaatgcctgtgttagtctgctctgatagaggagcatggaagaggttgggaggagccctgggctggtcattcagcccaggagtgaggtgactcagcagagcactcctaccacagcccctagccaagcccaaactgggtcacaggcagggtcccagcccttcccctcctcctgcctttccccacttcagatatccctggctaccttctcaccacatgcagaggcctgctagagataagggctgggcatcaaagtttccctgaatacatgctttttatgccaggcatagcactgaacattttaga

SEQ ID NO: 35563 - DNA, 1197 bp, Homo sapiens
ttgaagggggaagggtccatcgtagggagccagtgcagctggcagggttcaggcctgtgggcaccgctggggacaaagccactctgaatgcctctcaatgagtgcttgtgttctgggaatgggggcggggtgacatccagcctctttccctctccgcccccgacaggatgtcccaggctggacgcggcagaggaggtcccccacaagtgaaggtccagccctgctcctccagggttggcccatgtgtctgggcattcggaggtggcaccaggatcagggcttctggagtccagcatagtgattgggcccaggccgggggcgggtccaggacacagccaggcttccctggccgcagtgcccaactgcccgcagtgcccatggtggctcggatgggaggaaccaccgcggagccggggacagggggagcagggcagtgctctgctgggtgaggggcacccagctccagaggctaggtgggcgtcgctggtgggtggactcctgggcgctgcgcggagccgcgccggctgggttagcgcgggcggggcgcttagtcccacccccagaggaggcggaagaggagcccgagcctggccgcgggctgggccccgccgcagctccagctggccggcttggtcctgcggtcccttctctgggaggcccgaccccggccgcgcccagcccccaccatgccacccgcggggctccgccgggccgcgccgctcaccgcaatcgctctgttggtgctgggggctcccctgggtaaggggatggggagagatgcggcaggagtgggatgggggcggaggaaggggagggaccgatccgaggggcttgggctcggggcttctccgagaccctccggctgccacgggagccttgggtgttgctgggtcctcaagaagcgggaagagggagctccaggatgctgggccatgggaggctgatcccggggtgcagggtcagcttcaggcagaggcctcgggggctctggggctgagaccctcagggtggagacaaggggcaaccctcagtgttcgggagccgtcaggctggggaccgccgggggagtggggccgagcgcggctggggatgaactggcctggtggccactgggcacccccaatccctgcccgcagtgctggccggcgaggactgcctgtggtacctggaccggaatggctcctggcatccggggtt

SEQ ID NO: 35564 - DNA, 533 bp, Homo sapiens
gatagagcctttctggatttccctctctaagttttaggaaaggaagcaggatagatgggtgactgccagtgttggtggggcaggtgggcagcagtgggtgcgtggcgcagcagaaacacagcctccagagtttgggccccttttccgaagctcaccaggctatctgcccatcttttcctccccctccctctaactgcctccctcccctggtccctagcacagctccagggcacccctggagcagctggagaatctgggttgcggtccacccccaggtggcgctgtgctcccgcaccaggttcaagtgcactagaggagtgatgacatcatccaggacggaaacagcatccccaccgcgggagcaccgaggaagagggcagctcacttgttgctcaggacagtagggagtggtttttctctctggctaaatcatgtttgaagtttggtagaaagggcttcctaaggtgacaggttctattggacccttaagatttggaggcaggttgtttgggttcaggtgagcgtccagtgct

SEQ ID NO: 35565 - DNA, 1966 bp, Homo sapiens
tcgagggctccaaattggtcatggctctccagatggcccaaacagttccagttcacaaacatttattgagcatctactacattccaggcactgtggttattataaatcactgagacactgtttgccctaaaggagctacgtgtatttggtaacagcttcacagtaagtgacgaataagatagcattaatccacatttgacagcaaaagtaccaaaaaagaaagaaagaaaaagaagagagagaaaggaaagaaaagaaaagaagagaaagaaagaggccgggtgcggcggctcacgcctgtaattctagcactctgggaggccgaggtgggcggatcacgaggtcaggagttcgagtccagcctgatcaacatggcgaaaccccgtctctactaaaaaaacataaaaattagccggacctggtggcgcccgcctgtagtcccagctactcaggaggctaaggcaggagaatcgcttgaactcgggaggcggaggttgcagtgagccgagatctcgccgctgcactccagcctgggcgacagagccagactctgtctcaaaaaaaaaaagaagaagaaaagaaaaagaaagaaagaaaaaggatggaaggagagaagaaaaggaaagggggaagggaagggggaagggaaggcggaagggaagggaaagaaagaagcgtatttaggcagtatcgcgttgatttcagtccacggaacctctggtgaccgggtagtgtgactccgtcattggtagccccccgcccacacagccgggactcgcggcctttgaggacgtgggcagggccagtctcgccacgccgcggccaatgccccgaccacacgctggccacaggagtcctggctcccattggctgcagcgggaaatggtgaaccaatgctcatagaccttaacgccctcctctcgggatcacttccgcctctggggtcaggctccgcccagcttgcccggcatcactcgcggcattggagtcaagatggaggagtacgcgcgagagccttggtgagcttcaccgctgtctttgcatttctcttgcccccctgcccactgccctccttctcccttgtccaggctcccaaggtgcaagccagactcaaccgcagcctcgtcgacttgggcctggtaactgggcaatgcggtctttcgcggccagtcggcttcttagccctgtacttagtacctccccggccgcgtgagcctccctctcccaacccagcacccgtgtgaccttgtgatggatggtaaggaggtccagacttgagtttgatagaacctcggaacctcctcccaacgcagggcgtaatcgactttatgcggggccagttataatcccccctgttcgtcgaggtgaccttgggcgcgtccctccgtctcgccttgctcagttcctgcgttgaggaactgaagaataggcatttgagggagtgtcattcttgaggttttacttgtatcatgatatgtgtccacagagtgaagcattttaaatgaatggaacatagattttagccaaggggtctggataagcttctttattgcgtggggccttgttttccttcttggaattctttcttgagggtagagggggacaaaaattacctgggaaataggaagaggtaatagcatgtgttctctgaaaagccatggacagaaattcattgttacatccagcgtttattgagtatgaataaaccagacacatagataattataaaacgatgtaattgctgtcagaagtctcaggttgccagagtttaaagtttctagggtcataggtaaaaaatcaaatcttgatatttcggttaatcatttgttttattgtgtaagagcaacaaccaagatgtcctcaatttgtgaaagtgcccaggaccttaaattactactctggtatcctagccttgttgcatgttttatgttcccctctcccataaatggcatacaaaatataagtt

SEQ ID NO: 35566 - DNA, 1336 bp, Homo sapiens
caaacgtgggccacacgatcccaccggcctcttttgtcctaagtcccgaggcacgggtgcagctagaagagtgggcggtaaagcgcagggaggggatgcggtcgggagcagatttcgggggcggggcccgcgcggcgggggcgggcccgcggcgctcggggcggggctcccctcgggttcgcggcccggccggtgagcaacggctctgcggccatggcgagcggcgagcattcccccggcagcggcgcggcccggcggccgctgcactccgcgcaggctgtggacgtggcctcggcctccaacttccgggcctttgagctgctgcacttgcacctggacctgcgggctgagttcgggcctccagggcccggcgcagggagccgggggctgagcggcaccgcggtcctggacctgcgctgcctggagcccgagggcgccgccgagctgcggctggactcgcacccgtgcctggaggtgacggcggcggcgctgcggcgggagcggcccggctcggaggagccgcctgcggagcccgtgagcttctacacgcagcccttctcgcactatggccaggccctgtgcgtgtccttcccgcagccctgccgcgccgccgagcgcctccaggtgctgctcacctaccgcgtcggggagggacccggggtgagtgcgccccagactgcgcccgccgctgcctgcctgcccttccggcccccagccgccctgcaccctcacctaccccacccgggaggagggacagggaggacccttccagagcgtccctagaggggcctactccccgcgcgccgcctctaggcctcctccccttgcttcctcttttcctcccgggctgcctggtttccttctggacttcctccagccactgggcggtgcatccttcaccctttccgtccttccgcgtctcctccctggccctggaggcttgtccagattgcgccgcattcccgctcatcgcacactgccgtttctaacattttccgtggctttctagatgacctgttgttcatgcacttcacttagtgccctcttggacttttgggccgaggtacctgattatcagccaccttatctctgctttatggtggctctagaattagccagatgttgatctagctctttgttctgtgttgccttctagttccacggttaaagctcttatctttgtttttgtttcctcctgtgaagtcctggatttgattaacgaaagaatttgagtaaaagtgagaactggaattagggtgctataagcattataataatttggccttctcactgttggttaactctttaattttttttcgggacggggcaaatattg

SEQ ID NO: 35567 - DNA, 490 bp, Homo sapiens
acctgcccacagctctccccgctacaggctgcaggcactgcagggcagcgggtattctcctccccacctaagtctctgggaagaagtggagaggactgatgctcttcttttttctctttctgtcctttttcttgctgattttatgcaaagggctggcattctgattgttcttttttcaggtttaatccttattttaataaagttttcaagcaaaaattaagttacggattgagtgactattaaatttcttccaccagaggtcctcactgtgtttgttcaggaaaggtcactgggggaggcccagagaatgacagtattttcctgtcctcagggaacagccagggtgaaggaggtgggtgtcctacacatgcatatgaaaaaaaatatggcaaaatggcacagctggtgcaggaaaatgaaaaaggaatagcattccagttctccgtgaagcagctgaattctctatctgcagcagcattcccattatctt

SEQ ID NO: 35568 - DNA, 2394 bp, Homo sapiens
atgggggactctgcccacagggaaggcaagggctctggccatggagctggatgggaagactctgaagcccgaagacattgaatcctgtgcagggaaagagcgagggttttgtgtacaacacacctgcatacctggatgtgaatctcagctccaccccttcaccaactctgtgtggcctgggcaagccattctaagggaaccctccacactgcaactttcatgtctataaaatgggaataaccatgcattccttacaggacttttttggtgtgaggattaaatgagagaatatgttgaaaagtgcttggtaaatatattaatactatgcattccctcttctttgaatgacgtgacccaggtagtcaggcttctgaccactagagggcagcagaaggtactggaaaactgggccgagtgaaccagagattagatggggtccagagagcagggatgaacttacccgtgtggattctggcaactccggcagggagggctccagcaggcgctgagggaagaactttcaagcagagccgggtctcttcaggagcgactgcagcaaccctgatgcttggatggagtccaggcaggtgatggtagtgaagaccttgccaacagagtgggcgctggagaaggagccctttagtggggaccctggggccacgactaggctggcaggcccagccagcaccaattaatccatgagtattgcccagcattgagcctggagcaccttccagcccctggccagagtcctgggtgttctgggaaaaacccctaaacctagtaactcctctccctactaggcctctttgttgctgaatctctggaatttaggggccagcagctttctgactcaggtcagccaggggttcatgttccctcacttgccctccccctgcctggcccatctctggcctggcccctgggaggaatttcctgggccagagggcagccgaaagcacagatgcccaccccagcaacgttcccgccacctgcccaggccagtgccccgtgcccaaccccagagggtgcgggatgacagactctgacaatcattaaaccagccgggcctgatttcccagcactgcctgctaagatccgggccaagtggcactgaatatgcaaatcacctggggccaggagcccagtctaaaggccaggaaatcccctccatccaatgagacaccagctcaggttactgcaggggacacactataaagccctgagctcagggaggagctccctccaggctctatttagagccgggtaggggagcgcagcggccagatacctcagcgctacctggcggaactggatttctctcccgcctgccggcctgcctgccacagccggactccgccactccggtaggattccccgcctgtcattccctagcccagctcttgggaaactgcagaggggtccagaggatttgcagttctgaacctgcacactccagtctaggatctccgagcaagagcgtaggtgtcctgagggtcaaagaacagagagagattgtctctgggaaggcagaatggccatgacgccgctagtctggctccagggccccagagatctgaggagggaagcccagctggaggctcctgtggtcctgccctggtctgagatcttggagcccttcttgaagagacggtgtccgcagagttgctgatcttcctgcccctgggggctactcttgcccagggttgggcaaagcagagtagctgggagtgtaaggagaggaccctcgtcccctcaccaacctcatcctctctccccctacccacaggtagcctcatggctgcaacctgtgagattagcaacatttttagcaactacttcagtgcgatgtacagctcggaggactccaccctggcctctgttccccctgctgccacctttggggccgatgacttggtactgaccctgagcaacccccagatgtcattggagggtacaggtgggtctcagcggggtgggatggggcacggagtgggagacagatccatctaagggcctgttagacaaatgggggaataggcagggaggagggtctctaggcaaattccagggctagaggctgagacttagtgactgaggtgctgggggttgtggggctgtgacaggcagagggaggtgtcagataccaggacaagggtgttgtgaatgctacctcctgcccctactcttgggatggctccaagggctgaggtgtgaatccccagtgtgctccaggaatggggctgtgtgggctgggagtggtggctcacgcctgtaatcccagcactttgggaggctgagctgagcggatcacctgaggtcaagagttcgagaccagcctagccaacatggtgaaaccccgtctctactaaaaatacaaaaaaaaatttatcc

SEQ ID NO: 35569 - DNA, 719 bp, Homo sapiens
aggccctccagtgggctgatgctgggacccttaggatggggctcccagctcctttctcctgtgaatggaggcagagacctccaataaagtgccttctgggctttttctaacctttgtcttagctacctgtgtactgaaatttgggcctttggatcgaatatggtcaagaggttggaggggaggaaaatgaaggtctaccaggctgagggtgagggcaaaggctgacgaagaggggagttacagatttcctgtagcaggtgtgggcttacagacacatggactgggctgggaggcgagcaaaggaagcagctgagactgttggagaacgcttacaagacttcatgcaagcaaggacatgaactcagaacactgaggtcagaagcatcctgctgtcatgacaccgctcgagtgaccttgaccttgaccaagtctgtcctgtttaggactgatttttcctattaggctagggtttggacctgatgttctcaagatgtctagaattgcatggctggccttgtggaatagatggttttgcattccagccaagtgtgctgtaaactgtatatctgtaatatgaatcccagcttttgagtctgacaaaatcagagttaggatcttgtaaaggaaaaaaaaaaaaaaacaaaacaaaatggagatgagtacttgctgagaaagaatgagggaaggagttggcatttgttgaaagtgtagtctttttc

SEQ ID NO: 35570 - DNA, 2310 bp, Homo sapiens
ccagttagacaaaggggatgcgggccagggcgtaggtctagcctcagaagctggggaagctttcacagctacttagtctaaaaatgaccccatttcttggaaattatgcattagactctggtctagtttccctagccacaatatctcggggtccttgcacccttaaaagaggtgacccagctgggcgcggtagttcacgcctgtaatcctcgtactttgggaagccaaggcgggaggatcacgaggtcagaagatcgaggccatcatggccaacacggtgaaaccccgtctctactaaacatacaaaaattagctgggcatgctggcacgcgcctgtagtccgagctactcaggaggctgaggcaggagaatcacttgaacccaggaggcggaggttgcagtgagctaagatcatgccactgcactccagcctggtgacacagggagactctgtctcaaaaaaaagaagagaggtgacccagtgtggcctgaagtcacctagccaagaagtgggggaggggcctctagagcccgggacatgcttgttcagcctcccttgactcccagcctcttcagcttctaaaggagatcctagcagggaggagggctgggaatatggcgctcagccccttcaccctcttctggagggctgggggcaggtgctgcccgctgcgtgctgacctttgccctgccatttgcagtttatgaggcgctttcctcatcccattatctcatttgatccgccccacagctcgctgaggagaccaggtgtccccattttactgacaaggctagtggtgggctgaagtcactgactgggtgagagcggggccagctcacagcatgcctgcctccacgctgcagctcagtgagaccacctgggcaggtggcctctgcagggcagcgcctgggacagcctggaagacggcagctctgggagggacgcctttctccccaacagttctctgccctctcacccctcaggatgctgcagagtcctggcacgggcccctgggctggcctccgtgctgccctctctgtcgggcaccagtcacccttaccccgactctcaccagcccaggggcctcctagcaggagacggcccggtctctcgcccaccagagtctgcatcccctcaggtgtgtcctgggctggggagtgggggtggggaggaagccacagggccgggctgtttatatcccgccctgccggagctgctggtcacctcttatctgcttctgtgggattgggtgtgtcgctgagcaggtcagagggaggtcacccctcccgtcgtgtttgggtgtgcctgaggaggggctggggttggccccctgggacagttcctggcttatcccacagccccacctgtcccaccaattctggggaagtctggcttctcctgggggaagtgggtgaaggggttgcatttctgaggagtctggtttcaatctgctctctctctctgctgttgtctgtttacacatctctctctctcgccgggctgtgagcacctctgggcaagtgctggggcttactcacctcagcaccttgcacagcgcctggcacagaggaggtgctcgataaatatttgctaaatggccccgtgactctccctgccctggccactacctcccccacacaccacacacattcatacacactcatgggaaccaaagtcacacacactcacactcacaaagataaatattcacaagccctcactcacatgcccctgcacgcactgcagacgctgcctgctctcacacactcgcatggaccgtattcacaacctcacacacttgcacacaccagcgcacgcaacacactcccacctcacagtctcacatagccacacccaggcctgcctgcacgactcacctcctccctcggggtccttctatgaagcatttcctgacctcctctttggcccttttcccccaccagatgggttcagcccttgcctccagtcaggacaggcctggtaatttgcagagcccagtgcaaagtgaaagcctgggcccttgttaaagaattattaggctgggcgcagtggctcatgccagtaatcccacactttgggaggccgaggcgggtggatcgcctgaggtcaggagtttgagaccagcctgaccaacatggcgaaaccccatctctactaaaaatacaaaattagctgggcgtggtggtgtgcgcctgtaatcctagctactctggaggttgaggcagaagaatcgcttgaacctgggaggcggaggttgccgtgaaccaagatcatgacactgcactcccgcctgggcaacaagagagaaa

SEQ ID NO: 35571 - DNA, 1066 bp, Homo sapiens
ctactcggaaggctgaggcagataattgcttgaacctgggaggcagaggttgcagtgagctgagatcatgccactgcactccagactgggtggcagagtgagactccatctcaaaaaaaaagaaaagaaaagaaagaaagcctaggctagagcctaggaaattccaaagacatctatataaacctctcaacaaggtagaggataagtgcctcatttcacagatgagcaaactgaggcttcagagaggttaagaaaagcttaagctctcagagatagtagtaagtttaggaaaccggagcttgaaccctgccttctttcttcaattccacagctgactctgctttgagaggtgctgagcaacacaaatgtctccgctgtatgggtgcctaaaaccccaccattagatgtgcagtttgaggaatgccctatggatatacaaacatgcctggggtggagggtggattcaatgagcattgctttccagggacccttggatcctgcagggtggatggaaagtgagttttcagttcttcagaacctcacagtggccaacccttgggagcattgccctctcattcttatcctacgctcctcctcctcctccttcttctgctacgtgcagggctgggctggggcaccagcagcagcaattagcccagctcagccgcccgttactggaacctgcatgtcaactctggagctgatccaagaaaccacacccagtgtcctgcatgactcaacctcacctgccccctccacacctgccagcctcagtgacccaggccatagtgcccaggggaaagtcccagcatcctttggtcaatcctcatctactccatgtgtttgtaaggccagctgggatttagagtctttgtatcacaggcttgattccgggctgatttctagccaggagagaatgctccaggcggagcaaatgctggggtttggaaaactagactctccatggcaaatgcagacagatggacctcctcttcactatcattgcttgaaacacgaacagcttaaggccatgggagatattacttttcatatgtcaaattggcaa

SEQ ID NO: 35572 - DNA, 1842 bp, Homo sapiens
taaaatgaacactccgtgagggcatggcattttgcctgctttgctcacaatgtgtatcccactgaagacatccaataaacaatttatcgaataaatgaatgcatctacctgatacctcatcaagaaattgatgaccactaattatcatctttgaacctctgattggtgacctctggcaaggctgaggacctttagctctaatcaatgggcaaaaggttgacctctttgctactgattggcttttccttttcattatacccttgggctggatggggaagctgtgtgaatcaacgcttcataagccttcctctctgagaactagggcttccaaggaattggatatgaaaaggcagagaggaaggaggaggatatgagatgccagacgggggagggtgggggggacaggtcccagaagaggtcagctgggacccaggcaggatggcattgtggctgcgggtgccagagtcagcctgcctgggttaaggtcctcagtcagccttgactgctgggtaatccgtggtaagtacccactgctcctgcctcagcttccccacctctcacatgtggttgatcctcacagccatctcttggggttgttctgaagatgaaatgagatcatctatgtaagaagctggcacttaaaagcacagagagggcaccaaggaacgtatggtctgtccttatttggggaatgggggtggaaggcgcccagcagggcatggggcgtggtatggcagagccaggactaagggtctgtagcctcctaaatcagggctttctccgcaggatttcccatgttctcaccatctacagagtcactcccctccaccctgctgccccgttccaccaagtggccctcacactaggtggaggagccctcacagatctctttccttcagcctgccgttctttctgcagcaccagggccctgggaccagctggtggtttccaccagagcagcctcggggtgaatttagtcaggaatgtgccctcagctcaagagaaccctccccaaccttccactccccatacccacccccgaccgcaggttccccacccacccgtggcctggccagcagcaacctccactagctcgctagctcagtgacggtgacgtcagccctgcagtgcaggctgggctggtttacccgcaagtttcacctctccctggggagactggattacctcaccctgggagcagagtgaatgattaaccagcttcatcctggagggcctcaaaggcccgtcctggggtgtaggcctacagggcaaggggctgcatggtcacataccctagtatgcgggttcacataccccagccggggctggggtatgtgaccgccccgtccttggccactgccctcttatctgcatcactgctcacaagtgtcataaaaatttgtctacagcatatataaatatacatatgacgtggaaggcttccgatggcaaataacattttccattttgcctaagcttgggtggctttttattcatctattgttgttttaagtacacatttccatctaaacttagatgtatgtttaggctggccgcggtggctcattgcctgtaatcccagtaccttttagggggttgaggcgggtggatcatttgaggccagcagttcaagaccagcctggccaacatgatgaaacctcgtctctactaaaaaatacaaaaattagctgggtgtggtggcaggcgtctgtaatctcagctactcgggaggctgaggcaggagaatcacttgaacctgggaggcggaggctgcagtgagctgagattgcaccattgcactccagcctgggcaacagagtgacattctgtctcaaaaacaaa

SEQ ID NO: 35573 - DNA, 577 bp, Homo sapiens
agccatatggaactgtaagtccaattaaacctctctttcttcccggtctcgggtatgtctttatcagcagtgcgaaaacggactaatatgaggagtctgcctactgcaaccttgagtgaggattctctgcaaggacctcagtcctccagggagattggctccctctctgttctggaaatggctttgttttcagcccaagtccctggggatttcccaatctcagtcttttcactgcacagatcctgccctaagtattatcactgctgctgactcagaaccttcagatatgggacatctagtcattgggttctacttggtttctgggatgtatatggatccacaacagtacgaggtcccttggatggctttgtttgggcacattccaagcctgctggtgccattttcccacaccagtcagataagtgtgagaaaatggcaccagcaggcttctaatgcagcccacagatgggccacctatcagctgtttgtcaggtgtgtacagagcagatggctagccctgtgtcaaaggcctgggagcactaaggctcccaggagagctcagtggcacctgcttggt

SEQ ID NO: 35574 - DNA, 393 bp, Homo sapiens
ctgagattgcaccattgcactccagcctgggtgacagagcgagactctgtctcaaaaaaaaaaagaataaaaaactaatagctatgtgaaataagccagacacaaaaggacaaaggctgcatcattccacttactggaggtgcctacagcagtcacattaatggaaatagaaagcgaatggtggttgctgcgtggtgggagggagcatggggagttactgtttaacaggtagagtttcagtttgggaggatgaaagagttctagagatggatggtgatgatgattgcacaataatgtgactgtacttaatgccacagaactatacatttaaaaattgttatagccagccaggcatggtggctcatgcctgtaatcccagcactttgggaggct

SEQ ID NO: 35575 - DNA, 2332 bp, Homo sapiens
tacctgggttcccacctgataattggtgaggccctttcaaatgtcctttggccttctatcccctgccttctcttgactccttgaagtgggaaaatgaaacctaaagtgcctccctccccagagtgggccatgtggcgaactctatccaatgtctcagcacctgccactctctagttgcatcctggccataggctgaatgggtagggagttctctgaggctgagaccatgctgtgagggaggataggcgggccagggacagtgccagcaacagggaccagggagtggtgggaaggtaaaataaaggcagaggaaacttctcccaattgaggcacacctacccaaggcctctgcccctacccagactcctgactttgacctgcctaaaataaatccggggtctgcaaatggcctggaggctgcaaatggcctgaaggctagtggttggagggcaaataaaggcaactcatggcactgcatgctgccccttggtgggcaggtcccaggtcccagggtaccagcccccctggggtgtgatgtgggcagcctctgagctaagtgaggtgcaaacaagaaacctgggttgcctttgccctctgtccgccccttgtcctctgtttacatcctcccttcccgtaaatgagttgggtgctgggccccactggccctgatccagacacacctgtaggacaggttgggcagagctcttgggggtggagagcgggtggcagtactggcaggtgtttcaggcccttggggagcaagctctgttcctttccatggcagtgctgctgccaggctcttgctgccttgggccaggaattcttggccaactccaaaaggatgggatggctctagggggggctaccttgcccaaggagtgccaggaagttgtgttcaagccctcagaggcaagaggaccaaaggctctttatcttcagtgggcatttcccagcagaaatctgaggtctagagcgagacagagtagaattgacaataagatccacacttgagctgctagctgccttgatgggagaccccactgtaacaagatgtccaggaggaggtggcggtactgggcaccctgggtggctctgcctctctctggactttgttctgcagtcaggtcagttgaggaagcaagagtgaacctggagtttgggtttctggaaggagcaagggggaaaggcagacttgggcaagggacataggtgtcagatgaggcaagtctgagtcagaaggcagagcctgtgtcccagaggaagagaaacaccagtgtccagcctccaggccacttgcagcccccagatttattttaggcaggtcaaagtcaggagtctgggtaggggcagaggccttgggtgggtgtgtctcaactcagagaagtttcctttgccaccagaggattaactgaccaagtttacctaagatgtgttttccacctgatctcttctgtctctctcaacaacaatgatgactgtgtactcagtcaacaaatatgtagtaactgcttactatgtgcccagccctttgctgggtgcttagatcacagctgtgttcattggtgactttaccaatccatggcatcatctcggtggggcactgtcctggtcagctccttctcccattccctccatcactcctccaccctcacctgcagctcctgcatctcttgactctcatcaaatgatcttgctgtcttcttcacgggaaggccatgacctcaaacaggaaatccttcagtttcccaccctgctgaatctgtaccaccttccctccagaggagtagaagaggtgtcaaccctgcccccgtgctggcggtcccagtcctgctcagcttctctggacaggagattagcacacagaggctcagctctaagaccacctagaggcctgctttagggggtcctgctgagtaaggcagaggctcagggtggccacagtggagaactgctggcttagcctgcttcctgcattgtgcctgagatgcctgtggcaaagctttgcagtccccacacctgattctgtatgtcctgggacacaatgacttggatttcatcttttttttgttttttcaagccaaaaattaggattcagtttattccaacattgaatgtatcaggaaaaccaaagataaagtgacagaggtacattaggcacactgtatacagatttcatctttacttgacctttgccaaagaactatgcatattctggtgatggtggttttcttcaacagatctttacggggaaggccctctcatttcctccacacctttcctctagtgaaagcgttctcaacctccaaggagtgttgggattgtctccccaggt

SEQ ID NO: 35576 - DNA, 2757 bp, Homo sapiens
tggtgcaatttcagctcaccgcaacctctgcctcctggattcaagtgattctcctgcctcagcctcccaagtagctgggattacaggcgtgccccaccatacctggctaatgttggtatttttagtagagacagggtttcaccattttggccaggctggtcttaaactcctgacctcaggtgatccgccgacctctgcctctcaaagtgctgggattacaggcgtgagccaccacgcctggctgcagttgctatttagatctggaaggcttttcccagcttagcgtggtcaagatagggatgggccgaggctggcactgatgctagacttccgtgcacagggcaagtatggacaagccccaagtggctttgtgaggcccacacagtgaagcttgggaaatgggaagtggggctgcgcccagattctggtatctatgacaactaaggccgctgcacatcctcatggctctcccagagacctcaggtgaggcccttctgtgttcctcaagcacccatgccacctgcggggtggggcaggaccctcctacccagccctgggcctcctggggaaccatgggtgcacaggggtaacctgagccagcctctctggggcatgggcgggcgtggtggcgtgggcctggcgccagagagtggagcagaatgtcagctctgtgagccgcaccgggtgccagcactctgcaaacagactctagtcaccagatagactggagtcacgaacctaacaaagcgctcagctgggcaactgtaactgcagagggcggggccgcacagtgctgcctagtgcctcctgccttgatctggtcagggtcatgggaggagacaggttccccaggagggcccattaacaagattaattggggtggcctgggggactctgggatgctcactggaaacatatcctgggggaatgaggtaggtggggagccaggaaaactgccccgtctggtttccttccctacagccctttatctggagagacaagctctactatactacaaggggttaatttaagaaggggttgctgggcatggtggctcatgcctgtaatcccagctctttgggaggccgaggtgggtggatcacttgaggttaggagtttaaaatcagcctggccaacatggtgaaaccccatctcttctaaaaaaacaaaaattgccgggcaaggtggctcacacctataatcccagcaccctgggaggccgaggcgggtggatcatctgagttcaggagttcgaggccagcctggccaacatggtgaaaccctgtctctactaaaaatacaaaaattagccaggtatggtggtgcacgtctgtaatcccagctactcaggaggctgaggcatgagaatcacttgaacctgggaggcagaggttgcagtgagctgagatcacgccactgcactccagcctggacaacagaacgagactccatctcaaacaaacaaaacaacatcatattaaaaagaaaacccgggcctattttttttaaagacccactgcagaagtgacccttctcattggtggctggtgaaattgttcttgccaaggtttggtatgaccaggtaaaaagctttcaatgctcaaagtgaggaagcacagaagtcatgtaccctgcattgtagctgaccagaaggtaaatcaagaaccactgagcatggttgggtgctgtggctcatgtctgaaacccttgcactttgggaggctgaggcaggaggatcgcttgagcccaggaattcgagaccagcctagcaacatagcgaaaccctgtctgtacaaaaaaaactaaaaaattagctgggtgtggtggtacatgcctgtgatcccagctactcaggaggctgaggtgggatgatcacttgagcctgggaagttgaggttgcagtgagtcatgctcacaccactgcactccaggctgggccaccctgtctcaaaaaacaaataaaaaacaggaaccactgagcataggtcactggaagggagattttgtcttaatagaagaattccaacaaggggatgggcaattttctgagaaggggacatgggtgtttgttcatgcaaagcctggatgtcaaaggaacaaacaaagtctggggaaccaaccaatctcattgccagctaccaatgtggaccatgcctgctgcagttacacccacagtgctgtaattctcagtccctctggtcatctctgttctcctacaagcccaagcctactgtgatggggtttcctctcccttgatctaccctcctactgtctccccaccctccaccaaacactcttcactttctggcctcagttaaatttagcccagccctgagggtgctgcttcccttggagcctgtgtagcctgtgaaatccagtcatgccctcaggggccagaggtgaggcagactgtcttccctgtcatctcagtaactgtgacttccatctactaggttgctgtaaccaaaaatcaagatgtcatccttgattcttctgtatccctcattcctcctttttttttttttaagatggagtctcactctatcacccaggctggagtgcagtgacgcgaccagagctcaccacaacctccacctcccaggttcaaatgattctcctgcctcagcctcccaagtagcggggacaacaggtgtgtgccaccacgcccagctaatttttgtatttttagtagagacagggtttcaccgtgttgaccaggctgatctcgaactcctgacctcaagtgatccgcctgcc

SEQ ID NO: 35577 - DNA, 2286 bp, Homo sapiens
tccagctccaggcacccagtttcagccttgccccacccctgccccgggcctctcatttgctgtttaccccccaggagcaggtgcacctgggtcacctcaccgcaggaaggagagatataaggctctagggcacagcctgactccacacccacagattgcccaaggccagcacaggggttggagctctctagaaaggtgaggcacttggggagcataaaacagctccaagtgggcccaccaccctgtccagctgctgagctcagcccgctgcctctcatctcttcccatgggtttgtcttcattcacccactgcccctagagcagcccaggccccgccctcagcctgaggaccctgtgcagagctcagccagttccaggaggggagggcctcttgaaggcagtcgggggccaggggagctggtgctcacattgaggagctgtggaaggcaggcctaggcccacacatcctgtgctaagaagagaggacagggtgtggaaggaggggttggagtgggagacccatagcctgattcagccccgaatggaaaagtgaagttatggggggactgaaaggtttggtgacagatactgggatgtgagtctggaaagcggctttgagtcatggcttggcatctaccctccctttgtgaccttggccatgtccattgccctcttatccccatctgtacaaggcaggcgcctcagtgttcccatctgtacaaggtaggggctcagctggataagcctaggctccttctaaccctggcactctgtggttacccaggtgggcatccccaccccagtgcccaaccttcccctatccccactagctcccgcatctcccccatggagaaaaagaaacctcgctgggtcatggaacatgggaagggttggcaattcctgtgtgaggcagcccaaggcaacctcggagccctcctgcagatacccagggggcctgccccgcccctggcccaggctccagaccacagagcagacaacaaaggcaggcaggtggaaaattccctctggctctccgcccaggcaccctggatggcaactgtgccagcctgggcgggcaagagccgggagtccaggataccaacaggcagcctggcagccccagggagctgataaggggcctgtcaaggtctccccagttcaattgccccccactgctcagacacagaaattgtattctactcaggtggacaaacaggtgggaggaggaggatggggaaatatgtggttgtttgaacttctcagaagttgtagccctgagccaagaagattatgccaactcctcccactaccctgagctgagtggtccctgggactcttaatggaggaccgggggctgcagctagtttggcggacagacagaaaacggatttcgtcaagtgttcctgtgcctgctgggctcctgctggctgctggtctctgccctgtgaccttgggcagtgtgtatgctcctggagggcttgctttgcccatctctcaccctggaataactgtctgggtcctgctccctggaagggcatgaagccacacccatgtaaggcctaggagaagtgaaaagccctgtgtgtacatgtgacttgaggccgggaggcagaccactcccagagcctgcatgttcaaggattccttgcatctggaaagccaagacagggacccctcctgcctgcctctcttctgctttctgctccgaccccctgagctggttaccatggcaacagttccctgcctatctctccagaggcctttcacagaatccagagttggtttctacaatgtttacccacaaacactttcttgttgccagtcagttcggatggcacttccagaactgaggaaatacctttgtgacttcgccaggtcacagccagctggcccctggaatcactccccagtagggtgccatccttcgggctctggagagctgaggagtcagggtgtggccaggtcaaggtgaaccacatgctgctgggaaaactacccaaagggcacgtcccactgacccgcagtcagcagcctgcaagcgtcattgcctctacagggaacattgtccgtctaggctggcagaagaaggccctaaagataaggcagggcatgaacccaactccatgacagccaattagctccactccaagaacccaaccgctgtgactcactgacagccaatcaggaggcccagggccagatacttttttcagctagacacacctgtaacctgctagccatctgttgaaccacacccctgccccaaccattctagaaagaaatata

SEQ ID NO: 35578 - DNA, 1684 bp, Homo sapiens
cgacagaacgagacgccgtctcaaaaaaaaaaaaaattagccaggcgtggtggcaagcgcctgtaatcccagctactcgggaggctgaggcaggagaatcccttgaagccggaagggggaggttgcagtgagccgagattgccccattgcattctagcccgagcgaaagagcgaaactccgtctcaaaaaaaaaaaaagacaggttaagtgatttgcccatggctacatagctgggaagtgaggagatgtggatttctgtggatccaatttcatgtgtctaggatgacccatcaactccagagaagggcaggaagaaggtgccgctcttaggctcagagggactcagaggtagaagttcaaccatcctttccctccccacccacccaaccggccccctgaaagctgtccaggcagatgctgcccagggaagggttaaccctcctctttggctctgccctgcattcttttgtgctgagctctctggcagcttgtgtcaggacatcagggcaagaaggcagaaaggacatggctagggcacctggcaatgaataatctgtttgtcgtggccgtgctgccttgtggctgtgtgggatggggtggggatggcggcagtgccaggacttggggtcaagggctcagggagggggccagccagcttggaggcaggacctgagactcctctatgtttagtgcttgctccatctcccagacagccacctaaacaggaactgtggcagctttccacgtttgcccctggctgcagccaaacctatctcagctacagcctgggacttggatctccctgtaagatttctatcccatccctctccacctgccccagggcttcagaaccaagttctagactccagagggccctgcagcctgcccctccagctaccaaggatgaaaatctggtacaggcatctgtaggggacagccaaatgtgcctggaatcactggggaagggagatatgagaggatgcagggtgccctgtggggtttcccaggctcctccagcctcaccccattcctgccctggctcaactgcttggtcttgtgattgcaggggccagactctctcctccagctgagtgatgctgggctccacccagcagctggctcttcctggagtctttcctccccaccagctctcttcctgcctggaacttctgccccagctcctttctaccagactaactctctcacttccactcaaattctgctcctgaagaaatcccttctagaacttctcaggaagccttctttgactcacccaagcctgtctgatccccttgggctctcctgcctgctgccatcctcacatacctccacctgttactgtggccagtgcctactccttatgcatttgatgttatgcttgctgactgtgtctcacacctggattctgtgtgtgtgtgtgtgtgttctgtctcttccagaggacagaacaagaaccaacgggtggattttccttgagtcacatttctgataagggaacaagttcggcatgatcacagccatctaaacattggaatgggctatcttgaaagtagtgagctatcaaaggaggggttaataacaaatgcttctgggtagcagtgatgtgtctgccacatgaaaggctttcagtacacatttgttaaacaaataacaacctgctggctttctctcctcccacagcca

SEQ ID NO: 35579 - DNA, 1468 bp, Homo sapiens
gtagacacagggtcttgccatgttgcccaggctggtcttgaactcctgagctcaagatagcctcctgcctcggcgtcccaaagtgctgggaggggacagccaccacacccagcatttaatcctaatcttcacaacaagcctgttattatcttcacgttgcagatgaggcaaccgagggacagaggttacatacttgaccaaagtcacatacacagttagtaagtggcagggccaggaattaaatccaggcagtctgattccagagtgtgctcttggctggagaatgcatggcacatggaatctgctcagtacaacattcgctcatttttttcatgggtggcacttccacaccagctcagatgccctcagtgccacctcagtgcttccctcccacccggttccaactaagtaccttttcttttcttttttttgagacggaatctcgctctgtagcccaggctggagtgcagtggcacaatctcggctctctgcaacctctgcctcccaggctcaagcgattcttctgcctcagcctcctgagtagctgggattacaggcgtgtaccaccacacccagctaatttttgtatttttagtagagacggggtttcaccatgttggtcaggctggtcttgaactcctgacctcgtgatccgcccacctccacctcccaaagtgctgggattacaggcgtgagccaccgcgcccggccccagctaagtaccttttctgtagccagcactggggaaactcccagggagaggaatggggaattcctgggatcatggagagacactcccaagggctaggaaagccttccatctctgcctggcatgcttctgaataggggagatggctccagcttgtccagagagaggaatcttcctaaagtagaactacaggtaggagaaaagtacttttgggggacccatgctgggcaccctccaggggggtggaggggaagagtaggcacatcccccatccctttagtctcagcccctgggaacccaccctgtcccctatcatctcttttcagatggccttctcagacagccacagaaggtctgtgggcaggacctgggcagagtgggatgggttaagatccgatggggtgaagggctgaggccaggcccttaactaccatcactggacatttggttccacctagtggcctctgatgttccaaccgttctcacagagaccggcacaagggggtgccctttcaggcattcagtgtttattgagcacctactctgtgtgaggccaaatgtgaggtttgatggaggcatatccatgagcataaagaggctgggcacggtagctcacgcctgtaatcccaccattttgggaggctgaggtgggtggattgcttgagctcaggaggtctagaccagcctaggtgatacaggcagaccctatgtctaccaaaaaaaacacaaaaggctgggcatggtggcatgtgcctgtgg

SEQ ID NO: 35580 - DNA, 2690 bp, Homo sapiens
ctggcaggggaatttgggactcttgggttctgtttctggcctgctatagtctccaactctctggatatgatgctggtctagagggggccctcctgtcaaaggctcaactgcagacccagaaaccgaacccacccgggtacctgtggatccctgtcccagagcacagctatagtaacaccctggggaacgaggagatacctaggcccagctgcatttctcagacctaaacgcctagaacccaagccacctaggcctgcagagtcaggtcagagtccaggtgttatgtgcctgctctgggaatccaagagcctaagtcaatgccaagtttaaccagagggtctctgaccccaagggcagagcctaggcagacagagcccaggggtgttagctccgaaaattactgtgccaaaaccgcagcattggcctgaagatcctgccctgtcaggtcaggagacaggagacactgggtcgagaaagggcagaggtcatttgcagagcatgtttgggaaaggaagccagtgttcaattgtgtaaccacaggatgcccgcccctcgagctttccatctgccttcatgcctcaggtccaatgaagtgacgtcccctgccttctaggacgctgagaactgtcgaggaggcccatcttctgcaaggtggggcaacaacacggacaggtagaggtacctaggccggctggatacattcctctgctgacctatctcatcagtatctttggttactatctggccaactcacagttgtgggaaacctcagctttgggactggggccaggtccctggacaaccccagcccctgtcccatgcttcctcgacccacaagccctgtctagcctggctctgacaggcaggccgcagccattacggcagcctcagctcacacccatggagctcatcttccccttttttgagagagattttaactccttccccaccactcccctggcgctgaaagacttacaatcacccacttcagtgttgacgacccaaagcccttagagccactctcccaaggccccagtgggccgtgcccctacacctcatcctctcttgtcgggagcacctgctcctgcaaacttctgagccagacggagtctccaaactcccgttaccatgcgatcctccctggacccccggctagacactgcgggtcggggagaagttggggaggagtctgggcttgagccaagggcctcagctgactcctctaccccgggggatacctcccctccccctcaatagggccggggcttcctcttccggcaaggaggggttaagccctctgggtggggctgggcttgcccaaaccccctcctcaagcctctcggccgccccgtcccgtgaccctctacccgcgggacaggaaggcccgtgcactttcgccccgtcatgcccccttgcgcgggggccagagggggcccgtctcagccggcagcgggtccctcctgcttcgagagcccctcggtgccgcctgccccgtggcaccggccctgtctgttcgtcccccttcccctgcccccagccgtgcagtaccggcccgggtgagagagcgggtcgcgcgccgccccggtcccccacggcacgggccgtactaggccccaagcgctcggggccggctcctcccccgcccggcgcccggccgtgcccggctatgccaggcggcgaccccggctcagcagggcgcggcgcgggcggggacaggcccgacccgcggcccgcgcccggggaccccgcgcccgacgccctcgtaccgcgatcacgttgacgaaggtggtcttgcccgagtactgaagcccgaccagcgtgagctccatctcctccttccagaatagggccttgaaccagtccagcagcttgttgaacaaagcgatcatggtcgctgccgccggccccgcccggtgccaggtccccgccgcccctcgctgccctcgcgctgcggcccggagcggcccctccccggtacggcccgggtcccgcggctcggtgcgggcggaggctcgagcgcggctgccgacgactcgctgccccggaatcggctcgccgatgggtgtggcttccgcgccctcctcctccgccgccgccgccgccctccctcgcggccgggccgtgtcctgctcgcacccgagcgcgcgctcctccctcgctggagccggggggccaggggccgcacccgcaggtggggtgagcagggaatccgcaggtggggtgagcagggaatccgcaggcttcagcggcgggggttgaccggcagctggcgtcgagaggcgcttgggaaatggggtctaatttattttagaccctgtccccgactgccgcgccctgactggcaccccctttcttaaagggtggtgggctcgaggtgggtgaggttccggttaagcaggagccttttcaggttgaaggagagtgggtcacccacttcccaggacacggagatgagatctctacgacagggaggcagatggaggcttttttgtccctgaacccttgcctctgagcattcctgggtacagtcccatcctctcaaaatgcacccagtgcagagggacaaccgtattcgggtcttttaatactccatcttgttttgttcaccacaatttaccccgaccacttgttaggaagcctctggccccaagtgaaacggacgcttgaacttgctccggatttttaccagc

SEQ ID NO: 35581 - DNA, 649 bp, Homo sapiens
atctgaggggcagttaaggtaagttggcggggaggtcccattagtgctggcatcacctatgcagttctcgggagctgtgagctcttaagcagctggagattgggttcaacaatgctaacttcctgctaagtttagagggtggcatgggaggactgatagtggaggttagggagacttggtggtctctccagatatttttcaacatctgctccgttttttaggttggtgttttggggcatgttcagtaccagcccagcttggtagggctatgacagcagtgagctggagcagggagggtaggaaatgcaggcacctgatccaccagccatggctggaagatattctcagacgtctgagaattcccccattccccgcccaccactgcagccaggccactcactcggatgtagttggcattgatgtaatctccgtcctcctggctctgtgcccggcctagacagacacggctctggggatctaggaaataaaaatcagcagaggtcagaggtcagaaggtgaccaactaacacagactcaagcagggtcagaaagaggagagttcctgtgctcatcacagtcatagcaccttgtgtatagcaggtggccttacacccactgaagttgttgtttttgttgttgtttttagaga

SEQ ID NO: 35582 - DNA, 1388 bp, Homo sapiens
aataaaaccctagacttagaactaggatatagaatccagtcgtttaggtacttaatgtttagttctctcctccagaaaacaggaataattaccgccttttttccactccaaagaattgatgtgataattagggagataagattagttactagtcataacaagaataaactacaactcccaaaatgcccagaggaagaggctgacgccagtccaggagacagttccagctttagggcaaaggtgaccccactgggtcccgtggcgaaagagagagccgccggtcctcgccttttttctgatgcatccagggatttgtagttcccttacggccaccaagtgcacttagggcaggcctcttactacgagtcccgtgatgacccgaggccgggcagcgcctgcgtattgaagccgagggagcgtgcgggcggtactactggcgggaggagtaaagatggcggcgcgagggtctccgccctctgctccgggctgaagcgctctgagagaggcggcagcggcaactcgagccccaacagtaatttagtgttggtagttttggcagcagctgccgaggccggagcaatggcggaactggagcacctaggagggaagcgggcagagtcggcgcgaatgcggcgggcagagcagcttcggcgctggcggggctcgctgacagagcaggagcctgcggagcgacgaggcgcggggcggcagccgctgaccaggcgcgggagccccagggtccgcttcgaggacggtgctgtctttctggccgcctgctctagcggggacaccgacgaggtgagaaagcttctggcaagaggtgctgatatcaacacggtcaacgtggacggcttgacagccctgcaccaggtaactcctttcttggtcttagaggcgtccagtctcctacagatgagcctttgaccctgcgagccaccccatggggagtatcagtgttgccgccgactccttctgcatggacactgcccttttgggctaatcggtttcattcttggccagcttcctccactaatcaagtctttttctgaccccagggtcttaggaatagcgtcaccccgctgcttggtcagtgtttgtatttccctccacctacttgtgttgtcatggttactggtgatttttgtccctggtcttatccctgtagattagttatcttcacttatgtctggttggcgtgcctgcacaccgcgtcactcataggcacagtgtcatttgtttgatgccctttcagaaaattcagttgttgtgtgtccccgttatagaatatcttatatcacttaaagagtaaagccctttactgggtaaagacaagcaggtctgaaaccacacctcttgttttgttgatttgtagtacttcaaaacagttt

SEQ ID NO: 35583 - DNA, 465 bp, Homo sapiens
gagtgtacagaggaggaggatggaaggatgggaccattgccagagcatagataagatgagtccgcattcctagcctctaaaggatcatcgatttggctggagtccctaagccttgtgttctaggacttccccttattttctgcccactcagctgacctcttagaatcctcttctctgggagaagcttcagtgttcatttccctaccttatgttctgcttgcctcttctgatgtcacttcctggctcactgttcccctgagattacttaggcaaactcccactctgtcttatctcctctagatttacttagtagtctccctgcagggttggcagtcagctttcttgaatgaagtcgtgttagtctaacagttgatttgatctgtgcttagtttgaatgacaggaggatgaagaggaaaaattaaagttaagtcttctgagtcaatccagccactctgcttctttac

SEQ ID NO: 35584 - DNA, 956 bp, Homo sapiens
tatatgtggctctgtggttatgagatgtgttgtgcctttctggacttttattggaaaggtaagtatttatgaattctcctcaagagaaactccacccagatcctagattggagtaggattatatgccaacttctgacaggtgtgcatgtcagtgtgagctgtgccaggcctgcacctggtcttggcgcccacatcagatgtgattacttctctactgcatcctccactcagcatcagcctccttgtcagaccttctccccttcctttcctaggtccttgcatgagagggacccagcaaccaattcctttttagattggtcctggaatttttatttttctttggaaagattactagctgaccctgctccttagccctgcccttgcccatcctgcgctgggccctgccccttctcctctcctccttgccttgccttgttttcaatactgcttcctatagaacattgaccagattgtttcctgcctctctccctcatgctgataacttccaaattctttcaccttgatctgcttatactcacttgtcagattgagtcactttcatcattcatgtctttaatgttattccctgggaggtaagtaccacttcatacaatgacaattatttgataatgattatgttgaaagctttggtccaatgtcaacaccaaagaagggtgagagccagggactttccattggcttttaaatttggtccctgcccattgctttaatcttttccatatgctgtaccatgatctccctcctctatcctcaccatggccaagatgcttacagtgggcaaggaagattgcccggtcctcaccctccaatggctacatgagacagtttggctagcctacctttattccaaggtggtcattctttctctttggttaaagagattcagcagtttgtctctgcttgtttttccttttcactgtttttccccttcatgc

SEQ ID NO: 35585 - DNA, 1482 bp, Homo sapiens
catatatttatataatttaacctatatcttctctgagagatcaaggaaacagattatattccttaaggcacagttagatctcctaagtggttaatagcagagccagagctagaactaaataggcctcataacacctcagcacaggtcaccctttactgggggcattacctgcccctggggtcctataggttgaaatgactagtcaaaggacacctgtattgaacagatacagatgtagctttctgtagcctgcatagtggcgatgtacttacctgctatcctaaatcgctcttgctgccagtgggacccacacataaactgtacccttatcaacatcccattaggatttttcagatgcacagcgtacttgttgaaagtgcctgatcatgtaacaaagacttgaacttccaggatggaacttgaggctatttttcctttttttcacaagttagacaacagtatgtgtaatgttccaggatagcagaactaataaaattgagtttccactccctcccctgcccaacaagcatctatttctgtgaattacaatgccatcccctaaaactgctgatgaggcctctgggtatcctttggtgactgtcagtggggagctttggggaggattaaatacatgcctagtgttcactgtgcctcacagctctgtgagtgtaagttttctgagttttaattgttgaaagtggatatgtatagtatgaccagtgagaatttggaggattattcaccgaaggcaccaagtggaggatgcttaaatcatcttgtgcatatggcaagaaagccgagtactgcctctctggcctttgctcttgtttttgatgagatgtgaagcagtatcctcctttaactcttctagttgaccaccaccccctttctgaattctttccctatgtcctcaccagcccattttggctctctccccaatttctttaggggtgagtttaagggcaggagaaattgaaagtggttactgattcagtagaatgaaaggatatacagtgtgaaatgtgaggtctgcctatgaagaaataagatattactgctaaatatgccagctcaaaagatggagtggctataatctccctaaagattaacattaccaactcaataaaaaggaagattgaagggaatttcatccctgggagaagggaccatgagagtttattccacacattgtctcaaaaggccctgctcaccaggctggcctggcctggtcagggagggccaaggaggatcctgccaggctctaactcacctttccctctgtcaccctacaggtgttaacagaactgaaatccgacaaccagaggctgaaagatgaaaatggtgccctcatcagagtcatcagcaaactgtccaagtaggctaggctccagatttatgaggaaagaaagggacagcatttgctgcccccacccctcttttccagtccttgccttccaaccaaaagaaatggatgttttggtg

SEQ ID NO: 35586 - DNA, 5742 bp, Homo sapiens
aaaattctgtgatttattcattcttaggaagatcagcatatttattgggatttctgcttcaaaaattctttctaacctcaaaaatccaagtccagaattttttgttttcttctggatttaaactgtttaatatgagcacatcaaggttgacttctcatcctttttgggaagtgaatttaatattgagggtaattgaatgatgttgcaatggctttccctcctgctggcttggtaagaatattaaagcctgcagaggtggaaattggagctcatggagaaatggatagaaagcaatttgttgcaggcagcctttggacaagttgttttaataggaaatagacctgctgcttcataggtttcctcaaccacctttcctcagctttcttaaaatgggatctacattggctcttcacacccaaatagcagactaatcgtttttctgcttagcaccgtctggttcattgtcttgaactctgccttacagcagcaagaaaattttcctcgacaagaacctcaatctttagttccattgagctccccctctggattttggacttaccagaagtaggaggttctgataccattcaagatggtctttccttcaaagcaggtctgaagaggagactaccaaagcagtgtttacaaacccagagtccacacaaccatattgcatagaacagcacttggctttcacaagcctcctacaggacctggtgtaattggagtgaaagggcagagaccctggaagtggaggtggctgtgtgctgcgatgggaagaaggcagaaggcccaggggctttggacatagagcagggtggaagctgcaagtactgggaaggaagagagtttcacagaaacaaagctttgtcacacagaaatgagttctgtctcactggtgacttcatccctcaggctccagctgagcagagattttaatcagcttccttaatgggtattgacactgctcaggaagcagtagaccctgtcagggacagctattgatcttttgtgttctgattagattggaaaatagatcaacttcattgtagtccaggaactgttggtcacagctactaggaatgaggtgatttctgagggctgagaaaaaacacagaatcttggccagcagccagcagctgcatggtgaaagatgcattcacttctcctttgagagttggggttgagggcaaacatagaacccaggtttggcttacaacccagtgtcccggaagccctccttcgggagaactgtaagtaagaggtgggtgtgtctaaagacaataccattaatgaatgttctggccttacctaaaaaggtttagcaatttggggataactcttggatctagcttatgtgcgttcacatgcacatttgctagcccagagcttttaaaatgaggtctggcatatacttgattacaaatgaaaactcagaaaccaattttatttattaaatcatatcttttgtttttccccctcccttctaatcccccaaaggacctatttgagctgttccccaattcatctgcttattttggaccatgaatctgccagagtgatattttctgttatttctcctccaaatttttccctgatgtttccaataaagatttacttgggtggccccttaaggtgacatcaggatgctcttatgtccttccagaataagcatacacttcactcctctccctttcatctccctctgcattcttaattccttgcttttctcacttggagccgagggtgctttagagaggtggttttccatgaatcagccaagattcctgtagaagttgggtataccaaccaccaccaccaccgccccctattccagtttcaaagctcctcggctatgctaatgtcccctcagagatgaggtttgacttttaggcccgtatgactcctccatagcctggccaaggagaccatgagtagccatgtctggtttactctttatcctgagactgtttatagcttaaaacagaagtgtgtcttcccagcacaaacctaatcaatcagtgtatcagtgcatctggtggcaacagctcagcccattcaaagagcaaggattcaggaaaggcacactgatggtggggagcctcttaagagcctctaatgttctcccaaaaccagagttgagagtcggagtgccagtcgtcggggcccactattcctgaataagggacatgcaagggccagaagtagcttgactctcgcctaaatatctgtgcctttgcctgtcctttctcccactctactgaaacccggaacagattcccgcttgccttctgatgaagagaggttaggtaaagagagtttggaggaaaaaagacaccaggaggcaggctgcggggtaggagagggttctgagaggaggcagcaatccagaatacctccttttctagccagcatcccttgaacttttgaaaggttgtgcctaccactggctggcacaccagggcaatgatttccctgcagaaggaaggaaagaatgtttcacccttgcatccttcttggagaagctacagcctgtgctcagttgagtggttcacactcagactttggctttatggttttccttcctccttgtctttgccctgaccttgatcaacaggggtgaaaagaaccaccctgaggtttccatgcctctcccattttagtggtagcattttgtgtctttactccacccttcaccctagttccaccaaggttcacacaccagatgtaactgtttttcagctgagttgtatggattaacttcagtccactgtaaatacacctgggatggggtggggttggggttgtttagggagaagcagccagacttgctttgtgaactgaatgtatttttatgcaattttgagtggcctttcaaccctaagatgaatggttttgttttactggttgttgttatatagttttgagtattctgtgtttgaaagtttgggaataataatattcacttctatatgatgcctgtaaacacaacagtatttataaatgagtaaataaaactgtgttttaactttgtgactgtctccacagttcagagcatgggatttctagaatctcacatctggggcagcctcttctgattttacatcttatcattggtgggggcctcgcccaccagcctcctacaactcctgtccacatagaggccccttccccagggacagccacagtgagtcatggccactgagaagggtctctggtagtatcaaggaatttcctaaatggagtcaggccaaggagaagcctagattggcgttcaaaagaaccgtaagatagatagatagatagatagatagatagatagatagatagatagatatcaaggttccaagcttcaagtaaccaagagtatatacggttatttcttggaagacaccaggtttaagtgacaaaggtgttgaggccatccaggtgaacactagcacactctagtacatgggaaagttgaggtctagggaggtggtgatttccttgggctcatggaagtctcctgccatcacccttagtcatctgctatatccataagtcttcatgaggtcattgtttaattcaggagatccaaaactatcctgtagttccaaactacaaatgtagttaacttgggggctattgaaggttaaatctaaactcaaaatgaaggagccatgcccagagaagagctgttcaggcccgctggcagggtttgtacgtgggtggccaggtctgaccccaggcagccaggatctgggtctggtttctccatccagcaagccctgcctctggctttgctcagccctgtgtttcctgccaagcggaaatccctggtcactgacttggggagaggtcagggagggaagattcttctcccctgatgtcacccagctgtttgtaacccaagcagcagcagaacaagcacacttgatgtcatggttgaagaattcagtcctgtcctggggcacaaaacagaggcaaagaagcatgaccgatgcaaagggttcctagactgcaaatgtcatttctctttctgacccccactggttgtagtaaggtctgcagatacagtatcacctagccgtcacgtggtccagccctcttggggggaaaggagaaggccacaacctattggcagagtaaaaagctcatattcttagccaggagaccctcaggtgataaatcccagtccgtctgctgaaaggctcatgcccctcaccctacccagccttagggactgaagcagcaagacaggatagatgttaaaggatctgggctcatgctccctcaggtgggcagctcccatccctgcttgcattcactgcccccatgcctttggacctgatggacaagcacacatctagccaacggtgttcctggaggacaggtgctggtgtaaactgacaaaaatggtagctgctggtctatcctcaaggagaggagacaggtggaagtgggaaccgaagaaggagttttactcttccctggtctttgggggcaatgctgtcccactctccctttccctaaaaattctgacgccctatccctggtccctaacatctttgcttcagaagttaaagacatttcaagttatttgcaaagagtcaactgaggactttgtagaaattgttacttttcaaattcccacttcccagggccagcctccctctcgtcattgggctcagactgtggctgttccctaagcccagctctactggaagggaattcaagaatatagtccccaccaccaccccgccccgcccagcctcccagacaatgttccccggcaccaccacactccccacagttccacagcctggcatgtgttctcaggagatgtgtgggccccagcacccaccagagtgccaatctggtcttcccccaaccccaggagagaggggacctcagccccttttggtgcttccctgaagggagattctgggttagaagccagagcctcaggaccatctcaccaccctcacccaccatactgaccctcacaggcagctcccactccctcacccccacctcagcgcagcaaaaacaaccagagacaccccccacccccaggtttctttcagctcatttctttaataaggagacgcagttcattacaaaataacaatttgacaagagatcagacaagaacaagagtccacataagggagatggagagcattgccaagcagaagtgggaatgagagggccgggggcaagggctgtacatgtgtccttcctatggagacgaaggcagggctcctggtgggctgaccttggcgaagctaggctctgccaggccctgattttgaagttttcagccccagggttttcagaaagcagcaaatcaagtccttagatgggcaggagtcagggcagaagggtcactatctttgaagaggcccccctaaagtcctgatcgctaaggcaggtgggatggaggaactcctggtgccccatgcacactgctcccatcacctcaccagacagatgctctctcaactcttgcctcaatttgtctctgctgtgggtgtggagagtgggagggccccagagagagctggaggaagcaagacatgtcttcactggtccaagcacctgattccagcctgctctgaaatggtcccctccaccttccccactctttcagttcccagcacaaaggtccctgggacttctgtgtgcaacttctgttgtggtttgtgcagggcaagcctgcctcgccacctctggcctcctcgaatgcgccctgcctgattc

SEQ ID NO: 35587 - DNA, 797 bp, Homo sapiens
aataaaacttggcaataataatgatctgtattgtattggtattggtattggtattggtattggtattggtaggtcctctaaacaggaaagcattatttctttcatgtcattcacagacattttatgatacttcaatcactgaatgggatgagaagaaatttcagatccttccccctacatcaattataattggtgcacatattacttcagcatgcctatatcaagccatgctgtaatcaagtatatataatttcacagcttttccaaggaggttctctagtaactagttttcattgtgttttttccatacctagaatccagggaagaaaaaatttctggcagaaaactgaggctgccaaggttaagaaaggattatatactttaaaaagattccaaaaatgatctgtctgtcagggggaagggatttaggaaagaggttggactctgaccccaaccttgcctaagcaacacccaaacctacctgggcactaagggcaggggaagcttaaacatcccacaccctaactttaaggcctcattagatctgcaaacacacgcctggagattcaacatcagggtcaagaaacgaacagaagtgagactaaaaatcagtttgagcctcaaaaaatactacgagatggcaaaatctttgttgtgtcaatatcccatctaaagatgacacatttgcaatagtattaaagaaagaagggccgggcacagtggctcatcatgtctgtaagcccagcactttgggaggccaaggcgggtggatcacttgaggtcaggagttcgagacc

SEQ ID NO: 35588 - DNA, 2024 bp, Homo sapiens
ggggtgggggaagagagtggggagaagattcttaaacagcaggaaaggcagttaaacccgcttcccaacggtcccagcccgtccaaccgccgcttaggccaactcggactcagaccctcccgaaaggtgggcaaaaaaaacaggggtgtaggagcgcacccagttccggccacggaggaaggagttggccgggctctcctcagcgaacgttggagccgttacggatggtttcagcaacacccacccctcactcactgcccccaggcccgaggcgctgtagacagggctggaagggctgcggtgggtgactgcctttcagtgcccggagcctgagggccgggggaaacgagcacgaaatcttcggaggtctctccgtctgacgttcccctacaaacacggcctcgcccggaccccatccccaccagcacagcccaggcctccccggggagccgagcggctgagccagaagaagccgggagtgtgcgcgttcgggagcgcgggcgggcatcggggcccaccgccgcccgtcctgcccccgccgccccaaaagtgtcccccagacactaacgccccccacaaacatccgctccggggctggacccgcggctcctccccgcccccagccagcgctggccgcccccttcttgaccccggcccgggggacacctggaggcccggggaccaggcggtggaggggtgccctggtctggagggtggggcgcccaggtgagggccgctccgggccgacgccgccaccacacaaaggaccaggggctcccgccgccatattgaaaactttcctcctcgcacgacaactcgcaagtcccccacccccaccccaccccatcacacacccccgcaccccgggagcggaggcgaggaccagcctgccgagcctcgccgggcccacagtcctccctccagcccgcgcctccgccaggctccgtgaggaaactcccccgcgaccacccccggctcctgccatcactccatccggaaccgaacccgaacctccgcacccggccgcccgagccccgcggcgacccggccctcccatggcaccgccgaagcccccggttctcccacgctcctcatctcccaccctggagaagcccccgtcttcctcccccggcctcaactccgaccttctaggcagccccaaacttgacgaggccggcggggcgaccggctccccgccccccgcgcctcgggcctccccggacccgcgcgtccccgctccctcccccagccacgagctggatccggggtgctggcgtgactcaccggcggcggccgcaccttacagatgccagtctgctcggctatgggccggatcttgtggatgaaagcgaaggggtccgcgaactcttcccagctgggttcgaagaccgggcactcgggtggaggcaggaactcgcccagcgggcccgggcccccgaggggcagcgccgggcgcgggcctgggtgcagtgtggtggccgcctccatcaccgcaggctgggcaagggcgaggcgaaggtgggctccgggaccgaggctgcgagctccgctcggtccgagacccgtgcagacgcggctcgagcaacagcaagtccgagttgtacgggcaacggcagcaccttgggctttttcagcctccgacgacgacgtctcgccgcaagcccacgccgtgcgcctccgccgccacggcgaggaaaaagagtcccaccccacccccatcgacccaccctccgcgcgcggctccccgccccgcccccgaatcgggcggggccgcgccttccgctgtggatggagtttatccttagggtttcagttgagccaacttttattgaccatttactatgtatcagagttcctgccctgaagaagttaagtctggtagaaaggatcagtcccataagccaatcattcaatcacgtcagtacacaatggtaggtgcagtaaaacccaggagggggttttggaaagagtattggaaacggagaaggattttccagtagagataacagcttgaacatacacat

SEQ ID NO: 35589 - DNA, 1235 bp, Homo sapiens
attaaaagaattatcagtgcaagatagatatgcgatgtggcaagttataatagaatctaggtagtgggtatagaggaatttgatgcaaatttcttttaactttactgaatatttaataatactaaataaaagttgggtagaagaattatcgtcgatggctctttggtgcgcattctgggcctccgagggtcttgatgaagctcatgtagtgtcatgtgctctctcgggagagcgttgactattttcactcctaacgttggcatcctacgagccaggtaggcataactttgagacaaattctagacttacatgagttatgattattatttaactgagatggacaggaagaacaagcctaagaaaatctttcccaattctcagctgcgtcctacgattccctctcgctcccaactctcaaggtctcccagtccggcttcctccatttccggtagtgaccctaagtgatgagattctatcgctcccagatcaggccgcagctgtttggctcccagcagacccggtgtgacgttaagggacggggcggttgccggcgtcttgaggggaacctagggaccgagaggactctccgggaaggcagccgctcccccgcccacaacagacgctccccttgccctttatgatgtttacatgggcggagggatccctcccagctgacagccacaccgcgccggcccttctttttttaaagagcctagccacgggcgctgactggccggcagccgggcgcgtcatcctccgggggcggggcccgggccgcattgtctcgtctagggccggctggacgccccagaggccggacctgggcaaccccagcctggaggtgccggggccggagctcccagagggctgggtgcgaggcctaggcggggtcaggttcgggttcctaggccatagcggagctgcagcccaggcggccggagcggaacccagccccgctccgagtgccacgtctccaggaaccccctccttactcttggacaacactccgcccccgcccgggcctccgtcccccaaaccgccctcatttgtgcagcgccagatccttcggacacatccctaggtgtctccatcctcattcggtccatccaactcccagacctcacgtcaaccggctgcaccccactttccagcctgcgccccagatctgcagccttcgcccctagatacacccgcctggtgatgaggcgctcctcgcgttccttccggtaaccgcg

SEQ ID NO: 35590 - DNA, 1727 bp, Homo sapiens
accgcgcctggccagtcaagttctcagttttaacagagggacctcaagtccttgggcaccaaacaggagaaaagtggagtcaagaacattcttttcaaggccccaagagcttacaggaatccctagtcaagtatggggccaaagggcgaggacctctacctctggccagagtcgggcgcccaagacaaagacattcaggggaacaggttttgaactggagaaacctgttagagcttcccaatcatcctggaccttgcctcctgcgcggcaatgtgatctcagagggaggcggggaccgcagctacaagcgggcacctctttgtccaggaccgcagcgggagaaatacggggcgggccctagatcccctccaggctccagagcgcgctctgccgcagagccgactccgctgcccgaccttgagcgcagcgcacaaacgaccccaccatgttctcgcccacgctttaccgctcgccagcctccctagtccctcagcgcttctggggcgctcagaacgtttctagctcgcaccgcctcccgtaggggaagcagggtagaaaagtggtgccgggactcctcgggcgtccccgggctttctgcagagcccaccttcgccctgaacgcccaaacacccctggcatccccgcgcagcccaccccacaccctggactgccggggcgcccttccgttttgcgctgcgggcccttcccaccgaccccccgtgcgcccccggcatcctccccatcgtgcgacaccctcccccgcacagcatccttcaccatggttgatccagtagttgaagttggagggtcgctgactgcagacaccatacgggtctccagcaacaccacgaatcccaacgcgcggttgctggcgggaccttataaatccccggagagccgccggttgtgtctcctggcggggactcccattgggtcgcagctggacagagatcggatcgtcccccgcgcgactctcactgggccaggcccccaccgaggcccgcccctctctccgctattggccagccgcttacgaaacagccccgccgcagcggtcattgggcagttggtaaagccaaagggaggcagagtcgggcgtccgcgtcctcccggccagctcgaccgtcttctctattggggtgagtgctgggtctacgaggtggaatctttgggggaaacaccctcattctgttttagttttaggactttgcaccagtgacaccgctgacctgattcgaaaagtgtgtcggccttggagaagggtgcatacttaagttcagcaaccactgcagaaggaaagatgctgtgatgagaaccgactgctgggagtttccagagcgggacaaaatgcggctggggtgggtaggataggcaaacaggcatgggaaaggacattgcaggcgccggtagttgacgtttacttcccttttgaccggagcaactgctcaggttcaggtgactcgggttcctgcaagagcaaggggtccgggctggccaaagcagactgaggagggcctgtagggtggaggtgaaaaggaggcgtggggccttcaatgctaggctggagagcttgcatataatttccctggcatataatttcaaaccatcgaggggttttgagcagaggagtgatgtgatcactgcagcattctgagcagtacttagatgttacttgtgcattatttttttccagtggtggtttcatattgttccatgctaaagagcat

SEQ ID NO: 35591 - DNA, 1368 bp, Homo sapiens
cctttgatgaaaggctgttttggacgaatgggtacctcttgctcttctactagacattacacttcaccatctgttcaagcacgtgaaataataaaatgatctgcatatttttagaaataattttgaatgataggatgtgtctatggttgaaatgacattatatttgcacttcaacacagtttaccgaaataaatttttttttcaactttctcacttgcgatgatggtggtaggaagggtattaaaatccctaaactgaagggaaaaaaaaagtttttcttcgaaatttacttccaggacgtcagggatctactgcacttgaaatatgattcatctggaaaaccacaggcttccagtgcctcggtaaagtgggtaggttaccagggttattttgccgcgtccccaacaccagttgttcctggggatcctctgtggagcagataggtgcccgtcataaatgagacggtgaattcaggactggcgggtgaggtctaaagtgggaaaggaacccagcaacacccgcggtgagcggcggccgagaggcacctgccgggtcctgcaagctggcgggagctccgagagccggaatggggcgcctcccttccacgcgcccgcggagcaccggccttggacggcggcggggcgcacggcccgcgctcgaagcccccccgggggcagagggccgggctggctgggccgggtggcccagggaagggttcccgcggcaaaagatgccggggcgggacccggttccctccctagccttcagcggccccaggggcggagcctcgccgagctgaggcccgaggggcggggcttaaggccgcgcgaggagggcgcggttgccggaaattgaagagccggggttcagattctgactgcggcggctcgtcgggggagactgtgggtgtaaacggcctccaacctgcctccctacctgtcggcgagagaagagagcggtccctggctgcagcacccgggagccgcaacgctggcacagcaccgccttccggtttcggccctcggctgacactaactcgctcggctgctccgctggttccatcgccgctgccgccacaggctcctcagccacggctgcgcagacgctgtctctgctggctcgttattcactgcgctggcgcggcttggcagaggcggggcggcgagcggacggtcactatgtctctgcgcaggcgcccgcttccccgctctggactctactgcgcaagcgccttcattcattgcctaacctaagtggctaggtgtcggcaggctttgtgacagggacacttcttggcaccagtgacacatctccatacccacctggccactgggcttcacttaaaacctagacaaatcattaggttga

SEQ ID NO: 35592 - DNA, 1792 bp, Homo sapiens
tgtctcaaaaaaaaaaaaaaaaaaagaaacttcaattgaggacccattacctacactgaataatggaaaccacgcaagttatcgatggacttacacttgcttaagatattgaagctcttcaacaagagggtattcctactctacatctgtgaatgtccattactgttaaagaatcgatattggaatccaaaactttctgaaatgatccggggggaaggaaatcaaactgtggtctccaaaagtccacaagtcacaattaatctttcaacaggaaaaatgagatcctaaattctcatctacttctgtttgtagttggcattttactctataagcactatagataattcctccaacaactctgcaagacccattttacagaaaagcgggtgattcatcaaagcatatgtttttcaaaaagacttaagtcaacttagttgcaactctaggggtgtaaaaaggtctagaacaaatgtccatttactatgaagacagcccggggggtcttttatcgtttccgtgtcaaaatgacagtaccccggtgcagagtggtcttccttctaggggattcctgcctcaacactccaagtctcagcatatccttcatcctcacccttctgaagtgacctattttctagaactttcgttaacatctgaatggagggattccacttcgggagattcggggcagggaatgggtagtaaactcgggaaagactaaattctagagaaggaaacgaagtccttcctcctaataccaccaggcatatggccgccaccgccaggtggaggtatcggagaggggcagttcagggggagagttgagagggtgaccgaggccagatgccccaccccactgccagccttcctcctctgttgggcatgtctcccattccgccttgcagggagaccaaggatggggggtagggccataacccggagttgacggacaggaagggaagggctgactgccatcacttccgcgcaactcacctccgctcccgaacccacacagccgcaccgggcccgtccccagcctgtggggatggagtgcggcgcggggctagcaggcggctcgggaggagccgaagcgccgcccagacccggaggctctggaggctctggagccgtccgggtctggcccctgcggccgcgcgacgtgatgacgcaatgcagctggagcaccgccctccccccgctccagagtctgcgtcacgtgaggaggtggtgtcacgtgacctgtctgtaccctagcgcggggcttctgtacgctgctaggaagccgaattacaaaaaggtcgggtgggcagggaatggtggctcacgcctataatcccggcactttggcaggccgaggcgagcgaattacctgagctccggagttccagacccgcctggggatcacggcaaaaccccgtttctacaaaaaaaaaaaaaaaaaaaaaattagcccgcaccgcgcctgtagtcccagctactcgagaggctgacaggaggatcacttgagccaggcagcagaggttgcagtgagccaggatcgccactgcactccagcctgggccacagaatgagaccctgtaaaaaaaaaaaaaaaaaaaaaatgtccaggcgtggtggctcacgcctgtaatcccggcactttgggaggccgaggcgggtgtattacttgaggtcaggagttcgagaccagcctggccaacatggtgaaaccctatctctactgaaaatacaaaaaaattagccgggcgttgtggcacgcgcctgtaatcccaactactcaggaggctaatgcagg

SEQ ID NO: 35593 - DNA, 1519 bp, Homo sapiens
aaaatcgaaggcttgaagaccaaaattctcaaacagaagatagaatacatcaatcctagatacctaaggtaatgaaatttcattttcccccaaagtaccttcgattctgccccgcatttcagccttcaggattaccttaaccctgcagagcgatcaccaacctcccttcccaccccatcaaagtgagggcactgtcaggacttgacctgccaaagattgttggtggaggaaccttagggcttcctggcaacccaatgcggctgttccccgctgagaggcggttcgcgacctaggcccgcagccctccctccccacgcgcggcggcctcggggccaggcttaactctggctctctggtcccgatctggggaacccatgcatctccaccccgtggggctaaaggcgcagcactcacaggactgccgggagtcgggggacagccggggacgagcgcccaccgcacctaggccgcctcggaggcggcgcgcagtgggaggggccggaaatgtttacaacctgaccggctggatgcctggaggccaggcggctccttggctggggcccgagccccctggcaagtcggagcgggttcccccaacagctgtctcctccgcaggcctgggtcggggcccccggggtccccgcgctcccgccgagtccctgcccaccgcgcagcccctgggagacttacagccgggcaggcgggctctgctgggggccgcggtcccccgcgctacatcccgcggcgctggaggcggcctgcggccgagcggccccgatcttcagcgccctccccgcgccggaaggggcgcgcgacctcccgcgtcacctccgcagccgcgtcacctcctcgcgggctctgcctgggccctccaatcctaggccctctcgcggagtcccaatcacaggcccgcgcccgccggccacacctcccgccccgggccccgccctgctgccccgccttccctgccgcctgcccacctccccgccgcagccaggtaacctccacccgccccggggtagaggacgttcgtcggattctacactccacctcgttatcgcagcctgaagtgcgtgatggagaagaaatttcagagaatgagacagaacgtcgggagggaatgctgaattttctaccatacaccttatctcatctcctctgtccccaaggctagtcgtttcacctctgaaacacttcttaatctcttcttcaaccgcatggtccttccttcccttccacaaactatttattgagcccctaccatgtgccaggccctgggctagacctcagtctgcctcctgttattttcttatcagagagcagaattgtttctaactactcttgctggtgaacccgtgccccagttcctgctcccacaggcacctagagtgcagatcgcgagacaacatagggtagtgcagcccttgtctgaaccacacaacacagaaggggatttcagggtctggccattttctcatttctcccaagaatgaaatagtattattttattcccactttt

SEQ ID NO: 35594 - DNA, 1747 bp, Homo sapiens
ctttccttacccacaggcagccccagagtgtggtgggcggtgggcagggcaaagcggaacctcttggtgttgtggctcacagtctggagggtggaggacacaagtgtttcaccaagcgcgcctggcgctgccacgtcccttggacatcccaaccaccgtgggtgctgtaccctccatgccaggagcactctggtcccctccttcaccctggccctttcttccccaacttaccgtcttgtctagcagtcgtagcaggtacttttcattggggtccaggagagtgacctgaggccggcgggacctccgaaccaagtaggagcccacagccaggccgagcagagtgaccagccccacccccagggaggccagcaggacggggctctgtgggtagaggaggcagcgtgaccgccaggctgggtaagagcccggggcttgggtggtgaccgtcccaggggtggcgatcccgagctccagcgcggaggcatgccaagggcagaggggtaacctggcggagtcccgagcccggatgtgcgggatcgggaccccagcatccacggtgggcccagagccctgcggggcggggtcggcagcgacagcccctggtccggagctgagtggccagaaccagatggggaggggtcccccagtggaggatactgaatgagggtcttaccgtctggatccccatgacggagcgccttttcctccaccacctgacaagccgacagatcccacaatgcgccgcggggcgggtcggagggcggggcaggccgggggcggggccgggcaggaggcaggacctcgcggctgggggggcaggaggcggggcctggcgggggggggggggggtgtctgtcgggggcggggcctagcaggaggtggcggcggcggggccttttgggggcggggtccggcagaggcggggctgggcccctctgcgcgccaccctttccctccgctactcggtggctcagggtctccggtgcttattcaatacttttttttttttttttgagtcggagcctcgctctgtcgcccaggctggagtgcagtggcgcgatctcggttactgcaacctccgcctcccagtttcaagtggttctcctggctccgcctcccgagtatctgggactactggcgtgcgccaccacgcccggctaattttttttttgtatttttagtacagactgggtttcaccgtgttggtcagggtggtctcgagctccagggctcaaataatctacccgcttcggcctcccaacgtgttgggattacaggcgtgagccatcgcgcccggccccaagatcttttaagaccgcagctccagcctctcctcccagcgaggtggtccctgccacttcgacccgcttatatccgaactggatgggagttctgcctaaggtagaaccacgctaaattgggggattggaaatctcttgagtctgcgggtgctgagcggagagtgtaacgatgaaccagagacaggctcaaagtagagcagaagggcctgaagttaatcattgtgcagtcaccttagtttttcaaccggctgaattgcagcaagagaatggaacagcccagaggagtctcttacaggagtgaacagtggcatggcaacttcatttccttttgacaaaagactgattttgtttacagcgccaagccgtcagcctatcaggatgattcaggagcttcctttggtttcaaagaccaagcttcacatcctgatttgggttcttgtgccctt

SEQ ID NO: 35595 - DNA, 2260 bp, Homo sapiens
ccttcctgcctctgcgatagtttttcatggatgcttctagtagttttttggaggtatggtgtgttaggaacaaactgccccaaaaagcttcttggtactgccgacacttcccccaaacctctccgtgctgctcactcctccccctaatgctctgcaactcttctccttcccccaagcctctttacacttctaagtccttatgaagccagcagacttcacttatcagaccttgctgcaataaacaaaccccaattacaaatcatccggaccgcacaggggaaggtgatgggaagcataaacaaactttacctacaccctcctgtaataaacgtcacaagctaatatgtggcaaaattaaccagcaaacaaccccagggtctctctcccccatataaacccctcattttgtaagctcaggggtgcctcctctgtctgtggtggagcagccgtcaggttaataaacttcctcggctgaccttgggtctctctttcgtcctttctctcggctaaccttatatggtgatagattggaaacttttttttttttgagacggagtcttgctctgtcgcccaggctggagtgcagtgacccgatctcagctcactgcaagctccgcctcccgggttcatgccattcttccgcctcagcctcccgagtagctgggactacaggcgcccgccaccacgcccggctaatattttgtatttttagtagagacggggtttcaccgtgttagccaggatggtctcgatctcctgacctcgtgatccgcccgcctcggccttccaaagtactgggattaggggcgtgagccaccgcgcccggccgattggaagcttttaagaactccttctcctattttgagaattcagaaatttatttatagctttcgtaaaatagagtgaagactcttacagacctatgttagactagcaggcgctcagtctctgtggtccgagatagagcacgaagatgacagtgtatatgcattttggtgctgaagtggacctggagtgtggacagaggagttactaagaagaatcccggagaccaggatgtaaactctcaattctaatcaacacaggtgtgggctatggttctgagacaccattcatctcacacgaggtacggcgatacgcgacaccacccagtacaacagctctctctccacctggaacccggacccagcttgattcgcgggtgccggatgatgacgtatccttgcacctggcgatgattggttcgcgtggagaggcgtcgtccgacaacgcgactcggaacccggacctatgttctcgcgagagttagcggcctccggtgtgggatggccgcggagccgggcggagctggcttgcggctcccggggccggctctccggccggagacatggcccgggggcccggcccgctaggcaggcctcgccccgatacggtcgccatgcccaagagaggaaagcgactcaagttccgggcccacgacgcctgctccggccgaggtgggcgaggggggcaggggcgctgaaacattttgggggctggcggctgggagggggctggaccgtgccgaggtgagcgctcgcgtgcccgcggctggagggcggctcggtccgggggcctgcagcgaggaggaggtgttggcggggaagacgctgacgagagaaggcctcttccttgagggttggtgctgtgttgcagtgaccgtggcggattacgccaactcggatccggcggtcgtgaggtctggacgagtcaagaaagccgtagccaacgctgttcagcaggaaggtaagctttgcgcgagcctttaaagactcatgccgcgaagacagaactaggtattttatttctgtttttcttgcagtcctttagtcgtcttcctgtaaccgtgtttgctttcgttagtgttaacttacatattggggtggaggaggattagtcaagagtagcagtttctgtagcagaaatattttctttctttctttgcatttaaaaacatgtttgcatactttttagtttccactgcattcttcttggttattaatctctttgctgtagttcacatgttttactctgcagtttgcttccttgtttaataaccttggagtgttcttttccttttctggtgtttctcttgctttcagtctgtttactcatgggtctgagacttgtgttttatgacacctactgcctccagctcaggaccaggattaaattggattcaatttgtctcaaacatttctctgtagaccttatgagaata

SEQ ID NO: 35596 - DNA, 545 bp, Homo sapiens
tgagctgcatcaagttgcctggggctttgtttatcctgagacagacagccttgctcctggagttgtgaatttctgagcattccatccacccattggtggggtacttggcaccagtgcctggagccctgggagtgggtgctggcaggatcagttgtgcttgtggcgcctcactccctgcacatgctgctcctgggctcgagcttggggagcagacagtgcctcctgactggttttcctttagctttgatcttgctggctgtccttgccagggcttggctgccagccttggtggttgatagccaacctttgacctttgacatccagccttccccctcctccacatgtgctaaccacagtgaaatcacagatgcacaaattatcagaactgggaagaatcttaggccaactgcatcattttaaagaggagaaactgagaagtagggaggaggaagtccttgtctaaagtgacagatggcagaatggagtaagccacattggactttagcagcctgcctgccttgtcttcaagagccaggaaatattca

SEQ ID NO: 35597 - DNA, 990 bp, Homo sapiens
aactctgatggattaaccttggctagcccagatacctgtttgagacgccttcacacccattctggctgcagcagagcagggcagggtgtggcctcttcccttgcccacggctcctggtgccagctacctagacagggcctcttccccaggccctgtacttcctttatatacctgtcccactccactccccgacgcggcaaaccagcccttttatgggaactgagctatgtgtcaatgaaggaatcacgaggctggcaagtggaggcgggggagtactatggattaccagaggagggttgagaaaccgcagagttttgaaaactttgggtcaggtcttcatgaggcacctgccagcagaagagccactagggtgatgatggggggcttctggagatgtgactcagccgcatttcccagccttcctcccactcctgcaccccaccactggcctttcttgccagcaatttcctggcttttctggcagcctctacctttgcatcttcagcattcactccaggcccctggccaggtggaaactgggcacaatttagttacgtaagccacagtgccctaaacaaggctgttgttttcttcccaggctcagcattgccctgcttgacctaccttcctaccctccccctcacactttctgtcttcaggctgggtaagggccagagagcctcgggaggaaggaaagcaaagagcctgaaactgagcgctcccttttgggcccgtgtctttttttttttttttttttttttttttgcaatttacatgctgattatttagagggaaagacagggaaattcccaagaatgctttaagccccggtgctattttgcttctgttttgaaattcccataaagagagaggatcttttgcaagctcggtgctgcagtgaggcaccatggaggaaatacaggccctacggggcggctgcacgagcatctgacatcagtcagctccccaactctctcagtgaggctttgg

SEQ ID NO: 35598 - DNA, 499 bp, Homo sapiens
agaaaaacatacagatcagagtcctgaggagaccaagattacgcttccagtggtcctctcccagtggagttgtacgggcaatatttatttcccccagtaataatatgtgacaatacgttggaggtattatcaacaagggaagctcacctgagccttggtatcagtcacatagtcatgtaatatccatgtgactgaccttaggtactcagtctccagccgctacagaggtcaaattgatacagcattgcacaagactttcacataaactacattgttagcataagctatctggcatggcccaaggccccagatatgcaaagacaggcaggatatcccaatggtgtagaggttaactgtcagaagcaggtcaggagccagtgtcttctttgcaatgtgcagcctgcttagttaacttttgctgcacaggcatctagatgccaagaaaaaaaaaaaaccaaacacagatctagcatgttttataaaagttagctcaatatga

SEQ ID NO: 35599 - DNA, 2510 bp, Homo sapiens
gtgtggaagagggagactgaggccagattctttctcgagaaggtccaaaccacaatgaggaaggaagacggctgggggaaggagggagtggacggaaaaatacgtacagttgagagcagaccactaattcaaaaaaattagcacttaaggaaagtgagaactagaaaaataagttgagaagacaaaagtcttgcaacacaccccctacccctacccaccagaaaacttagacttgaatggttctcagcaagagaaaagacattgctgtagaatggaacttgttgtgggaggtgggattaccacggaaataaatagaagacagcctccctttccaaagagccaaaaggaacccatttcgtctagttaagagacgaggcaaagcggtaaaatggtgacaacacgtcctggtgagtggttctgaccgtgaatggttggaaaatgctgtgggaatcagaaaggggaaccgtctgggagaggtggtgtcaccgaaggcttctcggaggaggtggcctctaactcgagccttaaaaatgggcgaagaggcgaggccggggcctgccccgcgcggagtactcgggagccgcctccctcctttcagagctctcagtcccgtccccgggcctcgctttctcctctcgcctcgctcagctcagccgggcgcaggttcctagcactgacgacagcgagcgatgacctcagcgccgccaaggctgcgagggcgggggctggggtggcgggggcggggaaaagcgccggagcggggccgagcggagcggctccgggccccgcccccatcctctggccgcgaccaatgagcgccgccgccggctgcccccctacctccctggacctcctgaaaaacgctgcccggggaaagtccgggcagagcccgagcagcggccagggtaacgctgtcttgtggacccgcacttcccacccgagacctctcactgagcccgagccgcgcgcgacatgagccacgggaagggaaccgacatgctcccggagatcgccgccgccgtgggcttcctctccagcctcctgaggacccggggctgcgtgagcgagcagaggcttaaggtcttcagcggggcgctccaggaggcactcacaggtgagcgcatgccgaggggcctggcgccaccgggggtcggccccatccctgccagggccgtctttcttctactcctgcggcagggtgacccacgggagcagctttgggactcggtggccctcctccgacccccggggcggcccgcagtccccagtttcctgggtcctcctccccagccctgtgctcgggtctcggccgtggcggttctgatggggcgcgcccctctacgctctcggaggcgcagaccctggtcctggagtgccagcccgagtccccagcttatgcccctgtctcattacgggctcgtctccctcgctggaccctcgagatcttaagaccctcgatggatgttgttgcgggccgcccggtcggccgaggggtcccgatgagggaagaaggtgcagtcgagccttttcaacaatttggagtcccagtgcggttcttcctgccggtcggggtgcgctgtgcctggggtagtccactggttgctgactggcttcaagttggaatttgggccccctttgtgttatctttggttccccttagccatctgccacctattgtggtagggaggagagcctcgtagctcgtgaccctgccgtgcgggccttcaagttgggaggtgaagagataagcagcccgctcgctggctggggagagacctctctcccagctgtttctagctggttactgtcagttttgggaagcgatagccatctcggaacgcacccacacagaccctgccttctgaggaaaacagatgtttcatcaaaacaacccagttttcactcccttaggcactgctaaggaaggttctctgactcttctgaaggaagcagagggaacacagggtgggaggtccagtgacttgctgtggacccaacaatgttggcagccttcctggccctgaaacttcagctcacaggtctccagaggccctgcctggacatgccagtcccagtcacacccttcccttgctttgggggtgtgccaaaagcaatacactggccactagagagtaccctagagctctagaatcccctcccaacacgcacacacacacacacacacactctctctctcacacacacacactcagtcacacacacacacacacacacacacactctctcacatacacttgtcctggaagcaggaaagtggatctttccagcttccataaaattttctctgctaagtggaaagagggtcctagaactcagaggaatccacctcccttacttaaagggcccctttctctcctcctgtcccttgaccctccaccccgccctatggtagtatccatggcctagctgctctaaccagggcatctgcccctggtcctgtctccacagagcactacaaacaccactggtttcccgaaaagccgtccaag

SEQ ID NO: 35600 - DNA, 3995 bp, Homo sapiens
gaaagtcagaagactgtgtgatttttttaatacaggagcagaggaggaaattttccaaggtaaataaactttaaaggaaagtgagagacaaaataaggcacttcctgattatagcccttgagtactgtgtgtacaccatccaagtaccactccatatccaccaaatgggatctgtgtcctgcttcccaccttttccctaattgtcccctgcaaacactgctgcagaccactgcctttccctgtcagagttccatccttccatcaaagacagccttttccttgtctgcagatgttggccaccagtggttgggtcctttatgtcttagtcccacaaacccacagcacagtcccagacagaaaatcttgttagagactgagctatgttccttcaaattcatatgttgaagtcccaactgacagtacctcagaatgtgactctatttggagacagggcctttaaagaggggattaagttaaaatgaagtcattacggcaggcccaatccaatattactggtgtccttagaagaaaaggagaccaggaaacggacacagagggaagatcacatgaagacacaggaaagagacagtcatctgcaagccaaggacagtggccttggaagaaactaaccccatgaacatctccatcaatatttgctgaattgtttttgaataatacaaatcttaagtatcatttttaattttttttttgagacagagtcttgttctgctgtccaagctagagtgcagtggcacaatctcagctcactgaagcctccgcctcctgggttcaagtgattcatctgcctcagcatcccaagtagctgggattacaggcacataccaccacgcctggctaattttgtatttttaatagagatggggtttcaccatgttgaccaggctggactcgaacccctagcctcgagtgatccgcccacctcggcctcccaaagtgctgggattacaggtgtgagccactgcacctggctttaagtataatttttaatgtcttcccaacacttcattatatggccacttcatattacatttaatcaactcctactgttgaatttcagactgcttccaaattttccctagtttaaagaatgcctctatgaatattgttgttcagagtttttggtgttcaattgaattatttccttagcataaattttcatgagcaagattacttgtcaaaagcaagactatgtttatggctctctaggactataccaatctgaaacattatcagcactgaatgagttcacccatttcctgagagtcttaccagactggaatttatcaacttgaggtcactgtagtctgacccagggatgctgcttcttttcacctcttgggtattgctcctatattcaggggtctgcccatccccgttgccaacacaaactacctgcccaagttctcatatgtgtctaaatcctgatgaaagtctctttctccaggaaacctgccccactttattcggcagggctctgttctttcctatattttcccttccttcacacactaatctctttggattacgcaaacccccaagttgttgggcaattgtgtaccagagagtagagggagatgagaggccttaccagaaagatcctgaaattcttgctgataagggcacctcaggctcaaatgttgaaatgagagaagtaaaagagatgtcatcagattgtacctaagctaatcaagtgagtcatggtggttgcaaagtttggccgggcttactggggtagaggtgaggaatgggatgaggggaggtggtgccaaatgtccagagtccaggttgccattgaaaagtgatcatgattggaaccctgccgggaaggcagagacctgatagcagagggtttggtatcatgctaatgagttcagattgtcactggaaagacacagggggccatgaaaggctttgaggcaggtgagctgatcagtcttagacttttgtatagttgagataatgaactggcaaggagggatatgagaagcaagaaggtctgttaggaggttgtttgtatttctccagtggagagatgcccagggcttgagctaggatcttcagctttttaatttgtgtttgtattgtctcctcaataagtgtggcaggcaggactcctggggggaagaactgttttctgttccttgtgtctctcccaagatggtagcaccatgcttggcacacagtgctgtgcacttaaaggcttgtgaatacgcagagccctttctggggtggaaatatccagggggtgaggcagccactgttcctctggcttcagggagcttccagtctgatgtgagagatctagaaaccatggatcatcatcattcaaaaggactttagagagcatctagtcaaactccctcactttacaaacgggaaattgaggctcagaggaagaaagtaacacaagattggaatccagatctcctggctcctggtcaaggaaagaagccatctcacagcatttttcatgaaggagtcatggtccctgctcttgggaagcttccatccaggcagaagaagcccagcatctagtcagttgtaggggcagaatgcaatgtacaggtgcaggcacagacatcagcacttaggtgggtacagatacaacacaaactgtagagagcagatgggtggggggggtaagcagtgatggaacatttactgtgagccaggcactgcaatcatgactttcaccaaatatgtacacagtcttcaccattcatgaatgagttgatatgtttacccacgtccacgtaaaagatgaagaaaccacagctcaggctgataagagtcagagccctggctcaaaacaggactggccgctgccaaaggccttctctcactagggctccaagctgcctctgctgaaggcgcacagggttgtagggtgacaggatttgatgtggtggctgaagttcacttggtgtggcagaactgggaaataaaaaacctgtgttgatatttcctttctaaccctaccacatagcaaccatgggacttcagaaaataatgaaacctctctcagcttcaacgttctataagatgaggttaaatctgccctgcctaacttacagggtggttgagagacttaaacaagataatgtgcttaatgtgtttgtgaaccataaagaaagttctgggacagtgagagggagcctgagatcgggagcatttcccgaagactggtggctatagcatcgcagggatggagacaccagttgcattgaggtggagcctgcattgggatctctgagcaggactgacacagagccagggtctgtgctccttggctctatttttcatgcagttaagtacccctaaaaactaaagcatttgccaaatgagcaacttccttgggagcatttgctacccattgtttgtaacaagcctctggaagccagaactggcttctccatcagatacagagatcatggcctttggctcagtattcccagagttcccaagaggaaaaaaagacaccacgagtaacattggggaagtgggagcctagagtaaatgctggctgggccacctgctatccatgtgatttgggaaagtcaccataccttctggaaccccagattcctcctttgtaaattggcagagctctagaagttctctcactcaatgggatcgacactagtggtaagtagtttattttaaaaaattagttaaagccagacatcataaaaaatgatatatatttactttaaaccttgagtttcaacttaaaatagctaaatgcacatgaatacaggtcaatcctttgatgtaaggctgggccttttgggtttgctgattagaatccaagatggtttccttccacaagccatgccagcaatgcatagtcaatgatttcctcaaaatgaaaccagagcttaaagactcttaaaaataaatagaaaagtaaaattcttttagatgcttatgacttcgttcccaatatcccaatattttaccattgtctctcccac

SEQ ID NO: 35601 - DNA, 2551 bp, Homo sapiens
ttcagacatgagtctgaacatggcctcagagtcctcaaaacaggtgcgtaaagtgatcctatcagtataaaatagtaagacagaattatgtacagaggaggagtgcttggcctggggagtgggggtgggaattccatgagtgtttccaggagaaaaaaagaagcaaatggagcacagtcttggcagatgagtaagagttggcggggtggtgacagcacggaggcatggaaaagcaaagcaggagactgtcctggaaattcaggcagaggccggtggggcagaggagggccttgtgtgtctgccaagggttggctcaccatcctgcaggccaaggcagctttcgggtgaagagtgcttcggtcacctttaacatgggtgttttgggctgcacggtgggctggaaggctggagagaggtcagaaaggaagctgctgcaaacatccagaaggtgatgatggtctgagcaatggtaccattgggagggcagaggaggagagagcaggattgagaaaaattggaaagggaatcaataggaccgagttagtaggtgactctagagggcaaccgtaaggaggaggaaagaggggcatgaaggaatccagcagactgacattgtgttctctgttggagagatctggaagtcagagaggatgaagctgttcaggagacaggagaagagtaaaatctttttttttttaaccttccaatggccagatagagctgttgggcaacccctcagctgagatgctcccctgattggagactccctagctccagctgcttgcaagctcaggcaacatcctgcagcctctggaggatttaattcaattcaacaaatgcttattgaacagttactccacatagggaaaggagaatctaatgatgattgagtacttaaattgtgttcacagagtgttaagtgcatttacatgtaatctcatctctagtcaccatcccctcatccctgagaggccaagtcattaccctccaggggcctgagaggtcgagtcatttgtccaagtttgggtggtaagtaagcggcagtgccaggaggcaaacccacaagtagtgccttatcactaagtcacattgttacacaatgaagccaggaggttgcaagtgacgaatacactattttaagcaaatcaaggaatgcattggcttatttaactaaaaagcacatgagtcagctggctccaggcacagctagatccaggagctcaaaagatgctgtcagttctctcttgcacttgctcataaatgagtaaatccatctcactcccatttatgttcatcttggctcatccataaggcagcatagcacgcagagcatagcatgactgttttggagtcccacagcctgggttccaatccggactccaccacctaactagctggatgatttcagatgagctgcttaacttctcagtgcccctgtttccttgtctctaaaattgatataataatattacctcttaggatttttgtgaggagtaaattagatcgtccacacagtgtgcttggagcagggtctgatacaaaatccgcaccccaacatatcagccattgttctttccatctctgcctcttttgaggtgggtctcattctctcctatgttagatgccttcttccgtgtagcccagagagatggccccaagcaaccccaccttacatcatcctttcagcctctggtctcaggaaaagagctctttctctgtgtatggaggtagcatgcccatccctgcagccatctctgaggccaggggctgcatcttctgtgctgctctgtggaggtggaggtggggcaccatgactcacagccccccgtgggtcatatagaagtagaagaaggagggttccttaaaagatgggatgctgtgaagacaaaataacatatgtccactgttctgtgctagttgccgttatgacagagtgtgacaaaaagtgagtacggcagagtctcctctccatgaaaacttatatcaaagtaggaaagacgagacaaggacacatttatccagaaggcagactgtgacaaactccatgagagaaggactgttaagatcccctgcaattttcaggaaagaaaaaaatcacacatggttgggtgaatcagtaatgagtttgatgaaggagtttggctcctggggatggtgtccattcagcaagtacaatagcgtaggggaagaggaccttctagtttgatagcatagggtagaaaaaggaatcctgagcaatgaggctggaaggcagagctggcagcagcacatgcacagaaagcaggcggaggtcaaggactgttaactcaggggactagaaaagaaacagccatacacagatattgaattatcaagactgaaggcaggggatgcatgatgtggaagaggctgtgagtcagatgctgaggtcatttagaaagttctgggccgggcttggtggctcatgcctgtaatcccagcattttgggaggccgaggtgggtggattgcctgaggtcaggagttcgagactagcctggccaacacgatggcccatctctactaaaaataca

SEQ ID NO: 35602 - DNA, 842 bp, Homo sapiens
agcttggagcgaggccctggtcccctgggttttggcagctcaaggacgggcgctcccggggaagctgtgctgagaagtcggctgagccactgaagccacagggtttggtttcagggaggccaggtgaggggcagggtgagaactgggagggttccccaggtgtgttccccgggttgtggtgtggtgtgatgtggtgggggacaggacgagggtccctggggagggagagaggtgcttggctggctgggtcgagtgagtcatcggccccctctgagcaatcgctgctgcccaggtggagtcggcccgccttatttggggcttctgtgctgagccaggcctccagggctaaggcgtttgtttccccagctgcttcccgggccgcgctggtagccagctgagcccggcgcctgcggctgagttgcaccgcgcagaggccgggggagctgcaggtccgaactcggccggcccggggcgagggcgggcggggagcggggcgggctagggcgagcgaggctgccacacccccgggactcgctggtgcgaggctcagcatgccggctgcggaagtcccgcacagggcagcttccaggcctcctgtccctagagcagtaaatgcagatcagcacttctgcccctcactgtactcccactctcatccccttcctccctctaccaccaccaaaaggccagaatttttaagttgattgatatttttttattaggataataaagtcagatgcagtatattgtgtatgtttttttgtttcgtgttgcgtttttgtagagatggggtctcactgtgttgcccaggctgctctcttaattcctgggctctagtgatc

SEQ ID NO: 35603 - DNA, 446 bp, Homo sapiens
gtcactgcgcccggctacatgctgttttatcagcaaggcctttgtgacctgtatcttgtgccgacctcctatctcatcctgtgactaataatgccttaacctcctaaaaatgcagcccagtaggtctcagacttattttacccctcccctattcaagatgcagtcactgtggttcgaacacctctgacaccgtcacacatttatgtcccaaattcacagcagcaaggagcacctaagagaccttttcagatggcccaattaactcctgtggtcaggcactgtgctaaatgccagatatgcaataaataaaacatagcccctgccctcaggttctcaaagtctacttggggagacaaacatttaaacaaataactccagcgacttgagagatgctctcacaaagatgcatgcacagtgtgatgggggcacagaagaggaaacccagg

SEQ ID NO: 35604 - DNA, 877 bp, Homo sapiens
atagtcccggctactcaggagactgaggcaggagaatcgcttgaacctgggaggcagaggttgcagtgagccaagatcatgccactgcactccagcctgagcgacacagcgagactctgtctcaaaaaaaaagaaagaaagaaagaaagaaagaaagaaagaaagaaagaaagaaggaaagaaagaaaagaaaagaaagaaagttgtataaataagcctaaaactcaaggggacaaaaaccttccctgttaaatgccctggtttctaataattgggggtagcacgtcagttcctgattcccgctgtaacttcagttggcagcttcctgttgcattaggcatagccatctggggttgtaatcatctggatgcatttcaacacccaagcaaaaccgagcagtgacgccagccctgccagggaattgcaaggtagcacagaacatgaattggttaaacttcacacaacagcagtgtgttgcttggagaccagctccacaaattggtgcgggggggggggcggcggggggtggggggtgttattcaagttcatgcaagctggactctgtcacagagccactccttaactgtacgttggctaatcctctcctccaagcaagccaggaagcccacgagtagggaacaagaaggggcaaggccaaatgactttgactttgcaggtttggaggacagtgtggcagagtggaaagagcatggtctttggacgcaaacagacctagattcatattccttctctgctccttcctacctaggtgatctctgacatgttactttacctttctgagtctaaagctcaggttacttggccacaaagtgtgataggattgttaaagattaaataagtttcacaggccgggcac

SEQ ID NO: 35605 - DNA, 1813 bp, Homo sapiens
ctaacaaatcattctacattgcatgcttaggaaaagtacagtttatttctaaattaaatgtatacatggtttgggagatttactcattaagcaaacactttggtaagaataaattgagcgcttactgaatggcagtctcagttcctgcggccctcccgcttattacctcatttgatttaaaaacaaaaacaaaacgttatgaaagccggcttcgaggcattcctctgaagggaagggactccccgacccagcgcctcccccgtcacgtgaccctgtgacccggagcagccatcttaggcatcgcctcatagaggaactacatcttccagaatcctcgcgccctgcgtcgtgctggcacttttaccggccgggccttagagcggagcctgtagccaggcgccatctttgacgctggcagtcttggttttctgctagtgctgctgctgctgggaggacgacggacggcagcggccaagcaagaagaaagacgtggcagcaagcgggagtcggggatagtgtcatcggttcggtaaagtttctgttctctggtaactagacccgtttttttgattcccgggtggcttggggccggggaggtgggggagagggcgaggggagtggcagcggcctcccctcgcccctgggtcgcggcctatcccgggaagtcagagcggatccttcagcttcgccgtaacgacccctcccccccacctcccggtcgcggccctcgccggggctggctgggagccccaggctcccgctcacttttcccatcctccccacccccaccccgttcaccccacccccacggcgcctgctcctttcccagccaaccttcctcccctcccccacatccggtgttcgctaatctcgaggagcccggagcagccccgaaaaccgactgttcccccgaatcccgaagagagaactgacactagattgctttcttcggggcaacagtttctctagttgagcggaccctcactgcctaaatcaatcagactgagtgccgggcgctgaatttacctactctcattcctctccagggtcccggtactttggagcttgtctcaaactccacatacagaaagccaccgaccttattccggtatcctacacccattccccactctcattacactcccacccctggccctcagcgtcggagtcaagagcaacagggacacttccgttctccttgtaggactggtgaaaccgtaatgaagaacacccctaaactcccataatcggtgcggattcctatggggaaggcctatattgttgacatcttccaggccttggttctggaccttgagaaagaggctgtggaactagagatagcgatgctttttagggtaaatgtatgtaggtattgggggaaggggagggatcaatcgaaaaatggaagtggtttaaagttcatatttcactttttgctatctctatagcgtacaacttgtgagttacttacaggctgtaaaagcttctcaagtctaaaaatatctgaaaactaaacttgaattaactcttaatacaaacagtactttgaaaatgcagcatttaaccttgttttaaaatttttttctcaaagcatttttttccagccactcacattttaaaaggttgtattacttttagttagaactgaaagggctcaactagcatttgctgtgaccagtatgcggagtctgtgttggctttccagaattgactttttgggttgtattggcaaatcacagtcctaaatgatgaatgttgaatgatgcactatgtttttgtttaaatgagatttcctgaaaatagttaatttcag

SEQ ID NO: 35606 - DNA, 488 bp, Homo sapiens
gccaggaatcggaggttgcagtgagccaagattgtgccactgcactccagcctggtgacagaatgagactccgtctcaaaaaaaaaaaaaaaaaaaaaagtgctggtagcttcaaccttggtttcctagacccctaatcccccatataagaaagcataccacccttctagagaaaccgtgtggtgagggctgagactacatagagatagggacccagctgaggccagtcttccaaagatacacaccaaagccgtagatatgtcttgtggagcagaagaatcactcagctgagaacctgcccaaattcctgacccatgaagtcatgaattataacaaaatggttgttgttttaagctactaagttttggaatatttcttacacatcagtaaagaccagaatagcattctttttcaggaactctacatattagtaaaattaatcatttttcagatgtaatgcaaacatatttttcctagatgttttgact

SEQ ID NO: 35607 - DNA, 2837 bp, Homo sapiens
gattctcctgtctcagtctcccaagtagctgggattacaggcatgtgctaccatgcatggctaatttttgtatttttagtagagacaaggtttcaccatgttgcccaggctggtctcgaactcctgacctcagttgatccacctgcctcggcctcccaaaatgctgggattacaggcgtgagcctggccgctttgtgtagtttaaaaatcactttcaactcaacccctttctgaagtcgttattactattatccccattaaacagaagccctcagaaaagctaattttgattctgccatttgccctaatccgtgttcccttaggcaagtcctttcaaaagtctaaacttcagtttcctcctctataacatgtgtatgccaattaagtgaaatctctgccaggccacaagccatgacacaatggaaaggtaggtggactttggggtcaggcacacctacaaattccagctgctccacttagtagctgtgttatccagggaaggacatgttctgacactggctgacgcctaactgtgtgcacacatagacaattatttcattgaatctttaagcccctgagtaaagttaatctttactataatctccgttttggaaactaagccaagacatggcgaggctgagtaatttatccttggtcaccaactctaaaagagctggatttgcgcccagcatgtggatttcagcgtcttcctggtaaatcgccaccctcagttgccacctgaacagtaactctccacgaaatggatgagaattgaatccgtaactggagggaaccaggcgtctggctttggaatgcagaccgcctctggccgactgccagaggtgggaggcctgaagtttgggctccttgccgccctaccctttccaccacaacgctgctatcaagcctaaactccagcaaaataggctttaggaaaggcacgaaattaactcattttacacatagagatacacactgggacgattttggcttttcaagctaactcagaaaatggagatacaggccgggcgcggtggcttacgcctgtaatcccagcactttgggaggccgaggcgggcggatcatgaggtcaggagatcgagaccatcctggccaacatggtgaaaccccgtctctactaaaaacacaaaaaattagtcggacgtggtggcaggcgcctgtagtcccagctactcgggaggctgaggcaggagaatcgcttgaaccctggaggctgaggttgcagtgagctgaaatcgcgccactgcactccagcctgggcgacagagcgagacttcgcctcaaaaaaaaaaaaagaaaagaaattggagacaggacggcactcctcctaccacggccactatacaaccgaaggcacctcctcccgcctccctccaggtggcgctgtaggaccggcccaccttccacagcgcagacgcctcagtttggcctccctcggaggccatgcagcgaagaaacgtgacttcatggctagaggggcatttcccaggagccgcccatgccgccgcgtgaccttcacacttccgcttccggttctttattccggaagttgctctcagaggcagcgtgcgggtgtgctctttgtgaaattccaccatggcgtaccgtggccagggtcagaaagtgcagaaggttatggtgcagcccatcgtatcctacgcaggatgtcaggactaggaggttcgggtcagaatacggggtgcgaaggcgcaggctgagggcaggcctgggatagtggagtacggatccacatcccatgagcccccggggctaccaagactggaagaaagcgcgggtagttgaaccgtgatggtggggaggtggtcttggggggacccctgccgtggggaatgcaggaatggacgcggcaaaaggagggaagagaacttcaggtgcggagtgaaaacgggagttaacggttttgggaaactccagggggatgaaagtggaatggatgttctttagtctttagaagacccgtaacgaatgcccagctgggcacttgttgtttgcgtaagcaccagacctcgcgtttagtaaacaaaggtgagacgggaatagcgtcgtccggttgtttcaggaagcagagtctatgctgcttttgtattttttccttagccactgtggtgcagaacctcatcttcagatacttacaaaatgtacgtaagttgcttgtttcgtaactactttttaaataagaggtgaactgatttagttttttgtgttaacctgagcgatcgctgtgttctagaatttaaaaatagatgtaactggagattggagggtaattgaggggaaggagtacttagaaagcactaatgtgatgaagtggtgtgtatccatgccacttcccaacatgcaaagaattgtatccattactttgcaagatcaaaaatactttttaattccaaaaagtattattagcagacttgaccatggtatttgggcatcagtagttttgttagtagtgattatggctagaacattggaacctctcccctttaggatgaaacattggaagaaaaacccagccaacttaaaccatgtcaagaggtggtgtgtttaatacctgtgggaaaacttaaagacgaaaaaaggaagagagaaggggtagcttcagaggagtttagtggcagctgctttcctttgagggaaattttagcaacttaaattttatagtgtgataacacaactgaaaaacattaatttcaggtgataataattcttaaccacctgaattgagggctcctgtcctagttgttaggtgtgtgacatgagaaggctttgttttggaactggattttgctgcaggagat

SEQ ID NO: 35608 - DNA, 3102 bp, Homo sapiens
tccttctttcttctcttctctacaccccctcactccacccccacccttccccgccgcccgtaaaccttagctttcccctttccaacagaggtttccagctgttgatgcctggatggacccggctgcagggaggaggaggaaactctctgtccctcccttcttctgcaagtccccaccctccctccctcctccccctgcgcgctctcggtctccctccctctttctcctctaggctgtccagtcgcctcgcagcagcgagccgcgagcgcccttctccagtcccggcttggaactgaactgtgtgagcacgggtcctggaacccgggcccagaaccggcgagcccaggtctgagcccagagctcagcggtcagcctcgtaggccctgactcggaatcgagccgaggcgctgaggttggagccggagagcgtgagagccgaagagcagggagggcgggccggctgcgcgtccgacgagtcgcagagcaggaccgcggaaggcagggagacggccgcaagcccagggcagagggcagagggcagagagcggcctggctcggcggagagggcgccgcccggccggaaccaagctcgccgcccgggacggcgggccccgtggggcgcggacccagggtggccgtgggtccgcagcgactccccggccgacggcggggggcgtgccccctcccagcccagcctccccaacccggcccgcccgccgcgtcgcgggggcatgtgagcgggaagcctaggctgccagccgcgaggaccgcacggaggaggagcaggagcgcggagccgcgagccccgagccccgagcccggcgcctggctgagtagtaagtgcacccctccccgccatgatcgcgccgtcgcgcccatttccccagctctctgaagtttgacacttgcgcccctacgtttctgggcacccaccggctctcttccctgcgagtttccaccctgtgcaaagtttttcgaggagagacggaccctcacctacccccaacaacgctgggcagtggcggctcctccctggccgacttgggtccttgtggagagggatggcagcctctaaggcagtgcgtggctgtgtgtgtgtttgtgtgtgtgtgtgtgtgtgtgtgtacgcgcgcgcgcgcgcgcgttcaccacgcgggtcgagcttagggtgcacccccaacccgctcctcgccgaccgcagaggactaggtctttctcatcagcccgactatgcgcctagtttaaggatttctcagcgggaagccgaagcgacctgcgcgcgtcctgcgtggggctcaggtgcctgcgacgaggcgcagagctcctccaccatggttgcgtggggtgctgggggacagacgcgctccccttgccacggtttcagggtcgttccccagcggaccagaccagcgcggcatcctgtttgttttctgctccggctgctcctgtcccacccccacccccaccgcaggctgcttcttgctacccccacctcccgccctgggatatcgtaggtgagccttttcatcccgattccgctgcaaacgctgatcgcgcctaggggtagggagatgcggagcgggtagtcgttcagttcccagcggctcgccattgttttcccaccccgcgcgttccgtacgtaaacacacacgcacacacaaggttgtgtgtgtgcgccggctctggctgcttcccgtccccaggcgcgcagggatcgcccgcgggattcgctcagctgcccgcatgggtcttcaggctggaggcgctccaggacttaactggagctggagaggacaagagacgtgggggttgccggacagtaccgggcggggcggtgagccgggcctgggcgggaagtgaattttgaacttcagccctggacctttccgggaggaccccgagcgctggagcggcggctcccgccctggagggcccgcggcagctgcaaagactccgctggcgctcttggcagccgcctcggtgacagaggcttggaggaagccgaagagttttcctgggaagtttgctttgactctctgggaatttccgggcaggacgcctcggcgctggcgctggcgctggcgctggtgaaggggtctggccaaagacggccagagacgatgctgctggctcttgaccactaggctgtacttggctctcagcagtccaagtaggtgggtctctacctcccggagttcatgccttccaaaccagtatcccccaaaggatcacgacatgccggtttcaaagatgggtgcataactctgctcgttttggagtccagggaggcaagctcggttccagccgggcggcgctctccgtcgagccaggccgctctctgccctctgctctctgccctgggcgtggggctgtctccctgcctaccgcggttgtgctttcggactcgtccgacgcggcgccagcccgctacctcccgctctccctctcccccgctccctggctccccggctccctgactccgtaatctgcgcctcggcgcagttgcgagtcagggcctgaggctgacccctgtttccactgtgcttcattagaaagcgcttcacaagatgctgggattcagcacatttggattccagttccccatcgatgagcagcgtgggtttggacttccccgcatgcgaaatgggcagagttatgcacccaactttgaaactggcatgtcgtgatcgtttgggggatactggtttggaaggcatgatctccaggagggtagggacccacctacctctggatcattaagggccaaatatagcctagtggttaagagtcctggagctggagttagatcccggatgccactggcggtgtgactctgggcaatttaacttaacctctgtgcctcagtttcctcagccataaaatagggttaatatgaacgcttcatggggttgtcttgaggattaaaagacttaataaagtgaaactgagaacagtgcctggcacataataagtgctaggtaaatatgagctattattgccattattacttaactgaccttgtacagagcccagaagagcacttggtgattgtgctcaactaatcaattataacattgcccacttctggagaggaggagatct

SEQ ID NO: 35609 - DNA, 837 bp, Homo sapiens
caggcccttttggtcacaggaagtctgacactgggaagtcatcaaatttggaattcagttccctccactctccccccagcggtggccttagcatttaaatagccttggcatgaagccctataaactgcccaagggattggggcagggttagggggaggggtattggtgttacccccaacattgtccccctgtgtcttctggggacatgtccaagctagggtgtcagtgttttggcttgagaggagagaggggaaggggccacagactgggcaggagccctcctggctcccctcccgctctggtggttttgatcgtaatccctgcctgccaagcctggagctccctgggggatccgccccagaggaggcccgactgttctcctcccctctgccttacctcccccagtccccgccccctgcttgactcagaatggaatgtgcagcctgtggaacaagatggggtgagaactagttcccagagggccttggtcccgcccctcccatcccccaacaaagggggtgaggaacctggaggcagggcctgctcccaggtatggctggtgtttccctgatgcagactcaggtcctgtgctgagttggtgcagaggcaggcaggtgctgtgggggtccaggactagccatttgaaggttttcatataagtccaccatgcggggcaggtgctgagttagagaaagtgcagcaggcagagcagctccaactccagcttctgtagctgggggtggtcaatatcctttgttgacttttttttttttttttttttgagatggagtttcactcttgttggccaggctggagtatgcaatggtgccatctcag

SEQ ID NO: 35610 - DNA, 661 bp, Homo sapiens
acaaggtggccaggggctcccagagctcaggggccttattcagctacaagtcgtgtgtgcaagcacggggcagcatgggttttggtgtgcactaccatacgtgggggccctgcctgtggtgtggtgctgtgggttcaagcaggacttgggcactctgtggtgtgtggcccaagctgccaggggattgaaaccccaagcctctcccaggcagctgtggggggtgcaggattgctagggccaactgcaaattagccaggctggcattaaatgcctttgctgcctctctcctcctgtccctccctaccctcctgaaaatcaacaactgtgtcaacagcagggtgattgtgcttggccagcagcctccagggctgccaggaccaggcaggtgctggcaggggctgctggagccccatgctgggagcaggctgggcctagctgccagggctgcaggataaacaaggccgcacacaggctcagccgggagggaggccacaggcaggcaggaggcgagaacaggtgtctcaggagctctgtagacacaaagggcctcttgtctcctcctccctggcctcagggagccagccccttcctccctcctctcaggccccgcccagagatcagtgaccaggtcagccaggggatgctgtcttccagattcacc

SEQ ID NO: 35611 - DNA, 1884 bp, Homo sapiens
tttttttgagacaaggttttgctctgtcactcaggctggagtgcagtggcatgatcatggcccactgcagccttgacctcctaggctcaagcagtcctcctgacttggcctcccaaagtgcttggattacaagtgtgagccaccacttgtggcctcagaactttcttaaaccctagttttctcacctacaaagtgggaaaagaataacacctactttgagagattaaaaggatttaatgaagtgatgtatatattatggcccttagtataggacctggagtatagaaggctttggtaagtgggagctgatattagtgtgatggctgctgtggaggtggttgttgaagtctgtcctggggtggggacagtccagcattcctgggcctacttggatttagggggctgctcctcctagggtcatgggcatggcctttatggggtatgggaaaggaggggaatcagcttcccggtgtgtggtggggacaggcactgtctcctataacacctcctttggttgctacgtgcagatttgctgtgcagcacgggtcaagttacttagcctctctgtgtttccgcttcctaactgaaatgccattaatcacaatgctctcacttgagaagagagaacattagaagggtcacatgagaagagtctagaatagtgcgtgggaatcttatccaggtgttggctatttgttgctgtgattattctgtttttggagtgacccccattcagtcaaagaagcaagggtgagagctgctgtcccaagtgtatcagcatagggacgtggggacgtgggggaggtggactggggcatggacctcgctatgctggccccagggagcagcctagagaaggaaagaaactgtttctcgaatgctagctgtaggtagggcgttcccaggtgtgactgaaatgacagtctggctcagagcacactgccttttcttcccaccttaactggttactaaggggacagttctacactacacaggattgatttctgtgaaatctatggaatttacatatagttttgaggggctgctttgaggcatgaagccaccgtattcacaaaacccagctgcgggtgaattgcaatttataataataaacagcctgtacctgacctttggaccctgggtgctcaggatgatgcctgtggggcctgacaggaagtgaaggcggtggcatgggtgtggggggccacccctccctctgaccatggtggcgggtggcatccaggcccagagaagccttgtcactggctgtccccttggcacccagcccagcaggcggagagggttaattgggatttggagtgtctgtggaaagtagcctcttctcaaatatcttgtgctatggtttggaactttggaatcaggcataccgaaagtggaattctgtcttcaagtaagcctcagtttcctcatctgtacaatgagttttgtccctgaagaaaatccacctgtgaagtgcttagcttgtgatcactcagtaaataggcactgtcattatctttctgatgaggggcttccatatgtgacctgccctgggctacaactcgaacatggaaatcagaagcttagcaacactattatttccactgcatcaaaggcctgggagccctcccctgcctatacttttgtctctcagagaagaagtaataattcactccatgtgcaaatggaaaaactgagacctgaaaggttgagtggtttgtcccaggccccatagtgagttaaaggcatcaaaatcccttacacatgtatggggctttataaaccatcaagtgtgtaaagggtgttgacatttagaaaataactgtgccgagtctcctagggatctggtacatgtattttgactgccagtttacggatgggaac

SEQ ID NO: 35612 - DNA, 1437 bp, Homo sapiens
tgtgtttcatctgttcattcactgcacaagatatttattgagtgcccactacgtgccaggcactgttgctgagttcctgtgggtgtgtctctcgatgccactcctgcttctctgggggcctctttctgtgcttctctttgtccccaaattgctacctctttgtcagtctgggtgtctcaggttctgtgtgtccttgtgtgcatttctgtctctctctgtcctcgtctctctgcaaggccctctatttctctctttcttggtgtctgtcctttgccccctgtgccctctggattctctgggtctatgtaggcccctggtctgccctgggctcatcagccttcctgacctcctcctgccctccccttcactccctccctggctctgccagtcggttcccacggagccatttttagctctgatcagcatgggaatgtgcctcggcctccaaggggctttgtcctggtgcccccgcccctggtcccaacctgatcccacgagggagttgggacaggaggattgatggtgctccccttcctgccagcgtcagaggccctggagaggggctgtccatggcagctggtctttattcctccctcatgagcacagggtcgggggggtccccattcttggaagaggttgagaagactcctgggcttcagcctctcccacccagccctgcccctcacctgcctgccctcccctcccccactctatactagggactggatctcagcctctgatcagtttcacaaagtttgttccctaaggaaatcaaatcccattgtcacctaactctgaagatctaaatagcccttggatcagtatgggaaccccaaatcccacagggccagatgtggagtctgtgtctgcccccgtcttctctccatcctcaaagcccccacttctctccaggctgtttctttttttatgactgtaaacatagatagtgctttattttgttaataataagataatgatgagtaacttaaccagcacatttctcctgtttacactcgggggatttttttgttttctgatgacataataaagacagatcatttcagaatctggcccttgtgcaggggaggagggaggctggcctaagtccagaattcccaaatatgccaccagcctgggcaccactgtcccctggtggcagcctgcaggagcttcaggcctggggcctcagaggaattggcttaatgcaagggaatcccaggccaagcttgtgagtgacacatgccctccacagagcccacgctgaatgcccctaccttgacgaggtgaggccacccggatcctaagaaagaaggcagtagtaagagcactgtaataggagtcatgaagctcggggtctctctagaactggccacatggctggggttggggagtgggagccaggtctctcctttggggcctcattgtcctcatctgaca

SEQ ID NO: 35613 - DNA, 3075 bp, Homo sapiens
agggatcctggtgcacattgtccttagaggaatagtcagaagggtcaggcgtgtttcctctagaaaagaagacagagttggacagaaaggacaagattgctttctccaaaactgccaggtgggcaaagtgtagtattgcacaaagttcatgaggcagaacttgagctcctggatgaggttcaagactgtcttgacataaagaacaccttttccacaaaaaagagtgaacttcccaactcaagtcctcaagctcttgagtactggtggagggatttctagattggagagggtagtggtgagagagggtaggtgtggtggttgattctagggccacaaagttgggagggtgtggaatggagactgcccaagaattaagggcccagccatttggtatggggagcgtcctgaacgctggctggctgttttttccccagcccgggttctcagagcctcctctccttcgccctccccacgccacgtctggaaaagatgcaggcagaggtgggaggaggagctggcggcggcgcctgccccctggtggtcacgatggagagctgcccattgcacctcccactcccctcagccctctgccctccggccctccgctctccgccctcccctctccgcccgcccctctcggcccccggcctcctccactccactggtgggtccaaaccatgtcctgccagtctcaagactctcccagcctggctcattcccacctgtcggtcctgagttcctcttccctcccgcaagtcctcttgtcttgcctgccttattccctctgctgagacacagttgcgggtcctggagccccacccctgtctcatgagaggcaggatggggccaggtggttggagaggccaggagcagagtgctgtggtcattaccaggaaagctgggctacaagttcgtcccctccgtgcgtctccggcagagaccgaggggcagagcccgttgggaaggtgaatgtgcccaggagtcctttaactagagctctttgctaagagtcctggaaggggcccgagggggtggaacccggatcacactgggaggctcccaggcctggtgctcagccaggaggacaggagtgctggttagcctggggtggcagtgaaaggagccaaggtggaactcccagactttgaggaacagggttgtgttccctgccaccacaccggctcactcccctggaggactgggggaaggagaatgctttctcagaggcggcagtgggatgatgtctgctgttaattccttcccatacagatggtggtcaggaccttaggggcacaggacaatacccggggggggggggggggctctgtcccagccattccctactcaccactgcaacacttatctccagcgcaacagcatcaagacccaggaggctggaaacaaagctggcttcacagtgttaattctgccctcaattccagaggtggctcagagaggaagaaggagcggggacactgctatttagtccagacaggtagtgtctatgatgaccacctgaccccacaggtgaccccagggggcccctacctgcccagccctggcaccatccctatgcctgggcacctctttcgctcgtgtccccccactgtcaccccccgaggctgctgcccatggagggcctggctatgctggatcaccatgaccttgaaagctccagctgcaggtgccagctccagtggttgccatggcaccagggtgctttttgcaggcaaaagccaaacaaccagagtccacctggcaggctgctgctgctgttgcctctgctgcccctaagggcactgggcacttactggcaggggggcagtcctggagcagctgctgcccagtgcacagcctgggaagtatagccggagtgactgggctgccaagaggggtgcccccttctcatctttgagtttctgctcttccttctggccttctgaaaaagtgacggattggttccagaaatcactcctgcctgttctcaggcagagcagccccttccccaccccactgacagctgggagccagacatgaccgaggaaggtgtcctgagcacttctatttagaatgtcactggttcatctcctgggtcaaccaaagtccttgtaatccacagcctagttccccctaagcagtgctttaccgggtttaactggtaggttctactaagagagtcaaaggcacagaagctgagtgagagaaatagggggccctgcccagagccttcggagctaggtgcacaggaggatgtgtgcaggcggctaccttgacttcagcatgaagcccaggtggaggggggatatcaggaggggttacagcacccctcagcccccacgcaggggtcagttcctcaccattgtcactcaagacacagcagtccggaaatgagcattttaatgcagaaagaaaaccatgataatttacaaatgaatcactttctgggccagagccaggaaggccccaggagctgtgagggtagaaagggaggtggaggctgttgagtgtccgggcaaccagtttagtcagcacctttctgatgggatcctgcccaggctctcccacgataggccctggggggccctggcccccaccccatcctcttggctccctctagtcattccagataggaagacctcgggtcagcttcaggacataaagtagagctggagagacatccctggaaggagggcctgagggccagggagggaacaaggcaggagactgctggttctggttttggccacctcacccttggccacgtcccctccggctaagccacagcacaaagcagagccaggctctggaggcccagggcctcaccactccctctcctgtccccccagcagggggacaaaacagaagcacaggagagcacgttggggagcatgtttcctcgggctgaggtttgattggatctggtttggagaaggtgagggatctcagaggaggtggctgctggggaagatgtcatgctcaattcttggcccccacccatcaccaagataggtacatccatgtgtcagagttggtgtgatgctggtttggagctcagcacctcccacatggggcatg

SEQ ID NO: 35614 - DNA, 1294 bp, Homo sapiens
ttcaggggaatcttatgctcaaagtttgggaatcctagtcctagatcttgttcacttaattacatcactcccaactggtcttcctacctcaaatccaccctcccccaccaatctgtcccttatgatgctagaggactttcttcctaaagcccagtcctggtcaggttactgacctgaatctctgactcaaacatcttcatgacttcccgctacttgctaaattaaatcttggctacttagcctgacatttaaggccccttaccacctagctccaactctgtagtccacccccgcccccaaacccttcccaggtcctcccaaagatctgctccagccaacctcatctactcgtcactcaggagcaaaccctgctccagccatctcctccagttggagtagcctccctgcttatttctgccatgccacctctgccaagacaactttccctggttcttccacccccagcatacattatacacaccctgccttattttgcagctgtgcatgggcatgtcctgtgtacctagatggctcttaagctctttgagggcagggccagtgtcacattcatttttaaattgttttaaatcccagtcaatcaatgtctgtgaaatgaaggattgaataattcagggttattaggcaatgcctggagctccaggtgcttatctcgtctaaatgattgctcatcattgttctgcttttgggcagtcaggcagcttagggcatggatcatcccctaaagaggctcaacgaagttaagcaacttggtttgtccaaggttcaaaggtgtgacaagagcaaagagattgggccagctcttctccagggattactccctcccagtaaggttacccccaaggtcacacagtgacagcacagtcaaaggaagctgcagtatcaaggattatgtctgagcaccagaagcctggctctagttgctaagctgccactgatcagcgaccttgggcaggttccatcccctccctgggcctcggttttccacttgtcaaataacagctgtgggctgaaaggttggaaggacctgttctctacaaactgttctaaccctgagggaaaaggaggtccttgtcccaaagagaatatttgacatacaaggtctgaacatggtcaaagagagggcaggcctgggccaccttggacaaatagtcccaaagcagtgcttgataggcatggcatgggatgatgcagataaagtcatgcatgtgtgtgacagagacatactcaaaatggggatagagttaattattatcttgtcatcttggaagaggga

SEQ ID NO: 35615 - DNA, 864 bp, Homo sapiens
aggcagccttggaccctcccagatctttgtacctggggttgatctcgttcttcacaagcgtgaaataattgtgcatcttgtgccagaggatgggcttgggcaggctgccgttggcgtggatagtatgaatctttgccatttctaaggcgattaacctacagcagggaacaggaagagtagagcatcagtgctgggacattgccttccccactcatttcctcctggccagatagggaccctccaggcccaccagggcacttgccagagggccaaggatgggatgattgcaagtcccttaggagcacaggtcctgcagaaggaaggtctcagcagaagagaggagaatgaattaagaccttagcctggctgctccctttccagtgccaggctggggctgcctcagggagcagaagggcagagcagtggggctgttggtcacaggtcagtggccttgtcctaccccagtgtacccatagcaactcctgagaacagaggggcacctggggatgggggcggggctggccctcctctccccggactctgacccatcctctcaggggacgtgaacatagttcactttgcaccaagagatcagggggtggtgatgccaggcagggaagaaatgcccgcctcttatcagcctggccaaggtggggagggaaacaggctggcccagggtagccccttcctctgctatagggagttgatgctggcggctgggtgccaaggccgcaaaacaagccagcgttctattttcaagttcttctgtggacattatccaaggtctcaggagaggattgggtggtaggaaaggttgctgggagaaggtgggggtgaatggaaaactgaccggtcagagaagga

SEQ ID NO: 35616 - DNA, 2973 bp, Homo sapiens
cctgcatgtcctcctccacatagcaggccaccagcttgttggtgatgccatccgtgaagcgctagcatggggagaggacagtgcgtgggtgggtgggtggggcaggatctctctggtctctctcctgggctctgtagctccagcaggaggtgctcatttgaatgccgagcacaaccaccccaagcccccagtgctttagcccagtcactcatgctcctctctgtccccaaccttgggagtctccagtctctatagagttcaagaaaaaaatggtagcttgggtttagctcccacacactcctgggtgtgcctctagtgaatgggatttggcagtggagaaatttccacactacttgggaggtagacgcctcctgctgctccttaccctccaccccagtacggaaagaaacatcatggaccagaatgtggcaggggagggctgggagttgcccagaacactatgtcctgaccagctgccaatcaccttgtgccgggcagtgtgctctgctctaccccttgccccatccagtggtggaggtacaaggagggtactgaggttggcacccatcccaggactttagtggccagaggtccttaccagaaaagacaggagacaactgggctgcgagcaaggttctctggacagcagggtgatgaggagaaaggaaccatggaatttacggggcacaatgtgacagagctgggagggccctagaggtcatctgaaccaattctacgtagggaaactgaggcaggagaggggagggactggcagatagcacgttagatcagtgctggaattaacctcaggcctgcttgatgccttgacagtcttataccaaactgggccttttattttgaaaacgctactccatccccagggcgggttctgtcagcctccacacttggttaagaacctccccacaactttgcccccaccccaccccagaatgcctgtctgcatggagccgctaccattccagcacaagctacaagcgccccactcggcaccttcctccacaggcagcccacagcggggctggaggtagtcagctggggagttagcctaaggctcagtgagtggctctgcccacaggtgtgtcctgggacctgtgtccagctggggctggggaagatggcctgtgtgggggtgctgagcccgagcctgcagcgatggtgaggagctgagtgctagctggaattccacagggtggctcctgggacccacaggggcagctcagagcctggaggatttgctcccaccatggggtggagaaggggcagcaatgtatgcatgtatggctgggtcgggggggcggggggtctcttaaaagttcccgcctcctcaggtttcagagctggctgggtacgcgcttctggtcagcgaggggcaccagcacgcagcgacagggggtgcggcccgcacacgcagcatgccgacagtgggcaggtggccaccaggcgtgcctaagagccccgggaggaggggggcgtgtgcagggccaagggaggtgtgagcctagttttggtagcgacgaaatcaatccgtacacaaaccacgttccaaacctttcttgcgcagcagccgcgcacccctgggactgacacccggaaggatgcgaggactgggtccccgcatccccctggcagccctggcaggaccccatcctcggccccgcgcccactccgctaccttggtccgaacttgctcgggtttccaatgcggccgcagctcctggatgaggcgcagggccccgggaaggatgtcgtccgggtccacggaaatgccgaagtacgcgacggcggcggccctcggggggcccggcggctcccggcagctggcgctggccgccgccttctcctccatgccccatgagcactgcgggcaaggcgtgtgcctcctcaggtgaaaggacgcgcgcggctgaggggccgaagggggcacagccattcccagcagccccaccccctcggagccgcggcagacgctagccccggcgggggggtccggcgagggagtgggagtggtagaggaggggccaggggaagtccatgactcaggcgcgagctgcccgcttcgatcgccggctcgcggcccgccgcccaccgccgaccccggagcgccgcggcccgccgcgattgtgacatcacgggcggtggcccgcgggaacgcccccggcccgcccccgccccggcccgcgggccgctggggagctcagccagccaccgccggcagctgaggccgccgctacctggagcgcggggtgggggcgacgcccccctgggggccggtgacgccgggggtggggcctccgctggctccgccccgcccgggtccccgccggggctggcttcccggcctccgaggccgcgagactccagctctctcccggtagcctggggtggaggcgggggagggctcgtcctgcgcccccacctcatcctggaatagagagatccgctgctcccacgacgtcagcttgggctcgcccctctgtgcccctgctccgtgcccccagtccccggaccccgggaaatggctctgcaggggcggcccctgctgcatctcaaaggtccttccctgcagagagcccccccccacacccaggcaacctcccatccccgacagaaacacactgcatgaagaggggacattgggtgatagcgttggggtgagagtgtgccagtccagcagactgcgctgtcccctggcaggccactgaacagccagggcgttggagtgtttgggcacatcctgggcaggacttggggccagactgagttaaagcctccctcccatcctgagcgtgtgaatggagccaggtagcaggccagcggtgtacccgagcccagtgctttgcttggcattcggggtgtgaagtggacagaccctcgcgcgtcctggggaggacagccaaatgcctggcgcagctaagggccaaagcaaggcatggtgatggctgggggtgggaa

SEQ ID NO: 35617 - DNA, 1402 bp, Homo sapiens
gtccctaagctagccacctgttgctagcttaattcctcctctacagacccatattgatacaattagacaacaggctacctggctttaacaaaccttagaacaccaaagcaggcttaatctgggggcacttacagagactgctttaaagacctattctcctggattcctagtgtaattccatcaatcttgggaggcattcttaaattcagccttgatgttcttcttttagtcatggtggcctacgttctagtaaaacttattatgtactgtgtaaacaaaggttgtgcaagtctcgctaaaactatcaaagcaaaaagggaaatgccgatgatcattgttcctaaaaatggcactacgaaatatttccttagccaggtcaaatggtttcattccatagtcaccccttgtcaaccctgtttggcaggaagtagccaggtgagtaatgatgtctcattttccccaatcccacaagactgtgggatgaacctttgacaatggggaaattgaaatagtggagggaggcttagcatgactgactccattttgcctctgacccccaggggtaatatcttttaggttaaaagcttctgcttagctctgtacacagaccagctaattatagattagcttgcagttcaacttaaaaaaatgataacagctctttcccccaaactaagccccaaggagataaggaagaatacagagaaataacaatgttatgttaaagatttataggaacattgtgacctgacctagaaaaaagaacttttacatactcctcagacccttgctggcacccaggtgtctgcggtcatcagtcacctcttgatcccaacctcttcctcttccccctcccctaaatgtaaaaagtaacctaaaagtcatgctgacttcagatggttctttatgacgctagtccaccatcttcttggttttctgaatagggtcgctttctttgccccaacaccttacctctcagcttacttgctgttgtgtggtgagtggtgtgtgcttggatttggttacataatcctctggaagcagggagctgggggaggagggggttgtctatcctctgttgacctagtaagggtgggagagaagggcagtcttcagggttttggcttctgctaaatagaggtagggcagctgatcttccaacttattctcctctttctgcttggctctaactcccttttaggccctggttctctgcctcatttccttttccctgtagctttacaagcagtcaagtacagctccccagacagacatctggtccctaaatcccaggatgagtgctatttattcaggctaagatgcctatcttggcttttccctgattattttttagggcccacttcaaatattaccccctcctccatgaagcaggccctgactc

SEQ ID NO: 35618 - DNA, 1754 bp, Homo sapiens
tcagtgaggcttccctgaccactctatataaaatagcgacccctcctacctcgaactccatagcctcctcttgttttattttcatctggaggacttatcatcttctgatatactatatacttctttctgttaattacctgtctcccctctctagaatgtaagcagggagtcagtttcatttaatgttggacactctatatccaacacagtgcttggcacacagcagagacaaatctgttgagtgaacaaaagaatgttgtcaccaattctcagatgaaaaaccaaggctcagaggctttaagtaactcacccaaatgaagcccacagagccacggttcttcccatggccccagacttgttccaagacctcctccctacctcttcccccaaaagaaggggaaggatgtttaggagtgagggtatggtggtttggtcaggggagtggagtttagttttttataagaagcccccagggccacaggagaccttgatggtgtggggaaagatgtctgaatgggcagaggcctcctgagtccacctttgtggcaacccagttctaagaacccgggatgggaaaggggtcagtgtgaatggggaacctgccaggccccctgggcaccagcctctagctacctgtgggccctgagcaactcccacccgctggagggtagggagccacaccccaccctgcctgctgccccagggtgccagcacagcatctcccagcccctggctccagaggtcacgcttgtagtgacagagagcccagctgggagagagagccagccggcagggagcctggcctggatagcccattgcagccccgctcatcccacttactctgccattcggtgatggagatcatgccgcactcagcctggggggctttccgggtggaagcgggcaagtggagcgtggcccagaggacgcagctggtacatggtcacgggaagctgacccttggttaagttgcgaaatgagcctgtggcaaatcattaactctccctccagcccccgctccacccccgcacaccacgcaggtgcttctactcgccagctccctcctcccgttttccggtagggcaatgccccgcccctccacctgccgcgcctgcccggggaaggcaccgcccacctgaccctttcctcgcacctcgcggtgttctgcggctctcgtctgctccgcgaaacttagattgtatgtggaagcattggaatctagggggtgctcaagtttcttgcttggtttgatagtgtgggaagagttggcatctgcgcatccctttgggaatgtactaaattcatcttgaaagtcaagctttttgctctctgctattgcacatgctaggcgctgggaggcgatgagcgactgagcacaaagcctgttgttgacctaatggcagagccagatcgggttaaatcaatggcaaaagcgccatgggggaagttagacgtgaaggtcttcgacctcctttccccaagcggcgtccaagctttggactgactgtgatgttgagctatggaagacaaagccctgaatttggggttggggcaggactgcacaatttaggaggcctggttctagtctacccaccagctgtgtagacatggattcgtcctttgggcctgcaaaaagagaggcagttagttcctaacatccttttttcccatcgcagagcagtggttctgacgtggcattgatgccaggagagccaacatccactttgcaatgtcttctgtgtccagaaatgaag

SEQ ID NO: 35619 - DNA, 1093 bp, Homo sapiens
cacacaacatccttagacattttacacagacataatacacattcctacatttgtactcaaacctttcctccactctcacactgcatacttgaatacacacaaataaatgcatgaatctacaaacatgaccagatccagacactgcacaagacattcgcgccacacgtacaaactcaaaaaatgccatgacttccacatattacatacctgagtctgcacgcaccgggtggatttgtaagcataacagcattcctcactgattactctgtccatgccacacaccacacgcgggcactgaactctactcgctgcacccgctgcacgctgtgctcatgacctgtgcccagcactgccacacacacagtgtcctgggtgtgaacctgtgcccacacagtgcatgcccaggaccagtcttgctgtgcctggcagagctgtagctctggggagctgggccacaggccaggggcggtgggaacagtgggctgagtctgaggtctggccctgccacagcccttttttaaatagttggggttttggcaaaagcaaggtgaccgtttggtttcagcacacagaccctgacatgtaagcccatgtgtatcaagacggaaatcggataggccgggtgggttttgttttcatgggacctttggctgaggaactatagtagagagcgccaggggctggggctggggctgagcaaggtttttaaaccagccttgtctctctaaccccttgaaacaggaagttgccttttgcccagagcatgtggaatctgatctttggaaggttcaagttcattttgcagctaaactacagggaggttcaacagaggcctgcttccttgtggccagactggttttgctgccttttggctgcaggatggggctctctgaagctatcccttctcttaccctcaactccagcctaaagacagcctctccctgaaatacctccaaggctctccctggacacccattctaaagtccattacaccctaactggcagaaggttcttcattaaggcttacttaaatcctcttttctgtagctaaaatctggtttctgaaaatatccatatttaaaataattagcaa

SEQ ID NO: 35620 - DNA, 730 bp, Homo sapiens
gctagttctgaagcccctagcctaatggaccagcccctctgtgagggcaaaagcccgcaggaagggaccctgctgtctgcactgaatgcttggacagctgggcattgtggatggagtagaaagccaatcacatgggtgacagggaggatagcttgctcaggaatccggaggtgggtgggccatgagccctgctcctcacccctgcaaggcactttggatcttgtttcccatcagcaggatcctggacctcccggccctgctcagagttggaatcctgggatctgttcccacatggcccagaatgctcatggtgtggacacaatgagctgcttctggagctggaatgccacggcctccagggccaggagccatccctgtttattgaactgtggacattggtgcttcctagtgcctgaggcctattacaaaatcgaattgcgacaccgacatgaagccctggtgagatgggtcacatggcttgtgactagaagaaccaacagttgcagctatagcatctcatttaaaattttttttttctgtaactttaagagcatgaactcatcctaatgaggtttgacagcagctttgtcacacattagatgtttcctcagctgtaaactgggtcagaagcttggagtcactgtccaagctcggctgttcactggctgtgtgttcttggcatgttattcaacctctctgtgctttagtttcctcagctgtaaaatggggg

SEQ ID NO: 35621 - DNA, 749 bp, Homo sapiens
gccagcatttaggggagtcctgggtccatctctttgtgaacagtggcccccattttggtgtgtcctgagcctttgggttctcagctccttgaggttctacccccactgcttcccaaagactctcctgtgcagagacccccaattttcctccagtttcattcccactctggctccactgtggccccgtatcctggaggttcagcacctcggtcctgggcctgggcagattcctctccctgagtcttgggcttttctctgggactggactctgtatgctcagccccttcctgatttccctccttggggttcaggtggctgcaatacagcaaccagcaacagcagtgctctgcagggtcactgggtacaacctttgtttgccaaagttaatgattcactgaattgctcccacgaggactggaaatcagggctgtgccttcctgggccaagggagtgaaggaaagagcctctcctgcttcataacaattgtaccctctctcctctcatccctcacgcctatttcctcccctgcatccacatggcgccaccatcactgacctcaacccttgctggtgccctcagcctgccttggcacaacttttaaaaatagagagtagggagagggtgttggggtcagcagagaaggtgaagccagaggacatgttcactcattcagtattgactgagcaccgactaaatggcaggtagtgttttaggtgctgtggatacagcagtgaccaacactgacaaaa

SEQ ID NO: 35622 - DNA, 1913 bp, Homo sapiens
agaacacaacaagtatccccgttcctctcctatactctacttccccttctttcttggcctcaaatgcccagaaacttggctgcttctgctctcgccctgctgggtctagtggctggcaccttccccctattgtgcctggtttctgtttgcccatgggcagcccagccagaggaagcaccacagctgaaagccacaagggggttgggtttaccttatcgctcgaatctgctttctaaactggcacagggagcaccctgttcccacctaataggctctccagagccccgagttcctccctaggttcaacctagcatcactatgtcatcgaatctctttcctcccaagaaagaggcaagggaacaaaagggctcctagctgggggcgggaggagagtaaagtaagcacttcctttttggtgacagtctccctctttttttttttttttaaatcacgtgggcattcatgagtacacacacagagagatagcatcagctgagaaaagccagtgcgtccacctcctcctccaagccaaggaattcttgtccacaccccctccacaaaactgtcattagaaggtgccagggtcaaagagcacaaatgttttggaggttgaagggatgagggacctgaaggggaagttgagggaatgggggcaacagaaatctaaatgcaaaaggttggttctctttctccctggatttcagttttgttctcaactgacaaccttgtcttcttaatgagtgaagagttctccccgcaactctctgcacccacccccgccaggttctgtcttaccctacatctcaccacacctgactctgctaagtaaaaggataaaaccaggagcacagccatgccagtctcctgtggctctgtcccctccaccttcctcccgtggccccatccaggaaatcggcccacaagagaggccgacgctgcttctgaccagagctaccgagcgcctctctggagacaatggctcagagagaaggaggaagactagcagctccagctttgtgctcagggtggccacacaaaaccattgtcttgacatcaggacagacaatggtttgtatctctggcttctgcgctgagcagttcactcccttggactaagataattttaaagatttccttctaataaatagtaatgatactggaatctggcctcaagctgagaatttgtatctggttgtaacaaaagcccactctggctgatagaatgggtatatctaggcttccttttctgttccagagccacccagacaaacatagaccagacagataaccacttactcaccggctcttctttgctgttccctctgctgcctctagccctgactcctttcacactgaggagtagggagaaggttttcctttaatactcaccaggtccctggtgggtagcaatcattaacagccacacatgctggctggccttaaccccttcagtgctgggttgcctcagccagccggagctggctgatggacagccctgtcccttctactctgccctgagaaagtagcaactcccaccttgatgccatccacctgagtaatgctgccgcctcccatgtggagaaggagagccctctagtcccacccaggccgccccgcctgattggagcacacttgcaacctgaggcgtttggctctggcacgatgcccaattggatgagcccacattatgaaatatttgcctggcgggccaatagaggaactgggatctgggggagggatgatattgttatttattcctggaggaaggagagcagacaaagatagtcacagcatccctagccctgggatgggaagcagtgggaaggtggtcttcagatccatggaactgcctctaactgctctgtccaggtagagtgaactaattcttgaagctttctaagcaatttgagcct

SEQ ID NO: 35623 - DNA, 610 bp, Homo sapiens
ggctggttggacatttcttcttgaaataagaattaaccttgaattcccaaattacccttcaccctcccaggaaaacttgacaactagcacagaaagaaaaaggaaattaacacctatccaagtcatgatgctagcgaattctctgcttaacccccagagataggtattgctgtcctgctgttgcggaggaagaacctgagaggtcaggttattagcccaaggctacacagttaggaagtgagagaactgggattagagcccaggacacagcccaaagccagctttcttcccactttatgttagttgtgcaacttgaaattcccttctcatgcatcatcctaccagctaatcctttcgtttatttttattgagttgaatccgcattagccttgagatttttggctctggagtcagactgccccagttccaatcccggctccaccagttactacctaagggactctgggtgagaaacttaacctctctgtgctttcattcccccatctgtgaaaacgggataatatacggaccttcttcatgggttcgtcacaggagtaaataagattatacccacaaaaaatttatgaaaggttctggcacttagtaaatg

SEQ ID NO: 35624 - DNA, 934 bp, Homo sapiens
ctcgggaggctgaggcaagaggatcgcttgaatccgggaggcggaggttgcagtgagctgaggtcatgctattgcactctagcctgggtgacagagggagatgccatctcaaaaaaaaaaaaacaaacaacaaaaaaaaaattctagtgcttatgctgctatccagctgcataaggtgtgtagcaagtccttgttctcttggggcccactagacctgagaaagggaatctcattgcccctagagcaaattataggacaaaagagctgctcatcctgagcaccttcggttcttcagggaagcgctccttccaaaggctgcctgctcatctgaaaccctcaccccattttagaggcttagattcagctggggaggacccacagcccgagaaggaaaacaaaccaacagattatgcttctaggtggccacagcaggccaagccaagggcagggtggccaaaggtcaagcagcagtcagactgagccaacacgagcctcctgtgacaaagccagagccagagcagggcaattttctaactataaacggaaactcaagaagctccaaaccgcacaaacacacgtgggaagatgagggtaaggcacagaagctacggggtgcacgcacacagaggaaggggcttcatgacgtgcaggcaggggaccaaggaagggcatatgtgtcagtgtcgtggatgcagcaacagatctgggtttctggggtcctggagcttatacaatttgtggtgggaggggcgtggtcctcattaaggaaaagactataggtacaaatttgtgtgttagatatggccttggaaggggccagtgcaagtgcatcctcctccccatgtggatttctgaacactggtgcacactcacatgcgtgtgtttcgtggcctcctggttcccgtctcagcactatttctctttcctctcacac

SEQ ID NO: 35625 - DNA, 2865 bp, Homo sapiens
agatgcggggctgagtcccagctctgattaacacgtggttttctcttagaccggtacttcaatatctctggacctcagttccccatttgacaaatgaaggggttgtttctaagattccttgtagctccgatgtttttaagtggctatcttgaggaaggaaaagctcgtcaagtgtgggtaacagtccaagacgctgtgcttctagacttgctatatttctggaagatgtctatcctggcaaaagatgactatagtagaagcgagccaaaagacagccagcagggccactttgttataatgagattatgccagagccactttggcttatgaaattaatataacagtgctaatatattactgagagtagcaaaggcgcgctctctctcaagaatgccaaacatacagtgggcatcgtccccctccctcttgaccacagccccataaagaagcaggacaggagaggagaactgctgtcctgggcacgctgagtctggggcgagggttgccaggaactgagtggtagaggcaggatctcctggtatgttgtcacttagcccaagtcttcccataggaaagtctcggggaaaatgaaagacctacctctggccctttcagggaaggagctgaaaaaactccaggctgggcattggtctagtcatcctcctggaggcctcgcatgtgaccagggagagggagaaagggcagcactcccctgccctgcccagcctttccaagctgagggaatgccaagcctttgctggactttgacccattgaggaaaaggcgggagacacattcaaacaggcatggtgataaacttattagtcatgcccgcccttgtagccaccgcttcacccaccttctccggcctgcccccagccccgccacttttcaagttgggcaacttaatggaaaaaaatgaaataaaaagaagagcgagaccaacatacttgatgaagaagattctcccaccgccgtcaactccgtaggcccaccggccgggcaggtccagccagtcaatctcatcggccatctcggtgtccctgcagcccctctcgctctctgcgcccccaggcgccggctgggcagggggcttggtacccgggaacccccacttgctgcccccttccagaggccgtggtgggggagggggtccggccgggctggcggcgtcgctcccgggtccctggcagtgtggctggcctccccactgaagacgcgctggcctcaagccgggcggcagggagcaggcaagcgcttaaccctggccggccgggagccccagacaccacctgcctcctcgtcgactcgggagctcctcttcggaccgtttcctgaactttaatgacgggcaattagcgcggtgagtaattacgatgcctctcctgccgggactgttaacgggcagcgctgggtctccgttcctcctggctctgctgccctccagcctggcggagcccggagagcagaagctggagcggggaggatccctccccgaagggagcaggttgcagtgcgagcaggggtgttgcctctccgctcccagctccgatcttgcacttgaaccaccggcggggccgggggcggagccgcgccgccgcctcggaaggtaattcacagccccgagaactcgccggcagcgccaagtcccccagtccaggcgcaccgcgcagagaaccagtttgactaaaagagctttgaatcaggaacctggtggacatgtccagccactgaacggaaaaggggaagtgattaaacctggttctacttggtgggaggttaggagaggaacaaaggtcaaaggcacggaagcgtggcggggctgtgagcagcgaggggcccggggagcctctcctagctcagatgccagcctgattagtcgagctagtccttacctttctttcccagcacctcctccaagaagtctgccatgactaagtagaatcacagggagaccttagaaatactcagaaaccaacagcgtttatgtccctccattccattccccctaacttgcaccagaaatggaaaaggaaaaaggaagaaaaatggagagagaagggaatgtgttatgtgtacagaatgcagactgcaagcatttcatactggcataccaaaagcagtattgctggagcccacagttctgctatctcagggtctatatcaaagttagccagcttaggcaacatagcaagaccctgtcactacaaataataataataattaattagctggatctggtggcacgagcctgtagtcccagcaactcagaacactgtcaggaggatcactttgagccgggaggtcgaggctgcggtgacctatgatcctgccagtgtactccagcctgggcaacagagcgagaccctgtctcaagaaagaaaaaatgctgaagtccatttggctttcccagcttactccggatctgccactggggctccagttaggtacatacagttccaatccatgtgccaggcccaggagaataattagacgatgagagagacacctgtgtttaaagggagcaatgtgttccatgacagctggcaattatctgttgggcaaacatacgttttgtgagcattccaggagacttgatccccattccacataggtaattcctactcatcctttcagtgtctacccatgtgccacctcctccaggaagccattcctgacactaccccggagagatttatatgtccatcctccatgtgtcatggcacctgatgaataaccctatagtagcacttatcacactgtaatgcaatccttgatttagtcatctgtctcctccattggactgtgtgctccttggggcaggaactccatcttatccatctttacagccctggcagctgcctg

SEQ ID NO: 35626 - DNA, 2461 bp, Homo sapiens
cactggatgcacctcccaaaatataatctatcagtttgttactacaagctggtctggcagaaatgggaaggtcaccttctaggtatgagtaatcaactacacttattcggccctctccaggctccttttccataggtatctcactagatggacagccctcagaagggctctcttcttccaaagcaagtggaacctctgtagttaataattctattttttcttcagtggattcctgggtgtttccaggaatgtctccagcagcaggaacaaactgtgttgggttatctctgcagtgttttggatccatccggagaaggctgtgttcctcctccaggctgtggtagccattatcctggtcaggggtgggtaaatcttgccccttgttagcctgttgaaggaattccagccgtttcatgcgaagatggtgaatttctggtaggccttccgtagaaagaggtggacatccctgccacgaggccggaatgagttctgcactcagcggctggggatgacaatggtcctctctcaggcagctgctctctggggttagtgtctggaagccgactacctcgctatttccatcactgttctgatagctgacttctagcctaggaaagcagtccaggtaggaagggttcagcaaataggataccacactgaaattgtctatgcgttgaatgtttagaggcccagagggcgaagagccaagttcccggttagagtacagacgggattgaaggctactgggcaacagctccactccccacagctgctgctctaagagaaaagcctgtgctgcagggtccaaagcacttcccttggccttaagctccaattttaggtctgggggcgagtattgccagtggatcccctcctctagccaatcaaggggactggtgaccgaggggtctgaggagtcgagctgcagcgaactcaaagatttctgcgctgtgggggcggctggtttctcccgtcccttcagggctctcagggcgctgtagactccagcaaaatctagccatctggtcggaaacattccaccgaaaagttggctccaaattagcaccttctgaagcaatccggggagcggcgcaaggagctgggagagcagtttcgtccagtaactgacccgagtctcgggctgggcagaggaaagcagtgtggggttcccggagttttccgggccaagaggcgtcgggaacttagaagagcctgcttgcgatcgccgagggaaaaagggtggccagaaccggaagcccgcccgagggccaagccgtttccgcgatccgcctgtccccggctccatctcctttttcttgacagtctctcaggtagggccgcggcgctcagcggctggaggtcgacgggattcggaggaagcctacagagtctcggccttgcccagcggtggcgtcgctgctccaggccgatcttcgagccagcagaaaagccacagagggcagcgaatgcggcagcgggcggcagaacacagggaagaacagcccgcgcaataggcggcgactgatgcgacttccatcctggcggggaaggaggttccctagtcggctcgacgcttcaacaccatggataggagtccccccacggcctcggcgatggttttccgactgacagagggttgaaaagcccctgagcaacgcgataccggaaggactgggtaggccggctggtgcggtggaagcgaagcccaaaatggccgcagggcccgcgcgccggcaggacacccccctagacgccggaagagacgcaggactgttgggcgtctacgtccctagcgccgcgccgcccaacgtcactcgcaaaatccccggggggcgggcctttccgcccacttccgtgtggccgccgattggttttgccagatttccctgtcggcttccttactcgaggtagagccgcacggcagcgtgaggttgcatcagccggggcgggggggggggggggggggggggggggaatgcacgcatgcgcagtcgtttctgtgtggtctcctaggagaccgccccaacagccctctaggttaaaggtcttggggaggggaggggttttcaaaataacccgagaatttcccggaggcgttttgatggcctaatacacactgacgtgtgtacagtcatcccctctcatgaaatggggattagttccaggaccccgtagacaccagaatccgcagacggtcaagtcccttatgtaaaatggtatagtgtttgcatataacctgcatacaccttcccagatatttaaaccatcccctagattaagtataatacctaatacaatgcaagtgctatggaactagttgttatactgtatttatttgtattatgttttattatctttatttttcccgaatattttcaatccatggaaggttgaatgccccgcgggccaactgtagggttatcgtagtcttagatttttattatttatttatttgagacag

SEQ ID NO: 35627 - DNA, 4562 bp, Homo sapiens
ttcttaaaactttcttgaatggaactccccttccccatgtagtcattggatatataatttttattcttccttatgttagaagttctaaagagggaaaatgcaatcataaagtatttgggctaggcatggtggctcatgcctgtaatcctagcacttgggaggtgggtcaattgcttgagcccaagagttcaagaccagcctgagcaacatatggcaaaaccccatctctacaaaaaatttgccaggtgtggtggtgtgcatctgtgttcccagccactcaggaggttgaggtgggaggatcacttgagcccaggaggttgaggctgcagtgagctgagaacatgccaccacactccagtctgggtgacagactgagaccctgtcttgaaagaaaaagggatggaaggaaagaaaagaagaaagagggagggagggagggaaggaaggaaggaaacaaagagaaaaaaaggaaagaaaaggaaggaaaggaaaggaaaagaagagaaaggaagaatgggaggaagggagggaatggaaggaagggagggaaaggaaggaaggaaggaaagaagggagggagggagggaaagaaagaaggaaagaaaaggaagaaggaaaggaaaggaagggagggagggagagagggaaagaaagaaaaaaagggaagaaggaagaaggaagaagaaagggagggagggagggaaaaggaaggaaggaagaaaggaaagaaagaagaaaaggaagaatggaagaagggggggaggagagggaaggggagaggagggggacaggagtgtggggggaggggagagggaggggagagagaaggaaggaagggagggaaaagaaagaaagaacctgagcaacagtctacaaaagtttatggaaaaaaaaagtttaaaaaattaaaatatttgagagctgcctctgagaatatgtgactttgccttgttcgtctcagctggaaaagtgtgactcagccttcccaagcctgctagagggcagagggaggccagatctgtacacagagataacatgttgccaaggccgtgtgcaagctggtgaagacaaaaagtccttccattggcaagctgactggcactttggccggagaaaattaaaacctcagttaattctgtttattttaaaagactttgccagactgaggtaaagggtatatggctcttgattttttcggagtcaccaccagctccaaaatctgatatcgcagtatctcccactctggctgccgcctcctaccaatccacactgccctgataaccctattcagctgctggttaactcctcagagaccacaaaccattgctcttaccactttttgtgatccatcacactcttcatttccctccttactcagcatgaatttccatgatccagtattaaaactacccccttgcccttctactccctggcaaaactccaaccctagttaaacccaactactcacgcattctgcgcctgcacccttgcagctaatcattgcttaagaagatcgctcagacatgctgagtgactcacttcatacttgtgatcacaatctcatcgacaccaggcactcccaccacagttccctagaagctttgcttctcctacactctgagactgtctcacaatacttctttcttcaaatttccagcatttcccataaacacacattctcagtttatgatcacactcatacttcaagaaaaaacagatacaactggacataaatcacctcatctttccctgaacaaatccaccggcatctggacccacataatctgccttcaatcctgccacaacccaagaaacctcctggatgccatccctccattttcacttaaggaattctgacctctcttatcccttctccctagtaacatacacgtttctctcactaatagatcattcacatttacataacttaatatcagctatattaaaaataaaaagaccacccagcatggtggcttacgcctgtaatccctacactttgcagggccaaggcagggggcttgagccaaggcttgagcccaagtgttcaagaccagcctggacgacatagcaagaccttgtctctacaaaaatttaaaaaattcgctgggcgtggtggctcacacctgtagtcccagctactcaggaggttgaggtgggaggactgcttgagccaacgaggttagggctgcagtgagccaagaacacaccaccaccctgcagcctgggtgacagagcaagactctgtctcaaaaaaaagtaaataataaaaaaaagccttccctagatacacacccctccaagcttctgcaccaccagagcgaaacctctcgagagttgttagtgcttatggtctccacttcctcttcacctatactctccccagcctacaccaatgtggctttcacccccaccactcattcaggcagctcttatcaaggtcaccaagaccactttgctatgttcactcctcttgactgttaggggttgaactgtgtcccccaaaagataaagtcctaaagataaagtactaaagtccccttagtacctgtgaatgtgatcttatttggaaataggttctttgcagatgatcaagttaagatgaggtcattatggtgggctctaatccaagatgacagcgtccttataaaaagaggagatttggacacagacatgtgcatgcacagggagagaatgccacggcaatgtgaaggcagagactgggttgatgcatatataagccaaggaatgccagattgccagcaaacctccagaagccaggagagaaacatggaacagactctcgcacagccctcacaaggaatcaaccttgcagacaccttgattttggacttccaacctccagaaatacattgctgtttaagcctctcagtttgtgatactttgttatggcagccccaggacactgatcatacttttctttaggttgccaggacaccattgatctgctcctcctcctcctctaaatgttggcctcaatccacccacatgcctctctaacctgggtgatctcatctcattccatggaattaaatgccatctgaatgctgatgacttccatatctaaacttccagactgacttcccttgggcttcagattccattctattatttctccacttagatttctatcacacgtctcaaacttatcacaatcagtagtcttgattcagctctactgaacctacctccccactcccagtaattcctccagaggactctttgcctacattctgaggctccacactgaggagtcaacctcaactcccctttccctcgattccatatgcagtccatcagcaagtcctgtcagctctaccttcaaaatatatccagaatttgaccacttttaccatccccaagccaccatcatttccctcctagactacaatagcctcctcttctgcttccattcttgcttcgaacagcagccagaagaatgatcccttaaaacataaattagacattaccgtttttcaggttttttttttttttttttttagataagagtctctctctgttgcccaggctagagtgcagtggtgccgtcttaacttactgcaacctccacttcctgggttcaagtgatcctcctgcctgagcttcctgagtagctgggattacaggcgttcaccaccacacctggctaatttttgtatttttagtagagttggggtttcactatgttggccaggctggtctcgaactcctgacctcagatgatccacccgccttggcctcccaaagtgctgagattagagccatgggccaccgtgcccggcccctgcagttccctttctgaaaaccccatcaccctaagaataaagcctgaagctctgattgattttaacactcagatcagatatcctctctgaagcccactctgcctgccccaccccttcttatgccaccttgtccgtatcacactgcactgtatttatttccatgcctgcctcccttgaaagactgagttccttgaagacaggatccacacctttgttatctgagtagccacagtaccggacacctcgcctcacccagagtaagccattagtgttgtttgttgacactttagacaagtcccagccaccagaaaattctctcccaatttaaaatgctgcctcattttttcacctttcaaatccagtctaatctttgctccccaaatctcggcaagctgggctgcttcatttttgtcacctctctttgaactcagaaatctgggccccctgggctgcctttgtttcttttctccttgggcaacctctctctctcattccccacctctctcattcccattccctcaggagggttcagatttctacctcatttggccacgaaatttccttcactaagactcttggcagattcaagtactaacctttaaaaagtccatagggacttgcccagaactgcagtgacacctcaagaccacttagaaataaagcagtaacacttcctactgtttactactgaaaaatccctggaagcccccacagaattccccagtatgaaacatgactccccactggagagttctgaag

SEQ ID NO: 35628 - DNA, 1380 bp, Homo sapiens
ctctactaaaaattacttttaaaaattatgggaggctgaggcgggtagatcacttgagcccaggagttcaagaccagcctgggaaacatagcaaaaccctgtctctacaaagaataaaaaaaaattagccagacatggtggtgtgcacctgtggtcccagctactgggaaggctgaggtgggaggatggatggagtccgggaggtggaggttgcagtgagcctagatctcaccactgcactccaagcctgggcgactgagagagaccctgtgtcaaaaaaataaataaaattatagtttcatttttttctcaaatgtcatttattagaaaatacaattcccgagaaaggagatacaagggattctgggaagtgggaagtaaacagtacacagatctctttaaatcaggagcatataggtcataataaaatgagctacaggcacaaagccagtaacacatttatggtccgttcatctggaaaagtttcaccgcccactccccactcctcttccccctcctggaagcagccagctttatccttggcattttaattttagagaaaatttaaacttccatgctgccctgtggcttcggtcaatggagcttctttctccagttatggaatgagtcagcaaaacggggagtttctgatccttggaattagggagggacagtttacagaatgtcctcatttcactcttttcccaatcatgggaaatatccagccaattctggttttaaagattcatatcaaattcaaagtccctccctccttttggcgaggaagacaaccctttggagcgaaacacaaaagagcaaatgtaaaatccatctggggcggggcatggtggctcacgcctgtaatcccagcactttgggaggccaaggcaggcagatcacgaggtcaagagatcgagaccatcctggccaacatggtgaaaccccgtctctactaaaaatacaaaaattagcttggcgtggtggcacatgcctgtaatcccagctactcgggaggctgaggtaggagaatcgcttgaacccgggaggcagattttgcagtgagtcgagatcatgccactacactccagcctggcgacagggcgagactccgtctccaaaaaaaaaaaaaaaaatccatctggtagggaataaagaatatgaagagataagggagtcagtctcagtctctcccttcgggctcctgagcttagctccaggggaataatcaccactccaatccagcctcctactgaccaaagaaaaatcatggggcaaaaaacaacagttttgatggaatcccccaccccatgcccctttccttcagatagggcatccctttggctccagactaaataggtttatggccccacagaatgagga

SEQ ID NO: 35629 - DNA, 1358 bp, Homo sapiens
ggaggtaaattttcacataggggtcagggtcatttccatcctggagcagttgctacaatagaatgagaaccaaaaaaatgttaagatttttaacatctgtctcttcaccaccattcctgtgatcacactctgatccagactctcatctgccatctggcatcttgcaatgcacaactaatttatttgtctgcttccaagctcactctattctgataaaaatatctaccatgataacattgtgtcctattaaaacatcaattggtttgcctatgatatcaagtctatacttttatccaaatcctcaggacatcccataatgtgctctgttttgagtgaaccatcatgttcccaggtatcttcctgccatatctactatccttatctattttgtcatttggtccacttaacccctaagaggtagagacatgagtcacagagattgagctgcttgctcaagggcagccaactagtgattcacccagcctgatccttttaaaacctaagtcagatcatgtcatgcctctgcttaaaacccatctcattcagggaaaaagccacggttcttactatcagggtgaggtgctggtccatcataccctctccaacctcatcatccactcctctcgactttgctccatcggcttcagccgctggccccttgctgtttctgacgcacccctggcaggctcctggctctgggctgtcagatctaactgctccctttgcctgggaaagtctgccctcagatgcataaacatggctccctccctcaccttctccatcttgctaagacacctcctcaacaatgaggccttccctgagcactctttgcaaagtccactcccttcattccatcctagcattccttctctgctttatttcttgccatagctcttactaccatcttctatgccatatattttacttatctgcctgtgtgccgttcccaactagaatgtaagccccctgagggcagggattttgttttgttttcccccatacccagagctaatgtatcagtatatagcaggcactcaaacatttattgaatgaagagtaaatggatgaatgtttatgttcctcctgccatatcccactgccccaacctacataaaatgcctaacataggatgcagcacaatgcaagtattcaagttcccttcctggctgggcgtggtggctcacacctataatcccagcactttgggaggctgagacagacggatcacctgaagtcaggcattcaagaccagtctagccaacatagtgaaacccggtctctaattttaaaaaatacaaaaattagccaggtgtggtggcatgtgcctgtagtcccagctactcaggctgaggcaggaa

SEQ ID NO: 35630 - DNA, 1114 bp, Homo sapiens
tcctgccttcaaaatcctcttcgtgaggtttatagaattcctaagaactcaggaaagacatcagcagagagcaatgatcgtcatagccaggtaggaatgcatgaaattaggaatgagggaaagcttactagatatggaatgcccgccctccttgcctccttccataaatttccacccatcatccttcaatgaccttgagtcccataactttccagaccttccaagctcatactgacttctcctcctctgaacccctacagatgcactgtcacctccattcatacagcactgactttgccctttcagtcccatggggtttacagatctgttctcctaacagcttcttgcctatttcacaatgcctattgcaaaactagctccacacagaatgcacccacccagctacttgtcgaattacaacctgatgatggatccaccagaaactaagaatggaaaggttataaagaaatcacagcattcatcttctggaagaaaaagactatttcttagaaagtaaaataaatgaataaaagcacttaataaggagcataacgcgtaactcccagtcgtgacctggatctctatcaaatcctctccctgtcacagatgctctttctaccttaaatgaatcctattttggctgagaaaatagctgtgtgcctgtgggtaaatgactaaactcttttcacctccctaagttatgcagggtgttagccacttactggcaagaagtctcactctataaagggacactctgcctctgatttcaggggtttcatgtgtagggtgtgggatactctcttgctgagtaggtggccaagagaaaatacctctagtttctttcttctggaagtcatcaaatgaaactaccagcattgctgggggtggtggctcatgcctgtaatcccagcactttgggaggctgaggtgggtgaatctcttgaacccaggggttcaagtccagcctgggcaacatggcaaaaccccatctccacgaaaaatagaaaaattagctgggcatggtggcacatgcctgtagtcccagctacttggaaggctgagtcaggaggatcacatgaacccaggaggtggaggttgcagtgattgtgccact

SEQ ID NO: 35631 - DNA, 815 bp, Homo sapiens
ccatctgcctcagcctcccgaggaggtgggactgcaggcacatgccattaggcctggctaattttttataatttttattagagatgaggtgtctaggttggtcccaaacattcctgagctcaagcaattctcccatctcagcttcacaaagtgctgggattacaggcatgagctagcatgtctggcccaaaaaatatttccttacaattggtttgttttaatcaggatccaaagtctacacaatatgcttggctgtcacggcaccaagtctgttttactttataacagtcttctcccatgcctcccttttaaggctatcccacagcttctcatgaaataatcttgcccttttcactttcctggaggaggacacagtttgtgttggcaatgggcagaaggacaataagcaaagcggtcccctcctccaccctcacccctactcccaactgacctctgccccggccggtggagaagcagcggaagatgaccatgcgcatgtccagcccctcctggacccagatcttgctcatgatgcgaatcatctgcagcgttagcatgtcctggcgaaggtcgtccccacactggatggagggagaaagtgaccagatctaatctccactacctccccagctctcaggtctcccaagtgctcaaccttggccctaaactaacagtgacagggagttccccagcctcacacccctgacctgctcactcagctcacaccaggtcaaagatggcccaggaagcttcccagtttgcccatgtgttgttccagcttgtcctgcaatcccatggccccatctgaattaaat

SEQ ID NO: 35632 - DNA, 1191 bp, Homo sapiens
cacttcttgctgctgagagccaccaggaagaagcaccatgttctctgccctcggttcaccctcccccacagccctctcacttgtcctcataggagtccccttcacctagccccagggacacacactgggtttttctcacccccacccccaaacagcttcaaagccaaagggacaaagaggaggggtttctccaagtaccccagtggtgagaaagccaatggcagggccaagagaactgagacacataagccccaccactattcaagcccataagttctctccaggtccctcagtctgaatcacacctagccactccctctaagctcaggataaggaactgctgggtggggtgaagtacacaggggaggggagctgtggaaaggcagggaggacccacgttacctttcggggaagctgtccctgggccaaagtccatactgtcacaccctcctggccagcccagggcccagcaacttctatgccagagggcgcagaggcagggcggccacccccaaggttggcagtttcatgataaagcagcctgcctccaccgctgtcctccagaggaatctccacctaagtgaggcactccctccagcccaccacagactggcagagccctgctctgtcccagctgcctctaccctgggggcccacagctataattagggcccctccagcagccagcagacatgccaggccagggcttggctggaggtgacaaagcacggctgctgagcctattttgagagttagctgatccctggaccgctacagtggggcagagaatcagctgaccccatagcaaaggggagagggagctggtcctgagccctttcttttcacccaaggaagaagcttccagcttcgtgtcttaaggaaaaggggagtgagaagactttatgagtgaaaccagagccagccaaggccctcttcccttcagtccttgggtatatctggtattccacaacctctcccacagatcttcacccagggctggtcaggataaccattatgttggctgcagcccttaccttcctccctgagaagcccctctccttcctgcagcccattcaacaacctcatatcacacaggctgcctcctccaggaaggattcctggaatgtgctggttggctccagtcccggttctgccactcacaatcctgggcaacttaattcccatctctgt

SEQ ID NO: 35633 - DNA, 1957 bp, Homo sapiens
gtacaaaactctccaacagagttgagaaaaaacagcccaagagagctgccagagacaatacagcgattccatcccaggcatgattggaagggctggggcagggaagctacgaagaccccagaagcgggtggagaggagaaaaggcaggcctgaaggagcaagagcaatggcagaaaacacacacacacacacacacacacacacacttcaacatcagccaactagggtgtgtgcactaacctcatacatttggtaacctcttcccacaatccagaagcctgccaagcccctgggctccccaccctactccaccccacaccagcttggcagccttgcttgtgcttcctgctgcgattgctcctccaacatcaaagtcaccgctgtcgggagctgaaaatgagggacaagtataggccaggagagcagcgccttctcccagcaccggcgaactcaggcctgagggtccctctccctctttcaagctttcagtctccttttgctgcagtatccttataagggagaatccaattctaccctccgcccgactaagaaacgtacacattccccaggctagatgccgacttctcacccagtccacagaaggcactaaccccatcacaggacaggttttgctttttttatttcttatcttaaataaacaaaccccaaagccattgactggttcagatcgccctgcagctgggagccaggaagtgtgtttagcgagaagggggtggggacgcgggtgcctggagccccagaggccctgaagctgctggagtggagtggagtggggtgaggggcaacctgctctgcccggcgggcaggagctcaggctcccacggcgtccgccgctcagcccgccgccaggaaccctcggctgcttccattgttgcacctccgctgttgccatgttggagggagagccccctgacctcggctgcctccactctgggggcactttacagacgctggggccgatgcaacccgcaggatgcgtgtcctacctgcgctagctgctggctctgctgcaacatccgacgtgtcttgtgcctggcgacgtgggctgctcgctccgcgcctcccgggctcgctctgcggctccaggcgcctcttgcaccagcgcgagaggagctggccggccgcacgccgcctgctcccgggccgctcccctctccaggctccgcacagaccctaggctccaaggggcagagggagaggcagcaaagggcgcaaggaccagcttgtgggggtggggaggggtgctctccgccgagagcgtgcgcgagctcgcagagtcaggccaccccgggtgagacaatagcggcagcagcgggcgagagaggggaagccatctcccggacacccggcgcactgcacggcgacgcgacgctcggccagaccctgcctggacaggcaggcacccggccgccggctccagccgcagcgccgaatccgccgcgagccggagggcggggcggctgctggaacccgggccgcccttcgcctctcccctccccttccccctcctcttctcttctcctctcctcctctcccctccgactcccgccccacttgccattgcgtgggggaagagaaacgcgctggcgtcaagttgtgctctgcaacccaagagccaggatttccactccccacttgggtgagggtttttgcggatggtcgttagtttcccctgctggaaccccttggctttgggtcagaggaaagctcaatcattctgctagaaatgacggtgctgaggtccagttatccgtttcaggaatttctaccataattacggtagcgatgttcgggggatcccctaccttgagggttaggttggggtagagagaggctgtctccgggctttacacgctcagtgtcattcgtctttctgtctccttccttcctccctttctggaaggggagtctcgtttgtttttgtattcgcccaggt

SEQ ID NO: 35634 - DNA, 1494 bp, Homo sapiens
aaacaaaaaaaaccctttaattctaattaaaacctaaatgtagctacttaaaaggaagcaggccgggcgcggtggctcacgcctataatcccagtactttggaaggccaaggtgggcggatcatgaggtcaagaaatcgagaccgtcctggccaacatgatgaaactccgtcttttccaaaaatacaaaaattagctgggagtggtagcgcgcgcctgtagtctcagctactcgggaggctgaggcaggagaatcacttgaacccgggaggcggtggttgcagtgagccgagatcgcgctactgcactccagcctggcgacagagtaagacaccatctcaaaactgaaaaaaaaaaaaaaagaaaaaaaggtagcaacctatatggagtgaacagaaagagcttttcttcgggagcgcccggatagctcagtcggtagagcatcagacttttaatctgagggtccagggttcaagtccctgttcgggcgtttgtagttttcgttactttaacctgctaaattatcccatcaagtcccaagagcggacatcgtaaacccttacatttcaagttgaattcaaatcatttttcactgggttcagaatatgctagatagacgtgttttcagggaggaaaaaaaatgactgaaaagtcatttaatttcttggagagtatcgaggtctggcacagtggtttcccagaaaaatatttgttttttgatggctcataattgagaaaggaagaaaaaaacttaaaagcaagcaccttgtgctctcaccacaaaaaaaggtatgcgaggtaatgcataaccttatcagtttgatttaatcattcaacaatatatacgtatttcagaacatggtgttatacaccataatgtgtacaatttgtatttgttcattgaggaaaagagaacaagacgcccgaacagggacttgaaccctggaccctcagattaaaagtctgatgctctaccgactgagctatccgggctcccgtagacaacagcttgttctgccgtttcttacataagaatgaggacccttgagtgattgcatcatccacactgtgagactgctttaacgccaagaaagttcgtgattcgtgcgtaaaaggaaaaacagaaggcccaaattctgcgcctttcaccagcatcaccagctaatttagaattgcgagatatttatgcgcctagtaagcatgattaggtaggctttttttatttgtagttaaataggttcaggattaaaagaatggcgaggtgtcacttttgaagtgctgtaataaccttcgatctattttaccattgataacagaatgggcatcagtgctaaaacctatccaataatagaaaaaaatgaatctgtctaagagactatgaatatgctgttctgaagctatcgggttgcactgtgcggtataaagtgagagaaaggaaggatggtgaggttatccaataggtcgcctgaaagcatccaagttgtttttttgtttt

SEQ ID NO: 35635 - DNA, 1756 bp, Homo sapiens
ttttttttgaggagtttcgctcttgttgcccaggctggaatggcgctatctcggctcactgcaacctccgcctcccaagttcaaacgattctcctgagtagctgggattacaggcatgcgccaccacacccgactaattttgtatttttagtagaaacagggtttcaccatattggtcagactggtctcgaactcctgacctcaggtgatccgcctgccttaggcctcccaaagtgctgggattacaggcgtgagccacagcggctggtgctttcaactatttatttgacatggcttcaagcttccttgccaccctagtgccgccatcgctccgtttcccttccctaccacccttggggagtaagggtgaggactggggaatggcagaggaagcgtagtttttccgaagagctgaaggcagcctgtgattatgaccttagctcttcctcttctctgttttctgatctcctaatacacgtctgtaaatatcacaagaccctgcaagtccctcacttattatctcttcaaatctgacgactttcaaccgttcgggccccacgactctctccccggactaggatctactctatggtagtgagctcagcctttctagctctctagtcctcccattgctccatctatggtttccggaggcctcaccggaagccctcgtgtgaggccgtgtgggaggccggaagttgcggcttcattactcgccatttcaaaatgctgccgaggccctaggatctgtgactgccacccctccccccacccgggctcggcgggggagcgactcatggagctgccgtaaggtgtggctcttggccttcgtcggcggggtgccgggagcgggagctggagagtgaggagcaggcggccgtaccgccagttgtgcgggtagcgggcgggaggagcttgagaggtgggtcgggcggcgtggggaaggccgcgccaggcggaagaagggctcggggggaggggaagagttgtgggatgagggctcgcggaagataaaagtggaggtggggtgacgtgaagtaactttggccaacaggtgacaaacctaaagtcgacgtagttggattgagtttaactggacacaacatttgaggactgttgaggcaatttggagaaaggaggtgggagagagggaaccgggtagaatgacattgacgtgtcttaagtttttaagttagtttttaggtctgcggacagtctaccttagaggcacttgagtgcttgtttgaaaatgcttgttttggcttggcgcggtggctcacgcctgtaatcccagcacttcaggaggccgaggtgggtggatctacctgaggacaggagttcgagaccaacctggccaacctggtgaaaccccgtctctagtaaaaatacaaaaatattagatgtgtgtggtggcgcatgcctgtaatcctagctactcgggaggctgaggcaggagaatcacttgaatccgtgggcgggggttgcagtgagtcgagatcgcgccactgcactccagcttgggctacagagggagattccgtctcaaaaaaaaaaaaagaaaaaatgttcgttttggggccacactgaaacctacagacagtatcgagatggggctcagagaaatatattttaatgagcacacctcccagtgatttttgtataccttaaagcttgaaaaccacaggtttttttggttgtgtttttgttttgtttttgttttttttgagtggagtttcgctctttttgcccaggctgg

SEQ ID NO: 35636 - DNA, 1019 bp, Homo sapiens
cccctctcagtctagggcttgttccccttcatcattaacctctaagagaatcactagtgggaaataagctatgcttttgattcaaggtaaagagactcgaactttccagtgccctaaactgggaaatcttaaactccagcaaagtacaatgctcaaaactgggtaaagctgctaccttcgtaggggatacattttggagaaaattgcatctactttcttctttgtcttttctttttgtgtgagtgtgagtgtgcatgacagtttgtctatgtttgaaaacctgaccatcagcattcctggaattcttggcaatgaattaggattgccagttagctgcctgctgggtgaccttaggtagttcacctcgtgtctctaagcctcagcttcctaatctgtgaaacaggctgatggaccagtgagataacgcctgtgaggtgcttatcacctgatactgcctcttcttgctggcacatcaagctggaggattgcagcatctgaacacgaatgaccaatcaaatctcgggcctataccccacagacgtaacctttatctcccaccagagggcaccagtaacctataaaaatctaagggggcgggcggtccctcttgcccttaacatcgttgaatctgcttgagtataactcccttaagtctattgaaatattcttacccctggtgttttaagaaatcatttgaaaaatacctctcacacccagaaggaaaatatggagtagaagtgtagggtaaatggtgctccaactccccaccagccaccaagagagctctatttccattttgtattttgtccatttttaccattcagtctccatctcctcgagactatctgtaacctagttttacaaattattctctcagtaataacctattgcagttcccttcttcctggtttattcaaatgaactgaactgctgttttttttccctttgatgtacaacctcccgcctcctagcctatcgggccagccttccttccagcaggcagtagggggagggatcta

SEQ ID NO: 35637 - DNA, 1852 bp, Homo sapiens
aagccgtgagggatccatccccatgacccaaacacttcccactaggccccacctccagcattggggattataattcatcatgagatttgggtggggacaaatatccaaactatattacttgccttattatgttaagggaaagaaaccattcatacattaaatccatttatatgaaattcaagaactggcaacacaaatctggtggtagaaattaaaacagtggtggtctctggtggaaattttctagggtgatggaagtattccataccttgatttagatgttggttatatgggtgtatacatttgtctaaacgtgttgaatggtacacttaaaatctgtgcatcttactgaacataaattataattatatctcaaacaaacgaacaaaacaactttttctctgtccttgggaagaagagattttcccactcttcttcattgtaaagaggtagatggctggggcccccaggaagcagttaaatgtggtagaaaacacattggctttggagtcaggctctgattctgattctattttgccatttgtggccttggacaagctgatctccaattttctaatctttaaaatgggctgggagagtgttgtgatgatgaaatgaactaatacagtaaagtgcctggcatatagctggtgcccaagcagctccttctgcaggaagccttccctgacttctccagacctggtcaggtaccttcatttccacacaccagccttgatgcatgtgtcattcaaagccgtgtgtcaacaacagtgcagatctttgacagtcacagacctttgtgggtatttactgaatagtcaaacggcaaatatggaatctgcaaatgccaagagcctactatattggaacatttttatctttctggtccctactctctcctaggctttcagatcttgagggtacaacgtggttatttctcagctttgcttctccccagctgtcaaaagtgctcaataaatatttgaccactgagtaacttttaagttactcatgcatgagtaattgaataaatgcatgaaagaatgcatacactagtgaatgtatgaataatagaatgagacaattagtgcataagtgggggaaataggtgaatggtgaatcaagaaatgagtagagaattaaaggagtgaaggtgaaggaatgaatgaagcaaagctggttacctttcttccaaagggctatgtgctggtgacaatacaaatgggcccattccagagccctggagagagttagagctggtccacctgacagacagccacgagtgacagcccagccactggggtcctccaaatgtactcattctggaaacttctcctttccttccagccactatctgccacccctccatggagctagggacgccaagggactgtgaggcagggcatgactccagggggcagagagctaagtgcatggctgtcctctctcttcccaaacccttgtcacaggccgtgagggcctgctgcctcccctgatgccatgttcctgagcagatgttcctcctgtcttgtcagcaacagagcggctgtcaggagtccgcattatatatctgctcggtaacgtttactgggatttagtgtttaacaactgtcactccaatatatcttttcttaatcccttcagatctgctgctgtagcaactttaaatatttatcaacactgttcgtgtgttcgttggttgggttgcaattttcttgtaattaaagatttacaagacactgctccagacttaggaaggattggtagagagcaaagagggaggggaggagagctctggtcttggaatctgttgtttggaatccaaagctagaattcactctcctgggagagg

SEQ ID NO: 35638 - DNA, 437 bp, Homo sapiens
gatgagtagaactaaccagatgaaaaggtaaggaaaaagggtcgtgtggaggagaatgttccaagctgagagaacattgtgtatgaaggcccaaaggagacagcaagtgtggtttgttctagcaactgaaacacatttgatgtggctggatctcagagtgacgggagagccagcatgagataccgaggccaggtcatgcagggctgtaattgtgcaaggcatctggactttagtctgaggacagtaaggagcctcagaaacgtttaaagccaggacatggtagcaccagatttggattttagaatgagactattggctgctgactctccaccacaaagcagagaggctgggttggaggatatcatggtggatgggggagaggtggtagtggcattgcacctccacgcctgttcctgcacttccacacctgttctccc

SEQ ID NO: 35639 - DNA, 590 bp, Homo sapiens
gcatctccctgacctttagaccctacccgagtccagtttcccttcttcatcaacacttggttctaagcgctgagtccgtgctcaactgcactgaggggatcaaggaaccatttaaaacttcattgaaaccctccaggcacttgcctttccccttcaccccagactgctgccccttccttccctcccctggttgggctgggtggatgaggcagaggtcgtggctcctgggccgggagcctggggctgggcctcgggatccagaggcagtgacttgatgactcatgttcacactgcacctctgaccccaaggcttggcaaaggcccagacaagtccaccccctcactgctgagcatgcagctctttccaggatgcagctcagagctgccctctcacctgccatcaccacctaaggctgccttgcacatggcccgctcatgcaggctgattagcagtttctaccggggagctgcagagaaagctaattgtctttcatctgtaatctccaggggtgatcaggagttcagactgtcacgtgtatactttccccaattggattccgagcttcttgaggcaggggccatatcttaca

SEQ ID NO: 35640 - DNA, 1272 bp, Homo sapiens
gccacccttccgtttccgcttccccctgaccgagtccccaggctgagccccaggccggcccatcccccaccccaaaggtcccatcccaggctgcggtcggaccccagccagccggcccgggaggagcctagctcctggttccagatacttcagacagacccaaggccaccttgtccctccgcacagactcgcgagctccaaggaggagaaagtccccaggctctggagcgcttccagcctgccagtccgcccgtgtcacgccctccctaacctcactgccacctctcggctcctccacatctccagggccccactctacccagcaacagtttgggggaggttctggcctctccaggcgaaggcccaggcgccctctccctggccgcttctgggcattctccagccctccgtccctctgcccctcggccgcctccctctcccaagtctccggctcccccgcaggcgtctcggcggaaggcagcggccggccctcctctggcccccacccgggtcaggcggagctgcggtgccggggcaggagccaggagccctgaggcggctgctccggccgctcccgccgcgtacgcctcggccacgccagcgacctcggtgtccacgattccccggcggcggcggcgctgcccaggtcagccccgaagctgcacactcaccccgtgggcgccgggcaccgtctgccgtctgctgcccgcgcggccgcgctccgctcgccttccgcccggggccgggctggggacgctggtccgcgccctcccgccgcgcgcgccgtctgcacaggccggggaggctcggcgggcgccctccccaacgtggagttatcctgggagcggctccagggcccagccggtgagggcgatggcagaatcccaatccgtccccaccccctctccgcgccctgggcgcgtcgcggccggaggctggcgggcgagagccaggcgctccttgagagcgccgcgcgttcgcaggtgcccggagcaggccctcgcggcgcccggcaccccctccacgcgcgcccctcttcccggcttcgcgctcgccctcctcactcgcttctccgccgctctcccaacctccccagcccactccggtcgcctcctcccagtctgcatgccacgccaaccccctccagtcccgctgccattttaactcctgagtggccagaggccccctctacctaacgcacacacacccgggaggaaggagttgggtggggccagacgctaacgcttgagctgtccttgtgcctagagacac

SEQ ID NO: 35641 - DNA, 773 bp, Homo sapiens
ggtgaaaccccgtctatactaaaaaatacaaaaaattagccaggcgtggtggcgggcgcctgtagtcccagctactcgggaggctgaggcacgagaatgacgtgaacccgggaggcggagcttgcagtgagccgagattgtgccactgcactccagcctgggtgacacagcaagactccatctcaaaaaaaaaaaaaaagctctgtctctggcctgtgagctgcaggacaatttaggcttggaatttcaggggccacatttctcactgcatgaaaagaaactaatacctggcaggaaacagtgtcatgactaatacttcatgtttacgcatcactctgggaatttgctgagggcaagggctgtgtcaacctctctcagactggaactctctaggggcgggaatggggtttacctcattagattgggagctcccctaggcaggagtgactctaaagcagattaggtgctaaagtcctggtagtgtaattggtaaaatatcatgcatttaaagctcctcactgaaggcttaattccttattcagatatctttataaaaatcccacctgatcataagctctacctgggtagtatctatctcatttgccattccaggtactgagtctaaaaagaaagacaaggccatctttgccttggggaatttgcaatcctggagcagaaggtatatgtgctatgatggaaatacatagagggtccagtgggagcatggggagaaatggaaacactatctcaggacaggtctggaaaatcttccg

SEQ ID NO: 35642 - DNA, 693 bp, Homo sapiens
gatgtcctcctgcttgtctgggaccatggggaagtgttgaagagccacagacctgctctctggtaaaagagcttcccagacagtgggtccccaagagcacaggcccagctgaaactgcccaggtgttcaggaacagccaagagttttatggctggagtgaggtgaatcaggttagggtgggaggagagatcagagctcatgagggccttgggagtcatctgtggtccttggattttgctctgaggtcattggagggttttgaacagaggagtgatatgacctgacattttacaaggacaattctaattgctatttggcagactgtgtggggcaaacctggaaacagggaacaaagttcaggagatttgcaaacatagtagtcagagggcctaggtggtagcaatgaaggtggtaagaagtcctccaagccaacaggattggctgctgaattgtatgtatgatatgagagaaagaaaggattcaagaatgatgctccaggtttagccttagcaattccagctgccatttactaagatgggaaagaatggggatgggagcagcaggttgagggagggtatcaaagttctgctttggagatgttaggtttgaggtgcctattgggtatccacatggcaatgccaagaaggcagttggaaattggagtctgggacccagaagaagatgtctgggctg

SEQ ID NO: 35643 - DNA, 2259 bp, Homo sapiens
gtgctttccggaagatccaccctccaggcgcctccacaggttcagctgtctggagcctcctgaaccaagttttctttggtttttatggaagctttatgacataggcctgattgattacatcatcggccataaggtatcaacgcaaccttcagcccctctctcctctcaagaggttctaatcataccatggtctttctggtgaccagcccccattctgaagccatctaggggctcccagccaccagtttcctcttagcatccaaaagacattcttttgtcagagattacaagggttttaggagctgtatgccaggaaccagggacagagaccaaatccgtatttcttattgcatcaggataaaacacctgggtttgaatccaacaccatcacctattagcatcacctatttgctcctgtcattttctctttctggcctcagtttacatgtttgtaaaatgaagttctggatatgatgacctcttgggttccctccaaagatgactttccaagagtctgctgttttacatgctaccaaacggaagtggagatctaaaatttcatgtgctcacggagtgggccactcccacaatgccatctcccctccccttgtgtgactgtctctggtggtctgctcctgaaagagtacacaaagtcaggatgcaaagtcctctcactggagaatgaagacaccgttcattctggtgtttgttctgcggagcttcccagagctgtagtcagtcacctcaccccggtgccaaacacttgatgtgctgactactcccgtgctcttaataagcttatagtccggagagatgattgaagggctgggagaagagggctgtggagggacaggaccagctgaggacgtgggtggtcagactcctagattaacaaagcctacagatgcctgttgacagaagggaaggagacaggttctcactgataggaagacagcagcaatgcaggtacgactcatgtgtccatttcctgtcatctgcaggtgcttggtgagacagtgtcaccgttctgggaagagctagtctgggagaaggagtcaggatactagacctgtctgtgaggcactggatgactccaggtgagtcattcaccttccccccgactccaaccctcccaaatcttggtgttctcatctttatggacctaggttctttgacacctcattaatctgaaggtggaaccaaagaatgcacaccatagaaatggctacatcaaagacttcatccccaaatacatctcttctggttcaaaagcttcttggaacacaagcagacctgaccctcctcctcttctgcaccccatgatgtccaccccctgccctctgtcattcttcactctctactctacttgccttctctctcccttgtgaatctcttgtaaatggaagtcctggtcccagcagcgtgctggtaaatgtttaacaaacagctttgagactggggggaatgcctgatttgtagggcttgccaactgccaattgtaaatactcctgccatgactaatttcaagataccaaatatgacatcattgaatgcagagccaggaaaagagtcacagtagcacactgatgtatagtattttcaccatacacatagaacaggagtaaatgacctcaagaacacagataatatagtcaaagaattaagaattgataacattagagtatttattgcctttgcttttaatatcacttattaaattataagtttatgtaatttacttttcaataatggtgtgtttaacaactggctcattaaattcctgaaaaatgcctggtcctcccctttggatctttccagatgagactgtacatccccaaatttgcgggagtacatagttgaggcccttgctgtgggaagcctctcagggaaaataggagcatttatttctgcatgccatttgtctccctttattaactttagtttctcttcctgttatataagacattccttgtagattctcctgcctttgtaaggatggtattgagagaaatgaaatcagggcagtagtaacaccttgcatcttatggaatcttccagtttactaaacccaaatctcattacttctcacagcaattctgtgacgtgaggtatgtggagcagttaaattgcagatgaactatttcacaccaggttggcaaactgtttctgtaaaggggtagaggctgggtgcagtggctcacacctgtaatcccagcactttgggaggctgaagcaggaggatcacttgagcccaggagt

SEQ ID NO: 35644 - DNA, 1025 bp, Homo sapiens
acaacaaaggaaatgatcagcagagtgaagtgacgacctacagaatgggagaaaacattcatatacttcgcatctgacaaggggttaatatccaggacacacacggaactcaaagaattgtaagtcttaaacgatggctttaaacaaattttgtgaaaatttaaccatcaggtctggtataagccagctccaggacaccactggaagggttcctgttttggaagctggactctgtcctcctcttggagccctcggagagagcaagcgaggctgctctgttctggaggctccgtgcccctgaggcctttgaccccgttacccgcgttcctccccttgaagcccggtcccgctctcccaacaccagtgttctgctgccccctaatggcagcttctgccatctgcggctgtccgggagctagatccaccgcaaagtccaccagctccgctccaggatcagagacccctgagcaggttaaacaatcttccccctccactccagacttttggaacccaaggacggccgggtcagagtacccaggacctcaagccccgctgccccttgtccatcccagaatcgtggtttcccactgccctctgcagtgccgcggcgaagtgatgagcccggcactgtggcgccacctagtgcctctgctgggtcagtggcacctgcacctgcactgccagccccctgctgggagaattccgactcaagaactgtagtttgttgtgtgttgtttttgctttggggctcactgggaaactctcaccagtcacctgcattacagcctggggcttcctgtcactgtagagcaggtaagaagaggagggaaagaaaagacctcagcagcacagcaccagaccttcctccacttggtggggccttctgaccacgaatggtgaatagtccaactaacaactaaaagctccagctgggaggaccctggagctcccctgagcctgtggccttcaaacggtactgaccaagcccatcagtaagcagtgcattttacaacgcaacagtccag

SEQ ID NO: 35645 - DNA, 674 bp, Homo sapiens
ctcagttcactgagaagaaacagaggacaaagaacaaatttgcccaatagcaaattaggggcagattcagatctaggatctagaatccaggtctctgatgcccagtctcatcacttcaaggcctcctctgggctctgtaccaagttccttttgcactgaagcacagagctctgtctctctctgtggcccagatctatatagggcagactgtcaggatctgactgcaggcccctttgtgccctggaagtaaggggttgtcaattgctgtttctcttataatgaacttctcctgttctagcacaaggcggcagcaaagagaagcaaatggccttgatagttggaaggaaaaaggagaaaataggctctgggcagttccggtaacctaacaagtaaatgagtagcgttagcgttttgcttgagatcaaaagccaaagggcggtattttgtcaaagacctttggaacttaattttaaaagttaaggagggccaggcatggtggctcacacctgtaatcccagcactttgggaggctgaggcagggagattccttgagtccaggagtttgagaccagcctgacaacatagcgagatcttgtctctacaaataaaaaacaaaaaattagctgggtgttgtggtgcacatctgtggttccagcttcttaagaggctgaggc

SEQ ID NO: 35646 - DNA, 2063 bp, Homo sapiens
ctggccctccctaccctgccccacagttccccctgctctgccgggctgtctttaggcttttcctcaatgttccagccagctctagccttggggcctttcctttttcttccctctgccttaagctattccccccctcacctcccagttcgctcctttattttatttaagtctctctttgatatcacttcctgaccaccctatgtaaaatctgccctttctttccccactgtgtatttcttcatagcacttccccactacctgcacttacgtctctgtttattgtttcatggcccgtctcccccactggaaggtaggctctgtgagtgctgggacaatgtcttgtttacccctgaatcccattgccaagagcattgcctggcacctgtgaggccctcggtaaatatttgatgaataagtgaaaactgtagctcagtgtttctcactgaattctgggagaatgtttaccatgtgcttttctattattttaccagttaaaagacaaaacttctcttttgcaattctaatttgaaattgaaagatgtttttcataaaagtggattttggtttcttaggatagtgtctctcacactggggtatatagacgcccggggttctcaggtatgctcatgggagtctgggaggtattctttcctttggaatacgcctacatatgagtcaagtttgggaaaacccgtgtatagctgctggaggccatggataagggctgaaggtcaagcataagggctagaggtagggtgtgttggagttgtctccagagaactttctagaaagccgatcttaaacagtagttacaaggaaggggtgagcctcaacacaggatagaatggcactggatgactcgcactgggagcccagcttatgtgaatgcagagaagctatatgtggcaagcactataggccataaggggcttggctgaaacacggcagcctgactgaataggagtttcaacttggatagaacaaggtgcagagttgagggcacttcataccccaaaagtcgaaatttgagtgagtgacagctgtgcagggctggggcggcactggagcagcgacccataaactctgctttctagccccttccccatcacttacatcccattgaagtcatgtcagcatgaaggccccaccagggagcatcgaccccgctctgtggcctgtgcagctggggtgtggagtatatgtgctcaggagtcagctggcaggtggaagatgacccagccctccggaggatggtccccagctcaccagcttgcagtcctttgtttaaccaggaacctagcaggccagaggtcagcatttttcttggaagactgtcaaagcatgcctgtagctgaagaggagcagggtcagattcccagggagtgggccagcataaggtcctatcactgcttagttctgcactgtctgcagtctggctggtgccagcagcatgggattggcagggcagcttccatagtctggccatagaaccacaggcctgagccactggaaggccctttacaagccacacagtgacctccatgctgcagggatgagtggtgcctgagtcccagagagttactggaagatctgagacctgaacccggatgtcctgacacctagcgtggtgctccctctgccatctcctgatcaggacagggaacccaggtgggtaacccagtggggaacccagcataacagtgcctcgacatcttggtttttccctcccctgcgtctcacacagaagtattaagttgacgttgggaggctgaaataaatgcatcccactctctgctggagtgacagtgattctccttggacatgtagctataatgtggctctctcaccctgtcagggccttgggtgttttcaggggtgaggggtgtgtgtggaaggactgtgattcaggaactttcaagcctcagggtagcatctatatgtagggcagcttgtacagaaaggctgctgggcctggggagaaggaggtctatgccactcaaggtgctaccttttctctgtcagctgctttttccacctccctctggttcttcaatggtcagcaa

SEQ ID NO: 35647 - DNA, 4641 bp, Homo sapiens
tgagacaggaggatcacttgaggccaagagtttgggcaacataatgagacccccatctttttttttaatatgtaaaataaaataaactgaaaaagatgattttaaagaccttttgaggagcccagggtgggaacaacttgataaatattcaaaataatatttcacttttagtatctcctctcacccacccatcacccctaaagtgaacattttagaataacacagtgtggaacaaggaggaaattgttccagccgtgggccagcagaagtcctgagtggccaggagcccggggaatagaacccttcaccttcaccctcccctttgccctgtggggggggaagcatggtacactgggcacctccttgccaaagtccagaaaatctgtgtggctaaatggtgaaagaattttccaccctctttgccctcactggactttgtgggatgctagaaatattttgcaacccaccgtcagagaaagaattgaccagggctggtgccaaaatattcagtacattcaaaagagtcttttgttttatgaagaaagtgactgggctgggagcctcgtcttctgatttgacatcacagcctggtgggtggggccttctactgatcctgtccccactccctggttcaaagttccttagcctagtgaagattctttaggaaagctaagttctggttcagtttgtgagttccataaccttagacacattcttcaccccctttggcattcactgctcatctgtgaaatggtgagactattccactcctgtcgaagggtgagttcttgttccccaagaatgacctcttgttccatttccagctctcaggtctgagcttgcatgaagtgagtgttgcccctttccagatgggcactctgtgatgtcaaacatgtaattctgtcattatccgaaacacgtctgagctatgctttcgaaatcgctttcgaggctgcagcacattctttgaatatcctcagggatgggcagtcttcttccttttagagggaatttgatttctgcaagccgcctaatcaggacaataagtctaggctcaagctaaatgaagatacttttagttccaaacaaatgaagctgatttcgttcagcttctaaactgactcagcagtcggttccaaataaagtttcaaaaatgctttaagcaagaactgcatcattaaaacagcaggtggtaggctattataacttttaaggacagcactcatttggacttttaaaaattatgatttttaaaaaaaattaatttgctactttatatttacatctcatttttgtaaaaagtaattattctctttattcctattcatttgctaatgtgtttttatgtgtctggctgtttatgctttttatttccataaaaatgtggcttactcagatcactattagctataaaaacataaaatgtcctagctcagtggttctcaaacctatctcagcttgttcaaacctagactgctgggcccacactcagagttcctgattcgggaagtctgggaggggcccaataatttgcatttttcatacgttcccagattctgctgcaggaccacaagttgaaaacccctggtccagctgaggtgctttggtcatctagttcaacccccttgtacaaatcagtaaactgaggcccagggagacgcaactcccttgcctagtgttatagaactagttactgacaaagttggaactggagcccagggattctgtatgcccattctagtgctctaaaatgatcatttcttggttgaagacttcttagcatgactgtaggttcttaccattttgcaggaccctatcgaattcaaatattccagcctgttatcctttttagcacaactgtgtcatgatttttatttcatcacaggaagagcctgtgtttaatttgcctcattaaaaaaaattgtgataaaatatacataatataaaatgtaccattttaatcatttcagttgtatggttctgtgatattaagtacatgtatgttgctgtgtgcatctacattgccgccatccatctccagaactttctcatcttcccaaaattaaaactctactcattaaacaataactccctattccctcctcccccaagcacctgggaaccgtcattctgctttctgtctctatgaatttgacctctctaggtaggtcatatgagtaaaatcatacagtattcgtccttttgtgagtggcttatttcacttagcatgaatgtcttcaaggttcatccaggttgtagcatgagtcaaaatttccttcttccaaatactgaataatagacctttatttgcatggatataccacattttgtttatccattgtcaatggacatttgggttgtttccaccttttagcttttgcaaatcatgttgctatgaacatgggtgtacaaacagctcttcaagtgcctgcttccaattctttggcatatctgtacctggatatgatgtggaattgctggattatgtggtaattccatgtttaatttttttgaggagcctgattggcttttttttttttttttttttttttttttttgagacagggtcttactctgttgctgtcacccaggctggggtaagatcatggctcactgtagcttcgaactcccaggctcaaacagtcctcccacctcagcctcccaagtagctgggaccacaggtgtgtaccacaacgctcagctaattttttatattttttgtagagccagggttttgccatgttggccaggctggtctcaaactcctgggcccaagcaatcagcccgccttggcctctgaaagtgctgggattacaggcatgagccaccatacctggcccctgattggctgttaattctgggagttggaggctggaaatacagctctgttcttaataaattggtgggtaaacagagcctgaacagtccctggctcttacccatctggtgctactcttggtgctcccctgaggccttgtgataaaagagaccctgttattcacagttcatggccggaggctgcaaatggtctctagggttttctctcttctcccccttggctctctctgatttccgtgtcaccagtttccatccatatttgtctccctctttgcctttgggcagttatctgcttgtatttctgtctaccaaatctagccaaccccaaagcactcccactgtactgcagaaccaagtctggaaccaatgggtcagcttcattacacttgccaaaagacaaaattacaacaaatttagttaaagatcgaattagcttttatttgtgatcctagaattgggcaatacctcattctttaaaatggaatgagtgttcccatgacctgagcagaggaggttggctttataagcagaaaaaagctgaagaaaacagtcacagagaacaaaaagcagattggtcatttcaaactaactgtccttctagggttaaaacagaggggacttccttatgctgactcaggttgactggaatcttctggatttttgaaaactggcccatttcaaagtttggtttgattccatggcactgagcacaagtgacctcgcataaactttgtttaatacacaacaccttaaattctgtaatgaaatgggattgtaatctaaggaggcagtatgccaggtcatggggtgggaagacctcccatatagtagagattttaaaatgcttacagaattaaatgaatgagtatgacaagatggcaagaatgctgtcaggcagagctctagggctggccattttgtaggaaacagccaattacatgggttggttttcaccacaatccagcagtctggggatccaccaactctagggaaccctgtgctgccctagagttagaggaggcaatggggaagcctcatgctttctgcttctgaatgatcccagcttgagagttgaagcacgagtcttccttggggttcaccctggttgggatgcttcccgtgggttgtcaggcagtgagtccaggagtcagccgtgtttcaggagctcaagggcaagaacgaccaggctttggttttgttgattcgaggtttctgcctgtctgcacaacctcgaatttctcttacctgatttcagggaatattgtgaaactctaaaaccaaaactattattttttacatttaaggaaacttaaaatgatacaatattcttttcctaggtgatttacaaaatccttctgtcaatgaagttaaactaatagcagccaagtatagagcccccataaggcttgtttccacatcaccttcccaactttcccaggatcagttaactgagtggataggttactttaaagaaaatgttttgaagcagcatgatgcctattattgatgtcatcagaaattacccttttggtgatagtacaagtgcttcattacgcaggttaacaggaaaagtgaagcaggtgtggtagttaatccacaaaatccatattggctcagaatagcaggttattttgtgacagcagaagctaccacctttctgaatagtcttacggtgttcacttttacccacacactggtgaatatcttctcagccctggggactttgtgtttcccttcctccaggctatgttccctgaaggaggtagtctagacgtccgcccccagtgtgcaatatccttgttt

SEQ ID NO: 35648 - DNA, 1825 bp, Homo sapiens
aggaggaagccctccgtttatctgcgtcttctccctttgttggaagccactgccatatggagctgccccaagcgtctgctcctgagccgcccctccctcctcctcccactccagcatgcagcaccctccaagctcaggcttcgtctctccccttccctcccgccatccccagtacgtccactccttgtcacctcccatcacgggaagcagacactggccctctgatgcaaggcagagaaaccactgagcttccccaggccttcaatttcccaaaaggatctatttgattaattgcactcacactcctaagtccctctgcctgtcagagagaagctgggcctcctctctccagaaacattgacacaggcccccttggacagcatgggcccaggacacacaactgtggatcactgagggtgggaccatggagcttcattaggaactgtcttccccacctgctgcccccaaaccgatttcaggcccctgaggcaggcacctgaggcagcccccatgcttagccccattttcctgtgggcaccgagacctgtagggtaagtgtggggtacatgagtgtcaacggtgaaagctactgccctaatagcttgtgctgtttacctcctttctgctgcagtgatgcaatcatgtctagacccctctcagcctttcctgctgcctcgccaagcccacctttccaccagaggctgggctgtttgaaacagcatgtcacctgtgagtttctaataagaggaccatatgctctagcaaagggaggcccttctagggcataagacagcaaggtttcctccacaccactggagctaagagtctttggtataagcacttgcagccgccagcgctttgcaaccagacttctagacaaatggtgcatcttataactcaggaaaatcctcattctgttggctgcctccccctttttgctcccacctcccctcccccatgcctcctgtattttcacatctcctccagcctgtagaagcctgccaggatagcagttggatccagactgatgtctgtatgggatgtaaatgcagaaggctgcagggagggagagaaggaacaggtgctgctccctcctgctgtcttagttctttcctctctatgctcccgcttatcacatcagacaggaatttaaaaaatgcaaccggggatgtgctgtccttgaaatatcagcagctaaaccaatattggcagctgaattgatgtcaattcagaagacccagctccctctctggggctgactccagctgtttggtggatgtcagagctggtgggacattggtggaagaagctggggtggagtgctttgcttgtagaaaccatggcaaaggcaggagagaggggagcccagaggggatttggctggcctgggattttataggagcctcccttcctctctggtctaaagtagactgcctgtgcagataaccatctgttggctctaagagtaaacaataattccttaggtatagagctagggtatggtgtctgcacaggcatcgtctacactgtagatctacaaagtagatgtgaaaccccatcttgtccaaagccttatcgcaaatcagtataccagctgtaacttgggggagaggagaaagggccaatcgtttattttgtttgctttgttttgttttgttttgagatggagttttgctctgtcacctaggctggagtgcagtggtgcaatctgggctcactgcaatcttcacctcccaggttcaagtgattctccggcctcagcctctcgtgtagctgggattacaggtgcccgccacatggctggctaatttttgtatttttaata

SEQ ID NO: 35649 - DNA, 1212 bp, Homo sapiens
aaatgtagcaccactgcacctgtaggaagggaggcccaggctcctgcactacgcggtgtgatgattcaggttaaaagggagtgtttgcttttttgttttgttttgtttacttgaggcagagtctcgctctgtcgcccaggctagagtgcagtggcttgatctcggctcactgcaacctcctccaaagggagtgttttctaatgatgccttttagatagtcatgagaagggctaccttgtaagcatttgatttgtcagaaattattagaaaatatactattgataaggaactccggcaggtgcacactttgggaggctgaggctagagaattgcttgagcctgggagttcaagaccagcctgggttccatgacaaaaccccatctctacaagaaatacacaaattagccaagcatggtggacctgtagctggacctatagtcccagctactcaggaggctgaggtgggaggattgcttgagcctgggaggtcgaggctacagtaagccatgatcacaccactacactccagcctgggtgacagagcaagatcccgtctcaattaaaataaaaaaaatcagagcagtcctgcccaagtagacaaaataattgctccaggtctgtgccagcagcacagagcagcggaaagagcccatgtgtgtctatggccatgagagctgcagggagcaggcctgggagagaactgacctttgccccatgggtctctcaggctttcccatgtatgatgtgtgcacagtgtgtgtgtgtgtgtgtgtgtgtgtgtgtgtgtgtgtatgtgtgtcggtgggtggggataagtgaattccctcttgttgagtgtttttagtgctgagattatattccaggcctgaggccatcctggactgagcacagccctaaataaagaatctgagagggagagttgccccaccgctcacccctccgcacgccgccctgatgtctgtgggttgaccggggtttggggagtatagcattgtgagctttgagcctgcccaggaacctctggaacgtatggggcatagtcagctgcccagtgtgacttcggtggccagcaccctcggggcacagtagtacctctgatcttattagcagggaagcaggagtattccctccttctccaaagagggacttgtaattttggagacccaagggaatgaaagggcttttgctgggcaggctctggctgagaaggc

SEQ ID NO: 35650 - DNA, 973 bp, Homo sapiens
ccttgatctagaaatcgctccaggagatcagtgcatttgttactcccttgccaccatcatctattgttaaaaatttcaaagtgagtgacacaacttgtttggggctttgtttttgtcccaaatttgtcttggcctaaaagtaggtgattttttgtcatgcagggagaggggaagaagctctccagaaccggaaaggttctggctctatagcggctttagctgtggatgaagaaacatcttccttgtgccaaatgaacaggccaactggggctcagcaaagggtacaaggttcagcaatctctgtgctagtaggggtagctggcagtctggatacttacagggcactccctggtctgagtgagtgtagctttaaactcagccgagcaggctgccaagtggccggtatgctaagccctggggctaagggtaagggtggggaaagagattaagagagaaaaggatcagtaccttgcccccaggggatatcctaatcagatgcaggtcattagatacacagcatagcggaggggaaaaaacacacagtgatttacatgaacttctgaatgttgacttaaatattcattactcctcctgcacctggcctggcgaggctgatcctggtagcttgcatcttgggagtccctgcccatctgtgtaaacgtctcaccccaccccttctatcctagtccttcctggtccagcatcctgtcttcctccgtgtctccgcctgtcctgcacatttgcatgccatcaaggctcagagggtctgagagtcgggctccctgattgaggctagccaggccgactcaggcaggatgtctgagtggccagcctgtcctgtaacaaggggagcaaggccaggcaactggacagtggactgagcagagcaagtggctggactctgtctagctcagatgaggtcccaagctgttgctcactggtatgtgcatttgattttgcttcattacatatt

SEQ ID NO: 35651 - DNA, 1567 bp, Homo sapiens
cgtcattcccaccattaaactgtgagctcctcatgagcactcaccgtgccttattctcctctgtatcccagcacttggtgcaatacctgatacaagaggtacttggcatttgcttgttaaatgaatgtatgtaggtataggtgaatggatgaatgaataccatattttctaacaatttctggttattgtttattgaacacatcttttgtgccaaacactgtgctagaagctttcagtcctgaatcagtctaggttctcagttgcaggcagcataaatagactttggccattgtaaacagaaatggaattcaccagaaggctatcaagtcgatcacagaatcaatggaaagactaaagaagtcgactgagaaatgggcaggagccaacacaggccagccagcagagacaggctgaggtcacatctgggcaacgtccagccaggacgccaccgctggcatcacccacactggacactcccttcactgatgccagaaccttgaaatgcccgctgcctcctccactgtccaacatgtatgtgtacctcgcctcggctgatccacgcagctctctgaagcagagcctctcctccactttacagatgatgaaattgagtcttagaagcctatggtcacacagccaatcaataaggtgggtggaattggaatcaagatctgtctgactccaaggccttccaaccactctgcactgtctccttcccgggggcaccactgacattgttcttcatgaaggagctccctgtgtaacgctacacagcagccccgagattccacattgacgtgggctgattgaaactgcttccaagaggttgtacatcagacacccagagatcctggaaaacaggggtctggcctaaggctcagggaggcctgcagaatctagtaaaggactccaatgtccccacctgccccttccagctcccatgttccatggctgcctattagccaccccgggcaggcttagtaaagggcagacagagcaaaaggttatcgactcttcagcccagcccacttccagggtcacagctgcccccaagactgttctgtcatatcctctggatggcatggcttttaccgggaccaaaagatgtccccaccaggaacgtcctccttaaacccagatgacctggggcagtcaaggacagagctccaggcagggaacccacgcacccagtcctagcccagccccacctccactgctctgtgaccttggcccaatcatttcacctttctggctttgctttctttgtgactcaatccctctctactgtcctgccctcctgccctcccaccttccacaccagccaaattgtttcataaaaaaagaactcagggttctttgagctctttggagagaccacataaatgcagggcattattagcatcattactattaaatattaataatgacattagcatcatctattataagcctgaaaaaggagctgcaagagccctgggttgaaatggcaaagagaataattaggcccctccaggccacagacccctctgggccctcacatgaaattaggaaggcaaatgcagacagg

SEQ ID NO: 35652 - DNA, 2351 bp, Homo sapiens
aaaaaaaaaaagtccacttaaaactccaactcctccacaggtttggggggtttgtttttcctggttgacttcttcctttaccccaaagacattcactctctgttccaaacattcttagcaactggtaatgactctttcaggcctgcctacattctgcaatatcctacagctattttacataatcaccttaaactccctgcttaatgaaaagctctttaagggcaaagaccattttttatgtatctttgtagcccttttgacaattaacatatcttctgacttttttaaaagagaaacctaaccattaggaacagcaagtagtgcagaagtccttgaaaacctcagctacccctagaataccatgctaaatgtcacctaatggaagtccaggagaaaggacctacagtttttaaataatctggataggaggtaaggaggcaatgactcaaagtgagggcgacaaaagacaactccctccgtatttcacacctcagtgttttacacaccgtccctagcaaaggaccttaaacagaaagttaggataattggattccagtgccaactatgccatttacttgcttagtgcctagccattaccctctgagcctttattcatctgttcaatgagaagcttctaccagaagatctccaagtcccctccttagacttctcttttctacaaaaagattaacctgttcaggcacccaattccctgacaagtcttcaaagcttcatcccaagcctcacttcttcaaattccatctccaacaactctggtcctggctgctctgggtacttcaacacctgcgatcctcataatcaaagctaagtcacaaactgtctgtccccatcgctccataattgatatgaaagtggcctcgggaggggcaatgcaacctactcgggcagaaggtgggcttcctcctcccgctgctgctccacatcaggtgtgcccagtgatccatagccgaacagtgtccctaagattgcagcctgactcccctcccgcctgggttccctcctttccagtacccaacgcttctctaaaacgcagccacagcccttctcacccagcaactcgaggttcatccctgcggactgtggccgcccggtctcagctccggcaacaacaccttctccccggccggcttcagcaacttgcgtctaagtggtggacgccgcgaagagactggcgcaagctccgaagactttcggccttagaaggccccgcggcttccgctttcttcccccgccttccttgttcgtttcaggtgggctgcccaaatatatgcctgaccaaaatcaagcatacactctctcggaaacaattaattatgatctttgctgaggtacaacaatgttatcgtcactagggactttaaatagcgcgacaatttaagattatttgctccgggaacatgtaggtgaggtagaaattccaggcatacagttaacctactagttcttgccctgttgtgtgttcagcggcgttgtccgggcgggctacctcagactccgcaggaaaggttccggacaagtcctgctaatgcaagaaaccagggaaggtcgtcccctagtgctcgggtgtgtagcgccgctgacctcaccaaggcgcgtacttaccctgtatgtaggtggcgttgcagggtgtttcggtctcgtgaaaattatttctcatttgtaaagatatgctattgatcctacagaaaggtacgacaacatatgttaggcctgtctgtgttaagataataaaaaccttattatctaaggttttaccctttaccaaacagtgttgacagggacgctgtgaaaaagactgtgaaaaagaattggaatgaggggtggactgagtttcccggagctcagtcatacagaactccaatgaaatacccaaagcaattagagaagtccagttactggtatctagcgaaagagcaaattttatatgaacaaattcctactataaatgctgtggctcatcagaaaaaggaaacaacgtcaaaggctcgctgcagaaaatagtactcgggctaggtctccgacaatggaaaaatacacatacacaagtttattaatcgcagtattgtctgcaattgcaaacttttggaaacaataatgaaacttttgaactagggagcccagcattttcatgttgcccagggccctgcaaattatgtagctagtccagtctgcctctacttgacaaatttgcagaaaaagcagcctcattcacacagtgcaccctgtccctgggccccagttgattgctctttcagtaagcccctgacctaagctcaacccaattaaattcctttcccaagaatttggaatgggaattaagtggcccccac

SEQ ID NO: 35653 - DNA, 708 bp, Homo sapiens
aaatatccatatgtggactttggctggcctagagactttcaagaatattttgcaccttttctcaaaatacttttttttaaagaaaatgaactgtaacacaactactcatctccttacttatatcagtccctcccttccaccctccccactggggaaaaaactgttggggaatctgctagagaactggtatctgacagcaaactaagccgtggggtaaactaaaaagggactctgggtagaggaaaaaaatctaacctcccatatgtgaatgagagtatgagctaatacttcccaagaatgctaggaatgtgaccttcataatggaagcacagacttatgattatagttagagtcaaaagaaaacagtctggaaagggaactatataagacttttcctaaaatttcatacacaacagacttacaatgattttccagcaagtagagagtacttacccctcctttcttgacacctgactcccttgaagccccatcatagttcccagaaggacagtaagttagtgcagagaatagagtacttgaagtatagctaaataggtggtaaaaattctgagaatatactgaacatcctaccaaaacaaggctaaagcctgcagagcccaaagacactgagtcagttactttatcatttgcaagtaaaaaggttattagcactacatggaatttctgaaaggctccaagagtttaggg

SEQ ID NO: 35654 - DNA, 703 bp, Homo sapiens
gagagatgtccaaatggtgattcccatttgtactttttctttcttactcctttacctcttcactttccctgctacttgccttaggtaggtctcccctgatctggtttctcccttgcctgtgccagacctgccagtagtgattgtggaaacgagctcaaggggtagcactcaggattaaagtagtacgccctgcccagacccactgcctgccctccagccttacctgtgaaaagttcaggggccatatggattggtgtccccacaatgctgcctgacatcatggcctctggcttgcagaatcctaagtcagtgatcttggcacggttctgcttatccagctgccaacaaagcagggcaagagtcaccttgtttctgatcctgcacacagcactgctgcgtacctaagctcaaaggtaggtacctcaaagtagtgtcactggataggattatgctctgaaaatgagttgtcaggtgatttcatccttgtacaaacaccagactgtgcttacaccaacccagatggtatacctgctacacacctagtatggtcttttgctactaggctacaaacctgtacagcgtattactgtactgaataccataggcaactgtaacacaatggtatttgtgtatctaaacatacttaaacatagaaaaggtacagtaagaatatggtataaaagataaaaaatggtatacctgt

SEQ ID NO: 35655 - DNA, 1128 bp, Homo sapiens
tctttgttttccaacatgtcactatccaagctctttgcttctcccactaaatctttagctttttcatccatttgacatctctaccagatttgaacaagggcatggagagaaatgaagttgaaagcagatggttttactcctggattcttgcacactgctcagtgatgtggtggaatgcaatatggaagtgggaacagcacgagaatgaaggcaggctttgccactctgactagctctgtgaccttggcaatccactcgatctttctgagccttgaaatgctcgtcggtaaatggaggggggtggagttggattagataatctttaacatgctttccagttctaaaatgccaggttttaactgctgaaagaccaatgatgtgagggggatgggtggttggtgtggtggtttttattttattttaaattatatgtgaatttaattacgcaagtgccccttggaccactataactgcagaacaaaaagtagactgaactagccaggggctctgaggacctacagtgcagtcttagcagttctctaaagaagagattaaaagctgtagactgacagtaggagggaggaagaaaacctgtttcagagctggagcagctgcctcactgacagttaaaggacttcaagttaatcgagttttcttttgtaattaatacaacagcatctgcatatgggctgccagaaggtaacagcatggcttctcagctggctcacattaaccctgccaactctggctggaggaaaaatcatatcaaattgtcttaagtgcaaaccaaggcttctgttgttgttgttgttcttggtggttgttcttaaatacagattttgatttttgtttacttctaaacaaaagtttcaagctagatggaagagaagaacaactaaagcagcaacctattttggtttttgttttacataacatttattgagccctttctatgtattgatcactttatttgcttcatttcatttaatgctcacaattctacaagacaaggactattattaactccatttaaaaatgaagaaatggaccaggcatggtggctcacgcctataatcccaggactttgggaggccgacatggatggatggatggagctcagaagtgcga

SEQ ID NO: 35656 - DNA, 1484 bp, Homo sapiens
cctagaaagaatcatgcaagaaagaacaagagtagctagttctccattggctcaggaccaaaatgatcccttccctctcttcttcaccttaagcatgagcaacatctctggcaattccgtggcacccatcagatatgatttcctctggcgacccccaaccctatttagagaatgtcccctcttcacagagctgcctcatgattggtgtgaacacatttcacatacatcatcaaacccacacacccgactacagtcccatggcctcctcggactcccgggactcgctgccgcctctgctccatctctaaactggggctctgacccacaacggcgcacgcgcccgcccccaactcagagcaactttccccactcctcggattaactgctaccctctccgaacgccggcccgccccaggtccgtcagcgcacaccccggtccccggggtcccgctccgggaactccggccctcggttgcccctggctcccggtcccccagcgggccccttcctcccctcctcagaaggatgccctcccaaggtatcccagatccggccggcccatgcccggggacccggccacacgacacgactgcccctttccgcctgcccgagaagactcgggcttgttttgcagggcaggggtgcggtccgtcctccgatttgcctctcctgccctctctccctccgggctgccctccttacccgcctgcagcccggtttcggcgacatcgcctgcagggccgcgctcggccccgccgccgcccgtgagggaggagagacaagtgtggttgtgggagcacttgatgtcgcggaagaacttctgggtctcgcgcaggttctgtcgcagccgtcccaggtagcggcggtagcggccgaagccccggcacagctcgcggatcattccgccgccgccggggccgggacccgagacgggctcgctgccccatggcaccccgtcgccctccatcgcctctgcccgctctgtctttgcggctcggtccccggccgcaggcccggcctccctcctccccgccccccagtgccgaagggaggaggaatccgcctcctgacgcccccgcctgcagtcagcctggctcccaacctccgtcactgccgttgcaaacaaaccaaaccgcagtgcgccgctatcggaacctttctctccactatccagaagcgtgagggaaggatcgctggaggacaccctcgccgcggggtctcctgggacttgcagtccgggctgggaccaaacgccaaaacctcaaggctggagaaggggaggctgtggatgggactgatcccttttggagaaaaccctcactcgttcttgtgttttcgcgctctcttcattttaaaaagtgttcctaatccctctatgagcgtccctgaggagagggaggagctgcaggacctgagtgccagcagaagtgggggggccttaccgaaatcgtagcgaaagatgttaatagtagagaaaaggaagg

SEQ ID NO: 35657 - DNA, 3104 bp, Homo sapiens
gaggcctccttctggggctgggctctgcaggccaggtgggtgtggcctgtgttttcccttctgttctttctgcctgtactggatctgttattttcagggaaacaggccccagggcccccctgagcctcaccctaagcccttaggcctctgagagtgctgttgggttctatttatttatttatttgttcctttgttccctacccgtgcccccagtgtcttccctgctgagtaccaggagaggtcctgccccatcctctctctgaagccagggcccttccattccatttagcctttggatcatcctggctgggagaagtgggaccgagccacccagccccactatccccaagcagccctacagccgggatgggaggcacgtggcctctcttttatccgtctatttattttgtaagtgtattcgtgtggaggaggttgttgctttatttttttaaggctctggagtgttgtgtatggtttcttttcacatcccagcctcccatgggcacttctaagaagagaggggatttcttggaaaaggagagaggaatcccctagagcagggaaagcagtgcctgccagctgttgtgcaccttcctgagaaataaatatcctctaaattttcaaaccatcctgtctggtgttggttgattaggttgtgtctgtgggaaccaccacgtctctccccacacccaagcattctgggtaacacaggctaggcctctcctgttgacctgaggccctcttcctccagaatccgacaaggaacaaggcatggcctaagcggtatgatagaagggatgatatccaccccatccaggcctcttagagtccaggcaaaggcaattaggagagagatttccatagctcggagcaggtgagccaccagcggcctgaatggcagcagccatacccaagtgaggccacgagagggcagcagagtccttacgctaacactttctcccggtgcagccccaaagaaggcagctgctggagttagcttggttttctcagagccgtcagccagagcacagagcacctgctctccaggtgctggagcatgggcttgagtgtagtgaccaggccctctgtggctgcagcacccactcccggcagttcacacagatgggcaccctagatggcactgcactcccagcagtaaccctgtgggggtttaggagaggccacctgaatctccctgctgggatgaaaagatgctgacttccagcatctggaacaggagggatggtgggaaatgcacccaccccagagacctgggtcctggcccatagtgagtagatggcagccaactcacatctctctgcacctcagtctccacatcagcggtagaggatgtgcagcagctcacttcgaagggcttggacattctgcagttctgtgggtctgacaaatcagaagttgccgctgtacttgtggcctcaggcttgaggagacaacaagagtcagagacagtgctgtcaccagattggagagaaggctgtgctggtgccacggggggtggcattggtggctcatcctcaccctctgcacaatgtaagagtttcactaggtgaccttgccggggccttccaacagtgtcattcctggaccctacactcacctcccttgggggccacaggtgtcctagagcccacattcctgggccccaggtggggggtggctgccccaggctgcagacatttcccacattcctccccaaggtcaggtgccttccctgaattaaatgtcactgccaacaacagcccacactgaaagggaggaggaaaaagggagggagggtggcggccatgctcagctgatcctgagactgacagcgaacagaggaggtgggggaagaccagccccagctacacagggtcatctgcaaaaaggacagaacaccagcctgtgtttgccttatcatgacaacgtgtctaataaagccctgcctgtctgggactctgatggtcactgatgcttccttgtttgtgtttgagccttctcgccctttagaaaaaagggggtgcggcccggcatgatggcttacgcctgtaatcccaacactttgggaggccaaggtgggtggatcaccggaggtcagaagttcgagaccagcctgaccaacatggtgaaaccccatctctacttaaaatacaaaattagccgggcgtggtggcacatgcctataatcccagctacttgggatgctgaggcaggagaatcacttgaacctgggaggcggaggttgcagtgagccaagagtgtgccattgcactccagcctgggcgacaagagtgaaactctgtctcaaataaaaaaacaaaaaaaaagaaggaaaaaagggagtgcattgcccccacttcaacctggcctcctttgctggggaccgttcttcagaatgcagggccaacaggcaggtccttcccagagcatctgtcatgcaggtcccagcccctcacctgagggtccggaggtctcagccaggctggtatgctcccctcagcctgggtccactacagagggagtagctaagaattcatgttgaagttggcacgttactgctccagcagcactgagcaggcaggtggcatgtttaccatgcccgtgcagagctggcactccctgccaacctcatcaaaactgtagggctacaacaggtgcagccctggcaaacagcaaagcaggcagacagcacaggccagcaggaggtgacttaacccctgccagcacaggttactctggagtggttctgagctatggagggagggaagggaggaggaaagacttggggccacagggtgggagaggaggggagctgcagcctgggcacctggagggatcttcatggcaggttcaatttccctttcaaagccagggcccttaagtcaagtctggatcccaatattaaggagccagcagacctaggctcaaaccccagtgctgccactcaccttggacagggttccagctgctctcagcccaatctcctcatcttccaggaggaatggagatgacatggcactggctcacaggcttgggtgcaggagacttgacattctgcaggtcaagacttaagcacaaggcctagaatatgatggattaacccg

SEQ ID NO: 35658 - DNA, 2052 bp, Homo sapiens
ggcatattttggtgtggcatattctgtccctcttcaaagatacatgagacgacatatgcaaagcattttgcattgtaagatgcttattactgtcacttcacagatgggaaatgagatctaggcaactctcagggtccagccaccagaaggttgaggaatgcgggctctaacctacatctgtcgactccaaagccacacagccgcccacacaaggtagctcttttcctcacctcaccccctgagctctggaacacctttgttctgcccaaacgagaatgaagcagcaacggaggcagcggcaggggaactgtaaggtggccccaaactcagactgtccccaagttggaggcctgctagggcctgggagcacagcagtcccccaccagggagtcttcccttccccacctgcccactgcagactgggcacccctgctgcatgtgtctgacctctgtgaacctcagtttccccaacatacaataaccctgacagtctgtcattctgtgcttctgtgacgtcagccttaggagttatcagggacccaaacttgggcttcacagggggcaggatggaggccctgccactcggaccagaccaggttgtggtgaggggcaagggtggtgcctccaggcaccaatccagagtgacctcactctctgcaggctcccctggggccctgagggagggtggggtgctggacaggcctgctagatgggagcaggtttggaaggaggtttaggaagggtgcggtggggaaggtgtgccgctcaggttcagtgtgatcactagagaggggcacgcctgcctgcatcgtctgccatgccagacagggcaggacagcttctcccccagcctgggcctttaggatccactgtgtgaccatcctgagccccttagcaaggtgtgagcggggttggacaccctcccctcaacatccatctaatgtcagccaccagccctgccttgctgcatgatgggaaatcagggtaagggagccaaaccccagctgctctcagagctgtgaggacaagagtggaaaacctgccctcacaggcccagctggccagagggcttgtctctttcagtcgccctcccccagagggagcaggagcagacaatggccaccatgactcaccagtgagccatcttcccctccccacccctccagcctggcccatgacagcttagcttgtcctccaagggagctgcagcccagcctcccagggccgccagcttcctctctcttcacccaacctggctccccccctgcttgtgcaacaccacatcagagggttgtgaagtggagagggaggagtttgacagctgcagacccaggcagacagagcagactcctttgtgaaggagatagaggctgcaggggcccaagtccagcctgtactcccctgccctgacccacaaggcatcacccagtctccccaaaccctagggaagtggtcattgtcatttatttgttcctttcttagatagagcttggatcctgtctgcaatttattccttcctgcaaaaccaagtatgtgaggcagaggaaagtcctattccattccaggagggacagggctccctgttggaaagtatttccttttgctaagtttctatctgcctcccgggtagactccactaggcagtatttcaagaagttaacgcacttccaatccccatctaacctatattctttgccgcaagccaaatacccttagttctttcagtcatttctcctaagacatggatttaagaccttttgacagcttggcctgtatcctctggaaacatttccatttacccaagttcttcttaaaacattatgtctttgtccaggtgcagtggctcacgcctgtaatctcaaagtggaggctgagggaggagcatcagttgggtccaggagtttgagatcagcctgggcaagatgacaagaccccatctctagttaaaaaaaaaaaaaaaaattactgattctcaccaaaaaaaaaaaaaaagccaggcgtgaagacatgggccacctacttgggaggctgaggtgggaagatcgcttgagc

SEQ ID NO: 35659 - DNA, 6378 bp, Homo sapiens
ccacagtgcccagccacctctgtgctgttaacatccatcctgtaggtgttagtttatggccccaactttattataagtaaattccttgaaggaggggacgtgcctcaattgcttctgtattttccatggcacctagaacaatagtaaggtcttaataaatgttgatgtgtttattagggaatgggttttcacttgatttaactatcaagttcccctttataaggggctggggccaggaaagcgggtggaggccctttattaaacatttattgagtacctgttctcactccttaggttttctccagtgatgtattgcttaaaaagcatgttcatgtgttgtctcatttaatccttgcagtaatgtgatgggtgtgagctgactgtgaaagtgactctctaagtcattgcaatgcactctgtgggaagaatgtgctagcccagcaaggctgtctttgtgatgtccgatgtgtacgtgcgtggggaggcgctcccaaaagctgcgctggggcagggtgtcctgaacggcgttaccagatgtatcttgacaaagaggttggcaccaccatgaagaccaattcaaccagctctcctagcccagcttccatgctcttcaaggagacttcccactgaacttccgaatacccttgtgtgaaactgccacaggcagtgaatgtgctcatcagcaaacccaagtatctggttggtttgacaggggttttgttattcattagaaatgaatgaattggcatgttggctgaatccattcctctcctagagctcagtgagtctgctcctgagcctcctagcctgttgataagcaaggtttctgagcagcaaagtgaggctgctcactttggcaaacaggtcttcaggtgagcccggccaccatgtgaggccctgttggcaggccaggctctccccaggccccacctggcctcaccaatggctcttggattcacagaggactgcacattggactgggagacagggcaagccaggggtcccttagcagagaagggatccctgccagtaactagcctgctgtgagtatgaagttgccacttaccaaggaccctcctgatggacacaacaaaggcgatgggtgattgctgccagggctcataaagaggtgattcagaatctagctgggggaactttgaaaggtcattgcaccttgaccctagcttccaggcgggacatgtggtgagttctgctgcaatggctgggtgccctcacaggccagagctcaggttaatgcagctcagagctcgaattctgatcacaggaagagaatggtgaggaggatggaggcaggggtgctggctgggcccagaacaccaaaggcagagctgaacacttccactgggaagtgggggttttggcctcttgggctgggaaattcctggccggcactgtctgtttatcagggaagctgagtcagactgaaacgtatctcctaaaaagctctgctatttctaggattccatccggtcaaagccagcctcctcttccctggggaattcctttgagggtggagagatagaggggacagactggccttttcctagacatggaaacctgaaatctgagtttttgcccatttatggacctgaaatcccctcccccacctaggatgactcatcccccagcttgacccaactgcccctagagaggggaaagggtgaaactgagatggtgggattagctcagggagggggttggaggctggaaagagaaaggaaaagacaactgaaaaggatggggaattcctttgcaaagagatggtgaggagaggatttcagagccaaaaagaggcagaatgagaaagagagaaagattttcatcccagagggaagctgcatgcctggcagagtaaaaatcttccaggttaaggtaggttcaggccctcaccttgagtaaattctggaactttagtgtgatcagagccacttgccgtgcttgtgaaaatgcagagattcccgtgccctccctgggctgtgatccgcttccaggctccttcagggatctgaagtaggaagttctgaaacacagaaagaggattgactgggaatccttctcccaacctggggcctctgctgtataaagcgactcacaacccctctgcaggtgccaatgtcagaggcagagccctggtccaagggtgacgtttctaacattcttataaaaatctgtgaaagactttggccaggcccagtggctcaagcctgtgatcccagcactttaggaggctgaggcaggtggatctcttgaggtgaggagttcgagaccagcctggccaacatggcaaaacccgtctctactaaaaatacaaaaaaattagctgggtgtggtggcatgcacctgtagtcccagctactggaggagcaggggggcgctgaggtggaggatcgcttgtgctcaggaggtcgaggctgcagtaagctgagattgcaccattgtactccagcctgggccacagagtgagatcctgtgtcaaaaaaaaaaaagactttttatcggatggagaaagccagtccccaccaggccaaatatgcctcctcattgcagcactgcccacctccccacataatcatatcagagaagctttggaaagaactgctttcctagtcaatacaatcctaggatctttacagccagaagggacttcttcaggtatcatctggcgggatttttcacctgaagcagaaattccttctagcaacaacccccacatctctatctccaacccaaatctctcaaactccaggctcctcataccacttatctttgcctggaggcctaagtgcctctgacttcacctcacacctcctccatctgcaagtcttccccgacccagctaatggacactctaccctccaagtttctcaggccagagaccatggagtgattcttggtttctctctttctttcataccctacatctaatccatcaggaaagcctgttggctctagcttcagaatatgtcagaaatctgacaacttgtcatttctttactactgactccagtccaagccccattacctctttccagaattggacaatgtcgaccctcccatggctagtctcaacaagcagaagaattttttttaattctatctcaaaaaaaaaaaatgtcattcctttgctcagaacttcctggtggttggcaatttcattctgaataaaagccacagcccatgtaatggttcacaaggccctgtgtaatctaccttccccacccttgttacctctcctgacacgtcttctgctactctctcatgcactctgctccagcatcaatggctgttctagaacttgcaacctgctcttgccttgaggcctttgcaatggttgttccctccaccctgaacactgttcccccagatagccacatagctagctccacccccaacccctgccaccaggtttttattcaaatgccaccttctcaggaaggccttctctgatcacccttatttaaaatttcaatcctgtctcctctccatccccataccccatccttattattagtattttcctaattcttatcatgactatttatttattttttgatatggagtcttgctctatcgctcaggctggagtgcagtggcactatcttggctcactgcaacctctgcctcccgggttcaagctactctcctgcctcggcctcctgagtagctgggattacgggcgcctgccaccatgcccagctaatatttgtatttttagtagagacagggtgtcaccatgttggccaggctggtctcgaactcctgacctcaggtgatcctgcctttctctgcctcccaaagtgctgggattacaggcatgagccaccatgccaggtctatttatttatttacttatgagacagcgtctcactttgttgcccagactggaatacagtggtgcaatctctgctcactgcaacctctgcctcccgggctcaagcaatcttcccacctccacctcccaagtagctggtactacaggtgtgtgctaccattcctgactaatttttcttctttctttctttttagagataggttctcactctcttgcccaggctggagtacagtggtacaatcttggcttactgcagccttgacctcccaggctcaagcaatcctcccacctcatcctcccgagtagctgagactacagatgtgaaccaccacacccgtctaacttttgcatttttttgtagagacagggtttggccatgttgcccaggctggtctggaactcctggactcaagtgacctgcctgccttgacctcccagaatgctgggactataggcttgagccactgtgcctggccatggccttttaatatactatatcatttacttatttactatacttgtctttctccactagaatggatgccccataagacaaaaatctcagttttgttcacagatgtatctccagagcctggaacagtatacactgttggcactcagtaaatactgaatgaatgactgaatgactgaatgaacatcatacttttttttttttttttttgaaacagagtcttgctctgtccccatggctggagtgcagtggtgtgatcttggctcactgcaatctccacatcctggtttcaagtgactctcttgcctcagcctcctgcatagctgggattacaggcacacgccaccacacctggctaatttttgtaattttagtagagactgggtttcatcatgttggccaggctggtctcgaacacctgacctcaagtgacccacctgcctcagcctcccaaagtgctgagattacaggcatgagtcactgcgcccggcctgcatgaatgtcctatgtaggtggttgccttatcaagctgaatctagtgtctcagtagcccccactcactggtcctggtcctggtccttgtcctggtcctgctctctgagccatggcctgtacatctattctcttttccagaagatcaaccgtgtcatctattatgtgattcccacccactccccttcccctactttaaaagtgcccagactcttcagctaagacccaggactcttcctttgtcctgggtccatccttgtcctcaagacatgtgtgggctatcagtcagcgggcttcagattctgactcgcagagctgaagtccgcctctagaagctctactggagtgtgggcactgtgctttgcagaggactgttgcttcccaacagtgctctggatcactgtctcccctctcactttatctgcccaaggagggcccaaggcagctgatgggatggagcagggggagaggtgaaggggtcatcttgatggtgggtactaacatgctgctgcagtttccctccctctacacagaggactgcctggacttgccccgggaaagggctgaggatggggagaggattcctaccaggatttcatggtcctggttgcagaaggccctttgctgtctctcaaagctgcttccccacctcccccaaccctcgtcatcatctgggttcttcacattccggaagcactgatgtggcactaaatattcctgcagcttcagccttctcccttgggggcccacgtcatcgctgtgagcctggtttctggaatgtttttgatatgaagcatccaggcaggtgaggggaagggctgtgcagggtgggatccacagtccctcatctaggtctctttggaaccaagaaaatagacattctcttccagctcagattttctttccccagaaggcttcccccacatccaccccctcaccttgcccacccttccctccacctggcttagaagaggttacataagcagatgcaggaggacacagatgttaggaccgaatggttatgttaggacacagatgttaggactctcctttcctgaaagtccacctcccccagcccctgctgagatagcactgatggaaagggctgtgtcctctccctccctccccattccacaccctgcgcgtcccttaggtacaggctttccctccactgtgtcctcctctcctccatcccctccaattctagtcctgtccctcacccttcagcttctcgccgggcgcagtggctcatgcctgtaatcccagcactttgggaggcagaggcaggcggatcatgaggtcaggatatcgagatcatcctggctaacatggtgaaaccccgtctctactaaaaatacaaaaaattagccgggcgtggtggtgggcgcctgtagtcccagctacttgggaggctgaggcaggagaattgcgtgagcccgggaggcggagcttgcagtgagccgagatcacaccactgcactccagcctgggtgacagagcgagactctgtctcaaaaaaacaaacaaacaaaaaaacactcttctgcttctcccactcact

SEQ ID NO: 35660 - DNA, 1786 bp, Homo sapiens
tctgaaccaataacaatttctcactgaattgcatgctaccttacccacagcctgtaacctccttgaggctaagatctctgttttttttttttttttttttgcaccagggatacagcaattacctctgtcttctactaagcttagcacacaaaagggcttgattcatgagaggaatgaataaaggagcactgctacccccacagctgaactctaagcttctggagataaacccaccccctggattttttccatgtttacccagagtctagcccagagttccagcactgagtaggacctcagagacttaagacctaagtactccagtgtcgcctaagcaatgtcttgtttgctctcccatcttgacctcatagttgccttgccctccccatctcctttgcagactagtgactttgccagctcagctctccaggtgtgggaggggaggtccaacgcgctccactgggcaggcaccgacagccggcaggacaggtgtgttgtggggccagagccagagctggggacgtttggaggcctcctgtgactaccagagtgggtcggggtgggggagggaggctgcctgaagccagagccagccggctgctggccggcactttgtcctcatcctccctttcatccccagccctcggagcctgggagtttctcaatggagcaggcgtgtggggaatgctctgcagggggctgagggagttggcgtacggtgggggtggacattccaggcattctttgctttctctgggagtcaggcagtgaggacggaggggggaaaagctgcccagcaccagagtaaaggggatttcttaggagggagagaataaaggctgtgggggtgtctttacgcagcaggagcagggctcaagcagacaggagcaggggtgggaggagaaggaggcaggtggtgggggcagggtgggataatctgccaaatccacttctactttagtgccaaaggccggaagagcaactgggaccctgggcccagggccttcccacctgtgtgcttaatagggtcaggccagagctactgagctcacgtttgttttgattcggcagtttttctatttcccatccctggcagcctaggggaacgagtattaggagaaggctcaaaaacctgctcagcaccatccctccccacctcagtcaccaaagagaacagcagggcctgcttccaatcacctttctggttttaatggtactttttggccacggaggtccattaggtagagaccattaggtaaagagactcaagagtgtggagtggagtgtggggggttgtgggaggaggtggaaatagttgcaaaaatatctctctgtacacaaaacttagatgtcatagtggattttcccagaacatagcattcacattattgaaaacagcaagattcacttttcctaaaacacaaagccaagaacataaaaataaatatggacattctagagtcctgaaggcctagagaacacatccatagtctggactttagagcagcttagaggcagaagttctgagtcactgaggtccaaggtggagtccagaggaggctgggccccttgagatgaagtccacacagcaggcggaggcttttcaagtctttcagattcacagcagcaacttcaggaggctcaggccaggtttggaggatggaaaagggaagagaaccattgaagaaacagagattgtgttctcttactcctaggctaaataaggaagggttaggtggggcgcggtggctcacgcctgtaatcccagcactttgggaggccgagg

SEQ ID NO: 35661 - DNA, 5872 bp, Homo sapiens
ggcaacaagggcattccagacagaaagaaaggtttgaacaaaggccaaaaagaaagagccattcacgaatttgcacatcaggatctctacgcacccttccaaactctagaattctatgctgaacttcttcagaaatgggccacctgctactatgccaggaaggtgctagccaagtattattataagcagccccatactatggccacggtagcctgcttgagcataatttctgattctgtcccagtggttttcttgcccctgcagtcctaaacattggaaaaggcagcagggttaattcctcattctattttgcaaacagcacacactgaagtccagaaaggcacactgacttttccaaggttccacaacacatcaagacacaatcaggactgaagatggaaggatggtgcctggagaagcttccatctcagccatagagatttccctgcctgcctcccatccctggagaagggaatgccccatatcttgccctaggccaggctgtgtagtatcaccagccaccccatcccacttacagatatacaaatatgcccactcctctgccaacaccctggagaggtaggtgctgtggctcaattggtaaacactgcctccctcccagggactcagatcaggaacgatctggattcaggagaggatggtagaaaggtcttagaaaaagaagatccagagatgctggttccaggtggagggagagaaggtgcaagctgggcatctctggtcatagttatcacccagagctggagccaagatccttgatttctctctggccttttgtggagcagctgctgtctgggaggcagggcaaggagctaggggatgacccatttagataacggaggagaggttgggctgggttggcccaggctgggcagagtgggggtgggcctaggggtggctcgccatcccaccacaccagccagagagctaggcagggatcaggaatgggctccaaggggagcctgagccacctccctatactgtgctgccccctccttgccatcctccagccccctctaccgggttgctgggcaaggagcttccctgcccagccttcttgtgtggtttggctggggctcaaggacaagagtggcctgcagcctccctccctgccgcttagcaggcaggtgcagagggagctgggagggcagtgtcctgccaagcaagcccttggcagccagccaggcaggagtccttctctggagctggggccgaaggagagacgaggactttgaacaaagcagcaaccaaagtggtttggcttagggaagccaagcacaatccatactctttctcagggtaggacagacctccaggacgcagggattccccaggaaagggaagggcaggacttcatcaaagccagccttgctgggataataacactgtgtgtgtcagacactgtgctaagcactttacatatgctatcttacttaatcctaagagaatcccacgaggtaggaataattatcacccctactttacagataaggaaactgaggtacagagaggttgcacagctggtaagcaatggagccacgatttgaatgcttgcaaccttgactgtcagctaggcagcatccccaacaaggtttgaaacccaggaatatagtgtagttcacccacccagaatccttcaacacagtcactgtatgtgagggtgggggttggttcccagtgactcttcccacctgaagcactgcctgtagtgctgggaaagacagcgggagctaactgttggaataacaaagcacactgaggcaagcctgggctcatctcaagaccaactcccagtctaggactcagtacttggtcatccaggagcccatattgcaggcatgccactcaccagctacaggataagtcacttcccctcttcgggcctcagctactctatctgtcaatgaaggactcggaccacctcagtcatttccaaacattttgaaatcctgcactgcactccaaaacataaaaaagacagaagcactcttgctccagagcaccatacacttggactcacggccctaatggttccccttggaggtaagacttccatgcagatcatccaaaggctttggtggactccaccatttcagagaccccagcatgtgtttttctctttaggggaaggggtggccaggggagctgggtgagtcccaggaggaaatgtcatttggataccaggaatgtattgaagagccagagcaaatatttgtttttcctttgatgtcctcctagagcagccattagttccgcccacctgcccttccctcagccaatcccatctggccctgataatcccatctaggcaggttgggagcgggaagtgtgctagaaaggtggagagaaaattgggatggaagtcacccagctggctttcctctgaatctagctcccaccaacaatctcaattcattctaggggaggtcttgggcaagctcccacacccctctcccgcactgaagtatcctgaggcactaggtctctctcgattcacgaaggacagtcaagaggcaggggtggggtggggtggggaagaggcaatgctccagaattgagaaaccattagcacagcaggcagctgctctccaagaaggaaggagaccctgagcaagttcccagctgcagaactgggtggtctatggatcagggaggttcacagcaggtcccatgcctactgatcttggcttcctacatagagcaagaggcatgaggccagggagtatcttctgatgtaataagagctggaatccctgcctaaatccacttaagtttgaaaactgaaagctagtttatctcattctggaatcaaatgagatctctctcttactctctctctctcatgcacatccacacacacaccccacagtgacctgggtcaagagcctgatgggaactctgaacttcaatctcagtttctcagtctctgggccaccccagtccccacgacccagtgtctccacccccaagaggcacgaagcacaagccaccagcagctattttccagctaagcccctgacaaagcctgggtccaacagcctcaagcctggagcctcaccgggccctcacactttgcagaaagagaaagaaaaggcaagccaggaagtacatgattgcccaatagctgtaacctggcagcaggcaactggggactgtgccaggcgatagcaggaaaaacatactcggtcctattgatggggccataatctacccctttctccaacatccactctccttcaccaatgaaatgacttcttgaatttcaaaccagctactggctgcaaaagcaaacacaatctggggaagtaactgctgatgtagccaatagggcaaaccatacacacacacacacacacacacacacaccccctcacaaccagcacccaactggatttggcaaaacataataatgcctaaaccacctgctctaaaaggcttgttaaaatatacattatatggccctatcctagaccttcagaataaattactctgggtgtggaaccagagaatgtaagtattttaaacaaacatcccaggtgatccttacgtactttaaactcaagtttgagaaccagttaaccactgctaactaacttttgacaaatttgccatcctttctgggctgccctttccagaaattctcactgcaagttctttttttgtttgtttcgttttgttttgttttgttttgtttttgagacggagtctcgctctgttgcccaggctggagtgcagtggcacgatctcggctcactgcaagctccgcctcctgggttcaggccattctcctgcctcagcctcccgagtagctgggactacaggcgtccgccaccacgcccggctaattttttgtatttttagtagagacggggtttcactgtgttagccaggatggtctcgatctcctgacctcacgatccgcccgcctcggcctcccacagtgctgggattacaggcgtgagccaccgcgcccggctatctcaccgcaagttctatgtgttaggagcaatataagttcatatttcgatcttattcaatcctcacagcagcttgtgaggcaggctgtgttttctacagttctgcaaaaggggaaacaaagtacagagatgaaggaaattgcccaaggtcacacagactgctagactcctacgctcgcaccaaagtaacagggcatgttcttgaaaaggcccccaaaccgaaaggtgtctctggtacagtggacctggtttcacattttccagaatcaaaaactcatcataatgaaatttcaactaaattttagagctggaaaggacctaaatgtcaaaacccaccccgtgccagagctccagtgtgctgggttgccagattcttggagttggggaaatccacacctcatccattcattcaaccacacacatatttaccaaatacctattaagatggggtgccttctacttcctctttccattgcactctattgaacagtcttttcccagcaaaactcaacttaagtcccatccatcttatcccaggacacgacacgattcgtttttccgcgccaactatccatagcctcccttttatttggcaatcatcacagcagtacggtgttgctggctggggttcgcaagtttgcgaccactgtccctgcaatcacggactgacacatctgccagggacaccccgcagtagccccgcaagctcagcgcggtaaagaccacgctggcctctccgccgagcaacgagcgagccgccgcccgccctcctccgctccctgccggcggccaagccggagcccgccccgcgccgcgagagggagccgcactcaccaggcgccccgagctctcccgcgccttcttcaccttcccgtaggtgcctttgcccagggtctccaggaactcgtagcggtgccgcaggttgtgcttgtggtggtgccgcttcaccgcctgcttcttcattaggggcttgggcgacttgatcagcccttccgccagcggccgggctagctctgcggccgagggagtggggccggagcgccgcgcgaaaaccagcgactccatggcgagcaggaggtgagcaagggcggcaggggaatcagtaggctgtgcggggagggctgaagcgcggggcacaggtcccgcaccaggacggggagccacagcagtaccagagcgcgcagtaaagcacagcattccaagttgttataaacgccctgagcccgaggccctggacacgccccccggcgcccattggcctgctcgacggcggcgcgtgaccacggccgtccacattggctctccggggctccaggccccgcctcctccccctcggcgtggccgggaaaggtgtcaatggaacccgcccaccaggaatggggactaggggattccagcgaaggccgcctgaggcccagaagcttactctgagggcccttggagctgcacttgcctctgagtggcgcttggtcctgcttaatgccctgttgttttattgtactctgttctcagttggcaaggggcgatctgagggcactaaaggtcaccaaagtatttcttcatcctgagtaatttgcttgtcccaagccaaaatctataattgcttgaccacttcattgagtccataaaggagaaagggagctgggatggaacagaggcagaatccagcctagtgggagggttagtgcagagctgtcctatggttcgagttcacttgtcttcagttagatcaaccttacttggatattggaatccaatggccctggaaacttcttccttcttcctcaaagagggcttcttaggcgaatcgcttgaggtccaggagttcaagaccaacctagccaacatgacgaaatcccatctccactaaagat

SEQ ID NO: 35662 - DNA, 1469 bp, Homo sapiens
tgtatcccaggtgggaggaggctggtcaggcgcaggttcctaaagccaggactttttaagttgagacctgaaggacaagtggcaattggccagctgaatcaacatttcttcataagatgaaagaattatacagatgagcttaacgcttcttttaaggcttaatctagctacactcctgtaattttttccaggtatccccaacacccagtgtgctgcgaggcacctaaaagtcgctccatagatgcttatgaactgaaggaatggatgtgcgatggaatccaaagatgaaactaaaagcacctacatgtgattgggcccactccattaccagctatctggccatggtcgggagggaatcatctgcaacttcttggaccttctcacccctgctccagcttcctttgactacaatctgaattcccatctaggtgaggagccatgggtgaccaaagatcacagcaggtaggcaaggaagacacagagccagaacagcatgtgactcggaaatgatctaagctgctgaaactcatatctcaaattccttaaaggaggtctagttggtgggaaagcgagagtgcctgacagggaatccgtgttggtcggggactctgccaccagcagtcttggggaattcctgggtcatgtggtcggatgtgtggatgtgctgagatatctgggctgagctaagctactctcaatcctgcctgccccactattgactcctggaagggagacgcctaccccccagccccaagtcccatggctgatccatgtctgagggggtcatgggggaaagctgtttattggatctactatgtgctgtgctgggaaaacaagtgggaacaaatgtctgtccttgtccttacacacttcacaatttgtgtgtgtgtctgtaggggagtggaggtgggtccagactggtaaaaggggatttgaaagcagctcagtgtgtggactgctgtgatgtgtcctggtgggagcagggtgcaggtaggagcagaggtgagaggcaccaaggccatgccatgggggtcacgtgagggttgggagcaggtaaggcagatctcagatacctctaagatgagtcttgagccctgaggatgaattacagcctgtagtattccctacctcccctccaagaaagggatgcaaatcctgttagtcgctggcaaattgggaagcctagctcaaagctgccctcttctgaccaaactaagcctagcatgttttatgggatgcccaaagctgtgaccacaagcagaagtcggcttaggcaatttgttcctccagtaaaccgttcatttgttcattcattcattcattcaacaaatatggactgagtaattgcaataacagctataatgatatctaacatttattaagccagccctggttctaaattctaaattctagtatgtcttgccggaagtttggagaatttgtgccgcaaacactgaaaacagccctca

SEQ ID NO: 35663 - DNA, 600 bp, Homo sapiens
tttctcacctcccggctgaggttcctcatctacttggcttcacccctctcagggacagttccctggggacaaagctcccttccagtcccctccccagcccatgtcaggaagaggaggcagatggttaggtggggaatacctaaggtctgagaaagcctctggcaccagagaaaatagcaaaccctcccctcccttcccccagacccagccaactgcagttccaggctgcctggagtgacacctgcccctttgccctctttccaggagtaaatattggatcaggttcagtcaccagctgtttgactaagagcaaagtcagttgtgggatcatgaatggctgggatcctagggaagacatgctgagaaatatcagtgccccgggggacccacgggagagctcctggagcaaatagtaggcctggggaagtacagattccagctgacaaatccctttgtttccctggctacaccaggtactgccagataccaacctgcagagctaggctggcccctggaggagctggccccctggagtatgtctttcttgccaggacatttggcataatggtctgatttggaggcagcttgatatattcaggt

SEQ ID NO: 35664 - DNA, 1258 bp, Homo sapiens
ggctactattgtcaagaaaatgaccaccaaaatctgtccatgcacattcgttcctagggcgccaggtacagggaggtacctaggagaggtaggagcaccgcttttagagacaggcaggcactctcagtgtacccctggcgccttggtgtcctggggtgatccagtccagaaggcctcatcccctagccaaggctctcagggccggttttagaaacgaaacaggaagaggcacttggaccctggttcccagagtgggagaaaggggtgggcacccgggcagagggagccctggggattggtagcggctgtgggcagggcgggagggccgggggcggagtcaacttgtacatgtgaaaaactctggcgggggccgggcattttccttcctcctcctcctcctcctcctcctccctcctcttccccaccttcctccactccctcccttcccctccccttctacctcctcctcggccagctcaggttgcagcttctctggggaactgctcacctttccggagcaggggaagctgccccgtgcccgggagggagcgggcgcaccgcggcccccaggacacgcgctgtgagtcccgcgggcggtgcgcctgggaggaagggggaggtcggaggagcgggcaccgcggcgccgggtataaggagcaaaggtaagcggaacggctcttaaaggcgcagttttgcttttgccctgaggcgagaggttggagggaaataccggagcggcgaggggagagcagagatcacgaggcgtgatctgtgtgatactgtgttgtgtgttgaggggtggggggtgccctcgaaaggccactcgtaagttccaggtgcttgagagggagggttattttgcaatctcagaccccgcgcccccttagggagtctccatctgggatcactttggcccctgggctcccgtctgaaccctacaaagcaaagttttccacccagtccggaaccaggcgctttctaagctcccttcattctgggaagggcaagggtcaggagtctccagggaccaaaggacccgagagtgtggggccacatcgctgccttgaagggcttcctgggctctggtgaactttccagagcggcaggcagggggtgggaggccggagccctgggaagaacgtggaaggacacgtgaagccctgcaggtcccagttctgggggaggcaggggtctggggaatgctgctgcttctctctttccaccccggaagaccaaaggggcagtgcccccctccacc

SEQ ID NO: 35665 - DNA, 1376 bp, Homo sapiens
gtgcatgcctgtgacacatgtgtatatcctgcatacgtacagcttttacaaactgtacacatctgtcctcttcacttaaaaacacatcttggccaggtgcggtggctcacacctataatcctagcactttgggaggccgaggcgggcggattacctgagttcaggagtttgagactagcctgggtaacatggtgaaaccccatctctactaaaatacaaaaaattagctgggtgtggtgtcgtgcgcttgtagtcccagctacttgggaggctgaggcaggagaattgcttgaacccgggagacagaagttgcactgagccaagatcacgccactgcactccagcctgggtgactccgtctccaaaagaaaacacacacacacatacctctaactgaacccttgggggacacacaggcagggtgcccagaaggcagctgcacccaagcatctggagctgaggggcttggtggggccagggctacagatctggagtcatcagcacgcgggtggtggtttccacttcgggaggggatgaggtcacccaggaagcatgcccagagaggaagagcaaagggccaaagagagaattgtgggagtgttgacattcaagggacaggtagaggaagtaagtccaccagacccgggaggaaggaagaagcaggaggagacccaggcagccaaagggagtggaatccgaggcccagggcccaggacagtgcctggcgctgagcaggtgcttgtgaaatgagtgagtgactttgaggaggctgaaccctggtgagtgagtgacactgataaaagacatttagagaacagttgaacaactatgagatgttcagaggcctgggggaggccatgcaggccaaggaggcctcctgggcccagcctggtgggagggaggccatgcggagtgtgaggagggagaggcggggcaatccaagtgaccagaagctgggagctggtcagaggagcccagtggagttcttggcggtgacatgaagctgctttttttaagctagtctctcagattggaatgaggaaagttggagacgaccagccaggggttcttgtcagaatgtgggcactgggcggcgtgggccagctggtgggggtggagtataaataggaatatggtttagagatgctgggaaatcctccccattccctccccctcctgagactgagaggtccccagggatgccaggctcaaaggcccctgcagttctgttgccaaagttgggcatggagagaaacccagagacaggactgaaggtcccatgacaggccagcaggagagctggacacgggatatctggctgagagagggctattgggtgggtgaactcaacactcttcttttcttctccaatttat

SEQ ID NO: 35666 - DNA, 2787 bp, Homo sapiens
gagggggtaaaggctgaaaacataattgattctattttaacacttcaaagatagaccaatccctgtcctaaattgaaagggagcatgttgaagtaatgtattaaggaaaggaagtctctattaaataaaaccttttccaccctaaacatgtttataatacacacagtccagttgctgtggtgacccatagcccaactatttttcagagacagtagctaagacccaaaaaaacacaaagtctccaaattttcttcagcctgctacttaaaaaaccaagttatgaatgtatcaagcctagtttcgaatcaaaatactcaccgttgtcaaaaagtaaccaaaagtaacatgacgtttttaactacacaggctcctaaaaaatactctttgtataggatcctgcacagttcttacaatattcttacaataaaacttaaagacactacctcactaggaatgaacagattccacttacgcagttttaatgtttaagtaaaatcaaagagaagagtgttcctgaagggaaaatattgaatcatactacattttaatgaaaacaccgctgccaaacctaaatattgaagcaccaagttttccaagccagggggtgtagggggtgggaaaagacgacagaggatctgatctatcaaccaaagagatggacaaaccattctgatgaggcatagaactccagaatctttatttaaattccccaaatttcaaatagcaatagctggagaaaaagtgaagtgtgtacttttgactacttcagtcaacaacatccctatttccttccaaggccagttactatcccgccccgaaagatgtttccaattgatcttcccaggaatgaagttaccagcctcgatgcagctgtgcacaaggcggaaagtaaagaggggcggggggccgctggagcgaaagagaaaaagaaatgaaactcgacaccggatgactagcgagctaggggagaggaagaaacgcggacggccgcgtgtgccctacaggagatcaaagtctgggggaagaggtgcaacctcaccgggccttggtaagcactgaattactgtactttcattttccaacttcctgtcactacagaaaatgagaattgctcccctcctccccatccacgccgaaaaaatcgccgccacctttcgcccacgagacttcgggggaccaagaggcgacgagagctgagcggtgcgctgcggcgtccacctgtgcgccgcggtgcccggcgggccgggggcggacccaaggggagcgcgcgcgcccggccccggcccccgcccccacttcctgttgtgccgcgcgcccctcggcccccgcccccgctcccggccggtggggctgtggccgcgagatcccgagggggcgcgcggggctgaccgctcaccgacgccgcgcgcggggctccccctcggtctccgcctcgaacacgatgcgcctctccgccctcagcctcctcctcacgctggaaactcgaggacggcgcggcagccgctgcgacccccgcggcggagccgtagaaggcggcggcggccaagccgagcccgccgggtgcccgcagccgcccgcatctcccgccgccgcggctcctggcgccccgccctccccgcccccgcacgcggcagcggcggcgcgggtcttggggccgctacacgccgggcgcgcgcgttcggggcgttccttgcagcggcggggcctgccaggccctccgcggccgccgccactctcaaaccccccgactgctcctgggtccctcccagacgccgtagtcgctacacgtcacttccgggggaggggctgcgaccctaaggggtgtcgtgagccgcgtctgccagcaaacccgggtttggtgtggccgggggatgtagctcgggcgcctcctggagtcgtctcgccgctctccgtcgcgttcggtgcggttgcttccaggtccctgaggcgcccgtccggaacccgccaggacccaagctgccgcctgggccgggacctcggactcctcaaaggcgcgccactttctcctcggttggagggaagaggtggcgctcgcagagcaacctgcgggggaccacttctgttggtgctaagctttggggagagtctcctccctcctgtgtccctcgtcctccttaccactcgctgttagaagttggggccgtcacagctttctcatcgaagtgccagatcccaggacactacaaacgcttgataaatactaaattagcactgtggctttctagcctggggactgacaaatggaagcgctggagtcgtgggaaaagcttgccctgacgatggaggcagcgaccagaaatccattcgtggctctacccctcactaactcaccaattttaagcaaccttaacctctctaaaacagtcatcatttataaggtggagagaacccaatcttagagttgttgtaatgattaaagaaaataaggtgcatgaaacacctagcaagagtttctagcttagaggttctcattaagtaaaattcttaaggaatcaggtcacacttgatacaagaggctacttgagcagtttagcaccagaaggaatgtaaagtcataaattaggacagctgaacaaaacctccaagaaataaattaggtgtttgtttaacaagaaaccaaagagaggtcagtgtctgagttactggttattcgaggccatttactagctgtgtgacctgtagtgagttgcttaacctttctggacctcagtttcctcatgtaaaatgacgataatgagcagcattgctgagaggattaaatgaagt

SEQ ID NO: 35667 - DNA, 2081 bp, Homo sapiens
tgagcctaggagcgggacacagaccaggcccagcactggaccaatgcctgcaagaagggaagtagtatgagtcaatggctgggacaagtaaagggcaaggggaaggggaaccaagctccgtgagaaggatggaaataacattccgtactcgacactgtgctacgtcttcacagggatgctgtaatttactcctcataacacaggcattacagatgcccccattttcagatggacaaactgaggcatggagcaactaagaagtgatacttattcaaaggcgcagacctagggagggtaagaggcagcgtttcaacaagcagtgtgactccagagcctgcaatcctcacaggggcccctcttcctgggggtgaggggttgtcacacaatggttactacttgccttctgtggcttttgtagaatttatctgcagagtcaggagtccaccccttgtcctaggggtaggagcaagctccggctgggagaccttgatggagtcccagctctactgttcagctgctatttggctttggctaagacttacctaacctcttaaaagcctctgcttccttctctgtaaaatggatcacctcaaatggtggttgtaagcattaaatgagataatcgctataaattataaaagggctagccaaaggttaggagcatttctccagtgtctcctatgagccaggctctgtgcaggaccagggatccagaggtgactggggtatgtccttggtattctcttctttctcttggtgtgccccctcagcccagggtcaccctcctgcccagcaatgccttcccagcagaccacctctccctccaagcagctcccagggcagaggtactcctgtcccacatgccaggtggcatgtatctggaacaggaaggaaggaggatgtagtgactcacccagcaccatggtcatgaacttctcctctacccccacttccagcagcagaggcggcacataggtgatgcctgcggccaaacacacctccaggccaaaggttagcaggttgaccagcaagagctgggctttccggtgccgcagcaggcggctcacccacagcctctggaccatagtgggccaggcgggtagggctcagggggccgttcaggcactccagaactgcttcgtctcggctctgctccagaagctgcggcctctcctccttgctgccgccaactgcctaggaatcagccaggcgcccatttctgccagccctttggtgccggtccagcttctcagcccatgctcaacacctgctgctgtggggcacctcagtggggacacgtctcatcactcagatcctagaagggcggggcaatcacaagcacacggggtgttaagtcctgggagccaggtctccacgatttgctctaaattgtctggatcctgatcattcacaggctggcgactggccctgtcaccgaggtgccacccccttctgcccagtcaggaaatgcatgttaatattagcctacggctgacataattaataaggtaaatatgattttttaaacctcagcacactccagagccaaacagatgttggttattctctgttttgaaaaatctacaatttcccttccctgttagtattggggagcgggagggagcaatcaaaccaactgaatttttagttgcccagctatcaaggtgcccctggagaccctctgccaggcctggtttgtttgcttttgtctttctactccccaaacctggggtgttcaattcccctttgttaagagtaacacttcctattctgcattgcttggccatgagccacactgcaccacaacccctaaccccaaagaccaggatgaaggggaaagggaggagaggctgttttgttgggttgggttttaacttacagaaggctccctggggtgagcctaggcctgaaaatctctcccttgagtttctccctgagttcaacgttcaaggggaagaaacaatccctcacatggccgtccaactgtcatgggagagtggagccgtccccaggttctagctcacaggggcatgaaaccacaccacctggcaatacctgtaatgataccagtgactccccca

SEQ ID NO: 35668 - DNA, 591 bp, Homo sapiens
tgccaccccgcatggctgaggtggagctgggggagcagattccctctactgacagacagaggcccgtggaagcccaggctgggggcagcccccaccccgggcctgtgtcatgcagcaattctaaggcttctttatgcaggccagcgtcaaaccccacccaggcacatcaaacggctgtagcccccaccctgaccccgcaggctcagcgaccctgcgtgttccctgcacactcacaaagacgctctgctttctcccaggctcctcagaagcggctcctctccccttcacagccaccccgcagccctccccacagaaggggaaatcgggggctggtgaggcacgaggaataatgactcagctgaggaaagcgggtggggtcaccctgggccaacctcccggacacacaccccaccaaggctgccctgccccaggtcagtgagatggcagagaaggggcaaccccagcaccttgctccaaactgagctctccagggtcctctaggttgggggcagggagtggacctctcaggtctgggggttccccagccctcctccccattacccaccccctcctcgccccagtcccaaggga

SEQ ID NO: 35669 - DNA, 1320 bp, Homo sapiens
ccacgagccccaccctcacggcagctccacgggagccttggggacaccccagaaagagcctgcactagccaggagacctggaaatgagcattcttgtgagacaatgcgctccccatcatgacagatcccctttgtgaggggtgccatgtgcttgggctgctggggagatggtgggagggacacggcattagacaaccacggctttggtgactcccaacccactcagtctttgattctctggggccaaatatttccaaagcagtgagggtctctgctttccccagtcttgccctagaaaaaaacagtgatttgcagaaaaagcggaggcccacgacttcacagggctcccaggggaacctgaggaccccactcagaatgaagcccccccacctcagggactcctaagaaagaataagggccggcagtgggacgggggaccccagccccatcccggacttgctccctggtgcctgcctcccccagggcctggaggccagggatttagagttcgccctgctgagctgccttttcttcaccgttactggaagccttctgcttagcagcttgtcagagagggtgagggggctgcaggccgggacacaaagggggattagggagaaacctctcggcctgcagagtaatccatcaaactctctccggctgccagcgccggccccttcccactcaattccccttccagctgctgctggcccccaccccctccggctcctgagcccgtcacttcgggcagcaaagagaatcccaggccctaggggggcagagggggcacaccacagacactgggaaaagggcaatggctccctccccccactcacccccaatgtgtgaaaacccaacaggtggctgtggcgcggtggagagtggcttttgttgccctgtctgagagctccagtccagctttggaaaggaaacaaatgccagaggagattgggggaaggggaggggaagggacagaggggcagtccctggagccagcactgccctcccctcccctctcctacccagtgacagggattctggggctggctgaccctcaccttggccagagtcagtcctggacagcctaagctagggctgaagcatggggactctcccaagggtcacctggcaatcccatggtgacagtcaatacagacacacattctgactccaggcacctgggcctcccaatcacacttagtttctgagaacagctgcaacccaaggtcacactgggcatgccctccaaaccaggaccagcagtgctcttcaacctggagctctcttccacccgagggaccacaaccctctgaatcctga

SEQ ID NO: 35670 - DNA, 1769 bp, Homo sapiens
tgcttgaaaccgggaggtcaaggttgcagtgaaccgagatcatgccacactgcactccaccctgggcaacagggtgactctgtctcaaacaaacaaaaaaccacaaacacgcacacaaaacagaaaagaaaacgcacaatagcagccaacattgaggttataatacatactaggcactctgccgtgcgtcttgatcttccaaccatccgatgaggtgggtacaattagtatacccattttacaggcacagaaacttagattaataccaccaacttcatagatgtggagtgtgtttgagatacaggatatgaaagttcctggcggccacttctttggtcgcctcctcagtggaggaagggctttctcattcccaaacaggagcggctgtggttaggggagaccaagtacactttcttctcggtttccattcccccccctcacccacgtgcctcccccaccacaccagcgcctctttcagcccctagcagcaagaggaatgccaagaatgcaactgcctccccaggtgctggccccaacaggtgaggagaggtcactgcagcagacctgcctgctggaggaaggctgagaagggaggtagaaggtgggacaaagatcccatagttatgagacagcacgatttccatccacagggaaaatgaacacagtggccgacccctactaactgcctcagaggcgtctagcgtgtgccaggtacttgatatattgtaccttctctctaataactcatacaattcatacgctccaaatccaaggtaggtgtttaatattcatattcgagatgaacagctcagtctcagaacgtaacatgcccaaggttgcacaaataaacagtggttgagcagaaaattcgaaccatttgaaaatgctggaaggtgctctgaactgggagccaggagagggcagtcctgtttcagccactttttttaagagctgtgtagcctagacaggccatctcacctctctgggactcagtttctacacctgtaaaatgagagctaatctggataatgccgaaggttctttacatctgtgcaaccaggtgatctcacatgcaccccctacccccggcagttgcttcttcacgggcaggtaccccctaagggctcactgatgaggctacatgacattcaggaagggattcatgttcacccttgtgaaataggaatataaaatccctactttgtatttggactttcatggcctcctaccaatgagtcaaggggaatgaggtggagaaggacaccccagccgcacttaccccatccttcacctgcccacacactctcaggtaccaacacagtgccaagggtcagcggtcacctgaaactaagccgaataaccaggacatctgggggtagaactgccctcttccctagtccttcccagagttggactctgttcctggcagaaattagtaactgaattctcttcttgggccacaataaatgcttccctacaaggtggggcagcagtaccaagaaattccttggcccaaggtaggggaatatgaacatggagggggaagagggagcttggcacagtgtccaggccactcggaaattccttccccccatcctgccttttcgtacagccactgaaaagagaagcctaaatggctttcctcctactgaacttgaactctgccagtcagccaggctagacagctctccctgtccatgtacagccaatcctagtcttccctttagcctggcctcccttaggaggtgaggtatacaggaaagaggcca

SEQ ID NO: 35671 - DNA, 2227 bp, Homo sapiens
ctgtctactcctcctcctccttcaacgttattcagggagccaggagggatggggaagttcaccacacactccatgaatacataggaaaactccccctaacacacacccactaaattggggcctgtctgtccacagctgtacattcatccacagctgtatttttatcttcaaactcattctgctgactcaagctgcattttctgagcactttcagaacaacagagtcctggctccacgacaggcctggtgggaggagataagggaggaatgagggaatgggactgatccaacagaatggcctgcgacctcaaattgcgtcccacttatcccctacaatatgctgctctatgggtttcctcaggcttcccgtctagcctgggcctcctgggccctcccactcccaccccaataggccagcctgtttcccaggcctcgggcaggtgagtctacaccaaggcggtctctgctctgaaaggagatctgctaagtgcctcaggaaaggtagtccgaagcccctaggacctcaaccccacccctgagcaaaggttccaggaccccagcaagggtcactgcgggccctggtcaactggcaatgcccggctgcagactccagggcagcaagacagcagctgggctattcttagtccctgctccaccgggaccgggtctgtgtaacagctgaagggcgagtcctcaccaggtacccaccatgccaaacccctccctacccccaactctggccccttggaaaaagaggaagcatagggaacacgccctggagtggggaaaagctgagcaggtcaagagtgtctgtcaggaagatggaggctgattcagaggtcaagggcaagagcaactcacaggactgcagtgcctggggggagcggaagactacaggaaggcctgacccgcactagggagaaagcatgcaggtccctggggcttttctagcaagcctgcctaggcccagagctctgagaagctgcacgggatgcctaggtaccaccacatcacacctgtttgccgtttgcagaactctgtccttccccacctgagacctgggaggcgaggagaaaacagcggcctttctctccccacagagggggaaactgaggctgaaaaggggacacagtaacacacacacacacacacacacacacacacacacacacacggtccagtcccaactctgtacccagagctcgccccagttctaagtccaagagggctcagtcccctttccctgtcttaataactcactcttcctcaagaaagccggcctgggcctgagcaccccgcggcgccgcggccgtcggctcccgtcccggctcccccaagtcccggactgtgcgcgccgcagtgactcatcctgcccctttccggtgaagcccagacaagagaagaaaataaacgcaactttccaaagaaaagtctgacacgggaggctgcaacaggagccagcggccggtccgccagccgtcggcccggcccggtccggcccggcccggggctccggggaggggccgctccccgcccacaccgccgccccgcctgggacagcgcgggcacctcctgcctgcccgccctccgcggaagaaagcacagctcagcggggacccgtgcaggcgccgggcactcggcacccgccccggcagagcgtgtgggacgcgccctcctctgggattcgcgcggggctcggcgcgcagcgccccggacggccacggcgcagccccatcccgcggggcgcaaaacacgcgacagcgcggagctcggccgtgcactgctgctccctttcccgcgccgggaccctcacccctgggagaggagggggcgcgctcctacctggccgaggcgcgcggctgtcacccggagccagcgcgtgcaggctggttccgcccccccttccttgccccccacgcgcgccagccggcggcttttaaatctccaggttactccgcggggggagagagcatgcgcgctgggactgccaggaggggggcggggcgaggcgggacggaggtggggggtgctgcgaggggggatagaggggtggggctggtacccaggggaagaaagcgggaggtctcgaagctggctttgtagccgcgccgcgacgggcagcccccgcgtggctcccagactgccctatcattacctagggcagggcaccgccccctctgtcgctcgccaccaaacatttaggtgaaagctacccggcttcgcgggg

SEQ ID NO: 35672 - DNA, 651 bp, Homo sapiens
ccacaattttcattgtcaataaatattgctggctaattcagaggtgacctgtggaagcaacacgtgctctaagaactcctgtttccactgtctggtattattagtgtgtccttacttagacttagctctcccagagagagagccatctgcttctctcattgcacagtgactgtgcaatggtgttgacttctagagaagagtagcccaagagctaaatattagaggtcttattgcttcccttaagtgcatggcaagagaaaggaaagcaaggtgagaaaaggactgacttgctttgccaatggcccaggactggtgattttataaggtttagcacaaaaaccactcttttgaactagatactgtgtatatcctgtgtacttcaagtcacaccagcattccctacaacagagcttaggaatgctatttatcttgtactcaggccaactgtgtggctctctaccgaacagctggttccccatccacctctaggactatctagttgatgtataaacaatatttttgcctcaaaaacgctaaccccatggaaactaactgttcatccacacacacacacacacacacacacacgcacacatacacacacgaaggaaaagaaagatggggttaattaggtcagaagcaggaggaaaa

SEQ ID NO: 35673 - DNA, 530 bp, Homo sapiens
aagacaaagctttaattgccagatgtatacaaacacacactcacacgtacacacccacacaatacttcaggggtttttatacatgttattttagggcataagctgagtactatacccccacaccccatcaaaaaaggaacaacaaaaaaatcccaattttaccctcccccaataatctagaaaaccctcccttcacccctgatgtacaaagtgtatgcacaacggtggcattctaccagccacacaaagcatgctcaaacagatgtcaccagttcagtcactccattggcatggcaacaggcaggtttacgggatgtttcccaatagtggttattacacagtcagcaccactgtgaattttgtgaatttgaaaaaaaaaagtgtaatttatggattcaggattcaaaaagaatcattttgtatcgaatttaccccagacaaagggaaaactggttgcgactgaaacttggctatagatagcttgatgtcccaatattcaaacaataagccaactctccattttcaagtaa

SEQ ID NO: 35674 - DNA, 733 bp, Homo sapiens
caactatgttagacatataccaagaagctctagaagacttgtttcccaacagtataattctgtattatttttccttaaaagcacacttctgaaatgctccagcaaaaaaagtattagaggttgtcaacataaataaaactactaggtaaatacatgaatttaataatgattttggtgctccaagattcttagaagaagcagtgagaaatatttcatttatttgaactgctcatttgtaatagtattatttggaagtggtatagagctccaatggttaaacaatgtactttggagtccaacagacatggtttcataacctgtttgtccatttgctggataactttggttaaatcacagaacccctctaagaagttaatatttacccaaatagagatgatgtaagaattaaatgatagtgtacgtaaaacacataatagagattgtcacataataaacagtagccatcaccatcactataatcaccattatcaccaagaaggtcttgttacaccaagtgtaacaagttcatgttacatcaagtgtgagagtgtgtataactttactaacaaggcagaaattacaatatcctcgtcttgttgttgtttttttttcccaagacagtcctggctctgtcacctaggctggagtgcagtggtgcaatcatagctcactgcagccttgaactcctgggctcaaaggatcctcctgcctcggactcctgagtagctgggac

SEQ ID NO: 35675 - DNA, 1242 bp, Homo sapiens
tgcgcctggctgtagtggatttttttttttgagacagggtctctttctgttgcccaggctggagtgcagtggcgccatctcggctcactgcaacctccgcctcccgagttcaagcgattctcttgcctcagcctccagagtagctgggattacaggtgcatgccaacactcccggctaatttttgtatttttagcagagatggggtttcaccatgttggccaggatggtctggaactcttgacctcaagtggtccgcccaccttggcctcccaaagtgctgggattacaggcatgagccatggcgactggctgacagcaggagatattttaagcaatgaacactgtatcagaattactggacatttaaactttggactccaaaaccaggtaagaaaaaagctttttaatgtttattatcaatgatttaccaaggaaaagttaaaatccatgtaagttcaacttttgctttggttgacacagatcatgacatggttttggtaaatgatctaaaaataaaaaagtaaaacttattccaaaagcataataaaactatataagctggtaacctccactggtcagtccaacttaaaatttgttgaaaccacaaaacttacctgcatcatcagattcctgaaactgtgagtaatcaacaaccttcctatttctgtagaaagaagagactctaattaaaatcataaaactgtaggatttttctaagacatcagaacacacatttctctttcataaacagaactgaactagcactttgaaaattatttaattgctggacgtggtggctcacacctgtaatcccagcactttgggaggccaaggctggtggatcatctgaggttgggagtttgagatcagcctaaccaacatagagaaaccttgtctctactaaaaacacaaaattagccaagcgtggtggtgcatgcctgtaatccctgctacttgggaagctgaggtaggagaatcacttgaacccaggggtcagaggttgtggtgagccgagatacctccattgcactccagcctgggcaacaaaagtgaaactccatctcaaaaaaaaaaaagaaaagaaaaaaaaagaaaattatttaattaattttttgagacagggtgtcactctgtcgcctaggctggagagcagtgacacaatcatggctcactgcaaccttgacctactgggcccaagtaatccgcctgcctcagcctcctgagtagctgggactacagac

SEQ ID NO: 35676 - DNA, 2671 bp, Homo sapiens
tattctacgtgagttgatggatacattggtcaagttttatgccaaaaaaattacgcaaactatactctgaaagagctatccagactccttgccaaaaggccagcataactttcagagtagagatcgtgagttaccacagatgctgattgaaacagagctaacagcagctttctcctcattcccaccccgtgtgtaggagtacgcagtctcataccaccaccagttggaggatgatctagtctggagacagaacggtgtagaacaaaacccttgccagggtcccaaacctctctttagaactctaattaaaggtacttccgtttcccacacaacttggaatgaaggggaagcaacgactgttaaaacatttaaaaactaagcctttatctatttatttagaaaacacactatgcaaagaagccaattccttacattaaaaatatttatttgcaacagctctcctttttaaggcctcaacagattggactaaaccacacccctccataaatggcacattccatacaatagcctggagaatggcataggacgattccaccgacagctgggggaatagcaaacttgttgaaattccgagaatgaagtctgatggttacccgaacctagcccttttattactaaagtcactcggggacaagagggttacaaaaatatcccgagacgcgtacgcgggtgagagtggaacgagaaccacacgggatttgggccgtgctgttaacccgcacctccctgagtacggacatttccccgaggaaggacatttctagtcggagagaaagagcgaactttggggttaactctctcaaaactctgaggtggggagagaggcagcagcccattattttccaggatccagtcccgaactctcacttttgcccggggggaaaaaaacgggtcccgcccacgctcggcccgatccgggaggcggggcctgcagcgaccccgaaggacagaggcggggccggttggcagtgctgcccctccccctttgccaggaacacccccgtccgctacagagagggctcagggcccccacccccgcgccagtcgctgggggaaggggcaatacgggtgcctccgcccctcctcgctgaaggtggggagtggagctcgagtccgcccgcctccccgcgctggctccaaggggacggccccgaggaggtggggcctcttgggggcgctgacttcacacccctccccctccggccgctggcggctcagggacaccccgcccgctctagtgcggtgggtgggggaggcagctgagcagaccggagccctgcagcggcgcggggcggggaggggcgcgcgcacgggcgcgcagccaccacccccgcgcgccagcagggccccccacgctcaagggtgcgcgcgggccccgaaagggaggaggccgcgcgcggcaccggggatggcggactctagccttctgtcccccactcttttcaccactcgcccccatccccctccaacccgctccaggcctcagactccgcactgacctgacaggccgcgacatgttcgctgtcgaaacaggaccgagtcgagaagccaaagaccaggaccccccccaccccgcgcgctcggcgccccaccccccccgaacttcagccgatgggaccgctgctgccgaaccccgagctgctggcttctcaaactccgctgctctttggttcagggctcctggaacagacgagccccccgctcccccgtctcttcaaaatggatgaatcaaaccagccgaaaatgcgccaaagccgccgtgcaaccaaacccactagggtttgtgcgctcctccccaacacgcctgctcattggagacttctgccagatgcgcccagatcattagtccgtttgaatcatcacgtcttccaggccccgccctgctctctgataggctccaccttcaccgtgggggtcctgttagtcaagatgctctgagagcgcacggccgcaaaacaaaaatggtcgctgcttagcccgccccctggtttccactccagagttgcagattcgtctggggtcgtatcttagaaagactagaaaaaaagatttatgtagggttcagcgttgctcagtgttagtttaatggtgtttcatctcgtctgccttgatcaccttgaaaatcctctaatagcaaaacccgtgggagaggcagcagattcgtcactgcggggctgctacagaattggagggaaattccttaggttcaaaaaatttgaccttaaacctacaagccccttaccctggcttcggcattaaccctcagggaccaaatgaggctgctggagtagagaggcaggatcataatcaaggaatatcttcacccccaattaccattctccattctggaccttgagatccacttcagggtcattaaagtcccagtctggtgcattactattttaagaaaagagtcaggtgtacaataactaagagcatgagctcaggggccacaaggtatttcaggtggaatcccaggtccactacttaatggtggtataactttccttctctgtgcctcagttttctcatctgtaaaatgggaaacaagggtacctaactgcataggcttattagtattaaatgagttgatatatctatcaaaagtctttaggatagtctctggctcacagtaagtgctacgtaagtg

SEQ ID NO: 35677 - DNA, 1145 bp, Homo sapiens
tgccggacagctgaaaggctggagacttaagttcacagtacgcctgcaataaacagcaattgctcatcctcatcctcccttccctatttctcatcttcacgcctttgctcttacctttctcctggcagtgggctcagtttgggaaaatctaacgggaaactcaagagaggcgtgtaaaccaaacacccggcaattacaccatctaggttcccagacagtacttcctgacccgaagaaggacccaacaaccgacagcaaatccccaccccacttgggtccccagctcgagtccgcggtcggggcctcctcctccccctccccctccccacccccgagacgtctcacctcccaccgtggacttgtagtgtttgctgaagctgtcctgggaatatcgctgcaccagcgacgtcttgcccactgcggcgtcccccaccaccagcactttgaacaggtggtcgcggctgcccatggctagcggggtgtgcgttttagggaggcgggaagtgtggtcggggatcgggggtcgctcgttttaacccctttggatccggaccctcttcaaactgaagtgaggcattcccacccaccgcctgtctgggctgctctgacgagaaagcaaaaaaggaaactttgcactcaacctatacgcgcttcctccccgggcggccgcaacctgggtggggcgcagggcgcgagctccgagcccccggctgttcgcaccttccccaccccctcctggcctgactgccgagaaactggaccaggcgccgcggaacctcacccaccgggacttcccccgagcggctccaagtcagtgactgaatcccagtcagctccttacaccactggggccagatgatggggaccctccccttgcagcacaaaccaaattgtgaggaaggagcagccggcacctcgattccctagacgccctcccgcgcgcctctctctccccttcctccgcaagcgtcacgtgcagggttgcctgtggcactacatttcccagctttcctcgcggtaaagagaaccagccgagtgcggaggctcaccgcgaagcctcctgggaaatgtagtatattcgttattttgttttaagcaaacctacaccaagtttcaaggcttcaaactccctcgacagtttggaa

SEQ ID NO: 35678 - DNA, 1642 bp, Homo sapiens
tttcaaactccctcaccagagatccaggaggaaacctctgagtccagtgcccctatgccagaaaagtttctgagtccgctaaaagctgacacccccgcctccctcctgtgttcctggcaggccactgaacctgagagggggctcccaggaggggaagccagtcctccctcaccactccccctgtaaagagacttcagacaggcctaaggccctgggacgaaagaagcaaaagtgaaccaggacgccctatcccctcctcccaggcggggacaaaaaagacccattttagtatccccaaccccgaggagggagagaaagtaactgggtggcctcctcagtctctccaccactcagattcagcaaatgcgctgcgcgccaggactgccgccctccaccaccccctccccgccccaggaccccacaggactgacctgcccctcgcctgggaggaaggggggcgcctggcaagtggcagcgtggcccgtggtctcggggggtgcagggcaccccctcttctcatcactcctcctcgacagtcctccttggcccccggcgtgcccccccacacccccagccaaggcgagcgtccagccgcgacacccggctcgctacatttcgcttctgcgttacagcgaggccgccgctccgcttccacgcgggggaggtggccggggagggcaggatatatcgcttcgggcccggcgggggggcacccggacgggggaccggggagccgagctcacgcgcccccaatcgcttcttgcccgcggactcgggcccaactggttggctgccggtggcaaacgtgatctggggcagactgggtggcaccccccccgctccatcaaaaatagattctcggatggacaacagcagcagccaatcagggactggggagggggcgggatcaacctcggcccggcccccttccttcgcttcgtgcccaggaggcggggcgccggggaaacgcagtaggaggagtgacgggaaccgggagccggctccatgcgcctggagcgcgcgggtcccagcgcccatcggcccggggtccgaggggcccgctgcccgggctcgctgcgtggtgctaccgcccccgggcccgctgcgccgcgtcggagccccagcagactttgagaggcgtgtgcgacagtgcgcgtcctctcctgcctctggatgtttccttggagcctctggccttcgggaagaccggtaaacgtccctgtggagccagccagccagccacctctgacccccgggctcaagcagccagccgcgtgctccctcctcccacttggtacccggacagaacagtccctaccttgctcttctcccgccggctcgtcactttaggctccctccagattccgcgttccttgagcaaatggctcacccctgacgaatccggccttaaaaaagtcccggccttgaaaggggtggagactggcgggcgggagcgaaaggaggtcagacccatggctggggtcgcacacgcatcacctgaggtcggagaggaggggagcctcacttcctctgacccactgagcctggtggcagcgtgcggagagatgtcaccatcccggactaaatgaaatccaactttccctgacgcaccttgtgggatcaaagaggggtgttcccatgc

SEQ ID NO: 35679 - DNA, 539 bp, Homo sapiens
taatggtaattatgtatggaattgtcagtctttctgcaaacaccgtgaactccctgaggagggcaagggggcagtgcctcttttgtatccctacccacctagcccagtgcccggcacttaggaggagctcaatatagatttgaggaatgaatgaacaattgtatgatagagtctttaaacaaagcaaagccagagggcgagaatttgtccatgcatcttcagtattgtccagtgtcatgggtagcctgacctgttctaaactttgcccaggaaattcctagaaagcagatgagtcattatgttcttccgatagccaggtgacagtggctatcaagatcaaacaactaagtccccttgctgagacaccatgtccaccagggaatcttctggttgtatgtcctttagggcagagaatgcactgcccagctggttggagcgactagggctgcttttgcaggcatgcttctcttttaaatgacccatggacattctgggctacccattggtccagtgtgagttttattaatgtgagttagtat

SEQ ID NO: 35680 - DNA, 475 bp, Homo sapiens
gcagcacctcctctgtggcacgtctccagcccctaccaaggcctggctcacgtgagccaaaccaaacaggcacttcctaaatgaaggaacctgtggaactcctttgtccctggcttaatctggacactaaatgcacatcgatggagcagacaggatgaatactgtcccctcagccaaagccacttcccaaatcttccgcaacttgtagttacacattaactagggagcaggccagaaaccaggcaaaacggaaggaaggctgagcttgttttgggggcttgtcccttgtgttagtccatttgcattgttataaaggaatacctgaaactgagaaatttataaagaaaagaggtttactttggcttacagttctgcaggctatacaagtagcatggtgccaggctgggtgtggtggctcatgcctgtaatcccagcactttgcgaggctgaggcagggggatcaattgattccaag

SEQ ID NO: 35681 - DNA, 528 bp, Homo sapiens
ctctaaatgcaagtcagaaagccaccccttgggctgagtccctttcagtgttttatgacccgttgatgtatcacagctcactgtggaactacgtctattgctgcagtttgcttccctttgcatagttcatgttaaaaacatgaagcctctttattactcaagatttgaggaaagcagaacactgggagccatgtggagtgatttcctaactgggctctccacctgctctaggtttgccctgccagtgtcaatacacacttcgctctgctcctgactcagccatggacactaagtaatcaattcaagctacagctaactgtggggatcatgccaagatgcttggcctgctatttctattatccattcacaggaacccagtgtagatatggcagcatccaatgtcacgtaacattcatacagctctagcctctgtgtggaccactcttggaccagaaccttccatgatgctactccaagattcacaagatcataggattgttaaagatctttgaacacacatatttcagt

SEQ ID NO: 35682 - DNA, 778 bp, Homo sapiens
tcataaaagccagggtcaactgacctctgccagaattttggagagcctacaccacagacttttgaacctcttagctgatgacaaatctttagccttcgaagcggaaattgatttgaaagagcccaaagtactccggtaaagtaggtgatgttgaactgggtaatgtcaatttcagaaaaagaggacacgtgcctgtgaaacaccaagagcagtgtcctggggttggggaggacacctgcctgggtgtgggtggccaaggggaagaaggaagagaaagagcaggggaagatgctgtcccacagccaccaccacaggtgttcaccggcctcaggcgccagccctgctcagggtgagaggcgaagagggaggtgtgcttaaggccaaatgaaagaggatctgccaccctctcctcccccaactcttaccacattctagcaaagagagctgcaggagcagtcaggaaatcccctaacaaggcaagcattggaaccaagagcccaggtggcacggatgagtcacttcacttacttggactcagttcccctatttgtgaaatgaagcaaggatgagaagaggaacaagacgtgatcaagaaaaaggcaaatgttttcacaagtgcctgtcattgcccccttctgttgtccccttccacatgtcacctggtacattgtacatttcttctaacaattgtgttattggccaggaaatacagagaattcttttagagaataggttttctaagtgttaaaattgtttttatttttaattttgtaagggg

SEQ ID NO: 35683 - DNA, 1100 bp, Homo sapiens
attaaattcttcatgctttgggaaatagttatatttcataaaaagtgttatgtttaagatgtaatggctttggtactattttctaaggggattagataaatatttttaaattttcttagttttaatttctgatatggtcaatatgaatagatataaactacataaacaatagcgttttgggttccttagtactttttgagagtgtacaggggtctggaggccaaagagtttgagaattgctgatctaaggacccatggcatttcttcaccatagggcaagagaggagcattttgccttatctgccaagagtgtgctatgctacatccaggggtgcaagccaaaagattcaggaggaacagattgggtgttctcaaatagcgatgtgtcaagaggacagcaattgcttggacacaagaattccccccggagcctgctggctggcagtgcagcggctgtgtagaaaggctctaccagaggggcaaagtccaggcatgaggcaacaaggaggctctgaggttgggggagcctgcagaagaagcggaagaggaagctggataagtccgccgcccctggactaagctgctgactacctcctgctgtgattccaagagccactgcctcaaaaaacttccttgcaggtgctggtgcctgaaattccagtggaggtgtttcattccctcagccaaaggcaaattcaatcccaacaatctcaagtatcactcaagcttacacaagtgtgcaaataacattatggaagatagattcgaaggtcacactttaataaaacaagagagtgtgtctataacaggagtggggtgggatgggtggagcggacgggaaatggagaacaaagactcaaaaatatgaaataaatagaacataagagcagttcgtggacccatgatgtaagaatgccactagggggattgatcaatctgattctgggtagctaaaatcaaagaaaaaaaaatccaatccagtcaaacttctctgtagcatatggtatgtccttagcagcgtgagacagcttacaaggatagagaagaatgagacacgggccctgggttcagagagtgctaccccacgctcaccccccacc

SEQ ID NO: 35684 - DNA, 632 bp, Homo sapiens
tcctggtttcagcaccttatgcaagttacttaaaccctctgtgcctcaattacctcatctgtaaaatgggcttaaaaacaatacctagctgataggattggtgagagatttgaatgaactaatgcttgtaagtcccttagctcagagcctagcacagagctaatgcttccaaagtattccttgatattgtcacccaatcaagcctcttcattttataggcaacaaaactagattcagagagaagggatttatctgcgatcatatggccagttagtggcagagccaggactggagccaggcatctcatctcatctcatctcacctggtacagacatctttctactgtaccacacacagcatcgtggattttccctcatttcctaactttaagcaaaagaggttgggccatttcccagttggccaggtttgtgctgaaccagcaatgtgttgcaagagtcaggcatcctggagtgcatcctgcggtgccggctcccctgtgagcaggagccagctcatgtctgacagtaacagactctgttctaggagctatcgagccctgataaaacttatccacagagcactgagcaactgtcctcttatattgttattattttattttgagacatctgttg

SEQ ID NO: 35685 - DNA, 1280 bp, Homo sapiens
acttccttggggttcctgggtgtgggagcatggacttcccaggcagctttccacttagttaacttgcccaacctgctctgttgactctgggaagagccctgaacttccctgctccagtgaactgtgggagatgccaaaacagcacccagctgcccatcaagattaccagaagggccccagttcctggcttctctgtggctcacactctggtcctattgcctacccttgggaactcagagcatcctctttctcttttctgctgagctggtggctgcaccgagttgcctctgtctctttaagagagaaagagagagcgagagacggaaatcaggaagtgcgagagagctgagagccaggactcagtgctgagcttggtgtcccaccgccacaaggaggcagggaagaaacccactagtcccagctcctggggtggcacagacattgcaactggccctgcctgtgggtcctaggggcccttggctaccaggaggctaagaacactgctcatgaatgacagtgagccctgaaagctctgggggtgtcacccagtcccacaagcctgcatcccctgcagtggagatggggtgagtgtgcagcgtgcggaggggggtgggggtggaatgaggggccagacaaggggcagctgcagggcagctcagccgggtgcaggggtgtgggcttgttggcagcggtgctctcacatagagcgttgtgtgtggcatggaggtgagccaccacgggccaaccacaagccctccctgggctctgcttaccaacacccaaagccagcgatcagcacccagcgcctgccctcacctttcccggggtctttctccctggccggagtctcaggagtaggagacgctgggaaaggctccctgaacagtttgggaatagagctggaaacccccagcccagccctgtgggggaaggtgacaaacaggaaagggttaaagggctagggccggcggcctttgatggaggctgagaagcaactgcactgaggggcgcctctcatccgccctcctctttccggtgtagctcagctcctggacgtgccacagacagaaagcataacatacactcgccaggaagagcctttgcctgactcagggcagctcagagtgtggggtaagtgcacttggccacagcagagccctgaggagggaggggaggggagaggtgggtgggtggtgtctcacatgcttcactgtccactgctcattcatccaaccactggctgagggccactgagcccttctttgcaccaggtgcttggg

SEQ ID NO: 35686 - DNA, 560 bp, Homo sapiens
ttggaaaaagagagagaccgggcaggaggaagccaagtggaagggtctggagatggggaatgtgggaagacttcattggccagagcacgattgagaagtaggcacagcaccccaaatcctggaaggcacgaggccatggtacgggtgagggtgggagctctgcagcctagggatgccactggtgacaggagtctttgggaacagaagatcagagactgcccatatgcctgaaggccccctcctcccgccacccccagcccttgtcctcagggagctccagggagtttcccagctgtgggctgactcatgcagccccgcgtgcctcctgcttcgcagcagcaactcagttgatggggcagctgggaggtggaggagcagggaggaggaagaggagcatctccagataacagggatggagtctccatccagactgagcccctctcaaatggtgacagagagtagggttcagtcagcagaactgcaagtgaatctcctttgagcagagctctgtccagggcacagagggggctccaggggtagatgtggcatcctgtcattca

SEQ ID NO: 35687 - DNA, 1085 bp, Homo sapiens
caagatcccatcccatcacatcagcctacctccctcctggctgctggccaggatgtcgccagcattaccttccactgcctttctccctgggaagcagcacagctgagactgggcaccaggccacctctgttgggacccacaggaaagagtgtggcagcaactgcctggctgacctttctatcttctctaggctcaggtactgctcctccatgcccatggctgggccgtggggagaagaagctctcatacgccttcccactccctctggtttataggacttcactccctagccaacaggagaggaggcctcctggggtttccccagggcagtaggtcaaacgacctcatcacagtcttccttcctcttcaagcgtttcatgttgaacacagctctctccgctcccttgtgatttctgagggtcaccactgccagcctcaggcaacatagagagcctcctgttctttctatgcttggtctgactgagcctaaagttgagaaaatgggtggccaaggccagtgccagtgtcttggggcccctttggctctccctcactctctgaggctccagctggtcctgggacatgcagccaggactgtgagtctgggcaggtccaaggcctgcaccttcaagaagtggaataaatgtggcctttgcttctgtttctggtggctctccctgggctgtgtctgcaaggcagggctctcagctgggtgtgcttggcaaccaagtggggtctgggcggggatctgtgagaagtgctgggaaatgggggtgggaattggtcatgtcctgatttctgcctttcccctaaatgggccctaatttcaaggaagaacccaaggggtgccttcccattccttccattctcttgcccccgcatcatttggaaagctgtgtgaggggcctggaacttagggagaaaggtattcttctttttttttttccttcaaacccaccatctaagtggctactgcttttttcccatctccacagctattcaaaacctaggctatgtcctaaatagtgggtttgaatagtattatgggttattttaagcattccttcattttgtctagaatctag

SEQ ID NO: 35688 - DNA, 741 bp, Homo sapiens
cctctttaatgtacctctccattctctgcagtgattcctaacataacacttaaaatgaaaagagcccattcagttcaccagacatgatctgagcccttacagtgtaccaggcccacgggatgctggaactacagaggtgactaagccacctttctggctcatggggagctcacctctatgggggaagacaggtatgccacagatagcttcccatcatggaggaggtgctatgctaggaatgcaaacatccagtgtggtcctgagtcaccatcctcacaggggagggtgcttaggtcaggctgggaaacttcctaagtgtcagggagtgactgagaacaggtgaatccaaagtggtcttagcaggtgagcaggtgatacctagcaaagaaggtgtgggaggcattcctggccgtgggagcagcagtggcacaggcatgggaagagctactagtatttctatatgactggagagtaggttaaagtaggatgctggtattgtggaaagggaggagccagtccaaaaggtccttgcaggccacactgaggaacttggactttaccccagaggaccacagagaggttttaggtcaagtccaactggtattttaaagatactactcctcggtgcccgtgtggtgagtggaaagttgtgggtaggaatagattagctatgtgcataaagtgcctaaaactcaatattattattattattgttattatgtgagacgcagttttgctctt

SEQ ID NO: 35689 - DNA, 886 bp, Homo sapiens
cctcggcctcccaaagcgctgggattataggcgtgagtcaccgcgcccagccatgcttggatgattttttcaagggtggaattctggcttcttttccccgatctcacaaaggatccttaatcaggcaaccccaatgggaagtgttaaggaatagccaggctgacctgaagtagcttcagtttctgttccttggaagctcagaatgactgcggctggagcagtgtggctcccttcccttcattcttcagcggagacagaggaggaggggtgagataagaggtgggagtgagaaaggagagagggagggggagatgaagagggatggagagggagatagtggatgagcagggcacagggagaggaagcagaaaggagaggcaagacagggagacacagagcacagaggaggagacaggtgggggctggggtggggcagggagagcctgtgaggtcacccaggccaccctgctctcgctggtctgttgtaacccagtccatggcttcctgccactgcagtgggcccagggctggcttagtgctggaatgcaagtggctgtggcttggagcctcccctctggctgagggaaaaaaattgctgacaaatctgcttggaatatctgagtttttccaacgcggaaagaaaacacacacacacacacacacacacacacacacacacacacacgccagtcttatcataagcctggcagagcagctcaggatggaaaaatttcataattgagatggatggaggaggtgccactaaaactggtggaaaacaagccccacctgcccccactctacgtgatgacacctttccaggagccctcagatccctccctgcttttgtccccccttgatctgcccttcttgtccccaagtactg

SEQ ID NO: 35690 - DNA, 897 bp, Homo sapiens
cctgtttgtagagtggggtcatatgactagttctggccaataagctgtgagcaaaagtgactggagcttttaaatgctgatgtgggatcctccaggctctctcaatctccctttggcacagtgactggcaatattagacatggtgagtctgatgagaagagagcacctgccaacctgcaaaaggcatgtaatgtgagcgagaaaggagtctgttatttcagggcactcagctgtggagcttattactacagcataacctaacttgtcctgactcttacagtgattccatgtagacagttgtgcaactgtcagaatccctgggagttccctgaaagcttcggggatttcaggcgacttcagacgcctcaaagtcaaacaaaaccaaaaatgtccccttcaggaagtcaggccatgttctgtccttccgttttccttcttactagggaacttggggagggaggctgggcggcagcagttaaacaactcacccaatgggaaaaccagcacgctctgggaccacctctgaagtgatctcacaccctgaccacacactctaaactcactgtcataatccttccccttggtcaaaaataaaagcagcacacccactctgctgggagtgagtcacaaacagaaaaaagtcaatgggtctgagccaagaggatctactaacaaggggaaagatctcccagtggaggtgtttcagcggatgctgcggtcttacccttgtagcctggatgaccagacagatcaaaaaaaatgttaaagtccaggcatctgacactaccccagcaatgtcctgagcttataatgagactagagtttctttagcacttcttccctggggaagaaggaatactctgctgttcatgtggggtgtgtgtgtgtgtgtgtgtg

SEQ ID NO: 35691 - DNA, 3664 bp, Homo sapiens
ggggatgaagcccaataatcttaacaagccctccagatgactgtgatgcataccaaggtttgaaaaccactgatgtagcaaaagcaaggttaggagagggaagaggaaaggtagaggaggggtggggcagaggcggtggcctgtggcttacacccctcatcggagctcctctgtttggtagcactgtggggttgactgtcccatgggtcattcctcagaaaccacctcatagggtgagctcccgcctctggtgagcccccagagccccaggaacctctcttctgctacagatttgggaggcagaggactatgattaccgtgagggagaagccatggagcaaagctggctgggaattccctggccactggactctggaaatcttaggaattacctaaaaattacctccaagggaaaaacaaaaagcaaaagtgaagattcccctacgaagcactagggggagacccatctctggcctgggaagagaagggagagaccaggtccagaagaatttagactattcttctaaaaaatgaccaccgctagacggaccaaaccgaacctgtgttttaagaggaaagctgtgatcactgagtcataatgacggagctggagagtgccacgttaacaaccacctgtctccccacctccagcccaatgtacagttaacaatactggggctagagagggccagggcccaggcccaggttcagagatccaggagtcctccttatccataagatgggcctgtttccatgggcaaaggtgcctgtcaggaacaactacataatttgtgggaaccagtgcaaaaagaaaacgcctggccctttgttcaaaaagtaagactttcaagatggtgaccgcagagcgttaaaccagacaagggtccatgaaggcttgaagcaagccttcacgggggaaagtgccgggagaaaggagatctctctttgggtcccatgagtgaaccatccataccaggttccacttagggcatttaggggaactggtatctccacagtaattactagagcagctctggggaacggagggttggctaaggaagaaaagctcccccaacccttggggcgagggagcgttctctcaatggagcccccccaactcccctccaccccccaccagtcttccaggaaagaggaataccctacccggcagggctgcgaaggaaggggaaatccaaccagagcgaaagtcgcacgcggacagctctgccagcccttggaggcatccggcggtcacccacgggacaaagcgcggctgcgggagcgcgcgcggggcattccggacccgcgtcgagctccgctctagagggggcggcgggcggcgacaagccggagagaggaagggccaaggagcacggccctcctgtcggcaccatcagcgggagagtggcgagcggacgcctagacggaggggccctactcagaccccatcgagccagttcccaagcttttccctccgacctgctccctcccggggcgcgtgagggtgcgggtcgggggtgaacctggtgttggggaaagtgattggcaagggaaagaggcagggctgaaggcctagggccccccgcagaaatgcgccctctgagctgtactgtacagaggcgctcctctgcggaatcctgcagctgctccaggtgaagacgcccccaaatccacactcgcgcagacgtcgcctggcacggaccctacccccttcggtccgtcggcggttctcttgggtcgtccttcctgccactccgactctccccgcccccgccccgcccagcaggctgcggttcctttaaaggcgcgctggtgtggggcggccccttctctcggggctggctcgggagtagcgcagtcgccaaagccgccgctgccaaagctgccgccactagccgggcatggccatggcgtccccggccatcgggcagcgcccgtacccgctactattggaccccgagccgccgcgctatctacagagcctgagcggccccgagctaccgccgccgccccccgaccggtcctcgcgcctctgtgtcccggcgcccctctccactgcgcccggggcgcgcgaggggcgcagcgcccggagggctgcccgggggaacctggagcccccgccccgggcctcccgacccgctcgcccgctccggcctggtctgcagcagagactgcggcggcggcctggagcgccccgaccccgcgacgtgcggagcatcttcgagcagccgcaggatcccagagtcccggcggagcgaggcgaggggcactgcttcgccgagttggtgctgccgggcggccccggctggtgtgacctgtgcggacgagaggtgctgcggcaggcgctgcgctgcactagtaagtgtgaaggcaggggaggggcgtgcggggagaccgcagtctgggggcgaaggactgggagggccctggggcagggagagaggggccattacactctttggctccaggggagccccgaacataaggagataacaacccctggggacagtccgctccttagttccctgcccggtatcctttagtgcctgcccactacctaggtatggttatgcggtagttaacagatacctgtctcctgacaggtgcgtgccttggccctccacacacacacacacacacacacacacacacactcgcacacaggttgtggggggtgggtgggtgatggcctcggcggcctctgtcatctccctgtgcaccctcatggttttgttgtgagttcttgggagtgggttgtgagactgctgttgagatgaccgtttgacccttgcttattagggttactgacaaaacgcttgtttgtccgcccatggtacaggctcagacctctcctccagggggacgtattgggacagggaggagaccttgttagattttggataaaggcaggctgtgaggctgaagagagcctgaagtcaccctgaacccgtgccccctcctgcctttcacctctggcccctcaaacctttggactctgctccaatgtttggctgtgccctgcctcctccccttcctcctcctgggttcctgccctagtcgtcatgctctaacattactcagctcctgacagggtcccttcctctccacagccctcaggcccctccagtcacctcctgagccaggcgcttctcaaagccagaaaacactgggcccccagtgtatagattttctgagccaatcttcagtctccttgggggtttattatttttctcctcctacagttaggggtgtgtatgcctttaataggtgtccaccctccacccccaccccggcatttgctcttgcgtgtttatcagaggatatccacagccatgtgttcatgtgtttacatggatatttcaaatatctgaagcccaaagcacagacaatggcacagcctctaacaagcatctctggaaatggattgtggtttgcatctttcagcaaaggcccttcccctatggcagcagcctcacgtctcccatccaactgcagcgttggacagcagcagtgatttccacatcaggaaaaccctaccctttttctgcctgcagtctgcagcggaggctgttcaatgtgctgcccgctgcagctggctgcagggaaatagaactcagacactaagcctgggtcaagtggaagggaaagattggaagggcaagtg

SEQ ID NO: 35692 - DNA, 1127 bp, Homo sapiens
tgtctggtgccagtcttctgtcttggactgggcaacagggcctcccagaacttttctactagggcttggcagcttctgggagtcagagtgagagaacacctgtgagtactgttttggggcaagagaacaatatttctgcccttttgtgacagactgatcttttctcaccaccccacacccatagggtcacatccgcttctgctcaggtatctagtctcagaaaaatgaatggcctgaccctcttaaagcaacaccacctccttatgggcccctcccccaccctgggcttagcatgggaggatgtgaattagccccagtttgtcccttaggagcctgtacagctggtgaagcattagtaatccaccatccccaaagaaatccattaacgagctcctgggctgggcacgtggtgtgaggtaaccgatcacttctgtcgtctgaaactttggagacattgattttcagactcacaggcgcgactgagaagtgaggctcggggcaggctcttccctgcagcctgtttggtgggggcatttttatcttatcaagctaaaagccccaggaatagaaagttttccactgggggaggtggaggggaaaggacctcagtgcggagacagaaggcatcgtcagtcgttgagggtaccagagcctgagggtccaggtgactgtccaggtcatgcgaggcccagggccctccccggagccctcccccacccggcactccacccctgacgccaagcctggagaaaagctattgatctctggcgctgagatgaccgagggccaggaggagaaggcaaccgctgcctgctttgggacagtcactgctcagctccagcggctcttctgcaggctcccgaagagccgctcggtctccaaaaagcaccagatcctgcagaggttccgcaacggggcccggagggctcggggtaggtctaagccaatctgactgggggagcttgggttctgaggcctctgctactggcttctcccatagaaaaggagtacaggatctttctggcagtctgctgtttagtgctgagctcagcaccactccttggccctcctgactccgcaaggacaaaggcacaggtgctgtcaccttgcctggtatgggttgaaca

SEQ ID NO: 35693 - DNA, 975 bp, Homo sapiens
tctcaccggccttggaggaacctgcttccataaagccctccaccccaacccactcttttacatgggaactcagcatctgaaccaaactggagcttgctcaggtgcatcccctcttggctgttctcacagagacgacagcccctgtgtgtcagctgcccatcttgcctgtccacatgaggggctggccatctctgaccttagagttgcaggacactcgtcttaccattacattgacctttcctgtttgcttcctggcttgctttctggcagtgtgtgtgtgtgtgtgtgtgtgttggagttggggctggggttgtgtggagggagggagcagttgtgtgcctccaggccctccgggctgggctgcaggatgctgaatgcccccagggtggtctgtcctctaaatcaaggaactacagtaagtggtctcaagagggctgagctttgcctccttcctggaaacataaggatgcagatgtcctgacctggctgcctgacccttggagtggggagtttccattcccttgctgccagcctcactaggagtttagccaggagtttgaaaaacttatagatcatgttgattttggcaatggctgcagacctccaggcttgactatcacagtctctccgccttcccattcaccaacatgacctatccttccagcccccctgccttactcctctgcacccattaaaggcagaagttggagggaagtgggagcaggtgggaggaactcagatgagcaggaaagttgcacagttcttcttaccctaatacgttagaagaggacctgaaaattgagagggtttttggctggcatcacatgctgagtccacaggaagctgggtggactcaggcatctcatagcgttgaaaatgacagctgccatttattgagcacctaccatatgccaggtgccgttggatgctttgcatacatactctctaattttggcaacaaatttgctggcaaga

SEQ ID NO: 35694 - DNA, 699 bp, Homo sapiens
tgccctagagtgggctagccagctcccaagtgtggcaggcaaaaggcccagggaaggcctggagttggctggattcgttgtctcatcctccaaatgtcagcagtgaagagatgctttcatgtctgagtttttggaaacagagtgaccccctttcctctgctggagagaggagtcaaccttggaaccctctggcaagtgaaatcagggcttgtctagagcagaaacaccactgaaacattgcagaggaaggagccaagaaccccgcgtgggagctgaaccgcccccagtgggcaaacagcctggcatggggtttgctcctgggctggccagatcaggctgctgctgtatttgccttggacaggcctgcctgcatgcttcagcagaactggggcaggacccagccctctatcaataaaacctgggccctgctccaggcccacttgcctcttctaaaaagcctgtttgtgctcatttccgccttggcttgattttctgttaaatctcaagatggagctttctttcaccttgacatcatcgacctgggctgagctaacttcatgtgctagtgctgttttcttgggggatttaagggagcaggggctcagatctgagctcagctacttccgggtatatatggcttaggggggtctcgtctcagtggcatttctcctctctgatatatatttttttttcctgaga

SEQ ID NO: 35695 - DNA, 2218 bp, Homo sapiens
tctaaggagagattcatgctgactcctggggtaccttggcttggtgtttgaataggttgttattagctgtatgtgaaggttgcattgcagagcttcccggcatgaatccaaggacacagtgtggccacagagaatctggggcctgttttttttttcttaagtattagattcccactgagcaaggaggttctttttatgaagaaaagcatgtttcttagctggctggacaaagcaggtgagctgttattgatggcccaaggatcacaggaaaccacctctctgggggaaaccccccaaacagcctctaaaatttgaaaaaaagattgctccagacaaagccagaacctactttcacccccattaatgtgagatcttcccctgcaaacacccggtagctcaccccagccccgggtgctgaccgtctccctcctcttatctgcctgccagagaagacagctactggtattgacagttctcctgcaccgagggcggccagccggctggggtgctgactctcagctctcttgtttttgtgcctgccaggcactcgcaggcttctgggaagaagactgtgtgggaggatgaagccaaattgggctgcagtttgaaaccttcccgagcactgacggatttggcttaggtgggagagggagagggtttctcatgaaggtagccagagcttaagatggagttggcagcttggtgtccggggggctgagtctagtcctccacccagcttatgtttccccaggactggattgtttcagaactgtaggaaaagctacacagatttggagagagacctgataacccctctcagccacagtccagggccctccggggtccatgagccatcagactccatgaacatggtagcaaagccaggcctctgaaggcagtttccctgccgggactccagcccccactgtatttaaagatggcaaagtgcccacccaaatagcctcatcattgctgagggtctgtacatgacagtgactggggcgtaggcagctgcacacaccagggctgagtcccagcacacgtgttctacctgtgtgactccgagccttacttttctcatctgtacacagtctctgtctcaaggctattggaatgagtcaatgatagagtgcacgtaaatcacttgcacagagagttgttcaaacaatggtagctagaactgctattgatctattgtggggtaattgtcttaactgctttgaaggattcagccctatgtgttcctttgtccagtcagatgggaaaatataaatgagcccttctcaatgttaggaatgacaagatcaggccaagacccctctttctcagactatccggaagatacacagatgacctggacagtgtctgcaggctcctgtgtatcctgaggcttcctgagggccaagttctatgggtgggaaggcagcttgctctctaggttgccataactctgcatctgatttgcatgtgtttgtggtgaccctgcagtttcttctggcatttccaacttaaaatattgctgtttccccaggcagggcagatattgatttttttcttctctaaccattccgattgacccggctcccccacccagcgaatgggggagggagggggtgggggtgaggaagtggatgggggagaagggaggagggatggtgttgcccttatagctagcaccttttactccgtggaacctgagtcaccggggctgatgagaatgggctctttccagaagcaagtgcatgatgaagaaagaacagagggaatgttccccctcgggtccatcctggtcccttctttccctgcatcccttatatgacctgcagttccctgagtccacttgccaccgggggcgggtggcacccaggcggcggggaggcgggggaggggcgcagtgacagccgagccggctttgaggaaccttgcagaggaagtggcttcagaactgctttacgcgaggggcaggaaaggcgcgggaggcgggggaggtgcggagatggcgctctgcacggcggcggagggagggcgctggcgccggggacacgaaaccgcagagcccggacgagtcagggagtgaggcgcgagccgggcgcccggggctctgcaggcgcaggcggcgcggggacaggagcaggttaccgggccgcccgagcgctcgcaccccgctgaaagaaacgcaggcggcccgccggctctgcctggtccgctacccgaccag

SEQ ID NO: 35696 - DNA, 2851 bp, Homo sapiens
agtagatgcttacttaagtgccagatagtatagtgttgcctttagatgtaggttagctttaaccttcctgtggctcactttccttgactgtaaaatgagcatcataatagtattttttgtgacacatttgctgtgatgatgaaatgagctaatacatgctaagtgagtagaatagtgcacggtacatattagctgtagtgaatcatcgtcatcattcagggctggagtgatcaggaagagcttgacaaataaagtgacttctgatgggcaaacaggtgtgagatgattcaaatcgtgggccagaaggaggaaagactgacaaatttaaaaagagtgagagtgaattttttagcaaaaattaggtttgtgattttggtcaagaaaaagtaggcacggatgtatataatagctgcagtactgccggtgggacacacgtcctcctcagcccaccctcatcctggggaccccctctcattgccacagcattcctgggtgccctgggcccacctgggaataccagaagccacgtgactcactcagagcctctccttagggcattaggtcactctccagtcaccaaaattaagattacatatgtcattgattagagtgcagaagtagggttttgttgctgttgctttagtgataaaataaagaaaaacagcttagggcaaatctgccctgagttaggccccagacgaaaggggtatggtcctccttattttgttaagaatatttaaatggaagcattagagaatcactcagggtcggggtgtcgctgtgaacccctagcacccagcctctttacatggctgttccccaatcacctccagagctaaaagaagacattgcccttttccaccgcataggacatgtgagcacaaacctgtttttcaccagtgccctggacatgccaagtgcattgggaacagctcagccatctgccaccaatgccaggggcttaatcggaatagatgaattccatgccagatgcactgagatgtgtgagcccccaggagagacacctcacatgccaatgtctatatttgttaaatcataacagagttccctattctgtctctatcttgggccaccccaagaggcaaaactgtctgcttggtttctcgctttgtacccgtggacagatccttaagaatctggcaggtgaataggaatcagagtctttgtcttatcctctgaagattgctatagtatcgatctcgctctcatggcagatagtgcctgttaggtaaacctttggggtgtttgtgtgtttcttggcaccaagtgttaattcagcagctggatgaagacccttgaggtctggaattgttgtgaggggtctgtctatttcagttcttttcgaatgttgctgcgaattaaaatcaactaggagatttttaaaattcccatgcccagactgcaccccagaccaattaaatcagaatctccagggatgaagcccaggcagctaagtttctaaagatcccccagatgattgcactgtgcagacaagtttaagaaccactggtctggattatacgccatctcttgggtggaaaaaggatccgtgagccctcgtggctgtggctggctggcctaattcaggaggtgattcatttggtccatgggtcacatcttgtctgccagatatttttgtgggcagcagccatcccagacctgggtgctggcattccatggctgtgacattcgtagtgttggctacacacggggctcctggcactcccagacagggcttcccatcaccagccagagggccaggcctcagaatggtgaggtcagggctgctgtcttttgagtcagccctggaaggcagaggtgcctgtggccacttgcgtcacttccccgcgtttgtggtgggaaggggagagatagatgggtctatctgctgaagaaaggggaacaggaagaagaaaccctaggctaaggcagctttgcttctcactgtattcaaaatcaagcctttgaaagccacagcacagctgccttttcttacggggaaatggctctagcttgattggaaactatgagaggagatctttccgaagcttctagaattttctttccattacttattttttatagacaagtatgagaaagctattacctcctgaggagcaatagcctacatgcgtcagagacagagtgagtgtataatagtaaccagacaacggggtctttctaattagaagctcccagcgggaaggtataggggtagggccagggtcaggcacatctggtcccatagacatgtgctcagctggcaaggactgaggatggggagctctgggagctacccaagggaagggatgaggaaaatgagaggcttcactgtgagagtccccgggttaatggactgacagtgaatgaagagagtctgtgaggctcacactacttgctactcacctccggcaagtgggagatggccagagctgcttgcccttgggtggtctgcaacagaatcaaggttcagttccagagacctgggaaggcacacaggagaaggctgggccctgcatcctggtggctgcatctcacttgagttagaagtccttccttcccaccttcacaggtgacatggtgcctctggggcctgacccgctgcttagactcatcttagatgaacatttcacagatcaggtaacttacaggctttggtttaacagctgctcatcccagccccgcagcacagagtttcagtgatcattatgggtgtggcaggccggccccttcagcaaaagatgccgtcccatggtggctacatggtgaattgagaagagcatgggccttagatggatttgattccagttcctacttagcttcttactag

SEQ ID NO: 35697 - DNA, 1534 bp, Homo sapiens
ggaaagcagttgtcacatcagctcgaagctttctcctgtggaaagcacaccagcactgtgaatgctgcctggacagacttttaataaatatcaagaacgaactcaaaagtgctcactataaaatcacaagggccaaagaaagattgcctggtttatgatgtcctagtctcacacacactcttctgaaacatcctaaactctttttcatccattgtcatctattttcactcattcctggggtatgccttcccattttatgggtgggaaaacaggcccagtgaacaatccaagttagcctgacacaggaaacagccctgccttcctgacttcatgcctagcccttgggcccactcctttctcatacatgcttcgcaaatatgccagtttatgattaaataactatgccatgagacctatagacaactataaagcactggttacaaaattccaaacacaatctccatttgtgaccctgtctgaacagatacagttcttcttaccacatgtgccttattccctcccacctcagtttccagctgtctctcctgccagaattaatcactagtcatttttttctcttatacttttaattcttggtatcccatccgatctctcccaaggggcattaagctctttggagggcaagaattctgtattccttcacttctgcattctccacaacaccttaaatagtctgcagtcagtaaactctgacttaactacgttttcttttaaactcactagactatccaaaagagagccaggtccccctccatcctcacctcaaaatgtgtctaacccacccttgcctcctggggtcccttccctggcatacccctcggcctccacccgaggatgtcggccaagaatagcgagggctatgggccagcggggcccaagaggtgtctggttgttccgtggcagagcaggcccctttcctccctcacctgtccgaccccttgatggccgtgttggacttgacccgaaaggccttggcaaacatgtctgctggggtggcctggggaagagagcacagaagccagggaatgtcaagaaagcgagggcgcagcagctgccaggccctcagccgtgggggcagccatgctggggcccggccgcgaaaagggcccggctggaaaccagggccgcgcagcttcgtggccgttgccgctggggaggccgcggccgcccccagtggcggtacctggaactaaagcagggcagggaggggcagggcccagggaacgcccctcccccccaccttcccatcccctcgcgggcctggctctgcgcctgcgcgagcggctcgggttccccgtccgtagcgactcggccacgccaatagctgttctgtttatttccttccaccccatcaaccttaggaactgctttgagtagaagctctctgcaagctcccattccattcggttcggttcaattccgcaaaaataattgaactgataaacagttcaggcttcggccgggcgcggtggcccaagcctgttatcccagactttgggaggccgaggcgggc

SEQ ID NO: 35698 - DNA, 3193 bp, Homo sapiens
tgatcacattgtgaatgtcccagtgggtttttaagatcctggaatagttgcatcttttttactgttgtttatttccttagtcaatgtattagaacttgcaggtaccttattttgcagatgtcttggaattggcttcaaaggacagacatgcatcttatatgacttttggctaattcatggtgggtaaatctgactttaactgcatggagaatgataatggtgattttaaactactcttgaatgaggctttggaggggaagaaagggcatgaatgatgtggaagctgcttgggagctggaggggacagggcagcgctcagcaggggtgtggaggctcctgccagatcccttatgggacgttaaccccatcatacaggggatctttgaagaaacattgggtcactaaggtcagagatttatgaagctccagcaccctcgaggagtcctctttcccttgaccatgggaacaataggcgaaagacaaaggcggcctctgtatttcccaccttaggagcaagaaagggagcaggaacccttccacttggctctggaagatgtgtcttaagcacagactgcggatgcaatcctctcacgagcagtgattcagaatgaggtaagaaatcatgtgggggcaagtctcattcaactgtttagggagggcagtaaagtggtctgaggtgtctacataagtactgagaacggggattatttaatagaattttgcaatcttagagctggaagggacttcaacagtaacctcgtccaatctttgcgttgccatggaactctttcttcaaacaaaagcttcgtaagagcccaaatacaaacccctgtgaaagcagaattgctctggttgcaaagtgggggaagggagagacaaaaagaaaaagtttatttataaaataaactttaaaaaatcatcatggaagaaaacttttttatttatatgtatatcatagaaaggctaaagtaacattgatcacaaaaaataaaattccccaaaccaatagattattagtttatacagtgaagatactttggctctttagggacatttttacttggagtcacgagaacagagaatatgacttttagtcacacggaaatgagccttggatgggaatttttaagatttatgggaactgtgtgctatgctgatttgggacaataagcgttctagtcccaccaggtggcgcccgcgttcggcattctgagaacgtttggtgtcttctggactccagaatctggacggtccgaccgcctcgtgcttggtgggtttacaaactctgactggttcttaccacccatctaacaggaaattttttttttttaaaaacaaaccaacccataaaacatctgaccagatgccacactcaagaaaacacttgtattcgggtgttttaacctccaacgatggaaatctgcttaacattggtgtttctgaggtgtcttagcatcagaaaaggaaaaagacacatatacacacattctaaggaaaaagtcaggaagggccttgcagaggtaggtcctggtgcggcaagaggacggttaggcgttagaagcttctagttcaggctttgccgcttcatgctcatgaggaagcgcggctcctttggcctcagtttcctgcgctgccttcccgtctgtggctgactgttgcagggtagtcagacaaaggcccagcttctattctgcatcccagctaagtctgtaaaagacgaaagtcgtcgggtacctccgttactgagatcaaatgttcataaatggaagcatcgtgtcaataaatgggtttattattattgctttcttatgtaactcaccaacccccggagggccgtccccgcggtgggaaagcctaaaacaatacacatatgttttcactaatttaaaattcatattgaagcgggacgttttagaacttccaggacgcaacgtgctattaagggaccgtgaggggcgggcagcccttctgagatcgcgggctaactgctactttcacccctccttctccggacccctctctccgtctacagctcgcgccagggacccaaacagcctaggccgcgagctcctcgcctccaacctcccgcctcccgcgccagtactagcacccgctaggagcgccgcgtggcctttaccggccacgggccccgcccctgtgcgtcagcccgtagctgcgccgaggcgtttcccgggggcgtgccgcggttgctaggcgaccagaccgctccccctcccgcccctggagctgcgtctccccacttcccagccggggccagtcgggagcgaaagtgcgctgagctgcagtgtctggtcgagagtacccgtgggagcgtcgcgccgcggaggcagccgtcccggcgtaggtggcgtggccgaccggacccccaactggcgcctctccccgcgcggggtcccgagctaggagatgggaggcacagctcgtgggcctgggcggaaggatgcggggccgcctggggccgggctcccgccccagcagcggaggtaacggcgccacggggtaacgggctggaggcgccacagggagcggctggcgctggcaagcgaagcttgggggtggggaggaggtagagtgagccctcagtaggagggacgagggcaggggtctgactgcctccccgggaccgcccccacctcctctctatcagggccccctccccccatccctgtctcaccgggcgcgggggacggggctagagcggagttagagcaagaagaatttccacccctggattccctctgaaaccctagatcggggtatatgttaagggattacgaaaatctaggactttttgtggggctttttattaaagggggggagcccgggagcaataccttggaaagaagccctgttgcttagagcggataaccaacggctgaactcttggggtttgctgtgaggggtgcggtctagcttcgaatgtacaggttatgggctatgctgggtacggctttctccggatcctattttgagagattccccaccttgcgttgtattttacacctaaatggagagaagagacccttgctccccgctttatttgcatgcagactcttgttaatttcctctggctgttagtcactaggcaattttgcacgttttctttttctttatatatgtggacgcctatcctggtttgttttatcaggcttatggcaaagggtcagtcaca

SEQ ID NO: 35699 - DNA, 1341 bp, Homo sapiens
ggtcaaacatgttaagaattgaagtacagtgagatacatatgatggtagacatgaactagtgtcctagccaagtgttcctcaaaagacccattcggacgaagcgtccctcactagccatgaccatttacttctctttgtttcccttctttctaccctagccaccaccccgcagcaccagtgaccactcactatctccagtgccttctgcctcagagattgcgaatgaatggtgcccaggctcttcccagctgaagaagtgggaggcagagtgcccagctggagagaccaagcacccgtccctttagttcacagcagagccagggtttatgacccctccctgctgcgaccaaccccaccccgcccccactgccgtgtttacagcgccttttcagcagtccccatcccactccccaaagctgccaaatgggtttatttttacctactgggttggaaaaggggcaaaggctgaggctggggcagttctgtggcgccagctggggcttaaatacaatgagaaagtcccaccctgccagctctgcgtgaagagaacccagtaggaaataaatagcgctgtgtggcctgcctggatgcctgacctgcatatgtctgcctggactccagcccgtcacatgagccgaggcgggttaaaaagagaggtcgggtgatctcccagctcaggtatctgtcctggcatgaggagctgtggggtgagggtgccagctcttctttacagggcctggtggacagggaggcccagtgggcaggggcaattcgggccagggagggagtgggccaggaagggagccggacaggcggactttgccccagtgccagtccgcctccagctatcagcctccagctgtgggcactgggaaagggtgataacgttcgtaaggacactgtgactgcctaacgttggtaagggcagatgactggaagggagaaaaagcttggcagaagttccaggactaaatcttaatttggccaaagccgttgtttccgtcacaccccacccggtgcgtgcgcgcgcacacacacacacacacacacacacacacacacacacacaccattgcatatctttttctttcccatagctttgacccccttcatgcattcctgccccctcctccaccccttccagctcagaatgctagcatctgcctatctccagcaacacagacacttctccctcctcccacgcctctctcctgggactcaggcctgtggctgcttctcctttctaggcctcagtttccccttaggcagcatgtctcagatcccactcccagggccctctaggcaatttaggccaggagacagtgggaggctcctgggag

SEQ ID NO: 35700 - DNA, 730 bp, Homo sapiens
ctgcctcagcctcccaaagtgctgggattacaggtgtgagcaactgtgcccggctatttttttgtattttttagtagagatggggtttcgccatgttgaccaggctgatcttgaactcctgacctcaggtcatccacctcggcctcccaaagtgctgtgattacaggtgtgagccactgcgcctggcaggatttgtgttttcttatgcacattatatgttccctttctctcttcccgtgccctcaccctcaccgcccacccccgcctccagtgcataatcactggcacaagctgcttctctcacccactaaactgaaactatcatgtcttttactatttccaaatccaagaacttggccacattcccctgggacagagttcacagtgcttgtcataggcactcaggttttaataatagccaggattatcaatcattcacaatgcctctttcatccaccccttccttccaattacttggcacatttgttttcacctccaaattctaagataaaggcatggagtacattatttgtggaaattaagtgagctggctaaggtctgtgccctgttggatatatgactctgtctaccatgtggagtagttggaaaagttaaaacccagaggaaaggaatgcacttcaatttcaaaccagtaaatattcattgggtgctatgaatattcaaggctttggggcaatatgagcttatgaaatctgcaaatctgatggca

SEQ ID NO: 35701 - DNA, 2311 bp, Homo sapiens
agacaattggagaggagtggattttccatctgaattatgcagctcctttgacacgcctcccctctccctttgcatagccttggttaagaactagcatttcttcgtcccctctccctgtcccctctcactgtccgcgaggcagcagcccccagcctactccgcgatcctcccagctcccggcaccgcgcgtcctcccctttaaggcccgcccctccccccacgccacgcctccccaggccccgccccccgcccctcccctttaaggaccggccccggacgcagacgaggctgtgacgcggccgccggcccggggctgggtacattgtcgcgcggccgcttccccccggccgggcccccgccgccccgcggtccccagagcgccaggcccccggggggagggagggagggcgccgggccggtgggagccagcggcgcgcggtgggacccacggagccccgcgacccgccgagcctggagccgggccgggtcggggaagccggctccagcccggagcgaacttcgcagcccgtcggggggcggcggggagggggcccggagccggaggagggggcggccgcgggcacccccgcctgtgccccggcgtccccgggcaccatgctgtccaactcccagggccagagcccgccggtgccgttccccgccccggccccgccgccgcagccccccacccctgccctgccgcaccccccggcgcagccgccgccgccgcccccgcagcagttcccgcagttccacgtcaagtccggcctgcagatcaagaagaacgccatcatcgatgactacaaggtcaccagccaggtcctggggctgggcatcaacggcaaagttttgcagatcttcaacaagaggacccaggagaaattcgccctcaaagtaggtctggggcccggggaggggaggcggggccggtcccgggccctggagctccacggcgtcgggtgcccgtcccggcctgggtcgcggcgcggggcggaggggtggccgcggcggggcggggcggggcggccgggccggcggtgccgagtgcggcgcgggcggcgggtcccagcgccctcgcctccctgaccgcttccggccgctcccgggcgggagccctgggacccgctcctggggactcaggggaccctgccattttggggtttgagcgggatccagccgagtcagaacggttggcttcgggacttctgctaatttcactccatctcaaggaagtgattttggggttggtggttccccgtcctctcctccctcctttttctctctctgcgggcacaaaaggcccattactcattgagccggttggtcggttggtttggagaagtcggatcgcagaggtttatttagcctcgctccttatttgggagccggaatgtgtgatttcacttccccgagcctcgcgagggcagccgggccgccttggggcgcgccgggcaggaggtgtgcggcgggagggtcctgggtgtcccccggctgcgggggcgggattatttggatcccggagctggccccctcagctggccccctcccacgcccgcgcggggcggctccggggagaggccggcggtgtccgcggcccggctgatcattgtgaacagagtctgtaacccgcggccgggcccgtgctgattccgcctcctagagagggccacttgctgtcctggactcgcgccgtgatgggcagtctgaggaaacattatccttgagccgggggagcccatcccttttctttctttaaggggtgtggtggtggggagaataaggattcaagtgagaatatcgacttcagaagttaaacacaatggactgggaggtctcatgagatgggtgggtccgcagtgaagtgtgagccggtcttgcagggtcaccaacaaggttttcctctcacaggggtttcaggtcaaaccaatctctaaaggtgacgcctcaggtctgtttcccctggggtgtctcaatgattggaggaggagaaaaatacttcctgtgttatatttttctcttccccttcagcccccacagcgagctgtatttcagttgtcaagtacaaaactcagaaatgtggtatgggtggaactattggaatatacgatcagatgttttaaaagaaacaccagtacttcggggttgtacggggcaagcatgttccatttctagattttaaggcctctagaattgttttcctgctgctctcatactcaaccctgttacagtgctttgctttctactgtaagttattgctctgggatctcggttgttgtttagtgttgactgttggagaggggataagtatctt

SEQ ID NO: 35702 - DNA, 2636 bp, Homo sapiens
ctagataagaaagcaaaaataagtgcatacataaatagaaagcttccagtgtttgtatgctgctaacaagttacatgaccttgaataggtcagctaaactttccaggcctcattgcacagagggtcggctcgagcagctcctgagcaccggcagggtgaggcagtagaaggcggtgctgcaggccagaggtggagggcaggcaggatagcttgctgacttgctccgggtctgaccatcagcagtatctgggtcagcacagatgccctttcgtaagcttagtgcctggctccagggcagcctgtgtccagttaatgaataatcatcactgaccagctgctccttctcttgtgtgaagacttagaaagtgttctatgctggtgactcggcagagaggatagactacgtaatttagcagggtgtgcatcttctctttccttaaaatcagaagaatcatagtgtagtggtggtgcaaagtagagatgaggaactctattccctgtttgagattcctttctcaagttatggggcatttgagggccactgtgatttctggtgcaggctgttccctgtgcacagggatctggttgaggagctaagcgaaggctgaagtccagccactgtctccttgcttggctttgtctttgtgtgtggctgggttctttcaaaggagtgccttctaattcaccaaaggtatggttatggattaggggttgttcttaggttagagttggggactgattcacagagctgatgaggaaattaggatttacattcaggtgaccctcagcccctcagaccaggctgagtaagaagagatatcaggaatccaaggaagcaggaggaaaaggggttgcctggtgatgtctgttctctttcctcctcttcctgcccatgcaaggctagagcagctgtttcagccccggaggtttagactgtggggtcctgtgtgctgggccatcaggtttggtgggaggaggaagaaagccacagtagaaggagacataaagttgggctgggcctctggcagtgaaaggttcttggggtctttattgtctgatcagtaaacacctctgtgtgccagaatgagctgggacaaggccccaaggtcagcccatatttgtatctggtgttctcctccaagaccagccaagctgtgcgctcattctgctgggaacctgagccctccaaaagggtcatatgaaagggcatcttattcttgagggacgtttccaagcatctctgtggccagtgtccatccaggactcatcttagaggtgaagagtggtggccagaggcggaagctagtggccacccgatgggagccttttctgtttcagagcatatgagggagctgagggagctgtactgttgatgccttctctctggctcatctccatgaagattcttttgaaccagaagcaaaggtgaagtctctctgaggggaggggctgaacaggagatctactgactgtccccctgccgactcctccactttcgtcctccggcggggctccttatcctcctgcttgtctacagggagaagatcgagttgttcgtttgctgccattttaatgatccacattgttaggaggctctcagtacacaccggaccttagcagcctggcctcctgcccagggcccagaactgttactcagcccctctgccgaacagctaaaaataaacctgccactgctgcagtctcccctcacagccaggccctgttagctgtcccagtgcttcctgccacaccgctgacctgtttctctcactttctgctgatattctccctgcttgcccctttctcttccagcctgagcttggtaggtgatttggggctaactcactcttctgagtgctgggagacgtgctatggtttttatgtctccaggtgtctagatttgtgtgtatgaaagctccgtgaagctgtcctgcttatttcccagtagggaaagggttagacaaaaaggagagtgaccaagctcatcagagtggatcagaccttctactgtgctcgcctccagccctggcttcctccagttttacctccaagcaggcctctttgccagagttacctggttatggtaacagagttaccatagttatatgctaggacagccccacatgggcagtctgccccaggccttcaacccgactgccctgtcaccgagcatgctacctaccgtgtactcctgccctgttgctacgttatattctccacctccgcagtgtgaggctttgggctaccacattcaaaagtgtgacctcatcttgtcagcgtccaagaataactgggccctggctctcaggatctccttcctgagtcaggccatggcacctctggcccttccagctcagccacatgcagaatgtcaccgagtgcatgggtttcttctacctcttgactgcagtattgatgtgtgtccatggaggtgtggcctcttcctctactccccagggatcctggagacttgtggagcaagatgaggaaaggggctcaggtagctagaatatttgcttagctgatagatactgggcagagtctgacattggcattctgttcttcagcgtggcgttagtattctttctgattttttctaatccctagacaggtgttgatactaatcgtggcctagg

SEQ ID NO: 35703 - DNA, 1819 bp, Homo sapiens
tggccaataaaggatgcagagacacatgatgggctcttcaaggtgggaggaagtagagggtgggatcactgcctggcatgggcagaggatacttcatggacatatacctgtgacacagccaggggagggtgcagatgaaaatacgtccagtgggatggtttctaaggagaagtgtgagggactccactggggctccgtattttgtctggctgaggagggagagatgctgcctctccaggaatctggtaataggcaatgcttgagattggtgtgaaccaacgcatcacatagagccaggagaagtcacgaaggaggcaagaaaaagaaatggctgggctaaagctgtggcagagccctttttatcctcctttgggccctcatatggcttctcttttggtctgaagaatctcatccttcttgagtttagccttctaggtgaaggagtgggcagactgcatgcagggagacagggaggccgtgtttgtgtccttcagctcaggagctgagagaacagaggtcagggcttgggatggagctgaccgttagtgcagatgggaaagtgaagcaatgggtcgggtctgtttgttcctgagcatgtcctgtgacaaaggaagttgcaacatgtctgtctgtctttctctctctttttcttttctcctttcttttcgtttctttctctctctctctcttctttttttctctttctttcttcttcttactttttttttttttttttttaaataaagaaagaagcaggtaaaaccatcttccagaaaatgccagaaagaatatctggtctgtgatgggtggttcttgcccctcccgctgcaatgcttttcctgtgtagtttttcttttgtccttcctttcccatccacactttccactctcctttcctctgagaggttgtgtctctgcagcaggccagctatgtctccaaagggaagtagtcagtgcttggactgagggaaccttgagagagaatcctctcctttgtcctccaggtgagagagctgttgcatccactcacacctggaaggttgctggtctcctctcgctggacactgagagctgtttaaatttgacaggtggttcctgattcccacctggcattttttgctgctgcacaggtctgtgttgtgtcttagaaggctgagggaatacttacttctcaactcagataaccaccttgttggtaggttcagtgtgtgtctgtgtcaaggcagatgctgggaaaaaagggcccagaatgtgagtgggaggtagaaatcaaggctagaagaccacacatgttaatctggagtacttggtcaggtttgattttggcctgtgtgctatagctgggcaagaagccagttgtgtttggaaatgtacagatgatctattttcctgatgaaaccttttgaggtctggaataaacatagcttgctttctctctttccctcttttgagattcaatttctctcccttggacttctataccctagtagagccaaaagttccagtacaaaccagttttgagactccagcattagtcaactaagggatgttgtaggtcatccctgagaacgagggctgcttgctctggggaagctgggaaatggcaccaggtgtcaggccctactgcccaggatgggatgacagctgctggtgttaattacgtttctgggcagaacagggtaaagtccttgggggtgagagtttttgtttaggcactgtgttccctgtacctgttgcctctggtacagctgctgcagagcccctccttgcctgcagtcttctttgaatttaatctccctgtgatccagtgcatctcttca

SEQ ID NO: 35704 - DNA, 1842 bp, Homo sapiens
acagttctgatgttttctcactgtagattagttttgctttttctggaacctcatataaatgggataatcagtatgaactctcccttttgtgtgaatttcatctgcatggtgacatgtatcagtagtttgttatgctgagcagtattccattgtatagatatgataaaatttgcttctccattcccctgttgatggacatttgggctgtgtccagttttgggctatgatgaataaagctcctgttaacattcttgcacaaatcttgttgtggatgtaatgttttcatttctcctgggtaaacaacgaggagtgtgattgcagagttacaggaggctgttacttattgttcctatctgactctctgccctgccctctcattgtactgtgcacccaattattttaggactgttatcacatccagtccctcagttgctccttcagggtttctcttcttccggcaattcaccctagtttattgaactgttgctcttatgttatgctcctcagatcttttatatcctggttgtcctcctctggaagtataatactcttttacagatgtgttgcccagaactgagttctcgctgctcgatgtgatctacatgtggattctaggtatgggagaaatatagagtgtgggtgcatttggatccctgtcttgagctaggtacttgatctgtgagctgaaggaaatattaactttttggcagccacgtcatggcatcagatcagatgagttaatgtttgtaaaaataccacaaatctaaggtcatattaagatatccattcagcttgaagtcagtccgagcctctgatactaatggcatttattatgaactttctacttgccattgtgtcatttagtttttgcctaccacttggtgagaaaggtactattcaaattagcttaataaaaactccttgatttaaaactagggtacttagctttggcactgttgaccttttggaccagataagcctttgtttgttgtgggggattgtcctgtgctttgtaggagttagcagcatccctggcctctacccacttgatgccagttgcaaccatctatctacccatgcccccaagttatgacaacagaaaatgccttcagacattgccaaacgtcccctggggggcaaattaacaccaggttgagaactattcccaaggtgtagagcttagtcaccgagaaaaaatttaaacaatatagctcttcctgaaaggtaatcactgccagctctttagcatatatacttacagattatgctctttctatggacagtcctcatttttcatggttctaatctgtgtgaatttcagttactatggtttggttaaataacatcagtcctcgaagaatttggctcaaatttgagttgccaggatatatgtattacaagtaactgcatgcagtacaaactttgctgttagctcttcagtccacagatcactatgtacataacagatgctcttcatggtcactgactaatcatgtttcttcttgaagagtcttttggtgattggtcactgcctatctgttcacttcacacgcagacaggaaagtgtgtagttgtgttgcctccctgtctcctagtgagaaactcgtgacattttacaaaaatggacaattgatgagggaattggccaagaaagatgaaatttcaaatgaaatgtggtaatgctggtagtgaatttcaagccaaacgtaatggaattatatagactagatagctgactgtgggaatgtcaacactgtcactgttcaagactacatatacagcctgggaaactcagtgaaggtggcatgtcagcataaatgaggaaagtggtttgatgaaaag

SEQ ID NO: 35705 - DNA, 936 bp, Homo sapiens
aaatattatctaaatgctttgtcatctcactgcctcctcctttgtcatccctaaggtctgggcaggagactgtgttcatatacttcatagaggtccagaccccttgcgtctggcattcctttggtctataattcagtaaactctgctaaaaaggaaacgagactagcttgctgtggcctcttaagcgacccagggtagcttgtgatggttcagattatgatttgttctagagcttttccagaggcagatgttgaggagtttatcctatttgtccccttccctttaaacaaacaaaagtgccggctggacgcagtggctcatgctggtaatcccagcattttgagaggctgaggcaggcggatcacctgaggtcaggagttcgaaactaagcctggccagcatggtgaaaccctgtctctacttaaaaaaaaaaaaattagttgggtgtggtggtgggagcctataatcccagccactcgggaggctgaggtgggagaattgcttgaatctgggaggtggaggttgcagtgagctgagatcacaccattgcactccagcctgggtagcagagtgaaactcggtcacaaaaaaaaaaaaaaaaagaagtcccaaccccccagttttttatatcctcttagtcatcatagtttattaacagttttgtttacatattgcttctttttccctcttggctagactgtgaaccttgaagccctgtgagcttggtctagtgcctggagcattgtgggtaccaggtttcgagagaatgtgtgctgccagaaagcagatctttgccacctcctctcccctcagctcctgaaccactgccagcagtggttctggaatcaacctgtactttccttctgcatcctgggatgtaattctgggtgattgtaagttggtttatggtctagcttagaattgaggcttctcttg

SEQ ID NO: 35706 - DNA, 395 bp, Homo sapiens
actcctgtgtggttgacatcactgctgtgtgcagtgttcatgtccatataagtcagaagtggcttgcagcagtggtttggggctttggggcctctgctcgctccttatcaattcttagggttacatcctctgggaagatgccaggcctggtcaagtgtggcctctgacctagagttatgcaaggcctctcttcctcctgtggccagtgtgaaatttctcatctgtgctctcctgcctctagcaggaaggttggcctacatttggggcacatctctgtcactgtctcaggccaggggttcaaatataagacctgaatcatactgcacctcagaacccaaacccttttacttaattttttttaaaaaatttcattcagatggtaaaggttcaaacaa

SEQ ID NO: 35707 - DNA, 1641 bp, Homo sapiens
cagtgcccagagctattaataacaccttcattgaaatgggtgtaatggaatcccagttgccccccccagtgggactccaacacatggggagtggggagcagaataataatagcaaacacggatgcagtacttattacgtgccaagcgttattcttagttatttacatcatgcacatctattaactcatcttgtatagcaagcccatgaggtggggactattactgtcctattaatgggtaagggaaccaaggcacaaaggggttggaaacttttcccagttcacatagctagtgagcagtggcgcttgtgaagggggtcctcctgagggcctggggcctgctccttcccagtcttgtcttcatgtccaccttgctgacgagtggcacatcaggccctgggtgccggctgctttcctgtcctctggctcagccaggcttctaatgctgaccactcctgagtctttccacgtggctccacaatggcagacttgcaggaggagatgaggggaaccatgcataccttgaatagggggaggggtcctgtccttcttcccctcaggtgctggaagagacagagaggcatgggactgtatttaggcagctcccgcagctccctcactgccgctgtcctagagcttccttcccaggcaatgcgctctgtggcttgggcccctgcccctgccacagttggcagggggccttgcctgtggcgttgcagctgagcacacgcaatcattaaccttttctacgtgtaagagaatttcaggcacaaactgtggggctgaggtgagtcacaatgttggaccggggcttagtttgggcttaaaatatttcacaattcctccaggcattctttgactaatgatctatggctttttagtgggaagacccttccttcttctagtctccagtcctcagagcatggttcagggcctgttggccttcactgcccatggccatgcccatgcccaaggagcaggggccttggcttctgggtggacctgccgcctcgctctgctggtggcctctggcagtgccctaggagtcctgctttccttccctgtctcttctttggcttggagtgcaggccacctcccctgctgttctttacttagccctgtactccagattagcacattcttggtttcctctctccaggccttctgcgctccacacttgtccacagagccactttggcacttcagggctgtgcccccaggacgtcagccagcctgcctcgcccatctgaagggctttcattgcttgggttgattttcttatccagtcagggatttctgataaacatgtgcctggatggatgtcaatgaccagtcctttttttttttttttttgttaaatttaatttaagttctggaatacaaatgcaggatgtgcaatgaccagtcttcatgggaaattcttgctaagtttctctaagaaatttaaaatactaccttttccaatttatttcaggatggaaaggacagctcaccctcagtcactgggggagagagtttagtagggagaagaagcaacagaatgagggggtgttagctcagaagttcctaaccactaggtgagggaaggaagaggggagggagtaaacagaaatcaaattagatcttgcccattagaaactca

SEQ ID NO: 35708 - DNA, 2179 bp, Homo sapiens
agcctgtggccattgcctgagcaaaaatgagaaatatttggcaaagatctttgggcaaatagcctgggagacaatttgaccttgtacataattagatttgtgaaccagtctaattacatagtagtaattatacgactagactcacaccagtactttccaccaccaaatgtgtgagattttttctcacactaaccaattcttcattctcggtggacaccaaatggatggctacaactcaattaaagtccgacactatttaccaggggatagcatcagatcccacgggttaagggttcaatctcacaagactgctcccatttcagacagcaatgacaagtcccagttatcacctgtgcttctgaccgaacagccataaatcggaggttcccatgacaccgtcttctggtttgatcatacgctaaaatggctcacagaaaccaggaaaataatttacttatcagattaccatttattatgaaaggatacaactcacgaacagctagatggaagagatgcattgggcaaggtatgtggaaaggggcacagagcctccttgcactctctggggcacccccctcccagtacctgcatgtgttcaccaacccagaagctctccaaacctcttcctttagggtttttgtggaggtttcattacagaggcatgactgattaaatcatgaggcattgatcattgactcagccttcactctccctcctcttcctggaggtgggatggggtggggtggggtggagtgagtagggctgaaagctccaaccctcttatctcatggttgattccctggcaaacagctcccatccctaggctatccaggaacccccagctgtcagtcacgcgttagcataaaaaagacactatcattggtgagattccaagggttttaaaagctgccaagaaagggagagggttatgtcacaccagtcaaataaaattcactatttcaacaaatgcttactaagctcctgtcctgtgccagcttctgaggggaattctgacatggataatactcagttctagtgcccagggagttcacagcctggtgaaggagacacaaccagggtgcagggaaggatcgcctgggtgccatcaaagggggactagcagcactcctaggagcacaggagaggggagattaacactgtccagaaatccgaaaatctctttgtaggtgtggagagtggacctggataggaggaaagggagggtgctattttaggagtacagtagtctccctttatctgtggtttcacttcctgtgatttcagttactgacgtcaacagtggtttgaaaatatttattacatggaaaattccggaaataaacaattcataagtttaaatcgcgtgctactctgagcagcgtgataaagtctcgtgccatcccgctccgtcctgcctggaacgtcagtcctccctttgtccagcgcatccgactgtcacaatacaacagtgctcatgttcaagtcacccttatttcacttagtaacagccccacagcacaagagtagtgacgctggcatattgttataattgttctatttcactatttgttattcttgttaatctctttgtgtttaaacttcatcacagatatgtatgtataggaaaagaaaagacatcggatacatggggtttggtactatttgcagttttaggcatctactgggcatgatccactgatcaatggtcttggaacgtgtctgccatggataaggggagtctactgtattgattctgattaatgcctgagaatgggatgttatttcattcacacggaagcctttttcctttcttccattctttcttcctttttaaaaaaatctccttcagaaaaaaaagcaaccctggatatatgagacagggggcagggtgacacaggggaaataaaccacagtcctttacctggatctactcagaagactctgtagctactatttccccaacatgtaccatgccatgtatttatttgaatactcatgtccttgtgactcaaagttgatgttctacaggtcgtgggaggtccaggatcctgactcttgggaggcagttgcagttcagaactggctttctcttgtggttctttttcctgcaattgtacaggaggcttggcttagaaagtgagaccctggcccttcttctctcccccccattcctgtctgc

SEQ ID NO: 35709 - DNA, 647 bp, Homo sapiens
ctacagcctagaggaggagacagaagtctccactttcccagactttgacagactttaaactttggagttgtcttgacaaagagagtgttaaatgatcgtaagtttgggcagtaatgagtgcccataaagataaggacgctgtaagcaggaggaagctgggcgttatctcccagacctccctcaccaccctggcccctgctcctgctcccagactcccttcaccagcttgagccaaaggcaatagagttgtttatcttggttatttctttgttgcaggggaatttcccagcaaggaaccttttatttccttgtgaatataaaggtattttgtttctgcagttctttggaagaataaagggagggagtgggaacaaatatgggtgtcagatggcaacgttgaggctctcttgagtccggttaattgccccagacctttcttaccaggtcaatgattaatgcctggagtggggccttggccaaataccagtcagctccaacatggaagcaatcaggggacactagctgggatgtcatcacctgcgtgggcactgcaagctgccatgggagatgctcccaggtgggagcagctttcaggaggccaggaagtctcagaaacagttgggatgggctggctgcaaagtcctggg

SEQ ID NO: 35710 - DNA, 819 bp, Homo sapiens
gtgggtaatttactagatcatgtcctgctgcatgttttcaatagtctccaaaactgtcttagctgacccatgtcagacacacacacatacacatacacacacacacaccccacatacctggagcccactgatcctactgatccagtttacagaaaggggaaaatgagaagtagagccctgggaagaggcagggagtcaaaaatcctacgtcctattctgggctcagccacacgccggtggtgtgattggactcacttgcttcccctctcgcactgtggtttccccatctggaacccagtggccctaaaatagtactatttctcagccctgggggaggagggacaggccaagagagtccattgcccaaatcaataataatgatgataacagcagtgattatactttccaaacttacaacacttcatctgctcaaccctccctgcttcttttaaagtaatcatacaagaaaatataccagcagaagaacagcttctcactggactttcctgactctgggactcagcataagtcactgtggaacacctttgttttgttcctgattctgcctctaattgccgagtgacctttgccagatcacttcatcctgtaggtctgcaggattgtttgttccatcagaggacagtgccaaattgttcccaaggctctttcagttctaggattctgtgttttggttgagcaccgtattagtttctgacagctgctataacaaattaacacaactttagtggcttaagaaaacagaaatgtatgctctttctgttctggagaccagaagcctgaaatcaaggtgccagcagg

SEQ ID NO: 35711 - DNA, 1633 bp, Homo sapiens
tgaattttttggatgatatttctacagacagcaagggacgtccgtttacacccttggtttagccagagaatattgcagatgaccaagcccacaggctcacacaaatccaacccttcaggctgtctttagcttgatgctccacaaccatgggttgacacaatcaccaacagagaaagggaagctagatagcccttcttcactctccactgctcagcgggcatccctccacatggatggttcctttgagtgtggcttttgccataaaaatgagataagagggacagaggaaatgctctttactgccaactctctgctcctatgtacagatcttcacctgagtcaatgtttaacccctgactggagtcaatgtttaatcccaggccagccagccctgcaatccagcattcctcatctagcctaaaatacagagtcattttagaatcaaccactgaagaataaaattgtgactgaatttgccaaagctaaataaactctccccccctttttagaggatactggctgtttggaattattcatgctacctgttcccattagcagatagtggtatggcgtttgctgaccctagctgtcactcagtggtaggagcacagcgtttattcttcctgtttcagttcttccttttgggctgggggagaagagcattgggtggggaccactgcccttgttacccagctggcaatgctgctggctggcaacatgcttccttgtgaagccactacttggaatcccactaggggagctggaacttgaatgttccggttggctgcatttaggcatgttttctgggagtttctgagcccagatttatgttcaaaggcctaaaccttttcccaggtgagtctccctattaaggggcaggtgggagagggaagagttcattagaaagaccctgactattggtgattctctaggggcttcctagagtccttcctaaagagctcagggcatatggcatgtacaaatgggcagcattgtgtcaactctaagaacaacattaatcagggaagtcaaaggatggcaagctgggtggtagcgtgcagggacgtgaagagggaaggaaggccgctgtcagattagcagctctagtcttcagttggtgttggagaggtgactcactggccaaacgtgtgcatgcaatgctcaaatcttttcactttcctctatgaacacactgaggccctgccttctccttgaccacctgcctccctgtgtcactgccctgatgtcccattcttcactgttttcctagctcagctgcctctcagtcagaaagtgaaaacaacatttcttctggggctcccagagtggggaggttgttgctaccctttctcattttggctggtgaaagagtgaaggtagaaactgtggtaagagccccctgagattgcctgtgtccagccctgaggagcctgccgtggggagcggggagtgaagtggaacataaaaggccctggaggctgggtgtggtggcccacacctgtaatcccagcacttcaggaggccaagtgaggcgatcacttgaggccaggagttcgagaccagcctggccaacattgtgaaaaatactctactaaaaatacaaaagttaaccgcgcatgctggcgtgctcctg

SEQ ID NO: 35712 - DNA, 898 bp, Homo sapiens
gcagaaacacgttaacaagcagtagcagcgttagtaagtaacagtgtaaagtgaactgcagaaatgcacccgaacctgagaatctgcttgatcttgtgaaaatcaatggtctccctgcatcctcgattagattctaatcctaagttagaaatccccagggaggcttccctgattctggcctagggatagatgtttgcctgcccctcatctcagtggtataggcatcatgctagccggaggtataagatgaaaaacaacagcactgacaataccaagtggtggaggtggcctcctctgccagtttggcctctggccctttaaatcaaccctcctgactactccatggatcagttagcccataaaggagagctgtgaacacttggggcttccccgcttctctccctgaaagttcttactcagatcttatctctgccccctccaaactcttggccctgggactctaatctggccctgccctggccttttgaactcttaccagctccacctctggtggagcttaactttccctataacggcctccctgctagaaacgctcctggctctagccacgtggccaacactcttgctgggctggttgtctcctccctccccttcttcccccaagatggggtagtcagacagaacattctagctgctgaattccacaatgaaagtattagagccgtttggaggaaggagaggtcctggagaaaggtggtcagggaagcccttgaggaagaataggatctgatctccagatccgagtgggaacaaaagagtcctgtacaatttcatggcttagtccagggactggcagattctggctcaagggccaaatccagcctccctcctgttttgggaaataaagttttgttggaacacagctgcggtcatttgt

SEQ ID NO: 35713 - DNA, 804 bp, Homo sapiens
gaaaagggaagagagaagacagaagcagagaaaagtagagagtccatggggtggccctgagcttgttttcctgcaactagacttggcaagttgtcccctcagcttggctctgcccagccctctccactaaggcctttccctgctctacccagtttgagccccaagaatggccagatctttaaaagtccataggctctttatgcatctttctgtgccttcgctgtagcaagtcccctagcttgggcactgcgatggcagtctcagacctttccctgccttacaaagcttcctgtccccacctggagactctcccagggtgtttgttcctgcacctaactcataatttgattaatattcaccaagtcctggctgattctggggctggtacctagactcccccgggtgaatttttctaaagcactaagtgctgatgcagcacatgttggggccaaagtctctgcatcataccatccagttcctctgaagtcaccggtgcagcaatctctgggcttcagggagaaaagccggctccgtggggcaatgaggaagcaggagtatgagataaaatgtttccagggagttatcagctttgattggaggctgggaggataatactcaacggaatgtctccaagtcaccctctctgccaatgaccttcagaaatcctttctccaggagacagggggccataattcagtagcctggggccacaggcttctgttactgcacactgcgttttaggggatgagaccatatgaggggactctcttgtccctctcatcctgctgggaagggcatgcacct

SEQ ID NO: 35714 - DNA, 1192 bp, Homo sapiens
accttttgttctccaggcttcactgtggcctctccatccatctcagtccagaaacaagatccaggtggacttttcttctccttatgagatgcaggtgtttggacgacttctagttgctctcctttaaacctggagactgagaagtcaaggtggtattttggaaagcagctggagctagcaacggaaggtcggggtgcaaggcgtagctctgccactcacctcaagtcacttctctttggattttattatttataagaggaagccagtcctaatcccttgtcattcttactgtcacttattcctgaagaacttttccaggagtggtaacagtagcttcaaaaaagaaaacactgatccatatccttcctcctcttgtgtccccttcaggggtctcagactatttagggtgccccagcttaccagcccattcaggcatctcccggacaagtgatgcaacaacttgggcaggagggcagggaaaattcaaaattcaggagaggaattcccctgccatttggctggcagctggtgccctccagctgacctggcccctccaactctcatagagaagaactttgggcagcttgggtcactgacttcagagttgcatgatctggtggttactaattcacgtccctgacaaagcataatacagtaaatgagatgatcttcatggaaagaggacactgagaagtgtggcttacccaaatagatgacacagttgaaaaataccccaatatttccctttggaaaatagtttatgggtttttcttttccttgtaaaagatgtgatcttccagtctctgttggtctcaaactgacattaaaatggcttgtacagctgaagcactcaacaatgaatgggcacaaggggatggggggtgctgcaagctgcaattagggaccttcactaggacccctgatagatatgataatacggcacctctgaccaattagaaagggcaactcttccttaagaataaattcagttggtatattgttgtgtaatttgctgtagccatagatggcagcatgtattctccatgcatttccccttccaaatttgaaggcagattgagggtagaaattgagtcactgaaagcaacagaagaggaagagaaacaactctatggggtacttggagtttggccatgacaggacaattgtgcatagtgtgtgctggtaactgtgt

SEQ ID NO: 35715 - DNA, 1622 bp, Homo sapiens
tcagactcgtcagtggacagtccgctgtcagcctccgtgtccagtgagccaatggtctcctccaggaagagcagacactccttctcttcagtggacaggaagtcgtagctgctatcactctgttgggtttggggttgggggcgggggcggggaggcgggggggagggcgagaagaagaacaggagagggagagagagctgtgagaaagcgctccctccgcagaaactggcggggcctgagaaccaccctgcagagaggaaggaatgctgaagagctggaaacctttccctcctgctactctgcaaagctgctggagttgcctcctgaaactgtaggcaccagggagggcagagtctgtcaggaggctggcccactagcgcccagctctggagctgggcaggcacatggcaggggcctttcttttgctcagtcctggcttgaatgcttaggggcacagattagaagcagtcccaagtttcaatgtttgacagcctttgtcaaacatctcactttgagcacctctgatttagctccaaataagaagtgcaacataacaatttgacctgaaacttcagtggtattgcttttaacttttaaaagtacttctgcatacttgatctggtatgtcaagggcagtatgaggaaaagcaggaaatgaagccagctatgagctgccaggccagtaggaactgtggcatgactggccacagataaatgtactaaatgatttgtacttgactttgaaatgcattccatacgggaatttttccccttgtacatttactttcttgatgacatttggctctggctaatgttcaagtaagtgtgcatttctaaagcaaatattaacttaaagggggaggttggtggagaaactggatggtatgggaggagggaaaagcagcttagtattaaatattaagtagatcttaaagtagatcatattcattatgagagagtacatagaggtttttggaagaaaataataatggtcatctcagacagttactgtctatgttgtatggggctagaagtttgctggaatagttgctcttccacagaggaggttgaagggaaaacaaaagggcaaattggaatataagaaatttgggccaagtctcttcttggcatctccagcccttttcctaatatttgggacacttcagagttgtatattcttcaggcccactcagatggccaggaaagattttgagacagctctaaaaatatcctggagggaggggagagggttgcagaataacccttccatttgcctctggaacttcctttcgcatgtgggcctacatgttaaagcaagccccaaatatagcccctggaagctctgaagctgacgccaagagtttcttgaagaaaaatatctttattgtcctcttcctcctaaaatagccttgccaaggataagctgactctgagtttctccttcatgaatgattcactttgaaaacctttaatccctgtcacattctgtgtccaatgctatgtgactattcacgttggcctcagcctaaaagacatagaaagacgtctccacagccccattatctagggtcaaaatgaaatttgtatgattgtctgcactttggatttgtgcatgtgtgttt

SEQ ID NO: 35716 - DNA, 4230 bp, Homo sapiens
aggagttaaagcataaactggggttactaaggagaatacagttttgcaagtaagttaccagtaagaatctttgttcactgaattttcataaagatgaaaaaagaacaaaaaacacttgaggttgcatcccaatttagtgaaggggtctggagtaaacaacttcaagcttacctaaaaagatacatttcaaaaacaaaatttcctttccttatacagtattttacagaaggtgctcactacagagtaggccgctagggggttctccttctccggaaacttatctactctagagtgtttacaacatccttgatacagcaactgaaagcttttaattataaacactgatgttcaagttttgatatggcacagaaataactgctgctggttagaaattgaaagagctttcagtgggtgttttaaaagctaactcgaaaatgagtatgcctgtcaaacgaagtatctacgaaggggactgcaaaaatgaatcaagaaaaaaaaaatcctgcacccttgagatctcatcggtgatatagggaaaaagagacataaggacagagaaaataggccctactttatatttttgtggacgccgagggaaaacaaaatgggatagtttcaaagccgaccagaaagcggaatggggaagggggtcttcaaggctttgggttccctttcaaccctgtgtcaagacaaggagttgctagacacttgccctggcccccgtcagcattctctgttctttgatctatcctcgcccctggcctcaaagcccccccgccgactcacagccaccttgccttgactggtgttttgttctctctcacgcccctctccatcctcccgggactttccctggccccagccctgattccttaccagattggatgggcaagtcttccagaatggtatccccattgctgagatccaggcactcgggagggtatccgacgaggattcgctgaccgccgggggcgatcccggtgatggcggcaatttggccctggagttcccgcacccgggtccggctggacagcccctgcaaaacatgggtgccgtccttggccttgcagcggagccgccacatcgtgtcggtccggctgcccacaggccaggcacccgcggggccagctttggtcccggcagcctgttgggagacgccgccggggaaaccaggcgccgggtggactccaaaatggcgacctttagcggggccaaacatcgcgagaagttgcgggtggttgcagttatcgcgacgcttcggtgcggcttctgccttagtaccttagcaagcgcgaactcttttaaagtgacaactgatttttcccccaccctcagaacgaagatgtaaacctccgtattcctaaaggacaacgggtcttgctacctatagagcgagtgaggtgccctccgcgtgggtagcatatatgctcaagaaaagagggcgggggaaggagttcctgaatgaaggtctggagattggaatgtgaccttgcacttagtgaggtcggaaattattaaattggggcttccacactacacccagactacaccaggagaaacagaatcatagttcacaacgcaaacgaatgccaggaatggtcagtgagtcaaaggaccagtcaaaaacaatcacacttgtgactagactcgtggctgcattaaacattgactcattggggttccaggggccaaaagactggcctttctgcctccctgggactgtgcttgaaaacgtctatttgccacttcagaaagcacagtatgaggtcagcatctgggcccagggcagctgcctcattcaggtggtggcagtgtaaggaggagtcgtgtaacgcgtgtcatcagattccagttcagttcctgggcatacaaatatgaagacttcattcctgccttcattgtaacaagtattcattgcagttgggagacagggtggggtgtgagacacacagccactgaatttcaaagcaacgtgataatgctagattatctgtaccttttcaaacgtgtatgcctagaacccaggactgtgcctcgcaaataaaaagtgttcaacaaatactggctgaatgaataaagacagagttgtatagacatagagagggcaactagagcactctgggagttgtaaaaagccttaaagaggagataactgtttgaacttttggaagaattagtttaattcccaggcgaaggaggaataaagacatccctgaatttatatctctcttttccaagaaatccatactcattgttctttatccagccgggattcagacagcaagtcccacttgccaagagtgggtttatcaagcatcaaacgggcccgctggggcaactatgaaaagtgtagttcacttggtgcaaactcacctccactgtaaaagactttgcttctgaataaattatatgtaatgtttccatcttttcacatctttcatgactcaatttttttttgctggtgcaattttcctccttggttcttcaagacgactgcaacggatgatacagcctgggttagggggtaggtaggagggaaggtaggagtggttagaagtccaccggggtggccgggcgcagtggctcacacctgtaatcccagcactttgggaggccgaggcgggtgaatcacccgaggtcagaagttcgagaccagcctcatcaatatggagaaaccccgtctctactaaaaatacaaaattagctgggcgtggtggtccatgcctttaattctagatactgggaggcaggagaatcgcttgaacacgggaggcaaaagttgcggtgccaaggtcgtgccattgcactccagcctgggcaacaagagcaaaactccatctcaaaaaacaaaaaccaaaccaaaccaaaacaaaaaaaactccaatggggtgtatgggtgggtccagggaagcttctggttcaacgatgagagtggttgattttcttaggtcacagcgtctgacctgtggagccgggtatgtatacaccctaaggcataattagctcaagtgttgtggtagtttattctagcaaaaacatctttaaagcttacgttcccatttatggatctaatgaggttctgctgggattcaggaatgagagcgttaatctttgcagcattttctcgtcacccggcacacccgctctcaagacgcctaccgaatagtctactctcgcgagagtcagaaaaaagtcaagctttttattaacaccgcccccagccctattagttaccaagcaacagtgccaccaggctcctcggcgctgggaaactcaggagcttgtgatctctctggttccgacttccagccgccttcccgagccagttaggcgattgcgaccctgccccgccccctgggtcctgcaggcgcccgattggtggatgattctctccaggtgaggacctacgcgcgagggggcggggccagacgggctcacatgatttgccggcgactgtagcgccggtcccggccacaagctgtcggctcggttcggtcgcgttacagggcaggcgccggggccaaggcagggagggatcttaggagagatcgtagggtgagccacagctgcgcagccccgggtagggtctagcggggcgggatgtgggggctgcgtgcccccggatgaagtgcggggagaggtgctggtccccaggcatggcaggcagcgcggacgttctgggaccgggagccacagtctgtgtttgggttggaggatttgtgtggtcagtaaaggaatcgtgtaaggctcttgaaggcgcaggatcttccgtcctcaccagccccctgttgtctgaattgggggcatgagctcaggactttcccactccagtttgaatcagggcttacccctcttcctgaggtgaccttggggaagtcatttaccacctcagcgctccggcgttctttagactgagtcccgggggtaactagggagagggtgcggagcagggcttgagaatgcactagaggagaaatgacgacgtgctagggctgtcttggggtccagttactgtttttccttcagggaatatgttcgagattttcccacgtccctcacttttttcttttctttctttctttttcatttttcattttttttttttttttttttgacagagtctcgctctgtcgctaggctggagtgcagtggcgggatcttggctcactgcaacctccgcctcccgggttcaagcgattctcctgcctcagcctcccgagtagctgggac

SEQ ID NO: 35717 - DNA, 3716 bp, Homo sapiens
tttctgtctccttcaaggccatgaaatttctctggagaaggaatttgaaatatgttttactcatgctctcccctccaggatagacctaccctgaaaaggaatttatggcaaccttatctccaaggttgctgcctttagtcagataaggaaagcccccaaaatctctgttcctttccatatcactgaatctcaaatatcttcagcttaaaagaatcttaacgccaaatatttgggggtggcatatcctgattcctttcaggagaaagacatagattaatcatcacaaacagtagtaatggatggagaagagaagaacatttgcaaccttactgtgtccttaatgctttattattctattaaaacctgaaattttgtaggaatttttccccagtttcataattacagcacagagaaccaaccaagggttatagtagtcacaagcaagatgatatgggatccctcaaaacaattttacatgccttaattcctgagaccaaagcattctcctcacctctctctttactcatttggttaactctggactcaggccaaatcctgtccctggaagagccacaaagtaggaagcctgggtacaggcctggcaagcgagaacaatgtgtcactgcaggactttggagctctcagctttggagtcagttaagaccagttccttgctgggaagccctaactctggagggacagagacaggtaaggttagtttacttccttgagctttcgtcttcagtgctgcttacagccttaggatatctggtattcaggaaaggaggatgaggtagcattcaaaattgtgttctacctgggcaagaaccagggattgacagcccgttctctttccccagtgctggccagagttacagaagttggactgtaaacattggcaactattgacagaagtcaaggtcatggcaagaccatttggcccatgtttgttggggaaggataagcctgcgtttcaaaaagactggtcaactggatttgcattcccagaaaccaggaaatttctgaaactgagttttaaacctggcaactcttttaccatccctttgtatttttgcagttcctccctataccagcttccttacagctgttctgatttcctgtcgtaagattttttcttttcattttctccagggagggtaaatcaatataacctcttctctagagaggaggtggttaggttggtcttaagcagtgttagaagatctattttttttcaaaccaggtgtctgagctgggtgaattccagcctggggagaggactttgatcaccagatgtttttttggtgtgcgtgctgtcttatggttgcgtggcgagtttctgcttcagatggtacgtatgctttccttcaactcagcttacaggcatttggtgtccttttgcggtgttttgaggaactctgtctagggctttaaggaagtttacatttataatatctttattcttctattgaaaaatctcaaattggcctaatgctctgcactcaataggagcttagtgtacatttaatgataaccctgatctctgaagtgggtggttactgtttttttactttccctttctgttctgggagcaaaaagagtaccaatttcaaaatcctgggaggtcttacttgttataaactccaggatcgctatttgtgtaggggactatttgtttagaagtggacaacttgtggttgaatttgagtaaaattcctgttatacttttgaaaataaaacttcggaattccggccgggcgcagcggctcaagcctgtaatcccggcactttgagaggccgaggtgggcggatcacgaggtcaagagatcgagaccatcctggctaagacagtgaaaccccgtctctgctgaaaatacaaaaaattagctgggcgtggtggcgggtgcctgtagtcccggctacttgggagtagaatacagagtacttgggaagagcacaggaatcaggatcaataatccagcaaaaagacatgagaatggggaaatctaataagggttctctgacagcacatgatatgccaagtgaatctgttttcttttttcttccagcagagcactgtccagagcttcctccagtggacaatagcatatttgtcgcaaaggaggtggaaggacagattctggggacttacgtttgtatcaagggctaccacctggtaggaaagaagacccttttttgcaatgcctctaaggagtgggataacaccactactgagtgccgctgtaagttagatctttctgtatctttgcccatattgatatcctgttttactccttcacatcctacttcctataggctgtggtaaaactttataagaaaacaaaaattctcaatttctaggagacctcttttaaagcactccagtggaggagcttctcttggaagctctatgatcagatcttgatcagtattaattcagttgaattaacagaatcaattccctctatgggaaagaaataatttcttccagatattagaactaatttttttttgctataatttgtttaaccttatattgctttaaaaatgtttatgttatggaaaatttaaaatgtatacaaacgacagaagagtcaaattcactcatatagactcatcacataatttcatcaattatccacacatgataatcttgtttcatgtatatcctctttattattttgaagtaagtgcattgtatcattttatttcacctatcatataacttttgaactgggaatagtttgtattctcagtttaccaatgtgataattgagatccagctgacttgctcaaggtcacaaaactcatttctggtatcctctgtggagatggggaataattaatccatatcctatttattactattattttttaaagaatagttgcattagttctcttgtatacctagagtagagcacaccgatattattatccttcattcatataaccaaactcatatatccctgtgcattctctcctgtttttttccatgccatgggaaaaagcacaacaaaataaaaaatgctaagtaagtgtatatttggctggttgaaagggaaggaaatacttgcttcaaacatagtctcactattttgagccatgcttaatataacagtacaataaacatacgattggtaactttcagttacgtgattaattactttcagttgccaattcatgttgttcttgtgcatgacaaagctcttttgggctgtacttaggtcaatctcctctttttttcattctgcattgatatggtagtaccatgtacttcactcaattaaaaatgtgcagtattaactctaatttgctgttttctcactgaagactgaggaggtctggcctttgctgtgttgggcttcagctttgccctttcagcttattgcttattttcttcttcagtgggccactgtcctgatcctgtgctggtgaatggagagttcagttcttcagggcctgtgaatgtaagtgacaaaatcacgtttatgtgcaatgaccactacatcctcaagggcagcaatcggagccagtgtctagaggaccacacctgggcacctccctttcccatctgcaaaagtagtaagtacaagagaaaccatcaaggatccccaaaatactgattagtagtctaaacttagacatttgccacatccctgggatgcttttctctttttttgtatcagagacaggcttaagatctagcagacagccat

SEQ ID NO: 35718 - DNA, 1261 bp, Homo sapiens
ctcaccttggtgacctagcgcatggtttctttacatctaatatccttaccacttttatctaataatttctaccttttatccaaatctcacatcttctgtagaaacttccttgattaactcaacctgttgtagtttagttccttttctgaaactcttctgggactttcagtatttattacagaaaaagtgaagttctcagaaagaattgccttttaatagcaatcttctgagcacacaaatcttaaccttgaggattagtagcttaattggactatgtaagtgcttgtggtctttttagatctatgcgagaggaaacatggccggtccttcattgcgttcttctgagcgcactggatagatcaatttttggaggccctctggtgcctgacatgtagtagcagttaacatttgctgaactccaaatacgttctagataactcagcacatagtggaaacccaatgcatgtttgataaattccccaccttttgtaattccttggggtgggatagagacgagctctgggcaagaatatcagttttcaaactccaggaaagcatactggacctagtgtcatggaaagtggatcatttttgcggaggctctctgaacctcgcagtatccaaggtttccaggctagctggactgtgtcttgccataacccttatgtgtttatgaaaagaaaaaagaattctggcttcaaattcaaattacctttccacttaggggaaatggttggcagaggagaaaataaacgattgcgacatgttacgaagaatgaggactagcaaagaggaaggagcttaggtaaacagtgctgctttatttctgctgttaatcattcattgggcccgtcaaaagtttctgcccatctatttccatcaaccgtccttgaccagccaaccacatggctgaaattcagggactctttggtggagcaattaccagtcaacttcagggtattatgataaactctgatctggggaggaaccaggactacatagatcaaggcagttttcttctttgagaaactatcccagatatcatcatagagtcttctgctcttcctcaactaccaaaggtcggtggactactaaacccttggggaagcttggaggaaaggctggtggtttggccctttaaggagtgcaggattagaaggataaaacagagacaaaagcttggaggtgttttcagcagaaatcttttcaggagcactgtattagggggatgtaagacttgagacgtactttaaaccctatc

SEQ ID NO: 35719 - DNA, 677 bp, Homo sapiens
aatttcccccagctcctgatctataggacagacattcttccagggcagatttggagcaagcttcaaagactgtaaacactctgcccctttcaaggaactttaattggattagactgtgaagcatattatgccccagggagttgctgaaaaaagtagaacaatcagataaagattgctggaggccaatggttgtatgtaataccaacagaggtagaccacccaaagtctcaatgagaaagagacagtcaaagagaaaaccacagttatctctggcagttaaaaagactgtgtacatgcccaagtctgtgctgtctgaggcatgctgttagatgttgcacactttgaaggaaacagacttaactgaactagtccaattatgtcactaaacaaacaagaaaatgaggaaacaacaacagatcccaaaggtggtaagggagaatcaatatccaaagttgctgcaatgtattatctaacatgttctgttttcaaaaaaaaaattgtcagatgtgcaaagaaacaggaaagagtgacccatgtaaagggaaaaagccaacaatagaaactgtttttgagggagcccagagaatggacttagcaggaaagttcaaagaatcacaaagcagctattataaatatgtcccaagaactaaaggaaacaatatttaaagaattaagta

SEQ ID NO: 35720 - DNA, 880 bp, Homo sapiens
gccaggctggtcttgaactcctgaccttgtgatccacccgcctcggcctcccaaagtgctgggattacaggcgtgagccactgcgcccggccccacttgctttccgcttcctctttccccccgcggtgagctgaagtgctggcaagagtgatggtgagtcagcctctgccattctgaggacagttcctgcggatgctagagtaatgaaagggaaagcatttggcccttggatgaccttgtcaacttgggtcagagctcgtgactgttctgaatgcacttccatctctggactgtcatatgaaaaagagataaacttctgccttgttagccgttgtgtttgaagtgtgtttgttatagcagcttagcctatgccctaacaaattcagagggatacccaaatatcagtttttactggtatctcttctgttctgcccagtttctctggagaatgattctccagtctcctgcctgcttatttattaacttgaatttctatcgtgcaacaaagaagattactgcttctattttcctgtggaactccacttctccctccacctagcaccctgtttctgctacaacgttacttttgtattgtcaactttaaagcatttacattctttcttgaaacaattgttcctatttctagaaggcagagtcatcgcattcatcaactgcttttaggtgacttgtttttccttctattatgactagtttatctttgtatttgcctcagaggtgtgtatacaggatgtgcttaataattatatcatgggcaaacagtacatgaaattatgtgaaatactaacttggtactaatacagtccagcagaaggtcaattacaaaatttctgctgccaaatattcttctctgactataggg

SEQ ID NO: 35721 - DNA, 2647 bp, Homo sapiens
gttctcacttctttgtgggatctaaaaaatcaaaacaattgaactcatggagatagagagtgtagaaggatgattaccagaggctaggaagggtatcgggggtgagctggtgggggatgtggggatggttaattggtacaaaaaaatagaatgaatgaatgaataagacctagtatttgatatcacaacagagtgactatagtcaataataatttagttgtacatttaaaaataactaaaagagtataattggattgtctgtcacaaaaaggataaacgcttgaggggatggacaccccattctccatgatgtaattattacatattgcatgcctgtatcaaaacacttcatgtaccctataaataaatatacctactatgtacccacaaaaataaataattccaacatttttaaaaaagcaagaaaggtaaaagcactaggttttagtggaaagcacagatttgattcagattcgtgaaccaaataagtggctaaaactttacagataagtggctgaaccacttatttgggtacagacaggcctgacaaaattactcagacaatatttgagtgggacattccttgtggtttttcctgatttacctaagtcacctaataagtcacacttggtgccattctgatctgttgaaagagggaagtgtggtgcctgaagcactgaaaagcatgcgggagaaggtgataacaaggctcaggtaatgaggctcaggcacctattatctgtaaagttttggccaaatgtcacctacacttttctggaaaggtgattttaaaaaaccataggctgtcataagactaaatgtgatcatttatggaaagtgcttagaacatagaggtgcctaataggtaaaagagtcatctaacgaacgctctaaattccttgttttttctaactaatattcagttattgtcttagagtctcttctaaagttaagtcaattcatgacgaacttatgtgctttccttctttttagggaggttaaaatttaatcatgctgtaataaatgttacatcataatttaccgagttacttttggtaaatgagaactaagtgctttggattttgaactcctgtaacagtctttgcagctgaactaggtaggcaggtcattttcaggcctttcccaaaactcatcttcttgtagtaaaaatcagcatatttattattattatattattattcaagtattatttcccatgaattataattatgtacataaacagcttatcttttactgccttttttcagagacataacaccaggctgagtgtggcttttggctgattgaaaaccatgcaagcattcttcaggtctgatggaatcttgctgtctgtgtatgttcccacttgcagccacatgctcctgcatgcttttcagtgcttcaggcaccacatttccctcttttaacagaccagaatggcaccaaagtgtgactcattaggtgacttaggtaaatcaggaaaaacaaaaaggaatgtcccactcaaatattgtctgagtaattttgtcaggcctgtctgtattcttgaggtttttttttttttttttccgtatttctctttccccctcaggctttagaacttttggaaggaaatgtaactttcctcatcaattttgttttgtttgttttttaatttcatccttctgttggcagtccaaattcataactgaagccacaccttgtcctaagtaggcagtgctgctcaggatggctttctctcacgctgtgatttcctgactcgagtggatctcacactcagacttatcacactcaaggtttgctttaagggtgactgagcctgcccactctgaaccaaagtcctttttttccatcccttatttgttttttcactcaaaaatgaattacttacattcctagataacaatctcttttaagtacagctcctatcctgtaaggaaaagattagggttctattgctaaatggcttcagagttccacaaggttacttactccttgcatcagagcccctgatgctaaaattgaagttttgagtgtcctttgactcagttgattctaggaaccctgattccaccctcttgccctgagctcttccttaatgcagagcttggtcttgacctgactttgccccagggtgtagctgctactggctattggacagctgacctccagtttggcagaggctgctgctagttctctctctttcctttagttgtttctaggtggaatctgtgaccttcgggcttctgtcagtgcaggtcaacatgtaccatgaggcctgcgtcagggagcaaaccaccctcccatccctgtatctcatgcctatccagcctacaccgtgagccaggcattcctagtgcacagggccccaggaaagcctgggtaaagtgcacaatcaatgaaaggaaggtagtttacatcaatcaattgcaaagatatttattccatgttaggaattttataagtatggtcaaattgtagtaatttacaccaatttgtgggaggcataataaattattttattaatgttgtttattaacaaattaattattttattaatggtataataaattgtttattaacttccattttatttaaggaatgtttaactacaatttttttaagttttaatacttttaagtatatg

SEQ ID NO: 35722 - DNA, 2080 bp, Homo sapiens
atatataagctccccacgtgattctaatgtgtggccagtcttgcaaacctcaggctatttattctaaagggtttgtaacaagccttcctcttaaaatccaccccaccaccattcagcgttttggggtctgtttgtttttattgttatcccaccccacaccgccccgaggcgcgcgcgcgcgcgcgcacacacacacacacacacacacacacacatacacacacgcacactggtgaatttctctctacagtcagtctggagtaatcccaaagtggtgtctttcgtaaataaggagaacccgggtgaagaaaatgactcccacccgaacaaggcatgaacaatgttcactccctactgtgttattcaacctgtttccccaggtctctgttttcacattagagagtgttctaggagatgacgcccttcctccttagttatttccccaccctcgtgctggcctttgacagacctcccagtagagggcccaagacgcgggtagagcaccgcgtctcagcgcctgagtctcagcccccgaactccaccgcacctgcaggtccccttggcagcactcaagcgcggggatgctccgcttagacgaactcacgtgcgggcagcaaggcctgcgatacttgagcacccctccccctctcccgtttacaccccgtttgtgtttacgtagcgaggagatatttaggtttctagaaggcaggtcatcgcaggccccacccagcagtggagagagtgagtcccagagggtgttgccagcgagctcctcctccttcccctccccactctccccgagtctagggcccccggggcgtatgacgccggagccctctgaccgcacctctgaccacaacaaacccctactccacccgtcttgtttgtcccacccttggtgacgcagagccccagcccagaccccgcccaaagcactcatttaactggtattgcggagccacgaggcttctgcttactgcaactcgctccggccgctgggcgtagctgcgactcggcggagtcccggcggcgcgtccttgttctaacccggcgcgccatgaccgtcgcgcggccgagcgtgcccgcggcgctgcccctcctcggggagctgccccggctgctgctgctggtgctgttgtgcctgccggccgtgtggggtgagtaggggcccggcggccggggaagcccctgggctgggtgggaggtccaagtcggtctctgagacacgcacaggggccggcgacttggcaggtggggagcttggcccgcggtcgtggttcccgccgtcctgtgcctttaaggctctcgccgctcaccagcatttggggctcctgctgtgtcggcccccagctgacttggctttaggggtcggcgtggagggttaaagaggccccggctgggtttgcggagcagccaagcctggcaaaatcgaaagggagggctcaaagagactgtatccttaacccccaaaaagctggtctaaaaggatgggaggccagaccgctgaccgttccccactctcgacagagtccagccgtgtggagcacacgatgctgcaaacttgcatgtcatctctttcaggtgtggcatttcaagggggcttgtgtcttgaaaacagcaactgtgaggacacttgatagtcatttccttcagttctgcttttgtctccctaggtgactgtggccttcccccagatgtacctaatgcccagccagctttggaaggccgtacaagttttcccgaggatactgtaataacgtacaaatgtgaagaaagctttgtgaaaattcctggcgagaaggactcagtgatctgccttaagggcagtcaatggtcagatattgaagagttctgcaatcgtaagttcttcatctttttagaaaagttctgggaatggaatgtatcttaaatttatttttatatacctttggagtgactagtaattgatagttctctagcgttactaaaccccagggtataccctgttggcacgtcacactccagctaattgaagacatttaccaccctgagtaggtcctgctgcttcattaagagtttttcttcctaacactgtacctct

SEQ ID NO: 35723 - DNA, 624 bp, Homo sapiens
caccatttttagtggttgcattttggttattacttggatagtccataacctacctaacaaagtccttaatgtctggaattaaagtggtttcgcatttcaactgttagcaaaaacactacaatgcacgatcctgcacacgtgaaaagaaatgagatgaggacttcactaacttcaaagacagcttaaggattcagatcttcacatgtacacaagagacaagatttgcagatttgagtgaaaggctatgcacgattttaagcctttcagtacatattgccaaagtgccctccactaaactttgaccatgacctacggagtgagtcacaacagtgactctttctttgagtttatattactgctaggttttgtcaatttgccaatctaatgggcaaaaacggcattttatttgcattttaaagtgtatttatcatgtttataaggaagctaaacttttcatatgttcatttgactatttccatttttcgtttgtaaattatttgttcataattctttaccatttttctacttgggtgtttgcctttttataattgatgtataagagttgtttttattatttttcctctgtggtttgtcttcaaatttgtatgtagaaaggtttatttg

SEQ ID NO: 35724 - DNA, 1125 bp, Homo sapiens
ccataaacacaaaaactggcaatgtaatcataatttagtaataatctctgtgaagtcatagaatatatcaatagaagtagaaaatgtgagaaagcaggaaaaggtaggctagacttacagaaaagatgagtagactgactgtacagaatttgactctgaaattgagaaaataggtttaaatatatgtatcaagtgtatatatctacaatatacatgcacacatataaaattaaattcctaattggaaaaaatattaagtttaatttccaaattattagaataactaaaacagctgaatctatctgttccatatagtaaggggagggaaggaaaaagaatagcaaggaatgcatttgtctctgtcatcggaaataagccccatcatgtttgggtcaggtcattttattcattgctttctcctcatcctcatcatgggacatcgtgaaatcatgaaaaaggtagtgaaagaattatgacaaggccgagcacagtggctcacgcctgtagtcccagcactttgggaggccgaggtgggagggtcacctcagatcaggagttcaagaccagtctggccaaagtggtgaaacaccatctctactaaaaatacaaaaattagctgggcatgttggtgcatgcctgtaatcccagccactcaggaggatgagtcaggagaattgcttgaactcgggaggcagaggttgcagtgagcagatattgcaccattgcactccagcctgagcgacagagccagactccgtctaaaaaaacaaacaaacaaacaaagcaaatcaaatatataatttatttcaatccatttggtttaaacttcttgtcaaaaaaccaagtctactagacaggatcaaaagcaacaaatcttgtatttataaaaaacatgcctcaagttaaatggcatagtattacacacacacacacacacacacacacacacacacatattaagggaatacgcaaacaaaaaatggcagaaataatatgggaaaagacagaacttaagaaagaaattgtcaagcaggtctacaaaatgattgttttattttggtgccaggtacagtccacaatgaagtcaagatattaagaagtaaagtggaccaggagaagttagag

SEQ ID NO: 35725 - DNA, 2541 bp, Homo sapiens
caacatagaaaactgaaaagcataaggaaagtgaaatatctgtaatcttatcaaccattgttaattttgctgtattcctagtttctttttatacatatcaatatggtacttttgttttaataaaaggactgccaaaaggcacatgccagtttggactctgctttttccacttacaatgatatcatagtttctcatatttggtattcttttgcaatatttgctgcatagaattccatcacacaaaggtaactgccagaaattctttattacttttgctagacacttagggtttacattttttcaaaaattaatcacatcagagttttgatcacatcagagctttgatcacagctctgatgatttctctgggaactgagagcctaacacaagtcatgtccactttaagacttttaacatactgaaaagttatgttacagagtgctggtccccctgcaacacgttcactcacattggctgacgttttaattctttgccaatctgaggggaagaaatgtcaactctttgtttgctcttttaatgtcagtcatgtccttttccttttaccggtcattccggtttactcacaatcctacaaatcaatcctgctcattcttaattttccagtattgttcctcagattgtttcaccagaaaagttctcccccttatccactcttcacctaacaatttctacccatccgaatccttctgcatttattgcttccaggaatttggcacttaggacacccttgtccttacattgttcatgcatgtatatttcgtcttcaataaaaaatttagttgctcaagggcaagggccccatagagtctcaatattctaattgcctggtgttgcttaataaattagattcggaagggtcccctccagggaggggagcaaagggcaaattaccttaggggctgggagtgcagaagccaaacctttgagattgtgaaaacaagacggccccgagacgatccagtagcaggcattcaagcaagaaaaactcaaatattgttcccaataatgcctgactaatgccaaataccaagtaagggcccaggcagtcctgacagcctgcagtgccccaggataaaactaaccctgaggggtgctagcccacggtgaccccctgtctagactctggatctctatttttaggtcgaagtgctttattcttgactcccgaattcccggaaactattaccaaagcagcttagttttctctccaccctgcctgggtcacaaatatgacggcgagccagtcctttcccgcaggacgcctcaggcttccgggatggtaggccaagggcttagcaagaaaaaaggcggcctcggggaacctgttctgttaggttccgccagggcctccccctgacctctcgaaggccaagggctgcccatgaacgccgaggctccgccccgcggcccgccgattggccccagccgccctggtgactcgacgcacttccgccccgggcgcggctcgggccacgcccacctgtcctgcagcactggatgctttgtgagttggggattgttgcgtcccatatctggacccagaagggacttccctgctcggctggctctcggtttctctgctttcctccggagaaataacagcgtcttccgcgccgcgcatggagcctcccggccgccgcgagtgtccctttccttcctggcgctttcctgggttgcttctggcggccatggtgttgctgctgtactccttctccggtaggaccccggggcgggttcgcgcgtccgcggcgagactagagctctcctcagtcgggcaagagtcgcggggcggggctcacagcaggccgtgcctgtttggggacagggttctctgaggggtgcagtgctcagatcccgggggtatgtggcggggaatgcggggaccacgcagagcccgaggtgaagcttgtttggtggcgtcgtgtgcgcggccagcatttacgcaggatctggctgcgtccctaaaaaaagcgtgaatcgtgttttcgggattgagccagtcggccaggggagcgcggactgggcgccctaggtgagggcttgttctggagtgcacaggtgcgtgggagtgttgctagggcccgtgctgtgtccgtggtgagagtttgccctgtgttcccttggtgccttggtgagtggggtgttcattagggcttggacagtacccgcggtaagggttgcagtgcgtctgctgtgccccatgtgctgggctgggcgagcaggggcctggccaggtgttgctgggagcgtgctgtgcgtaagtggcctgtgtgcagagttcactgtgggcaagacagctcaactgtttgctttgaatggagtgagcgcggactctggggctagggagggcatgttgagtgagagcaggctctcggtgcctggggttagagaggtggtaagggcgcgccatgctttttgtgccttctgtgaacagtctccgtgttacctgagctcctattagtttgtaaatggctgcttttttggggggtgggtgggccatcgagtcttcttcctgttccc

SEQ ID NO: 35726 - DNA, 893 bp, Homo sapiens
aataacatgggaggaaaatgggaaggtgagggaatccttctttctgaaatccataggcaaacccactgaacaaacagacactggtccccagttacctaaccctgcttgcttgtgctgcgctaccacagtgtgtgcaaatccagaacgtgggaaggttctgccaaggcagtgctgggtgctgagtcacagctacttacgtgactgatgtgtgttccagccagatggggggagccggaagccaagcccagatggccatcttctttcctctgggaatgctgatttcagggctcctggcagcaaggaagagctcatcttggtgagagaggggcctggggaaggctcttttgtaaaaggggaatgtcttgccctcaagagacagtcccaggccattgcatgtataaactgaaagggcagtccagcttcctgtcattctaggcagcagcctgggcattctgtctttagctgtcagggtgggggctgtgaatcagagggaagggtgataaaaggaatggtatacacatgaggggccaagggtggagcagagggagcatggagttaccggctggcccaaagtccccagaaacctccatcaggctcttcctttctggcagggtggccttcaaaggaggactcagaacccagggaccactgcatttcccaggccctgagccccagtgtgggaatcacatcctccaaacccacagtgcccctcaaattcctattcaggtaagaaggcaaaaagtaacagccttccaagcctacgtggacccagcatcggtttttctggtttcccctgcgtcagaggtatggaggtctatgttcctaggcagctgcactcctaaaagttcagttttccatccctcccttaacactactgacataaaccccagact

SEQ ID NO: 35727 - DNA, 1261 bp, Homo sapiens
gaattactggctaaggaacatctccatgaacattcagggaggccccaggatacagctggaacctccaaagagattctggttccatcccctcatttcatagataatgaaactggagctgaaaggaggaaagtgagtgagtttttaccaacaagagctaggaccagaatcagggtcggctgactcaacacagagcaacacaaaccccactttcctgaccctcctcctccctgagcacccccaactacactacctcatccctgtgcaacttcagacccctggcagcagatggcagtgtgtgcagtccggcgggtcagctgtccatgatcagccaaagagccaacaatcacatggcctgactccgcaggtccgctgcctcttccaccaagtaaacaagtcccgagccctggagctacatgcgctgaacacatgacacatgcctgccctgtccccagcaccaccaacctgcctccgcctctcaagacacagctcaaccaagcatctggcacaggtcacttctctatgcctggtgcccatcccttccctatcgtgagacgattagctctgggaacggctcgttctggcaggacaggctgagttcagaaccagcctcctgcaggaacatttgaccaatggctcggcaaagacctaacctgcacgtttccctgtgctgcatggacaagtgtggggcacagtgaccaggctgaggaaagaagtcagctggtgcctgggagggtgtgaggcagaaggccaacagcaaccatggcagacaggagagaaccagtctgccggagaccaaaggcttgacatctactccaccttgatccctgactcacgacaagttcctgtaagccatggggaccttggatggatttcccaagttattaggaaaaaagagggggttagtttgtgtcagtcctaactccctgaaggaaagctcaattgatgtggcttcagatggctgaggtcctaagtctctagaaccctctgaccatcatctgaattctcctccttatgtgtgtggggggtcccccttttcatccccacacaatctccatatatgtctaccctgtacatttttaaattctttttaaaaatcattattagcggtgtctctccacactagaatgtatgccccatgaaagtggaaagttggctttgtcaagttctgtatctctagcgcctggcacagtccctggcacatagcagaggctccgtacacagcagcagacgccatgtactggccttactcagctctgcctgt

SEQ ID NO: 35728 - DNA, 2306 bp, Homo sapiens
taagcaagtgaaatgcaaattcagatttgataccctgccctgagccaatcaaaaaaagcttttcacctgccattggcccacccaccaatcagaggaagtgtctggagggagagccctcccctggccaatggaaggccagctcagtcacttagttaatgatgcagcagtacagggaaggccatcacatgtgaactggaagggagccaacatggagacacagagagcgcaaggtaaacaactttccaacgccaaaaggatgacatttaatctctaaatgctagcttcccttcttagctcatccttaacccctctcagctggccacagagaccccaggagcctcactacctgtccccatagagctcctaaccagatgcaacagtgactgcgtcaccattccccacttttcccaactacgcagtgacaaacctaccagctttaccccacttctcccagcccacaccccaccctggccactcggctccccaccagcctcagaatcccagggccagacctttcaataaggcaacccctgggaaaaaactgtccctctgtcttcctttcggcacttctcactcccttaccttccacataagacctgcacggacagacagatggacgctgacacccaaacaacttggagaaccagtctgtctgtccactagaaggaaatagggtaaaagctgggaggtcaggtgggaagcaggggatggttcactcctctcacctctaccctggtcaggcttgagcagctgacactagggaaaagaaattaaagtgggaaaaaaccctccctcagagaaataaatagcaaaaatcgagaaagaaggtgagaaagacagagcacccacatacacagagacagcgcccctgatcccagcaaatacatacgtgggggaagaagggggttacgccatcaagtcctgaagcccgtcggaccacccatcgccgcctgcgcagacccaaatcttggtcccgccgtaaggtgccgcagtcccgaatgttccagaatttggtcccatcaaaccctccaccgtcgccccacaacctcttgctcccacccctgccccccaccaccaccccacctcctccccacgggaaccgcccgtgccaccttgcgtgtcatctcctagcctaggctacccagaggcctctggccctgacagatctctgaacgctcagcaagtgagctggcagaacctggtgcccggtgttgctatgacttgtttcttgatttctctctctctctctgctgcagcacggctgttgctagcagacctatcgacggagcttgcttgctcgctcgctctctcactctctctctctctctctctctctctctctctctcagctctgtgacgcagatctaaattctccagtctgctccttgtgttgcaagagcagaactgcagcttttcccctggagagccggagggcagtgccaaggctggtcaaacaaggcaaaaaaagttgggcctacactctgcttccttggccacacttttcagctcacaccctcccacctcacccctcctgcacctcactgctctggggcatagaggtccctgtcctttcaggctcactccttccctgaggccttctcaggcataagagtagcttaactctttgagtggcagcccccagtgcccagacagggctgccctgtactaaatgttgcaacatgttttcttgagccatatgggcttctccagccctgagaaaaaatgttcctcaccctgaccactgtcccattaactctttgtgccacagacaagtccaggattacagtcatagctgatttctgttgttttttgcctttttggccaaaaaccaggacctttttctccctggaatttcttaaggacaaaaagcgtaattaaaacattgcctgcctaccccacacatgagatccttctatcagggcaggaatttgaaaaaccaaattgaactgcagcctgaagaatccagagtaaaaccagtctggatatccatccttcctgggctcaaaattttagggcctaggtaaatacgttcaattacttttcaagtaattggccacacagtctcagagatttgggttgctgagtcatttgttcccaagaagatctgacaacatgaaaaacagcaaaacagagcaacagccaagcctggacctgaagtggccaatgactgggttctcctctccagcatgggcagtcaagcaagatgagcatccacgagccgacccccaacccctccacaatgttcatgcatggatgtccacactcctggaaactcttccaggaaggggtggtccaccaatgatcta

SEQ ID NO: 35729 - DNA, 2718 bp, Homo sapiens
gagtgagatattcaggtcctgggtcaggtaacttatgaagtctatgacatcaagaaccttgcaacttccaggaagatgaatgagaatgcgaggccaggcagctaccttatcccatatctgcttcccaggcagccttcttcaagcaactactctgggccaaagtttcatccggcagaaagaaggaccacttggaagacaagcatggcactacacagttttaaaagaagaccagagtatctgtgccaggctcccagcaggggggaaagtgcttcaaattcacaccttctgggctccaaggttgagcatgccaataaagaagttacctactggtctgatgaccaaaggaacgtggccttgatggcactaaagcaagtcccccagaaaggtcctctggttacttaaatcccatttgccatagtttccttctccatggaagaaaaacatgcctaagttcatgtcaggacattcctgatttatccaagagcccaggatcaaataaacaaagggctctgagctctgccagggagcctcctccttcaggaggcagaactagagggaagtaggcttggtacagagctggcccatcaccccatgaacttggtgagtgacgtggctgctcactgccatggcgatggggatgttacgggtgggtggaagtgagagaagaggcaaataagtcatgagagacgaagcgaaagcgaggcagggtcacaggaggaacctacaaagccacagaatttgtacagaggccgactgtagtctatgaccgcagcaaaactaagctgagtccctgcaaagataagtccccatctcaggggtgcggcatgaaccaactatgactcgcaaaaacctatgacaacactacgttcagcaaggctttgtttcctttcattttccctctaaatcttttccttcccatgaccccgttggtacggctttgatgactggaagaacactagggttttcggttttgctccggtttgaataaaatgacacagacatacatggagtggttttaaagagtggagaatttaataggcaagaaagaaggaagaggcttttcctgtacagagacagaggggggctttaagccgaaagagggaaccttgagtgcggtggaaaacagccagttatatgaggaggctggaggaggcaggattaaaacagtcattttaggtacctctgcccaattctaggtcttccttctattaacctgattctacaaggcaccaagaacaaaaaaacccgaatgggatgaccaggaagcagaaatgaattcagttccaaaaacatgggaggatgtttacttagcaagcacgctcgagcctacaaggaagcagttttacagggtgctgcatgcagtgtttgatttcagggggtaaagataacttcagagtggggaaaaggtgctggctccttctactcaccctcagaggcttggggaggccaggccagcacaaacttgaaaaggcaaggcttcagctcaagcccaacaggttgccggctctctttggctcctcggcagctaccggactcaggaactaaacaaactctccagacttcatgagcattccgtggcctccgactgatctgggtcaaaacttcgaaatgccaaagacaaagaatttttttctttaaaggggaatgagctgaactttgacccgcccttgttcagggtgtggaatgcaagcactgtgtaccggccacaaactccagttcggcaggcaacagccagaaaagcagtcttcatgccggcttcatgccggcctccctgtcctgtttcctctttagggccaactcgacggggtctaggtctttacctcgctctccagacagggaagctgtgcagaggacacattccaatctctgttatctagagctagagtggatgttctagataaatctggcagcgatctggtctcaggtggaactgacaggcccagtccacagcaagatggcatttctgttcactccctgggagctggtggacaacaggcgcttggttaccacctgaggtaaatcatttattaagtacctactaagtgctaagccaagatacagcacaggaaaagcatcagaaacagtccatcatggagaacacacacattccagctgaggctaagtattcccaaatttgcattgctgatatttaaaacatctgcttactttaaaagctgagatccacttttgcaatgaaataatatcaaacatactgcttggttcccaggctagctcacaaaagcccattttatccactccaggaagtcatcaactccagtgtcttcaggggccatgcaggtaatgaaggagtacagtggcctggggaggggatgtgcccagtggaaggaccgtgccactcctgatgggccaccctcctggctctgcctgctggggaccatctgggaacagagacccaaagagtccagatcatccaggttttcagggcaaggcggaaaactagctttatgttaaactcctgattttttttttaacactgtccagatattttaatggtcagaacatacctatagagcttccagtttgttctcctggttgtaatgtgtctaaaatacaatacgtttgtaataaaaaaaaaaaaaaaaaagagcaagcattgccagagtgaggaattaaataaaataaagaacatacccaaagaggaaaactttacctcacacatctgccatttgaggaaaataataagcatagaggaaaatg

SEQ ID NO: 35730 - DNA, 1294 bp, Homo sapiens
aactcctccaccgtcatcaccacacccactttattaatttggcaggggtgggggcagctgaacagagacagagccaagtgatctcccgcagcacctgccctctcctgagctatgcctctggccttcccgcctcctcctccacacggacctccgcgccccctgaagaaggggggaaaaagaaatacgcattaatacctcgagccttggcgcaccagccctcgccccctcaaccacctgtctctgcgttctcccccgcagccttcctcaactctgggcgccccctctgcagcaaaggggcaccacgcccactgcggagaggagaaatgcaaggtggggagcggacaggggctcacttgagggcccgggggctgctcactcacccctgcgcgcagctggccctggccccagagcctggggcccgcccggagctgctccaggccgcgaccgctcccacccccgcggcgaggccagcagcgccccaaggccgcgctgcagccggggtggggcgcgaccggagcgcggccggggccctgggcatcgtccccagggagcccaccctaccccgggacgctcggggaccgccctgcaggcccggcccaaggtgcccactcccacctggccgagtcccggctcttacctcggcggccttccgccctccgggggtactgcgcaaacaggctctcccccggcccccgcccgccaagcgccccgctgcaggcccgagatgcgcagccgctgcggacgccggctccgcggcggccgcttcccgggcgtgtgagctcagcctgcccgcgcgcccgcgcttcccacgctcggcgtcccgcgcggcgccacccagcggccgcgtcgggcgctgcacgctcgtgtccgggaaaatctgcagcagccgggcctgccaactgattcggaaattcccagaatttgaccatgggcttgcggcggggcgggagacctgtcaggccgtgtggccgtcgctagactcggggcagagcagctcccacccaccctgtctctgaaggggactccagagtctttgcaagatattctgatttcccccctgttcctctgaccttgcctcgccatatttcttccagggcagtggagactgtggggatgctggtgactccttgtaaaatgggggtggagaatcgaggggtgggaaatgggtgggaagcgctcgaggctggcatctcaaggcctccatgggcccgtctagagatccgaggtgtgcactgagtcacttcccgagcttgttagaacacacatgcacagatgccccagcctacctgtaaat

SEQ ID NO: 35731 - DNA, 923 bp, Homo sapiens
aacaaatctataatatacactcagtggaaacctcagtggcctcctccctctttctacccaaaggagtctcaaaaagtgcattgctcaaactgaaatggcatttttgtctcgtcttccatctctgttttccattaaaagcatggaacccagttttaatgaagttcatagatttttcttcaggttgctgactgggccatcagacccaggaatttggactcagaagaaaaactctgataattcttcaatagtgagtcagaatttattccagcagcctccaatcagagtgtcctcctcccctgaacaggaaaggaattgaaactaagactttctcttcagtccggatggcagatggcagagaaggaaatgcctgaacagccctgacaactttcctgttaggggaaaactgctggggtgtgtgaccatcatcagaactgggtctctgtggaggagaaagcttcctgtttgcgggcagggccgctgcttgcaacaaggccacagggtcctcccagttggaatggagcctgggtattttcccactgctgtgacccaaggcaggaaaacccaggctcctttgctcctacacaaagcaaggtcaagattggcctcaggacccagctggaatttgaagcagctgagggaaaacaactgggcttggataaggccaggagagtgtggttagccaaactccaggtcacagagacacgagcccaaactggagcctcaaaaaacccccaggaaacaaggctacagagaaatgagttctcaggccactgctgcttcattcctcaggaaaaggagcaattctgcaggtctcccagtaagtccttggatagacgttctaactctggaaaaatccgtttttctgaacagcatttgaactaagtagtctgaatgccacactgaaccaatcaacagtctccacc

SEQ ID NO: 35732 - DNA, 1860 bp, Homo sapiens
taagacctagtgtgggcctttcgtattctgggtcagataagtgaacaagcaggtgaggttctgtgtgggctaccctggaatacagtgttgcatagggttgtgtgagaggtgcggggaacgcctagaaaactttgcagggagaatgttttctaagccaacacctagaagacaagcaagagtttgctgggcagagagtgaagctgggcgcggctgggatcatggagccggatgtgcacagccgggacatggggaagagctgcagtggagagtggggtatggtggagagcagtcagggccagacgatgctggcgggcctggaggccttgggagcgctgactttctccaagagctgggggtgccaggacagggtcccaagcagcggccctacgtggcctggtttgctcttcactggcaagctccatggccctgggcaatgtgctgcttctgtttttcttctcatcggtgcctggctgagctctggaatcgtttcctgctctgagcctgaaacttcaagcagtaagaagacggtccacagcccggttactggggctctgcaaatgcgacgttcccagtggccctctcccaggctccgggcctccgggtagaggaacttctgtctgtaaaggatgaaggcgaccttgctcaggctgcagcgggatggagaaacgtgacccagcggaggggctttcggctgcgaggtgcgagaggcgacccgaggggtgaaagcaaggcgagtgcggtcagcgcaccgggctgggcggcctcccagccggccggggaattcgttcccagctccagccgcatctcaccgcctctatcgcgcctttggggcctcagagggaggctgcatggcccggaggcctgaaatccgccatttgttccctcccggggcggcagagccacagctcactgaaggctgcagcctcggcagccggaagcgctggccgggcgcttggccagcgaccgcctcgggtcggcctcgggtctgcgcaggcgcaggctcgggaagccgggcgcggtggtgtttctgcggcccgcggctgccctctcgtggccgcaaggcgccatggcacggccgcttccacgcagcggaggtgcgctggccggaaggcggcgggtccggccagccagggagaccagccaagcgctgtgtttttccaggtccgcgcgggccaggggaaccctgcgtgtttgcttggtgggagtggtttactgggaaagtagacggaaggtaccctgcaaatcggcgtgcactgtattgtttgggagtcaacagcctggaaagtaaatatcaggtgagggcagtgctgggaaccaccgcctgccccctcccctggccttggccctgactttgagcggggcaccgcgggccaaacagctcggcggcccaggggagagggaggaggaggaggaggcaggcagcgggggaggtgtcaagactcagaaataggagccagctaggcccaacatacgcctgccaccccaggggctgcaaacagggaataccatcccttctgcccaccccacgaagacatcgtacaccccgacgagtcaccattccagaaaggctggctttctgcaagcgtgcgggggcggtgagagtggagggtggcggggttgctcggggcccacccaagcataactgtctgaagggcacacctcacaacggaaggtttaggcgagaggggtgaacccacactctggcacgagaatcatatgttctgttccacccagggagccgcactacatagagttctctttaaattcatcttcactggctgggtgtggctgagtcttctcctatctcctgattctcagttaactttttgcgtcccaccctgttcttgtctcaagcagtcg

SEQ ID NO: 35733 - DNA, 1041 bp, Homo sapiens
tggattcctgtggcatctcaccaagttggatacaggtctgtgtccaggggcccaagggaggtccttgaggttgaggtggatttggggtcgtgtaactgagcaccttgcctagtctggcagggtgcggggctctgtaaagatggtctgccaggaggacctctgtgggtgccctggctcctgccacaacagctttcacctcttttttggctcagaagcactatttgtttcctttccctttttccatcttcctcatctctgtcctataggcccagccagcctttcctccaggactcattccttgcaggaataaggctgtcattgaaggatcagacctgaaggatctgagagatcaggccagctctttcttctccctgctgtggctggcaggcatcacacagccctcagagtctgggaattcacccctttggactctgacccttctctgggccctgcgagaatcacggcctgtaagcctcagagctacacactgattcgtggaatttcagactgctcctgtccaggagtcgtgccccatcactgttatggaagggaagtagccctgcattaggggtcaggagactcaaggtctaattctgcctcagccacttatgccctgaatgaactggggaaagtcatttcacttctcatgagtcctttgctctctcctgctttgcagaatgatgataacaatatttacctctcagagtccttaccaattaaaaatgagatagtggatgagaaagtgctctgttaactgcaaagtgctgatggaagataaagcgatgtcatttttatggttgccactaaaggctggctccggtgggggggatcagaggaaacaacctgacctggcagagggttaggataagggaaggaagtccctgccccaaagtcatgctcttgctcatgctcccagtaccccctgcagagctgtgttcacagtggaatcagaatggtttgacccaacttccctgataaatcatgcagaatgatttggctgctcccccgctttctcctttggaggggtagcctccctttttc

SEQ ID NO: 35734 - DNA, 893 bp, Homo sapiens
atctataattttggtgtgttcgacatgggagaagtgccacaggcactgaagctgggaggacagagtggcggaggcatggggagtaggaggtaccgctggacatgaccactgcagagctagagggcaggctgcccagggccctttgcacagagctggcagcaggctgtcaggttctttggagaaagaaattctctcgaggaaagaccctgcctgctggctggtgggtcagcctcactgcagggaaccaagatttacccccttttgccattctggggcacaacattagcatctttaccacttgtctgacctaaatggagacacactgtccaggtctgctaagagcatttctgcaaaactttctgagcagtcttttacctccaaaacccaagcagggaacccagtattcacgggctcaaatccagtccagattttgcatctgtgaggcaccagcttccctccctccctccagagccctcccaacacctgccgcagaggctggaagccaagagctattgtgcaggaccctgaactctggccctccgcctccgcctccaccccaaacccagctcatttcatggagatgctttgctagctggcatggagccctggagtttccaactccattgggcaacagaattcctagccagctcctgtctttcggggttttcaccctttctcttcccctggggctcttcaaattaggaagtttaagtgtgatttagcatttatattgagttggtattcaacggcagatcatgaggccagttgaagtgagatgtgaacttcttagaatcataaaataatgagaccagaagggtcctcccaagggtatagggtccatgataattattctgatttgtgtagccttttctgggcttccttattaccaaagc

SEQ ID NO: 35735 - DNA, 465 bp, Homo sapiens
gaaaactctgcctatctcaggaagtttatagtccaaacacctcagtgtgacatttcagacttctaaattctgctcctcacccaggctgacgtttccactcctgacccctttggtcaatgtcaactgcactcctgccaggctggcctcctctcttgctttgtgtagtcctgcctccatgcctttgctcatacattcctgctaatccaaacatcctcccctctcccgctcatgtgcaaatccctgggccctccctcctccaggaagtcttccttgatcaacctttgttacttctctctctgaactgagaatctgactgcctgcccaattggcatgagtctaatgcactttttatactcttcttaggtaggtaactttttagattacttatagggctcttctttttatttcttcttatgagacatctctgtatgctcccacttcagtttcttgtacgaaataggtcta

SEQ ID NO: 35736 - DNA, 1346 bp, Homo sapiens
ttcaagcgattctcctgcctcagcctcccaagtagctgggaatacaagtgtgtgccaccatgcctggctaatttaatttttgtatttttagtagagatggggtttcaccatgttggccaggctggtttcgaactcctgatctcaagtgatccacctgcctagcctcccaaagtgctgggattacaggcatgagccaccgcacctggccttctccggaactttctaatccttagggacatttctttgggtaatgaggtccagaaccggagggaggtgagtggatggatttgtgtcccctgaggcgcctggctgagctggcttttggggacaggggtcactggcccagctcctagctctaagcacagggctttggtgtctctgcacctttggctggtgactcagtgtgtcaacaatactgatttagccccggctgggtgcagagttttctgatggatgtcacaaaggtggccaaaaccaaaggaaatgaaaacatgctctctgccctcctacagcttgctaactagttggaagagcataacaaagatgtgaaaaaaagattcaggactcttaaaaggcagatactgagatgtgaaaattaagctggagccagacaagggcatgtggagttaagtggtgattagagtggggtgggattaatcagagagggggtgaagctttctgaagacagactgtgaggccagacttcatctttgacgcatggggaggggcaggcagcacttttcgggttcttcattaagcattcctctggctgctactacaggccctgagacaagaagattgaactctctgagactccctttcaggactaccacttgccaatgcggtactttggtgcaatttgaaagaggtgccccatctaggcacatgccttggtaagatgaatgaggacttttgtttcagcccctacttgcccctcagccagatgcctttatgtagtgcatttcctgaaccatcatttcagccttgaagtccctagggaagtagggagttgaaatatagctggtgggtctcccagagttctggcctggtggactcagagacagaatgtttttaagtactaaatattgtgggccctcttataatgtctgtgaggggaggtcagagggtgcagagagatgggaatcacctttgggtctgagagcaggcaaggctccaaggaggaggcaagatttgaaaaggggcagggtgaaaagtggcctgggcatgaaaacgccataaaccaaagcagagagaatgagctatgggtgtgcactggggccagcgaaggacacaatatgggatgtcacccatgtagatttcctttgttactcattccttagcagtag

SEQ ID NO: 35737 - DNA, 424 bp, Homo sapiens
tccaggcagtgtgatcctgctactgatggattcctgcaaacccttcctgaaagcattttcagggcccacaggcatttgatagacctcaggtaggacttacacaaccttcagcaaatcaacagcaagctttaaagttgtcagtacttccccacatgtttgaagaaatcagtccagctttgatgactccagctgggcgttgggtgttgcacaatgctgatggggcagctaaacagggtgctctctgggcctcgtctttcttatctggggtcagaatgggtgctctctacagtccttaccagctctgatgctctgtgattccatgaccttggtagctggggaatcatgttcttaatgtgtgttcatggaccacacgcatcagaatcacatgggtgttgggcagcagagggaagaggcaagcagaccg

SEQ ID NO: 35738 - DNA, 857 bp, Homo sapiens
taattttttcctgtaattaaaaggaacaccccccaactccatctctaatcccacataattagctctctgattgccagtgctgggcaggaaacctcctgtttggagagggattttggacagaaagattaggcaaacactatgcaggaagctgcgctgggaaaacaggctgttctcaaagtttgttgttaaaagagatttgtggtgggcaaaagggcctgattccctacaggtggtctgagctgcctctgaccctgtcgggttctccaacaaatgggtcgcttttcttggctttcaagatcctccctgtggtggagccctgcagtgggctctatctccagcacatggggcaaggagtattcccaggaagcacattccttcctgctcccagggaggactgtgcttctctgcatgggagagggagggagagccgcataggcatctacccccacaggctagctgggcgatggtcaaaggttactgaaatatggcaggtgacaacaaaaccaccatgactccaatcaacctagggagtgggagaaatgccaggaaaatggggaaaccccttccctagaggctctggggagggctcctcagagctgggcattgattctcccagccaatgttgtcctttgtccatctaacaggcactgcattatcatctgctaggctgagggtatgctgaaggtaatgacattttgtttgtttctatcacctaatttttcttttttgatcttcatgatcatcctgtggggggaagtaccttcccatagaagaggaactgagtcctggtgaaagcacacaactccctcaaaatcaccaagcaaacagctggggagcctatgctaaagtaccaggct

SEQ ID NO: 35739 - DNA, 1300 bp, Homo sapiens
agaattaatttaagaaaatgcatatgatgcatagtgcctggggcacatagtaggtgctcagtacatcttagcagttattacattggtgcagaagtaattgtgggttttgccataaaaaaaaaaaaggcaaaacccgcaattacttctgcaccaatgttgtgcagtgagataagcacaaagcagtgtcaaaatagagagctggggggaaaacaggcaaaaaccacaaagacttttgcaccaacgtaacagcagcctgaagagtggctccaaaggaaagatgcacatattgtttgcagacctatgtgaaaaccactgtttggggctctgttatttgcagaggtaatgttttgggttggaggaagtactgtggaattggaaaggttggtggggtcatattgtgaaagaccagggatccctggactttgctttgtaaaaagtgtgttctgttcttccttcaatttctagctctctactttgacattgcttttaaaaacaactcctaagtacttccaagttaccgctgccccctcctcttccatctcctctgcctgctagttgtgcccacagcactgcccccatccgcagatgacacctgggggtcacaagggtctgacctcagctctgggcaggctgagccgagcacatgccctgacacttatctcaccgctggaaagcttggcttctgagttcttgggtggcaactatcccaaggaagctgctttctctttataacagattctggagggctgagggagctgatctcatcatgtccttggatggtactatccatcttggcagaagggagggctgagagtgctcaggccttacctgggagtccctgcaggagcctgcacaaagctgtttttttgtgttcaggggacacttttgggcagcattagagaagaaaggagtaactgggatactctggggacggctggctggctgcagaagatgggtccttctagcagctcccagtgaatatgactaatcagttcaacatcacagaaagagcccaggcctgagagggagaagattaacagcgaggtgactgtgagcaagttactgccctctaggctggagctgcctcactggcatatctgagaggcagtgttgggtagtgattaagagcaaaatctacaaccagtattgctagattggactcctggctttaccactaacaagagcagggctctcagcctctataagccaaatgccctcatttgtaaaatttccttatttcaaatcctgtcggtgcaagattaagagttaatatatacaaataaagtacttggaacagtag

SEQ ID NO: 35740 - DNA, 5157 bp, Homo sapiens
gcgcacccccactcacacagaagcacatatgctggagacagaattaggagcccgctgagatagcgctttgaaaagaagagaagttggtggaatatgtgggttttctcccttgtgccaagtcccctctgagaagggtatttggatcagaggtagaatctctgagtcatgacgtgactggtttttgcaaatgtgtctaggccacttgcctggtcatggaggggtcctgcccactggcagacctcagctcctgtcggtgaggggctttgagtatggaaaagagaggagtggggacttgctatggcctggcagccaatggttgtgtgtggggttgggggctggagagagaagggctaactctttggaaagcctgcctgcttgttctattcttgcagaggcgcctgggggagggaaggaggaacacagaaggcagagtcataaggagacgccgcgggtgggggtgggaggaggtaagggctgtggagggagggaagaaggcattgtcaaactctctggatggtcatcagccagatgtggagaccatatggaggaggcaggctggaggtgtgcagggaggggaagaagacaaactgaggggaggagactgggaagggcagaagaggcaggtgaaggctgctgacctaagccatcagagtgggaagccggaggagctcccatgcccccaataggctggtccatgcaccagggccacaggggtcaccaggcacttctgctcaaggctcagcccagtttctctgctttcagttctgaaactcaaaccccacaatgcactccctgctccacactagcccttaggccttctctcctcctcatgtgttccccccacctgtatatcctcaagttcacgactgcaaagtgacaacagtggtggatacaagagaaattccccgaggaaatgagctggtgtttcctggtctccctcaatgcctctggaatgcaagggaaatcggatttggcccctgctgatctgatacctccctggtgctgggaactctgtccagccctggccatttgctgcctctgggggagctgggacaggtgggagccagctgttgttaggactttgcacactagtggctcgtgggagctcctgtaccccttagaaaacagaactcaacagcagtgagcagactggctgatcctgcaggaatctttgggggagaaggtatatgatgagtgaaccggaacacctggagaccctgtacctgaagagcactcaggagctccactaagggaggatgagaaagaaggctaaagggtggagggggagagggcagggatgtgataagaacaaagcgtgagtcttcctacattccaactgggtccactcatcccagctgagcaccagacagtgaactgtggactccagtatggaatacagccagtcactgggcaagagtccttcctttccaggggaggtctcttcttgttcccccactgtatccctccagggctggcacatcctctgaacatggacacaaaggctccagcattaaagtaagaagagatagaggctacctggcctggaggaagaggaagaatgtaaaatggcctccaaaggattctcttagggtaaaggagaccaaactttgcctgtgtcctggacagtctaggcagtctgattggaactatgttcttcttcttggaccagtcctttgttgagaagtctgagctggagtcctggggccagctgtctccacaacaggaatcactgctccccaggggaatgggctggaaatctggaaaggtcatccatagccccagggagcaacaacctgaggccctggttggcagaggtcaggctggagaatggcagtcttcctaagagagtgcctcagaaaacctgatagccagagaaagaagacaggctggttcaaaccatagttaaaagatgcctagggactcactaggatggttatagggttggacacgggccggcttcccattgtgtggtatcttggggttttgtctgaagtgaattgatggatggctcaattctgtttctgttggaaccaaccagccttacgtaccctccttctctctcatagttgtctggtgctttacagtttataataggctttcaaagtcaggtttgagttaaggtcacaataactgtgaaataaacaagtaaggaattgttgccacttcacagatgaaaaaataaaggtcccaggatggtgcttctagcactggttcccatcagcctttccagtgagatgacaagagctgggttagacaggtaagccctgcagaggggtcccagtggcctgcaactaactctagactcattcatttcatttccacgggcatgggtaagaagaggctgtcaccccttctttactcctcaaattatgcctgtatccacatctgcccttacctaccagagcaaggagccatggccaacttaagcatgggtttccaggctacaaacaacattgctacagattttttcttggggtcatgaagaataagatgcaaaattaatgaattacagggtcagagttaggtaggtacaggttggaaaagcctggagaagaatggaaaatatcaacaagaaaaagtcccacagtgagaaacagacagtaaggggatgctgtccaggtagatagaaagtgccagggaaagagggtgattttacccagggacatataagtgactgaggatgcaagggaaggccagctcctactgtgtctgttcatgtagcccatgctgaactaaaagctaaaacctggcattatctttcaaaatgacacatctgattacgtccctcacttgctccaaagaccttaaagggtttccccttgataaccaaagtccaaactcttgagcactgacagtgtagccctagcctgcctgtcagctgctttccctttttgccctactcccttcctccttgagtcctgggatcctctagcactgaaccactcatagtcccctgaacctgctgtgcccagttcaccacggtgccggtgcctttgcacagactgctttggctgctgctagggaatggccttttgcctctttcacagctcaaaactccttgcattacaaaccaagctccatgcacacttttctttgatggctttgccgactctcccagacctattcattctgcctgctttagggcctcagcactggatacatatttctgtcttggtactattctatgatgttccaattgttcatacaaggaaaggctgtaactgttaaacactgttaattgttaaaggaaaggctgtgacttattcacctttttgtatttttcctacctgatgcattcagagtccagcatagtgcctatctcaaaacagatactcaccaagcagaggactgattagcaaaacaaattctggaactagactgcctggtttgaatccctactccacctctgatcagctgtgtaaccttcaaatctctgtgtctctgttgcttcatttgtaaatggggataataattacagatacctcaggattatttatgaggattaaaagagttaatacatgcaaagctctaggacagtggcacttagcactaaatgagtgtttactataatgattattatcttttgaataaatgaataaacaacatggaattagcaagctggtcacatttttccttagtgacctcaagggatcgcagaaagagtataatctggtctagaggtgggaatacagttctgatgagtgaaacataaaacaacagccagcaaaagtctaaccaatgggctgtagaactagataagtggttctcaaccgtggtccccagagcagcagcatctgccccacctaagaacttgttagcaatgcaaattcttggggcctgccccagcccagtgctaatgaatcagaaactctgggggtgggacccagcaatttgcgttttaacaagcagtcaggtgattctgatgcactctcaagtctgagaatcactgggctagactttgcccgtctctggttatctgtgtacagtgtgcacctggagatttcaaacctcttactgcaaaacaggggccttaccctgaggacttgaacaaacattaggcagaaaacactcctggtaatagaagatgatgtgcaatgcatttagcacagcctctgccattctataggagcataataagtgtccattcctaccttctttcctctttatcctaccgagaggagaaaaaaaaagagcaaaggtcacgctcccatggcactgtttttgtggaattcctgagctctttggagtagaggggaggagaaagctatggcaaagagttatgagaagccttgctttgaaaattaatgtacacaatgtgcagccaggtgcctgttccctacagggcatggggacagtgtgcacagggacattgtcactttctgctgagcctgaagctcagctagaggaacaggtggggaagaatgagggtgggcctaactgagggaggagagcttggctgcagcccagtgttcctgaaaaaggtttacacagtgagtcaggctggccccagcacccccttgaggaaggcctaaaataccaaatgaaagaataaatcttcaggggtaggggcgggggtgttgcctgcctctgccttctctccaaggggttcctatgtgtgcgagctagcagcactcccccatctcacactgcacctgggcccttggcctccttgttgggaacccaatttggaaggtatcgaatgagggacaatgtaaacacctgtatccaggaggatgcgaggagaagaagagttccaataactcacccttaggggagtggtttgcaaaatgtggtactcagatcaacagcatcaacatcaactggaaacttacaaaatcagcatttggaaaatacaaattctcaggctccatctcagatccattaaatcagaaatgctgggcgtgggacccagtgatctgtattttaataagctctgcaggtgattcggatgcaagcttaagtttgagaacaactagtttagggtgtgggttgaagtctttttcttggtttaaagaggagggacatgtgctaccacacaaaggggccttcccccttgccctagcatgtaagccctgacacacagcatccccacaagcatgacagcacgctgggcctgggctacggagagtctctggtgatgaggacaggggcagaggc

SEQ ID NO: 35741 - DNA, 652 bp, Homo sapiens
taggttgggcagctcagcctctcctagaggagactctggctgctgagtgacccggtgaattaatgcagcttctggctaggggtaggggacagtaaaagccaaggagccaagatcagaaaaaggaatagcttcttcccatgtggaatcaagctggggctgccaacctcctagtcaagaaagaaagcttttcctctctcttcctcctgtttacccacagcgactgggggaggctgtacagagaggcaggttgaatgtattcagtctgggatagggagggaaagttcctctggggctcccccttcgtctaggggagaggtcagaagaacaaaggtcacagatggacctgccatgatatgggaggaggcacatgtgttgcagtgagccatggagggtgggggcacaagagtttggcaactcagacaggggagaagccactgatggcttataaaccagacaaggttcatcctgaatccggagggagggcagtgagagccccatgaactcactttcttgaatgtcactaacatttcatttcaccctcactctgccttcctgtctctttttttctctttctcccttaaccttcctcagcaggggatgggggagtagagggagccggaaaggaggtctgcaggcctcgttgactctgctg

SEQ ID NO: 35742 - DNA, 1350 bp, Homo sapiens
cagggaggagggaagggacgggtaagaatgtttattctgccaacccgaaggttttctttagactctgagtctctttgccagtcctaagcaatttaacttgcctggggaggaagggggacgctgtctgtagcaaaagaggaattcaggtggtagctacagccaaataggttttgcaatcatattctgcctcccttctccaccccctgcttaaaaaaaaaaaaaccaaggaaagtataccaaggccagccctagataatgtgggtgtggtgtcattaccctgacttactcatcacaccccagggcctctacagggttgggtgtaggcagggatggaaggggcacacaggctggggatgaagcaagcagttatgcttcagtcaatcttgaaagctgttgacatgatggagatggaatgagagatgttaaagccagatattgggcacacccagcaaagcctcccgcccagctcacccttgagcctgcgctgctttactcacattaagagatccgctggtgcagagaaatcacaaagagtacacacacacacacacacgcctcatgcagttccagggagatttctggaaagaatctttagcccaatttctcagtaagcctcagctgttcccccaggcttaagcggggggccagcagatggtcccagctaaataggcaagcctcccagttcctctaaaagcagggtctgggcccttccaagcccaacagtccaattaagctttttgcccacaggtggaagcaaaaatgaatttggggccattcttcccttcttttaggcatggagcactcagccctcccatcagccccctccctactcctggcattggcccataaggaatccctgcctctcacactctgctctgaacattaggttcctcagggatcaaagactcccagaaagatttccttctaaggtgtcttctaggctgcagggatttgactgaaccgttcaaaggaaaactcctggcttggccttgttaaggaggccctctcagtccaggaggtggggcctctcaggattaaggccacagatccaggtaccttcgatgatgttcttatttccttttcccaagggccagaaagtgctgcagggagatcctggtgccctgctcttctctagaggcctctcctcgctgcagagctcattggcatgactggcataaatatatccatatatctctctataaatatacatgtctttagctatatatatcttttcttctaaagacttggcaagaattccctacaatccttttccatgacactatagaaaatcagcagagtcatcagtttgatggttcccacaaagactgcttggggttgacctctgcaaag

SEQ ID NO: 35743 - DNA, 842 bp, Homo sapiens
aggagtggtagtagtaatactagtaggaggagtcactctagcagcaacagaggtggtaggcagcaatgactgccatttattaagcatctcctatgtcaagatctgtgttagacattatatatcctccatgtctgatacgcatagcaatcttgccaggcaggcatgggtggtccagatgaataaactgaggtcccctcagatcacataattcatcgaaggcagagttgtgcagcacaggatactgtggttggtgtggagacatgcaaagggggagaatgggcctgttttagttaattctgcgaagctacaacagggcaactgacacttccttcagccccaccctggggagggggtcagtacatattgtttggtgatatgagactgggaaacctctcactggtgactaatgcaactggatgccaaagtccagcaggattagattagttcggctcagctggtcccgtcttctaagtatttttttcccatgactcagggctgggagtaggggacaggattctcttcctccgtctgaccttgcaaacatgtcactgaaaaggagcctgatctgacagcatcactaccccagggagccagggaagaagtggggttttggggaagcctcaaagatatcagtaataatagaaagcacttgcatgccaagcaccatattaagcactttttacacatgattttatttaatccttacaacaaatatgcaaagtgcttattactaccccactccacaggaaaaaaaaaatcgaagttcacaagttaagtcacaattgtagtaatatttaaatgcacatatgcccatgtgcccaagctctgcactccatcccttc

SEQ ID NO: 35744 - DNA, 648 bp, Homo sapiens
ccttacagaaaacctcgtagcctgggttttaatgtcacagagagtgaagggacttgttagaaagttttaagcagctggagtcagggtggggcatcagtgttgtcagggcactgtgaaatcccagccggccctgctcctggaaaacaccactgccctaaaacgtggagtggagacctggaacgagagctttgctgactcacgaggggcctcctgcctgtggacggggaaggagcctgggtcttcctgtctggcttgggctgggctcccgctaagaacgctgttctcagtgaaattcaaaaaattggctcttctccttcaggtatttttgttcctcaggagaaaaaaatgggaaaccggggagcagtcaggggaggtgggaggtcagaggccaacgtaatatttacccagcctagccgaggcctttcacttttatgaagcaggaaaccacttcaaagcagcaacatcccctcttgccacttctgtctgcccgctggtcctgctgcctctataaggcaaggcagggcttttctacacaccccttcctctgctcctgaaccttccaccctctctcccttaaagggtggagcacactgcctggccggctgctccctctaacccctgctcaaaggtaaaaagacctgcccatag

SEQ ID NO: 35745 - DNA, 925 bp, Homo sapiens
cagttttgctactacctgagagtctcaaaaatctgtatttagggagttgggagatgggaagcatgtgaaggcccctcggggttgggtcagaaacttctgttgctgataagaacggcaagggccttttggcgggccagccagcagattggactccctgttaagttgagaatgcactccctccctgccacccagccctagacgtgacctgttggggcaggcctctccggagttgctcacaacccatgcatcccagcttaatgctgcaggcgccttctcatcctctgcaaacagacagaggcccaaaggtcccactggcaataggaccctaccagttgtagtctctgggaagtgacggctgggagtttcgaatatatctcatctattaatattttttttcttctaaaaaaaaaaaaaagcacaaaagccactgttttgggccaagcctggctttcaagagtcccctctagtggagataacctgctacttcggcttctcagttcagcccagagcctccctggccagtgaagattcagaaaacccccttctgcctgcaaggctctctttcccacttttctctttgtgttcactctgagctctgtccacccccattcacactgttaatctctctgtctttatcttcccttgctgtcttcctccctctctccatttatctgtgcctgtgcccacatcttgacttctgtctttccatgtgtgcctttgctcctgcatcttgatctacatcttccatccacctgctggttttctttgatgttcaggattccaggtctgacttgttaggaatgccttggtcaggccttggaccacatggactcacttcaaacggccaaaacagccacccacaagccagatccacagtgagaagcactaggaaaatcctagtggttatagagctgtctataacctg

SEQ ID NO: 35746 - DNA, 849 bp, Homo sapiens
gctcagagctcctgctccgaatcctgtgtgaagccggctgctcccttcaatagattctccccacctctgtgcctgcttcccagtctctgacacacgccctgccctgcaaacaactggcaatgcctgggtaaagggacaactggcagtgcgtgggaagagtatgctggggtaggggaagaaggtgaggaagaggtgagtgggggtcagtggctgagcctggggctgtggcaggacagtggagacacagcaaatgttaagctggggtgaaggggggtatgggggaacacctgctggtcctctgagtttcccagagatattctttcacccaagagagagacagaaccagagcagggaaggcggttaatggttaaccaactgtagaagcagagaacttttgcactgctcaggcctcagccatttctttcagctctgtgcccttccttcctcctctccccttacactcttaccccgcaaggaccctgctccccaacaaagaactttctcgcctctatttatgccctccaattccagatggagcagtgtggagctagataaagaggttccatatgcccaaatgccagggaatgaggcccaggagagcctgagggctaagcccaggaggacggggatatcctcttcttaccagccatccctccctcgtgccttgagaccagctgtttgaccctgggaagaactgcctttctctctgtctccatagggctcacctttagaaatgaccgaaaaagaagtggatgcacacccacccctcatttactctaatcaggcatgaaatctttgtaacgaagtgaaaaaactgttcagggaactggttccattcatcattgtttg

SEQ ID NO: 35747 - DNA, 3147 bp, Homo sapiens
aacttcctccccaccattatttctatccctcctgagcagagctgagtttgagtaggtagctcccactagggcaagggtcattccaaacaggtggacttttttcggggatctaaaatggtagtttctggtgactctctgggcatctagaccatgattggcattatagagactacctgtgggatggataaaaagggctagaattttctaggatccctacctcacttgtggggtggggcaagaaagagcacatggaaggaaacattctcaaatggttcataaggagcctctgggaccctaagcaaactcccatttcaacccccagcactcctgtggtgctcaaactaaggggctggacccctgctgggcgatacaccgcaaagggagccccgggagatgaaacacttagacccattcagtgcctaggaatctctccctgagccttatggaacccgcgcaaatgatgttttcccattcccctgatctccagtccccgatcggaagggagagccggcggccaccagggaccccggcactggagtgaacgcccccaaatcgatcgctggccagtgtggctttgggctgtctcgctggtgccaccgaggccctctttgggctccagctctcaggacagccttgccgccccgagctccccaaagccgcagagcgccggcaggtgcgcggtggaggcgcgccgcggagcgctgctgccgccctcagcccgcattcgggaagccggcgggctgccggccgggaagccctcggcgggaggcagcggctccagtgagcctgcgatcgcgcgcacgccgcgctccagcccgcgaaagtggccgagcccacgcggggactcgcccgccgcggccaagccgggtcttctggggccgggaccccaaagaggcgggcgcgggagaagccgccacgggtgtgcgcgcctgtggggagagggcggagggcgctgccgactccgagcgcccggcccagccgccgcttacccagctcggcgacgtcggtctgtccttccgtccccgctcggtctacctcggccgccgccggctgctgagggcggcgcgaggcccctctccctgcccgcagctcggaatcagggagacgaccaaatccacatggagtccaaattcattaaaatccacgtcaagccaccagacacttatctgtattcctgaagtcgctcctcggtctccgctccgcgcgcccctcagtcctccgtcgccccgcagcagcccggctgggcgctgtcgccggctctcagggggcacccggaggcgccgagggggcgtgtgggggcggccggcggtgtctctcctgaggaagaagcagagccccggctgtcttcagatttttccagcgcgactttccgggctcctctgacatcagcaatcccggcgcttccttcccttcttgctctccggttcgttcacagtcccatttcctccgggagcctggctttccagatctatttcgaggtttgctccgctggctgcggcgctcgcacgccctaccgctcccaagctctcggggtctctctccggatcgctcgccctctcggctgaaaaattcccagcaactgccctccgccgccctcccgctccagtctggcgcggatgccgctcctcccggcagctctggctcccgcggtggcggcggcggcggcggcggcggcggcggcggaggagccctgagcgccggcctccctatttcaccatgcagctcattatcatagaggccgcgcgcgttaaccccctccccgccggccgcgtccgcccgggctggggccgcgcccgctgctggcaccgcccgccaccgccagcaccctgccccctcccccgcccgcgcggacttcctcctccgcaagctgtcaacaaaggagaagcaggtttggcatccggaggccgctcggctgcctgtcctgcgcccagctcagcccggacccatcggccaccttaagtagccaagggggcaaggaaaatgctgccagggcccgggaattcgagtcgggccttgcgagcccagctggcttggcccccgggggaatagaaggtctagcgttggggttaggggggagctcagaacacaggaagagtgggtgagggcagtagggacagggaatcccccccattcgcatcacctgtcaccgcacacatcctgcacacctccctcttcatctgtaatttgagtgaggggtgagtggggaggaacggggcttgtctggtagggttgagactagagtcttggaatttgtgggagcaaatttcctcttcttgtaaattaaaaaaagaaaaaggccaacaagctgtcaaataaggcttgaagttgttgttattattattattgcaatgagaagatgaaccttgctctgaattgaatctcaaacttccagccctgatagggatcctgggcatctggtaagtcccgacttgcatgggggcattggggacgggagaagagctttctatatccaattcagagaatctttctggcagggtaatcagaggggtggcaataagataacttattttaataacctaaggtgagaggtttcgggattctggatgacaatgtctcggtgccctcaaggccactgattcctcgccacacagtctcagtaactccgcagcctctagacacggctttccggaagcggcctgcaagctggaccccagcgagttcgcaggatctgcgtagtccctgctcgcgattagagcgcacacgagtttactcctgtccaagtattctgataagcttcctctactgccctctcgtggccacagtcctcagtggtataaatctaaaaaacaacaaaaatcactgcgaatacctaaaagcaattgcaccaaattcttagagcagtagcggcagaagaaacgaagggagggaaggatgaagaaagggagccggagaaaagagagagagagaggaagaagaaaaggaaatctagactaaccagtcatctcgaacaatcgcacattcaacacaggactgggggatctaggctttactccaacatctgcagaaatcagcgaattcttcaaaagttcttcattgtaattagctgaaatttgtgttcctgtaactttcactggctactgctagttttgtcctgtgggaccacaaagaatctgtctaagctgtgtt

SEQ ID NO: 35748 - DNA, 1158 bp, Homo sapiens
ctaagaaactcactgcctaaaaaatcaacgagggagtgcaatccagggacagagctgagaaataggattttgcctttgaattatcccaagtcggatgatttctctctctgcctgtctttgataaacgctcccattcagggctctggtgttatgaatctttctgagtcatgggtggctatagccccttcgatccattcagctgacaatatttcctgacgtttcaaaggccaagagcataggacaatcccgtagtgtctctttaccttctctcttcttccccatccctcaagctccagcctccactttttcctgtggaattcctactttggcattgttgcacaaggtcgtgatatgacagcaaacccagccttggcgattgcccagggtgcgggagccccagctcctggtctcctggagaagccggcagaaagccttctgtggtctctccaggacatcacccacccctggtggaatgacagggaagtttcctggcttcagaaaagcagggcaacctggcagccgccccctcctctgcagttatcagtgtggttaataattattaccctgtgttaatcacgacagcggaagagtagcaggccgttatttcgaaatgatcggctccagtcaatgactacttatgacagcaaaagggaaacatcagctccggggagcccccatgtaaatggggagttgaaagaaagatcaggaataatggaacgtgtgtttagttccattttcctccctaaaagggccctgtcagagtaatttccccttccatgtactatacctctccattatttacaatatcttcttgggggaataaaacaacgcagaaccgctcctcctcatctcccaccccctgcctcaccctcccctctccccacccccatcaattgtgtctctttctggagtttggcaaacacagctactttctcctgctgtgctttcagtggagctgaaatgactgtggctctagttatttttttcccttaatcattctttttctttcttttttgcaggagaacattttcacgaagcacaatcacagaagaacagaatgtcctgatgtttgggtgagcagcatgcatttcttttcttttttttcttccccttgaataaaaattacactccacaaccataatatcagagggctaaagg

SEQ ID NO: 35749 - DNA, 1465 bp, Homo sapiens
gcctcctggtattcacactcttttgtgattcccctaacctccagtgtgggcaggacccacaacttgcttctaaccaatagaatacagcaaaatggacgggctattttctctggaaccacagatcacatactgcgattgcattatgttatataagactctgtcttgatgtcagactctaggatactctctttgctgacttgctgaaataagtgcccatgttggtgaagcccatgtggcaaggaattgtgagcagcctttaagaagtatggctgaatgccagcacaaagcagctgcaaggaactgaatgcttccaaaaccacttgaacagggagcagattctttctcagctgaggctccagatgaggacacagcctggtcaacaccttgactgcagcctcataagaccgtcagcagaggacccaattaggtcatgctcggacttttgacccacagaaactgtgaagcaataaatgtgtgttgttgtaagcttgtaagtttgtagtcatttgttacactgccatagaaaactactactccagtaatggccattaagctgacccataaggagacagctcaatcagctctgggtaagaagaaaatagcaactgatgagagtgagggtgcctggattagagtgaactgtattccgtttggcatttccatggcagttctcatgagatgaatgagattggagtggttcaaataaaggtgacagctcccttcacttcttcgttgactattttatcagtccttccacattgcctcagtttccccacctctaacagtaatcaaacttgatttttccacttgggttaataaaatgaaagtgacaagtgatgcatggcaacatttaattaatatctacaacttatttagagactgggtaaaaactgctatataagtgaaaagtgggtctttttttttcaattaatattttttgcgtggcactcatcatttctctaagcctgtcagatgttttggctttctcttgaaatctgctgattcaggctttcttggaaaaccaaacaaaaggagacacacagagatgtaaacacatttcccatccagcaaataaaagggtttagagcaaagaggttatctttcttaaccctgtgaagaccgcacaagatgcaatctcccctgactgggaatgctagacctttgtacccatgtaagtgtttgagaagaatctggatcaataattcatcctgaaatgcatcttctttcttggtactccctgtgcacatctttttaagaactctccagtcatggtagtatgtatgtttaattggttccaagataagaacttgctcaccttcaaagcaagtggcttttaggagtgaaggtcagatggggaccagagaggagcctgtttttagctacacctagattttcccgaatgaaaggatgggtgatggatgaattttctccctggtagggctgtgaagctatagcctggcttgac

SEQ ID NO: 35750 - DNA, 828 bp, Homo sapiens
ggtctgttctttccccctgctgcttccctcccgctgtctctactcttctattgagcccagctagttctaatggcagttttggttcagcaccttacaggagtgtgtgacagaaaagtgaagtacaaaattaagagcctttgatttagcaactggtggccatctttgtgtaatgtgccagttgtttgataatactcatggccattccttgaccaccatctctgtgttggacatttgtcatctatgatctcattaaatactcataacagcctttcaagtagactttatctctttaaagatgaggaaactcaggttcacagaggttaagtgaccagcccatggcaacacagccaataaatagtgcaaccaggtgatctgaatctaacatgcatcacctttccactacttgtccccaagagctctcaaagaaaagagcacgttagggctcttttgtttctgtaggtcatcctggatctcgttagtgctttgcccttattatggtcaatagtgacctttgccctctcttgccaaattcatttagtcttctctgctttttcccagtgtcatggcctagattgctctataaaggggcacttttggcagagcagggatccgtcttaacccgaagctttctgagaacaaaaagcactgggtacgtgtcatccttcctctgtcaatgaaccccatgagctttgctgttgcctttgctatgacaagtaattttttccttctttcacctgaacatagcctttcgaaaatcaagacctattatgtaaggctggcatgtcctaggagaaagggaaaacacaaagttaagcatagtctgtcaaa

SEQ ID NO: 35751 - DNA, 965 bp, Homo sapiens
gaagtcaagatcactctcagacactacagaagttagggctctcatgactgaagttatgaaaaacaaactgtcccatccatggataaaagacttgcctgagtaagcaagggaaaaagaatatgagccaggaattcctggcccctctctcttgtgtgcactgcctctgctggctggaatgctgtgtttatacttaagagctctttgacactctccaaaccatgggtttcagcaagaccacccaggggagagctcagaaagcaatgggatgctgtgttaacaggatgcagaagtctccaggcaagagagtgtttatagtttagctttgccctgggcttgatataagatactgcctacatttgaccttgttccagctccactctgacatcatctcctggtcattattgacctttccgctcagatcaggcatggaggaggaggtggagggagtgggggtgcctcatctgcaggggaaaacagaaagtaagagtgatttgtagatcaaaagacagcctgactagggccacctaaattgaattcccaaatggaaactgggagtctgcttgagaatgcagtttaattaactgtgatgttcagattgctccccatctgagtgaacatgatggactgctctgagagcatagcttggcagggctgtggtgcaggagctgaagaatcatctttcacaaggaagcaaggggtcatggactcaagccaggtgcacaggcacctgccttcgcgacctggcaaagagaaggtacacagaaaaggggagggggtgcaagtatttcactcttggagtctatgaaagagacagaaactggaagtagagagtgagaagccctcaggggtttttatgcctgtgatataacagagcttggagtttgaagagaacttagacaatatttagtctgattcctccattgtgcagaggtcgcaagttgttaactggcagagccagaacacaa

SEQ ID NO: 35752 - DNA, 721 bp, Homo sapiens
ttgttcatgttttttaaaatttgacatttctaaagtttatacataaaatgatttatgtaaaagagcaaataaatttttggaaaagaaaaataaatgagtgtttgtcatacagatatcaaaatacactataaacctacaactgtatggcatggtattgactcaggaatagattcataagtaagtagcaaactagcactcagtcattatacaaacagacatttagtgtatataagaagatatttcagatcagtggggaatcagggatcagaaaaccttttctttacaagacaatattataaatattttagactttgggggacaaagtctctgttgcaactactcaactctgctactgtagtgtgaaaacagccataggcaatactaaacaaatagctgtgttccaacaaaactttatgtacaaaaacaggtactgagcaaaatgtggcctttggaccacagtttgccaacttcttgtgtagactagtcaataaatagtgttgaaattagctttttggaaaaaagtctgaactctcccactatgcacaaaaataaaatccatttaaatgcaagcatctaaatgtgaaaatgaaaactataaaagtatcagaaaaaagtagaagacacagaaacatgaaaaaaattaacagatgtgattacataaagctttaaaggttctatactcaaaagactgaaagtaattataaaacaccaggaaagactg

SEQ ID NO: 35753 - DNA, 834 bp, Homo sapiens
gtgtgcacacgcaggcgtgtgtaaggatgaaaagggcacggggggaaaagtccctgcaaacagctccttgttgtttgcagaaagtaacctgacccatcaggttatcccccgtggtggtcatattttcatctagctcccttattgggaaacaaaatatatctcacaagacattctcagcctccctagaacttctggtgtcatcaatttgccttcagagtcctgcagggttaagaagaaagtgtggaagtcttgctacagcagagagatttaatgattaactgtggggttgacaggtgtccagaacacccagtaatcttgacattttgatgtcaaaataaacttactggaagcaggtatgtgggtttaaaagacatgtccatatggtgtctgcttatttcacatgaggagtcatttttatgatctatagtgcgtttccaaaatacttaagccatgactcagagacccactcagactgggcagaccagtgccagtagcccacaggctgggagcaggtccctggctgggctagatcagggaggacaggcagaaagcctttaagtgctgcaagatcctgtgttctaccggcctcatggggcatttaaaaaacatgacacatctcattaaaatcaactttaatttggtggatataagattttgcgaatgctattaatccactcaaccactgagtgtaatacagtgggaaagcaccaggcagggatcaggagacttggccccatccagctgagtaggtcacttgccttccccaccccggccacctacctagggctaactttagatgacactgaggcatgccccaggaattgaaaaatgagg

SEQ ID NO: 35754 - DNA, 698 bp, Homo sapiens
tgttcatcaactgataaatggataaacaaaatgtggtaaatccctacaatgaaatattaatcagccacaaaagggaaagaaatactgatacaggatataacataaatgaacttttatgtagtaaacaatttaacttcactcaaagcatggtctgacatttgcccttgactcctgggaggtaatctccaggcccttggaatgtcctgtctgaaaaaatatctttgtttgcctgggatccttgggccagccagatactaacaatctaatttagggtgagggctttggggcatgtggtatcagttgacctccagaaagaaagtctgaagactgaagtcagccatgtgagcagccagccaggtttatgtgatcaagctccaataaagacctggacaccaaggctctggtgtacttccctagctggcaatattccatgggtacagtcacatattgataccagaaaactaatggcattggcaagaatatgaagcattcttgccaaagctgtccatgactcatgagtaaagaacaactggcagttttgcttttggtacttttttgaactctgttctatgcacctcttcctctggctgattctaatctgtatcctttagctgtaataaaccataatcatgagcataatagctttcagtgagttttgtggggttttatcttgatggtcttgggaatcaccaaacttg

SEQ ID NO: 35755 - DNA, 1437 bp, Homo sapiens
gacaaacttgccctatggagtgtctggcacatgtggcagatgttgcagttactcagtggcaataattcagcaccctgtatctgagctccgtcctgtgatcttgggtgtgggggtggcaatgaaaagagaggagaatgcccacaacggtctaccctcagagttttgactcaccatgcaatcaagagacttcaacttgctttcaaagagtttctaagtgcagatatgacctaaggaaatggggtgaagagagtggggtgctggtaccctcccctgcactcacctgcctccgccctgccccagccctgcaggacttgactatgtcttgctcccttgccaaaaaaggacagcaacatcagacaggaagcagcttagcgctttcacagagcctggggccaaacaaacatgtgtcagcatttaccagaaaccctggtaaatcttacaaattcttacataacaaaagcatgtaatctctgagtccacatattcctttttcaagcaagccccacctacttgactactgtttttcaggaggttaaaacaaaaaatgatgtgtcacttagttacacaaatgaacagccgatttggactttgaaaaactcttaggtattttgtaaaaacggagctaaatactaagtaataaattttgggagccaaatccttccaaaacaaaatttccttgagaattgcccttctgcgcatgggtaactattgctctcagagacaagaaatggcttgcttggattcaaatatgcaaaagctaggttttaggcatccactctcttattctagaaagatttattgaatacacactatgtggaaagcatcatgctaggtgctacaatacaaagatcaaaaggttcaagagatagaggcaagctgtctctaaactaagatgctgctggggacccactctggggatctttttagcctgacttagcaacaggccatgtatttaattagagtcttcattctactgacgcttcctccaaacttgcaccttgatcagaagataaaggtcagtccctctgatctcactgtaagctttttggaggcataagaacagggtctttgtcatttttttctccagcaccagatgtaatgcttaccccatccctaagaggcactctgtcgggagttgagcaggcctcggctccgatcactgtggcattctaagcaggtgccactgacaatgtgactcagtttgtctaagctgcagtttcctcatctgtgaaacagagatacttttgatctgagaaggttggaaggaggaacaaagcaagggtctggaaggggctggccaagaaacctgtcatgcagtcggaggtcagcacttcacgggagctcctagtgttaaatgtggaaccacccaatgtcccctgtgagggagctcagtgacattaggggcagacaaagatactagaatgggaacaatcagat

SEQ ID NO: 35756 - DNA, 1047 bp, Homo sapiens
gggaggtggaggttgcagtgagccgagatcacgccattgcattccagcctgggcgacagagtgagaatccgtctcaaaaaaaaaaaaaaaaaaaaaaaagatctgggaacacagggtttatctccttcaactgtgaactgcggagcaactgtgccctttttgagcatcatggggtctccagctcaccactgaaccccctagggcttgtgtcactcatttaagaggcagacctgcccttgtcacagtacactggagacactttggagagcactggcaatgccagtgagcttgagcctaaaagcggccaagactttcacttgaatcatttggggagtgaagatggggagcagggatggtgccaacgccagcggctgatgctgagatgcagcagaattagcagtctccccttgagaaggctacagagaacacagaacactcgagggagaggcaggtgcagatgaaaaggcagagggagtgaagtggtcaaggaagagtctgaggctacgaatgagtttattcaccatggacattccagaggacagacataaaactgttggtaggagctgggccaggcaaggggaagcacagggtgatggcacaggatcggaaatcacctggggaaacatttcaggtgtaagcgtctaatgagaagtctcaaaaatgtcaagctaattactcttgggagcaacctggtggttgggttggagtcactgacctggaccctgggcacccaaattgccttggcacagagacctttccaggacagctcaggcatacctaagaatcaccttaataccaggtcaccgggaagtgagtcaggctaaatttcaaatcctcttcctctgctctgtccgtgagtcacagaagatcaataggaggaatctcagtcagattcgacactggttatcccaagcaagagccctttttatagcattcttacaacaatgaatttagtcaccttgcgggccacacaattcgctgacaacaaggggagagaggagcagaaagggaagatgccaaaaacatgctatgtctatttcaaaattt

SEQ ID NO: 35757 - DNA, 673 bp, Homo sapiens
gcttctatgtggactctcacatggctgagtctcctcagccccaggtgggaaaagggctggcctgaggttctactgctgctgagtcagatcctcctctcttgctagacaaagagcattttcctccccaacaacagcgtgtcagaccgagctccctgcaccatcctcccccgcaatctcccaagcacagtatcgacacttgagatggactggaaggccctgagcaaatattggctcttgagaggttaataatttacaaatgaactacagctgataaaaaaaaaaaatcagggcctttgctgctgggatatggtgcatgacatgcatgcagccagtcttctccagtgggcaacaaagtggcaggcaccagctggctcctttataaaggtttagagaggtgggccagaccttgttctttcccatataacaacgggagtcgtggggagcccgagcgtttggtcaaaccaccaatatttcttctgtacacagaagtccagtgagatgcataggcagcacgcttctcctgggggcagcttggcagctccattcttcatgccaggaaggacatcaggatttttattcaactccacaggcctgccacaccatcccaccagcctttgcaaaccacttctgtactgtgacttagacccccttggacaggcaggtgcctatgttt

SEQ ID NO: 35758 - DNA, 5337 bp, Homo sapiens
caaaatatttactgagggcctacattgtactaggccttgcactggactctggagagatcagacaccattaaccaaagattggttctctcaaaacacaaacagggtagttggaagtgagggaaggaaagggtgagtatattaatgtttacaagaccgagcaaagtcagagccataagcaaggtgcagactactggggtgcaggtgtgagggtgcaggtaggaggaagaagggaagaatgggggaggatgagctggccttgaagtcaggagcccagggctcatcttcctgtgaaattttgtatcaaggggaaggaaaatacttgcttcaggtggttatatcctacactacatattttttctcctacagcccgaaaacctgctttaccttacccctgaagagaactctaagatcatgatcactgactttggtctgtccaagatggaacagaatggcatcatgtccactgcctgtgggaccccaggctacgtgggtaagtctgggagcaggaggaaggttgaccagttggctacattcaaccacatgcctatcattcatagaaaggggtgattctgagaacatagggttcaacttcaggggctatcctggtaggacatccacttataaagtttagggccagccaattcatccgtctcaggatctatctctactgctcccaaattctacatttttaaagaccgcctacccctgagccctccagagtccctgcctatgctttggctctcatttctgcggatagacttccagcctttgtctttccagctggaccaggggcagacaagatcacaaacccagagatcagcagagagctgaggggttgagcaccaaccctactcctttctcccactctgaaggagacattagcccccagttcttgggagcctggaagcacaggatattgaatttgggcctgaggaacccagaaatgggctcctaaatgtccacccaaggaagcactctgggaaattggcaaaggtggagcttcctgcttgaacatccctgtaggtttccagggcccccaaaaagagtgagagcaggcagggcacctggaagagtattcctgggatctacaggagacaaagttgaaactcagagcatccgctcctgtcccttcccacttcaccagtcgtcacctgtttgcagttgggtaatgggaagcagagctctgactcaagagagggaatctaccctcccagaaaggcaggtcattcactcctcagtaggtattgagtcccaccaggtacaaagctctggtagctgcaagaaatacagaaggcagctctctacaccccacagggctcctaatcagaggaagtcatggctcatgccctctgaaagctctctatctgatgggacagactaaatgcctcccctcagaaggtacccacagtctgatgggagacatactgcctttgctctgggagctcctaatctaatgggggtgactcagtctctgcctcccagaggctcccagtctagtggaggagagacagtcctacactgaagatctcccagtctgaagggagagagatcacacttgccctgggaatcccctatctgagtggggagacaggccctgccttcagagaatactcagtgtaatcagggagacatagccctggagatccccagtccaacaggtgagtcatcgaccctgtcatggggaaactcacaaactaatgcagaagtcacagtctctcttttcaggaagatttagtcttcccagaagagacacagcccctacccttagggagttttcagtctcctagaaaccccaccatcccacagtcttccccagacctcttctctaagcctggccttcagctcccaccccaaagccctctcctcttgccaccagccctgactctgcccttggtctgctgcagctccagaagtgctggcccagaaaccctacagcaaggctgtggattgctggtccatcggcgtcatcacctacatattgtgagtagacgctggcctgggttcagctgatgagaagtctcggagcctgcttaccccttctcgttccctcccctgtctcagctcctcctccaagcacgtgcatgtgcacaaacagacacaggcacaggggcacacgggtacacacacacacacacacacacacatacatgtacacacagcttaaaagcttcctctctcttcacctccaccaagttttaaaacagagctcagcgtgaatccactgcacagccacctggcactccctcctcttgcacccctgccccttttactgcctataaatgtgttgcatcccactcagtggaatgaacagtgaaaaagagagaggccaagccaggcttggaagccaggtggaccctctgttcctacatctcagctttcccaaggcaaaactgtggcctggataaagctggtcagggcctttccttttcgctcctctccacacattcccaagctctccctttcctaacctgcccatcacctcttccccaccatccctcctcacctatagcaaactttgctcttaggaaaataacctggtttcaattatctcctccatttatgttgaataagtactctcatttatttacccaaccaatattcactgcctatctactctgcatctatccctgtgctaggttctaaagaatcccgcagtgaacaacacagcctaaataaatccttcatcaagcttacattcaagtagacagtctaccaactttcttaaacatattttatatagcattcataagtcagggaaagtataaggagaggtggcaagggttggagggcataatgtacacagggaccttctagggatgactgtgccaaggcttggcacttgcataaacactttacgggacctgtaccattctggaatttgaggcagatctgcgtcctggtcacaccactgttctgggaccttcagtgcccacctgtgtatacagtgggagcttgggggagcagagaggctggctcagggaggacaggtttgttcagtagtatgcctccttcctgtcctgctgcaggctctgtggataccccccattctatgaagaaacggagtctaagcttttcgagaagatcaaggagggctactatgagtttgagtctccattctgggatgacatttctgagtcaggtaaggccagtaggcatgaaggagagataacaggctcaaggtagaggctgccaagagaaatgagcttaacaaaggatgacagtcccggctcttcaaagtccctggggatcttacagaacaggctgccaaggaaagtggagaaatcttcgtctgcttcaaagacccgataaattatttacatctaagagctatgcttttgtttttctggaggcagaaccacagtatgcctgaaaaggagatgggggggcagtttagaagatgggccaggagggcagagccaggtggtgaggggagagttccagacaagagcagcaaaactaaggggttagatatcaagaaagagcatgcaatgtctatgtgtgagagaagatgatcattacgtgattgttggacctgttaagtggaaatcagagctggaacaatccagcactcacatgcgtgcccatgtgccagcgctggcccctgtttcagtgcaaacacatgcacatgtgatgtgcaggcacatgggggccttgtgactagtgacgcttctgcagtgctgtgtgggtgaggcggcttggagcttcccttctttggtggtttatggtgggttgttgttaggtggtttggattttttttcctcttctaagactcttaaaattgcctctttggaagatcagctaaagatgcattcactgccacccaccagcccggaagtgaatttccatcagtcatgaaatctggtccttagtcgtcgtgtctttgattactccccttagccaaggactttatttgccacttgcttgagaaggatccgaacgagcggtacacctgtgagaaggccttgagtcatccctggtgagtgagacatggagtggactctagaccccagccctgtagttcccaaaaccatgctgactcattcatattgcatttccctggaatctgcttgtcctgatccatttaatgatgtgacaagcaaggaccatgccattgttcatcaggcccaggtagagattcaaacattatacagtggagcaggttctaatgcaagggtagcagctgggttgtctggtcaagtgcaggaggcaggtgcagccgagcgctgtcattcagcactgggatagggtgcaatgttcagtactagttattcaagaagtgccaggaatgggcaactctgtcctgtcctttagagctttgttttactcagggatcaataactgttccaggtgaagtgatttaagaacaactgcaaagcaaccgattggcaaaataggaaaaagaaaatcttaaaatattttttcatgttacttcccaactcaatttacaatagctccccacttcataccccagcaagcctggattcctttgtctttccagtttccctaatatggcctgaccctttatctccagcctcttttcccaggattgccagcatacctcctctgtccagataggcctgggagctatatctgtctcaccccacataccaagctctgtcttaactacaccttggatcagatcattcccactacctacaatgtcctgcctcttgccctgtatgtagcatctttcaggatccagatcagtctctgcccttccctgaagcccctgacccctgcagcccaacccaatctccccagttctctttattaatcacacggcttaccatgtattactgcagtccatagcatgaacaacacccgacatctagactgtaggctcctaggggtcagggcccatgtctcttacttctcgaggtctattagtagttggcacagtactatgcacacagcaagtgtctgaggaacacttagagaccagtgaataagaggctaaggggataggaaaggggcagcctgtaccagacggccttactgaggaaggcttccaggaggaggtgggttctaggcaaggttttgagctaaaggatggtgactaccccagtgccctgtgatgctgggtccaataaactttttctataaagcatcagatagtaaatattttaggctttcctggccatactgtctttatggcaactactcaaccctgctgtcacagtgcaaaaggagccacagacaatacctgaattaatgggcaccactgtgtccccataaaaccttatttacaaaaacaggcaataggtcgatttggcctataggctatagcttgttgaccttgctctaaaagtttttgattttgccaaagctaaagccgac

SEQ ID NO: 35759 - DNA, 1513 bp, Homo sapiens
tgtgtcctagattcctggtccacaggtagaatccagggctcatggccacctccagagctgctgtgcccacaaaacaagggctcccactcagagatgagccttgaagtcaaggcccagcataggcccttcagaaggtgtggtgcatatggtattactgacggccaagagccacagagggagggacatctggtgacttccccaaatgagaacggggacagaagacgcccagtctgacaggggagaggcctagaagggcagcatggaggggcagcagagaggctggtgctcaggacccccctcccactgagggggcccccggaccaccctcacttcgtacctggttgcactgtgggctgagggagttgtgcgggtcgcaggcacacggttcacagccctggccactggccagcttccagtggtagggagcacactggtcacatttgggacccaccacgttgggcagacaaaggcagcgcccactctcctcgtcacacggcatgtccctccgggaccccaggatgttgcagtcacagcctgcaggaggagagctgctgagctcaggcagacgctccatgaaaaactcacccccagaggacacacatccagggaggggcgctgcctgggaaaagaactgggcagggcccttccctgcagatgacatggctgactcacaggacccctgcgctgtcccaccagttccagccacctggcagctcagccgcctgcctgcccaccctccatctggctgactcagtcccaccttccaactcggacgtgtgctgccacctgctggaggccagtggcacagcatctggcgctgggtaagagggcaagaagtccggactcctggcaaaggcccgggcataccccctctgtctaccctgcagtgggatttcctctgaagagagcacagtgagcagggcaagccgtgggtctggtggccccatgcagcccaccccacgtcatgctgggccaagccccctactcacggtggcagccctgcgggttggcgtaggtgagtccagtgaagcccggcttgcataggtcacagcgctctccctgcacatgctccttgcacacacactgcccggtcactgggtcacagggagcccctggcactgccccatccggatcacactcgcaggctgagagacaacagcagccaccgcagtaggaacaaagaaaagtagagttcagagcagattccaggagccaggctgcctggttcaaatccttgttccaccactggatttcaaattcacagccttagtcaagttacttaatccctctgtgcctcaatttccttgtctataaaataaaaataatgatacagccttcataggcttcttatgagaaataaattagtaaatggctgtgcgcggtggctcatgcctgtaatcccagcactttgggaggccgaggcaggtggatcacctgaggtcaggagttcgagaccaacctgaccaacatggtgaaaccctgtctctactaaaaatacaaaattagccaggca

SEQ ID NO: 35760 - DNA, 10400 bp, Homo sapiens
tagtgagggaaagagaaatgaaacaagacagagaggtggaagatgggggagagatgctgattgtcagcagtcggctcattgccaaagaatgttagggaaaaggagggaccctaaagaccatctcatctaatactcacttacagaaaaggacagcgaggcttacacaggggtaatctcttgcccaaggtcacacctcaagtcagtggcagacctgaaactacacactacatgaaagatactccctgctatcctctattctttccaaaaggctagataaatttattcccccttagaaaaaaaagaagaaacagccagtgcttctcagctttcacagcagaaaaatagctgagatttatccatccccagggttgcaaaagtctagactctgttttataagcaccctgttttgctctcaaggggctacttaggagcagagaagacagctggcttcctggggcatcagagaggcagagggcaggccagtgttaagccaaaagccccaggcctggaggaggagaaacttttcagacaggactgggatcaagggtacatcccaacataggggtctctgacctctccttgcctcccctcccaaaatgcaagtcagcctgagaaaggaaatcggcagaggtctccctgaaatttttagatatgggctcataatttggaggttatgggtggagggaacagccaaaatcactctgttgcctaaaaaaaaaaatttttttaatttttatttttttaaaaattcaatactcaatactgccaggtcccctgatgctcatggagtaatctagacccacagggagtcctggctagggctggccatcttacccaaccctgtcaaatgagcttccccacatccaagtgggtgagatgcaaaaaccacagccatctctgctcagcaactccagtcatttccctataccatctgtgctaaaatagccaagagaacacagggactagaagggcagtgaggcccagaggccatatcagataccaccttccacagcccagaagacaagggcagcctggaaaggggacagataaccccggtctctttccccaaaaggctacagcaactcgggacaaatcactcccttatccattcccttgttcaagcaaaatggctaaatgaggcagctggtagacaagaaaacactgagtgatttcaactttggtaaagaaagattcccccctgttgagggcaaacaaaaagaaaaccaaagttcctataaaaaaagacccagagacaaattagaagaaaagtttgtaaaagccatgactaacaggcaatgttagtcatagctcaaagcatcgtgtttctggatttgatccaacttacatctgagcctctgaccctgctggataagctcaagtcacttcctcatctatctcactgaccatggcacagctcagttcctgccatggcaagaacacagttcggcccacacatcccagcaccaaataacacatgaggctccatacacataaacggccagtgtttggcctatttgcctattcccaagacttgaaagactatcctgcccatgcccaaggactgagaaaagactccgtgtcatctcagagagataagagagaaatgagctatttagttaattctgagtacatttcctcttgcccaaccaacaggtaaattccttagaggcaaggatctggccttatacttttactgcactccccagtccgtgtagtacacagggcttggcctacaccaagtacattctaagtattcagtggacaaatggcagctcacacacccctcccatcccgccttcctccagtcctgggaagtagggcctacctcgccatactgggtgcagtaggtctcaggcttggtcagtccacaggtagatgaagctcggagaaaccgggtcctcccaacaagcaggtccccaacaggtggatagcaggccccacgggagcaggcttgttgggcatgcaggaggccaggcagggctgaaatcacagggatgtgtgatggagcagtccagaaaaaaagggacctcactggccaccccagtatctttcagggaagctgacattagcaagattatatcctttccctcactcaagcttccactcgctgctggcagtaataattgcagtattgatactgttatattttgaaagttgatttcatattccagaactcaaaacttgaaaaggagaagaggagaaacactggcaaccaaaaaccatagatgaccctaaaatatggcttttagaaccagactggagacatagactcggccatcatgacaaggtccgcagctctttccacctgcattgtggcctctgtcagcagcccagaggagggctgactgctgagccattggcagaacattaagaaaggcctgcatttattctgctcctttatcttcaaagctgccccagccatactttgtgagtgcccagctacaattcactggaaaacaggaacttaagccacagtggctctggaaccagcttgagaaaggatgggaaactgtggagagcactcaggaaaccacaaaccaccctcggctgagaataagaagacatttgggagcctttccagagtggcagagaaacttcttccccaaaggcccaaaggaatggggaaatctcacaggtgtccccagtagacaagtattcccaactgaagggactacaggtgacaggtgatgcccacactttggtaaactctccttctccctgtggctgttgcctccctgccatataacagggcctggaaggatgggaaggggtacttaccaaaacacaagaggaagaatggtctcatcttcagccaatggggtgatccccagaaaggacctttcctaggacacagcaaagcaaactgggtacaacagtgcaaacccctagagcacactagccctttttcttttctgtttctagactcaagtatttttcagaagtctttacctagggtcctgatctaggacacttggagcagcagatacatttgtagcttggaaaatgctggagctctagacccttgtctcaagtggcatgtgactcacagggtgccctgggaaaatcccatcccttcccagactccagcttcctcctctaaaatggatgggaaggagtgtggaccctgccctaccccacacagccgtaaggacaacgtggggagcaggaaaaggctggaccctttgcaggagaaaagctgtagaaagggccaagacctagttccagccccaagagagagggctggcttttctcagggcctagaccagcagcctcaacccagccccgcccaaagtgaatgagtcagagtggctgacggcctggaggcaaaccttctcctgtcacgggcatggcctccaataccattcagggccactttgagtttgaggctctgtgcccacaattctgggatgcaacagggagagatgtatggctgtctttaacaagtgagtgagggtttcttctgaaagggaagcaacccaaaatgtcttcaatgatgggctggggctcgacaagaggggtggggctgggaggccacaaagcagggattctgaaggaggctggggaaggatgctcgaaagccaccgtggggtcccagaggcaggcctgccttgtggaaacatgccccacccttgctcatgcagtgacccttctgccttgaattggatgttcactctgttccaatgacagccacaaactcttttggctggggtggagggctgggggcttggcaaggcaggggcggggggggaaattgaggacatttctggcatctttaaattatagatcctaatgcttcaaaatcattccttccaatccctctcctaaaagagtcatgggcccagggagggaacatgtggcctggggtcccacagctaacgatggcctaagagagacccatcttctgactttcatccagtgctttctcagctttcccacccctgactgaaaatccccctgcaagtaggcattctgagccaggccagcccacccttctcacttctcttttgtgctcaaccccggatctgaacctgctttcttctaagccactgaggtgcttatcaaatgtgaaaaagaaatcaaaactgtagcagacattttaacctagctcacctgagtgagctcccaggaagaggaataaatcaggccctgaaaccaggccccaggcatccagagatacagtcctcctcccgcatccggcccgcaccaggcaggtaaagacaggtaacataccttgctgtgtgttctgccgttctttctccagatcgcctgaaagctcctcttgaatgtgggggtctcccctcccggctccaggtttttaaacaacagcctcacctctggagactccctggctgggtgtagccccaccgcagggcgggtctcaggaatctggcagccgtcacacccatctgtcgtcactgcacccccacctcccaggacgggactgggcaagtgggttggtcggtccgtcccagagttcttgtagtgagctccacaatgcccacctgcctgtgggggctgcaaggggcccctcaaacagaaagcacaaggcacatgtaagtgatcatcagagaccagaattcacagggtggggaagggcccttgcatttgtgccaggcaatgaactcagcattttcccaaagccagcaggggtcagcttcttcttgtgacctggaccaccccagacagaagatcaggcagagaacacaaagattagggcttatatagagagttaaagctccagacatatcaccgggctggaaggtgagaagactcaaacatccaggaccctggaaagcaccattcccctccccagtgaaaaaaaaaatgaaaaatcccagcttcttggggcatttggaggatccttaaaaggcaaggttcatcaggaaggattcaaagctcaactcatccaaggaaagcttaagagaaatgagcagagtaactaaatggctcgcctccagctccctccacagggttggcagggagccctgggacaggtagctgcctgtgagtcactcctcccacctgtggggagggttagtctcctagcccctccctccctaggcaggaatgcccgcctggagggccagaaaacagacctgaccacaagtggtggaaggaaaggctgaagcatagcttgactgacaaagtcaaaacagactttccctggcctcctgccaggcctgagaacacagcttcttttgtgggctccttgctcagggatcctgggcttccagccactgtaaatggaagtggcaggtccaaattgagaggctggtctcacaggacactctttcccccaggttagggtcagagagcttttagggaaacctggagggtcagccagtccatatcttggccctggagagcctgcactggcaccgttttggaatgctaggacctcaaagctactatttaaaggagcttcttaactacgattccactttgttagtgtctcctaaacagaaagttctccaccattggagggttatgtccaagaaattggcttgaagacccttaagggggaaatgtagaattttgtggattaaattgggcatttctaaccctcagattcgaattaagcataagttcaggtaggcagaagaaatagtgtaattagcaagtgggcagtgagttgttgatgtaagttgatgcataattgatagtccaataaatgttagagtcttgccccctgtaagcattccagtgaaatctagctcaactcagcaagtaaggtcagtagaagcagtgtcccttcaacacagagagacctccctcaagtcccccaccgagaaaggtcagctctgactctgacacacctgtgttttcagttctcccacctggtggtctctttctctccacttccccaactccctgaactcagagcgctcatgaaactttcgccctctgcccatcaccagaggatgtgacaaagaactcattaataattaactcagcagaagagagcaggtgttgcaatcccagatcctcagaggagaaaaggcagggcaggtgtgcggtgggcctcaccatgagtagctggggccccttaaatcctcctcctcctccctttatctgaggccatgagcccaggtaaatacacattcggtgtctcagacttcacaggcttgggcaggtcctggagtggtttggcttcgcaggagggacatgccaattgctgtgcttggctctcccctacactcccggcaaagtccaggaagctgtttatgcagacccccaagagcagcccagccagcctcactcctgagggacactgatcatttccaagtggggatccagtcccccaagaactccagggctccaggcacaagctctggagcttcagaacccaatttgttcagtcaagtagcctaaaatagagcctgaggccagatcagggtccagctaagattaaaggggtgtggtactgtggctggagcccctcagcctcccctgtgtgcacacctttcctctctccctgcgcccatcctcctacaacagagcacttatctgccctagagccttgacttattagaatgtgtgctcaggaaagtggctagtgaagtcatcccagacttcagtatctttcaaacctcatcactccatcagcaaattcggtcagctctgccttccaataataatcagaatctacttcttccctcctggcctgagcctcttttcctgggacgtctgcaacagcctcctcactgatatacagtcaagtcccaacacagcaggttatgcaccccgagctcagaatcttcacatgcccctatcccactcagggccaaggccagagctttttcagagtctaggggaccctacaccaccttcctcccattactcttcacctctactacaatggcctctatccctgtcttagctcaggcttagggctttggctccagctgcttctgctgcctggaacggtcttgcccctggatatctacaaagctaactctctgacctctttcaaagtctttgttcagatcctaacttctcaatgaggcctatcctaaacacactattaaaattacagccaacttccctgccccatccctgtcccccatcctaacactcctaaccccacctaccctatattttggtgagttatttatttacttatttggtaggggggcatcatgtaccagcttctaaccaactatataatttatctgcttatgtttattttctgtctcttcccaactagaatgtaatatccaagaaggcagagatttctatcttattcactactgttttccaagtgcctggcacatagtaggtgctcaatacttgtggaatgaatggatccacactaaagtacaaacaattgatacagttcaatgcatcccctgtgccgttgatgtgtagttgcattctcagaggggacaatccaggctttgggcactgggatggattactaatagtggaaattcctgtatcagccagagtgcggaggtcttttttgaggcacctatctccaattacagaaatgtcaccatattgacagaggcagtctccttctttgcctgcttctcagtcattcctggcaatgtctctgacagggtgtgggggtggcattataagctactgtgtctattatccatctgtcaggctcaaaccgtccaagtcgctagggagatcagccaagatctgatcaatcagagatcaagggatagggaacaaaggaaggagaaaaggaggaagaaaaggagagagaagaggttcagggggcataggagaacctggtccaggctgtgactctcaggtgttggaggaaggggcaccaggtgactcaagctcaggccacacctgaatacagtgaatcatggctgagtcctcgtctgtgggacagggtggactccaggaacggccctggggatttgccatgtgactaaagcttgcgttgccctgcactacaacacaactgctcagctgtccagacaactggtcacactcttctctgtgcctccccaggaaccagggagagaaagtgggcctggtgtgttacggaggcacagataggagcccagcctcaggagaggggaggctaagcaggacagaagtcgcctgtcatgagtgactcttccatagcccttctcctctccccaccctcacctatccaacctgaatgtttacccagtggacaactgtgcatgcagcttgagcccgaggactgggagcaatcaggcaatcggcctaaaatcactacagctgatatctgctgagtgcttgctgtgcccaggcactgttctgagccctttgcatgtatccactcacttaatacccaccacaactctgtggggatagacaattatctttatcttgcagacaaggaaaatgaggcacattttcgataacttggccttggctagtaactggggatttgagcccatgccattttgctccagcacgcatattcttaaccattacacagggccaaagatgggccatatcacctgaactcccagagtgcaccctggctaatccttggccagagttcaccagactctggacctcatgtctcccaatgtctaaaaactcctctttgttggccaggcgccgtagctcacgcctgtaatcccagtactttgggaggccaaggtggttggataacttgaggtcaggagttcgaaaccagcctggccaacgtggtgtaaccccgtctctactaaaaatacaaaaattagctgggcatggttgtgggtgcctataatcccagctactcgggaggctgaggcaggagaatcgcttgaacccaggagatggaggttgcagtgagccgagattgggccactgcactcctgcctgggcaacagagtgagaccctgtcttaaaacaacaacaacaacaaaaaacctcctctttgtgcccttgttccaaacctaggagcactgatactgtctaggggctccaggagtgacactgatgctgtagagacatctagaacaaaccccaccaggtgctacctccttatttgttttccttattgacaacctctcttctatgggcacagatggagaaggtgctggcctccagttcttccatctcagaggctccagcacataccagcagggtttcctccttcataccaacaggggtggctctgactaaggacaggagcacgccaggaggcgtggacagaaggtgaccgcaacattctggtgagctgacaaggtgaagcagaggacgtgacgagaggatgacacaacttcccctttgccaaaggaaggagatcccctgccctgaggtcaagagcctgggccacctcacaggctacagctccttctgctctgtctcccagtgtgccctccaaatggcccagccctcctgaggggtacagcccagtacagcctacagcctggtggagccatatgctggcccatggctggctggctcccagagaagacagaagaatcttttcattcttaccacctccatcccctcccatatttcctgacattcctctggcagacaggctggcccatcgccacaccccctcctctaaccccagtcacctctgtctctattctgtgattctatttggtcattgacctctggggattaggttattgggatctaagtccgacctttatgacctttggataacatttgccatgtgtagttggccatgtggccatggtccagcctccatgagaggagagagacatacagctgtctgaaggggcacatagccacgtggcatggtgggtctgacaggtcgggagcttctggggaagaagaagggaaagcaatggctgagagcgagctggggcttttgtgtcctgaaatctgctcttgaagctctcacagggctgccccacaggactttcaaattctaaatatgatccctgaaagggctactagacagacaaactaagtgtcctaacacgtagtttaaattggcattagtttaaattggcatttgatggctgagtatggagaaataagcaccttgtggtttgatggggaagagagaatgggtgcgtctggcttcttgtctggaatcaacaccacctaagggcttttaatcagcacctgcccacagcgcctgtggctacaccggggtatgtgtatggacttgaccgtagctctgctctgctactcaatagaattgtaaacttgggcaaaatcctctctgaacctctgtttcattatttataattaaaggtattagattctaatggttcttactcaggctgcccctcagaattacttggagaacataatatatcacataccaagaccaggcctcacccagagaattattcactggcagacgggcagagacatatgtttttcaagctccctagatgattctaatgtgcagccagggttgggaaacactgaagccccctccagctataagatgctgtgccctcagggtggggtggtgcaggaca

SEQ ID NO: 35761 - DNA, 2456 bp, Homo sapiens
tatgccacctcttcagtctcttaaagacataccactggaagtgggagaaaatcaaggagaagattctggtctgttgcagggtgatcggtgattctggtttgctcaggactctcatcgttttagcactgaaagtaccacatcccagaaaacccatcagtcccaggcaaactggaatacttgatcactctgtttggacagtaatactttttctccaagtttttagaagtgttacctcaggtggctcagtaaactctgcatgaagatgcacaatgatctgagaaagtaaagtttgcctcaagtccaggaaaaacttggatggaaacagcacatgggaatagcagttcctttcagggacttggggaagaaaatagtattgccagtatggcttttgtgcaggagactctactccactgctgcggcctgacgtgcaggaagcttttcccagccaaatcacaccacaaacccatattgagcttgtagaaactttaacaactctgtctttttcgagccaaatactgttaaaacaggttgttcactcttgaatttggtgtcattcttaagatacatgtgagcatacacacacacaggcgcacacatacctttgcactttttcctgctacattttatcttgttagttttggcttgttctccatttgctaggcgttggatttggtatggactttatcctgcatactctccatcatctccaggttaaagtccaaagtcttcagccaggtacccagggtccagctgaaaaagttgcattttaggccctaactcacacaacccccttcacagacatgctttgatttagtcatctgctctctcaaccacacttaggcttgattcatccaactctgcctgtctacactgccctctccacctcctgtatacttggcaagatcctaaatccaagactcagatcagattcctgaatcagcagtggcttctctggcattctctgtaaattcttcccaaactctggcaagtggaccttgacctatacaactccatcggcaaacagttccattctgttttgtcagtctcttttctaaatatctcaaagttgcatacttacgcttgttcaatgttaattattttgtgatttgtccccaaacatggattataaaatccttgaagtcaaggagaattcttgagttcatagcccagtgtttgcacataataggtgctcaataagcagatactgatttcttagtaggaactcttaaggcaaaagaaaaccataaaaagtgcttgaagagtatgattccatgaatattaccccataattccctcttgggacaacttagcaagaaaatcacccagaaaaaaaataatttttcccctaaaaattggaacctgagaaaattcatgatgaactgatccactcatcagcagaatttcaaccctatgcagccttgagttacatgccaacttcctactctatctaacctagctggtacttacaaatggggagaaccaaactagcagtacttttggtatttgaaactgaaatagttctgggatcaggccatagattttagtcactcgagcctttaagatccagcttttagaaccttgagaatgaaagacgtaaatgtgggtttaggggagaggagggcacagatggacagaggatcttaggaatcaagtacccctaaacatgttttaagaattctgtgtcactcccaaagaattaggcaacatgtgtattaaaaaggtctaacatttgctgtctatccctgtgctgccaatgataatgtgttccactgttagtttctggcccgctgcagcccttggccaatgagcatcaaagccaatacgctgagaagccccgccccacaaccaaatggggtctaggaatgtttgtttctttaagtccattgcctggggatcaagagtatcccaggagctgacatgagcattgaggggcagcttctctcaccaacagtccctctgtgtgttccaactgctgcttttctggcccttctgtctagatctttgacagtgcctgttatccttttagttgttctgggagtctgaatctcctatctgaatcctcctcggcaaatcagtctgcatattgcatattgatactcttccacccccagcttctgtctggtattcactctcagggcctggacttttcttctagttttcctcatcacatttcagcagacccttctgacttataacctagaaacagaaaaacacccagaaccaatcattcattcaacaaatatttattgagtgcccacccaatgccaggaacccagcaacatagtagtaaacaactcacacacaatcattatccagaggaagtctactgtgtcatgggacacagacattaaacacataattaccaaataacttattaattttgcaaccagaataacctcgacttctttagccatccaagagtcactctttcctctactatccaaataacaataatt

SEQ ID NO: 35762 - DNA, 695 bp, Homo sapiens
gtaggcagcagggtgcaggtaattctaaccacaccacccatggctattcaaggcttccagcacagtctgcatgccccagcagctggtggctctgcttgaccaaaagttatgaaggacaaaagcagaatgcctataaagtctgttcctttgccttgatttgtaccacgggcaggctggagggtgcccagagtgagccaatggctacaatgtcagacactaagttgggagtggaagtgaaaggtgaggagaccagagtggaggaaactaagccaagttgccaggtcttgggcaatttcaacaccaaggctctgagccaaggacaggctactgtgcttgaaataacttcccaagagagccttaactggtcactttgccctctctatctcagcactgacttttaggtcaatgtaactaatattgattagcctcctattctatgttaacaccatgaaagatacaaagcttttgtcttccacagagctgaggcaagcccacaggaaacaatgacagagttgtacaaaacggtaatccatccagtgccagcctgtagagtacaagccccaaaggcaactgaaattcacagaaaggagagatcaaggtgtgctgccatgggcagtggtagcttcttggagcacaggaaattgaacttgacctcaaggaagaaaggaagacaaagtagaaagaggacagcattt

SEQ ID NO: 35763 - DNA, 4159 bp, Homo sapiens
tctagaactctagtctataagaccagaggagacagtggctacacatataaatttcagtgtcttccactgatatccgagtgataagcaacttcctttctaaaactatgaaagtaactaagggtctaaaaaaaatttctagtgcggtagtcttaaaactacaaatagttttgtcatatctcctatgatgactccctcccttcagctgcctggagccccaggggtgggcagtgactttgtgtaggcagcaagcagccggtaacaaaataataattattattgttattattatattataataattgtaacaataacaattattattgaagctcatttacaactaaccatccaaaagacctctttcccctgtgtcttcaatccccaaggcagaggggtagggacagttctatccctcctctgcacttaacccttgaaacacatgcacccctttgtgactttaccctctgcagatggctctgaatgtcttaatgtctgagagaaagggatttagaaagcaaaatataaaaattttaaactagtccttcctaccttcctagaagtggcaagagttaaatgttgagatagactcaagggtaggatgactatttcagtttgcctggaagtgtttcagtttgcctggaagtatctcagttttagtgctcagttttagcaggagtcctgcatttcagagaacccctcaaccctgagcaaaataagatggttggtcaccctatggcttggtttgaccatcatcgctataacctgtatcttacctgcatgcatgacacaacacagtgctttacttccctaaaaatgacatcagccccactaaaatatatgtttagtttccaagccctacctagtcaccttctaccctaggagccaggttctcttttcccacccagacagaggagctgcactcagaaattcctagacatgagttaacactggattccttagccttctactcccatcatctcctgctcagccccagctaccacctaaactaggaagatcaagtctaccagtgacctccgtccatggcacttgctgcccctcctctgtccagctcttaccaatatagctgctggaacctggaggtcaaagtcaaattatcaaaaaaaggaactgagctggtgatgtgcactaacacagcaaatcacaggaaaggggaaccccaggtaaattacagccttctgacctaggaagacgtgtggtttgcgtctctgagttacagaaacacaggaaatgcttactggaccagtcaatttcagaattttgggtcccaagctaggctgactcaccttcagaatggaaaccacgtgacagcccttatatcagggcacacatcacatgctcttccagaagtcaatgggtttggaaccctcacagatattgggaaagctcactaatcatttctgccagttatcagaggttgctctgaaactataaggaagattcaaagaaaatgccaagactgatattaaacttggcaggaacccttgttacagaattttcctgcctgacaaggttaaaagaacaataagcaggaaacacagtcctccaggaataatcaattctatttggcccctggtcaccttcactcagactaaattctaaaacatagaatttcaaataagctatttagataaccttgaccattctccacacacaagcccttgcctgaactattaatagtcaaggcaaagggtagttgttattgctgcctttttaaactgaatcatctgagaaattgcttcagacccccaaagaaagattactgttaacaattcaaaaactaaaatatttgatccctgagacagccttttcccccgacccgcccttcagggctcagtccgaccgactgcaaaggctgttgcaagattgcatcactgacctttgcaattttctggccagtttgatttccccttctttcccctgccccctccctttctctgcttaaaggcctttggccaatttgcctctccttttccccaagtttgctaaccctttggccaatttgcctctctttttccccaagtttgctaactctagcatatccataaccaaagccaaactagaacgctccctcagccccaggtgattacagctaaccctggtcaaaatcaatcctacatcttcacacgtccaagagtactcacactctggattcttacctaagctgtctactacacgcccttctgcccacaaactgcttcaaagctgaagttgagctggagcagtgaagttgtacccccaaacccaggagggtggcagagaattattgaggagagcatgaaatacttccattctaaaatggcagatgaacttctaccaacagccccttccatacttgaccccctacccccaagctcccaactccacttctcaagtggaagtgagaacaatttgaatttgaaggctcttccctgatacacggaagtacataaggaaacagctcgcaggcaaagagactaatctctctctctttctctctctctctctctctctctctctctctcacacacacacacacacacacacacacacctctgtgcataaaagcaccatcaatgaatagttttctatcaactgactctagttatacatgcatgtacctctaaataaaaccaaccaggcaggaaagaaacaatattagcacatattgctttatccaagcgtaacctgttctgtcctgttacccagatccttcccccttgccttctcctctctgatccattgccacacacgtgggaaggtgacaacccttccgaataaaaatgaaagctttcttctttagatggaacccccaaattccctcattatttataatgtcaggctgtcctggacaagggaagctgtgcacccgctgacaccagtaagaaggttgccgccatgtcagagatgtccgcggacacctccctgggctccgggtcctcccctgcgctcgcctggagtgggaccttcgcgtgcacactggccttcccacgcgccccgctgcgatggcacccgcgccgggccccctagctcacacagtcggagcgtgctcagcgcgtggccacctcctgccaggtcccagccgggttccaccccctccttttcccctcctcttcttcctccccctccgagttcccctggctctgaccgcgctggcctgggccggagagcccaggaggcgtgtctcagagaaaagatataagcggcccccggacgctaaagcggtgccagcggcggagtctccaactgggagagctgcagctgccgagaggaggagaacgctgaggtcggtcggaccaacggacgcgctgaccgctgccaactgcagctcgcgctgcctcctgctcgcgccgtgccactaaggtagtccgcctttctatgagccctccccaagattagctgggtgcggggtggtgggagccgttctttggtggctgaagcccctctcctgctgctcctcctgcaggtcattcccgcctccgagagcccagagccgagatggaaacggtccaggagctgatccccctggccaaggagatgatggcccagaagcgcaaggggaagatggtgaagctgtacgtgctgggcagcgtgctggccctcttcggcgtggtgctcggcctgatggagactgtgtgcagccccttcacggccgccagacgtctgcgggaccaggaggcagccgtggcggagctgcaggccgccctggagcgacaggctctccagaagcaagccctgcaggagaaaggcaagcagcaggacacggtcctcggcggccgggccctgtccaaccggcagcacgcctcctaggaactgtgggagaccagcggagtgggagggagacgcagtagacagagacagaccgagagaggaatggagagacagagggggcgcgcgcacaggagcctgactccgctgggagagtgcaggagcacgtgctgttttttatttggacttaacttcagagaaaccgctgacatctagaactgacctaccacaagcatccaccaaaggagtttgggattgagttttgctgctgtgcagcactgcattgtcatgacatttccaacactgtgtgaattatctaaatgcgtctaccattttgcactagggaggaaggataaatgctttttatgttattattattaattattacaatgaccac

SEQ ID NO: 35764 - DNA, 1551 bp, Homo sapiens
tctttgctttcattattttttcccaaaatgtgcacattttttttcttaagcttattttgctgttttgtgctgttatttttaattgcttcccactgggtgggggggtagggggactgagagtgagatttggcttgagtttggctctctttgctattactcacatttccccccagaagccctacatgcactcctctctctctgtctttgacaaattacttttgaaagatcattgatccctggcgtaaatggtgttaagagtaagatggactcgggtagggatgctcaggaatccagtcctgtacagtcatgagcttggccatctggaagtctcctcttgctcaatgaaatggagtaaacattgtccattatgaaatccaccacacaggctgccagggacgaatgggatcccacccaaagccaatcgctgctctgacagggaaattggctagcactgcctgagactactccagcctcccccgtccctgatgtcacaattcagaggctgctgcctgcttaggaggttgtagaaagctctgtaggttctctctgtgtgtcctacaggagtcttcaggccagctccctgtcggatggcttttatgaaaaaatatctcctccccattctggggctcttcatggcctactactactattctgcaaacgaggaattcagaccaggtaagtacccatgcgtctcattttggaggaataggtttaaaaaacacaggggtgcttgagtgttcctgaggaccaagatgtgttcttgatcctcaaagttggtgaaaatgagggaaccctgagttaagatggtatttttgtgtcctccagctacaggctgtggacaggggggactgtgtaggaagggtaatcgtgtagccaaaatctagccaaataggccatgctttatttggcacccttaatggaaagcagtttcaaatcttctacaaaaatgagagtaatacccaaattcacaactcagcagctaattgggctctatgaagagactgataagtgggaggcaaaaaaaaaaaaaaaaaaaactggagatgatgactacatagaagtgagggaaaatccctggaatttctatgaacacatgtgttttgattccttgttaaatgtactttcaattgagcaaaattgaaagagtccagaaatgtctggaactccagcattttagctgaaccatgacttttctggcttcatcctatgatctctttccatggaggtttttagaaatgacagtagggaggctgtcagcccaaacctcccacttcagagcatgtttatgaaagacctggcctgttcccacagtgatttacggagtttgtgacaaactgatctgggctcataacctttaagttacaaattgcgataagcatgcctatatccagagagggagaaggaattttgctgccaacttgggtatggtcctcacttccttttggggttccccagagatgctccaaggaaagaaagtgattgtcacaggggccagcaaagggatcggaagagagatggcttatcatctggcgaagatgggagcccatgtgg

SEQ ID NO: 35765 - DNA, 2392 bp, Homo sapiens
taagatagttttttttaagtaccacccgaaaaacaaacttactgattatgacagggaaaagagtaattttacagaagagaaacctgatagacggcacctgattcaaatgatcatggtttattaacatcaccagtaatggaataaattgaaaacatgtatcatttgatggggtgcaacgtgaagaacaaaagttacttttgtgaacctgccaaaatgcataacctgaatcaaatcatgaggaaacaccggataaatccaaactgagggacatccatcaatagcgcgctggtaaatgtttaacaacaagctatccagaaaggaagaatcaaaagccctgatttgtagcctttccatgtaatcaacactcccatgatgaccatatccacatgacattctcttgcttgcaaaatttataaacatttaaccaccagctctcacaatctagtatgagccagcttcggcatatcagcttgtacaaaataactggctgtactctccaacagtgccaaggtcatgaaaataaaggaaagactgcagaatcattgcagagcaaaggcaactgaagagtcatgacaactaaatgccaactcatgatcctcaattggatccttttgctataaaggatattattggcacacatgacaaaatttgaatagggtctgtggattagataacatggatatgtcagtattactgtactgggttgaatagtggccccaaaaaagatatatctacatcctacctgcctgaacctgtgaatgcaaccttatttggacaaagggtccttgcagatgtagttaagttaaggatcttgtgatgagatcatcctggattagccaagtgggctcttaatccactgccaaatgtccttatagagtcaggggaagagaagacacagacagagagaagaaaaagccatgtaaagatggaaagtagagattgtgatgtagccacaaggaatgccggcagccactagaagctggaagaggcaaggaagcactctccctcagagtctttggggggaatgcggccctgccaacacattgatttcagacttcttgactccagcactgtgagagaataaatttctgttgtcttaagccacccagtttgtggtaatttgttatgacagccctaggaaactaataaattccctcattttgatgactgtattgtgattatgtaggacagtgtccctctgtgtaagaaatgaacactaagtatttgggggagatgggacatgaggtcagcaatgacctcaattacagctattaccctcaaatggctcagcagaaaaaaaaaataggttgtgtgtactattcttgcaacttttctttaagtttgaaattatttcaaaagcaaaaaaaaaaaaaaaaaatccccatcctgggagtctagtgacttggaggacatatgaaagtgaattctgtggggctttttctgggttcttcagagatcccctgcaggagacaccactgctgccgcccattccccctgcagttccctttgtgtgagcaatgccttctctagctcattattttcagttcagctttcttctcagttcctaggcttcaatcagcccagcccacttggcccagtctacccaaccatccctgggcaggtgactcctgggcagcccccatccacaggatccacactgggcctctgggaagccaatccttggactacatggttgatcccacaatgcactcagctttgttctcaagcaagggcacttccagccctccctgttgcctttagactttagatgtgagtcaaattccagtccctgaactccaggggacatattaaaagttctccaaataatgctattgaggcccctctcatatggcttaagtggaaagggatgaaactgccctgagcgtcggtggatatagacacaggacattgagaactatctcttatccaagggtgatttaggctaggcacgggtgattaggcaatgcaggcagaaccggtttgggcccacccttcaactgtggatgttcttcaaatctattcttttattcttgccttagaagatgtgctgatactctgagactttaggaagaactccatttcatatcctgtcaacaggccccatacctgcatagaaatattcttgccaaagtcaccttgtgaaatttagtaaaagttttatcttatttatctctgttacatttttgtgctgtttcaacaccaaacgctctttcctagtgatcagccaaaactttgccctgggttttctctggccaccttaactctcccctctcagtctcttaggtttcttggcaattctccaaccttaattgttggtttcctgaggatttttctatcctgaaccctcttctcttttcactcaacacactttccctggataaatccattcatt

SEQ ID NO: 35766 - DNA, 979 bp, Homo sapiens
tgttatttcctttgggccctgggaatacagtgggaatacaagagaatacactcaccacttcaggctgtccttttgggcagaattggaaatggctccagaagagaagggatgagtcctgggacaaggcccacagggtggtgagcagagtgtgggctggatttcaggtccacctacaagggagagtttccataggtgtgacacaatttgggctatgcaatggctttgcccatagccatggcctctcagattgagtcagaccccagtcctccttgttgctcatcaaactctttgggacgagctctctgaggtctctttgaagtcactctcacaaagactgacgtgaggaaaatcccccaccccttctttttggaagatcaatgagacattgctaatttcttctccctaactcctatcttctctggcctcccagtgtcagcccctttatttccttgggatgtttgtttgtgtttccatgttccctgtaagtgcacaggtggtctggaacctcccttcagaacgtggaagcctttgccaattactgtgatgttctcagcctttgaacctcagctgaaatgaaagcagaaaaagtcaaattttaacatcctgttacatgttgtttactccactttgaccaggccttttgactcatggaatcttttttaaaaaataaaaatctagatttttagagggattttgcccttttcagctttctgaaacttctaaatatggtttacatagagcagaacataggggtttcctcacacaagctaattagcattatgtggaaaaatgtttaagaacacacttgtgaatagaaataggctttaattaaatgcaccaatgttgtttgagaatggaagatttttctctcttctcttcattttttttctgctttttaatttttaatatatgttccagctttcctttagtgggcctagactggttcacaatccttatctgcaattccaaaatccaaaaa

SEQ ID NO: 35767 - DNA, 3222 bp, Homo sapiens
acggggttttgccatgttgcccagattgttctcaaactcgtaaactcaagatatctacccgccttggcctcccaaagagccgggattacaaggatgagccaccatgccaggcctgccctgaaattttatgtctgccttccctgcttgttttttctccttagtacttattattatctatattgttggtcatttatcttgtttattatctgtccttgtcccagttactatggtgacataacaaatcatcccaaaactcagtggcttaaaacataaaatgacattcgcttcgcttgcaaatctgtagtctgagcaggctcagcagggatagttaatttctgctccactcagcaagattgggtggctcaaaggtcaggaactagaatcacctaaaagcgtgattgtgcctgccctgggaagacatgaacagctggactctgaaacaggtagggcactttaggtgcctggctccttgggcacctggagctaagcagggagggcacagcaggagtctctctcatctttgtgtgatctctccacatggtcacttggaatggcagctttagggttgccagactgcttggaggacttgagatctccaaaggcaagtgtcccaagagaaagagccaggcagaagctatattgcctttcaggactgaccatacacttttggtcgaagcacttctgaagatgcacctcatttcaaggaaaaggaatacagaccccacctgttgatggaggactgtcattgtcacattgtaagaagagcatgtgggatggatgggctaaaaattgctgcagccatctttagaaagtaccatctgccacattccccctgctagaatgttggtttcatgaggacaggagttttttctgtttagttcagtgtgcccccagcacctagaggagcacctggcacatacgtgtgggccagagaagatcatgaggtatctagatgcaagtgataaactgttgtaccagacccagaatcaggagcttctgagggtcacataaacacaggaagaaggcaggtttgcaggagccaaggccctgcagattgtcaagaggacaggagtgggagggctgattaggaggtgaggaaatgagtacagagacagaaacatggtcaggtgacaaattgatagccaaagtcaagttaaaattagtttttgcctttagtctgaacatgtaagagttcttcttaggcccaaagatattgtaaggtttcagcccgtgttcaggataaagcagcctttctctgattctgctaattttgggcttattcacccctccatagcattaggggagcagaagatatgaaaactaatagccagtatctatgagttaatattaaacgaaaactttggtcttttccagggctgtgctgacaaatgtttaacaactaactctccagaaaaagaagaaacaaagccttaattcgctgatttgtagcatttgcctgtatctatgatgtaaagactcttactgtggccaacttcgagtcaccaacaggacatcacggcatgtggattgggaagagatggacacccccggctctctcaagcctgtgtactggctccagcacatcatcatgactttcactttccacattcctgacagaattcgttattcttaaggagacagttcactctctcctcctccaggacttgaaatcaaactctgataacatgagtcaaattggcgttttctgttttttgttgttttttttttctgtcagcaagcgtggccaagctgactagcagtgacaagatatctacattctataatacaattgccagggaaggagaggcagcaagggctcctgaagacatgggatgctcacactcttccattctaagggcatcagcatcctgcatgaagtcaacagccttgaccaaggtgtcagtgagacctgcagtcatgactttcaagtttgttagcactgcattcccctgggagtaacagaaaatccaactgtctgacagtggctggctgaatcaggcagagacttattttcctctcctaacaaaaagtctgggtggagctgactagggccttcggggacctgggctccttctgtctttccactcagctctccatcctcctccttgttgctggatgttcacaagacagtggccccaccctcagcatcactcagtgtttctggcaagagaaggaggaaggtgaagggtacaggatgcacaccagctgactctgacccctgataatgagcacactgggaggccccatccaaagacttcagcttacatctcacggcccacagccatggcatgtggccactgttcccttcaggggaggctgagaaatggagctttcaactgggcacattgccacgccaaacaaaactgtggttctattcagcaaccaatagtgtttgtcataagtataaatcaccagagaagcagggagatacagtcagagcagaaggacacaggtctgaagacatcagcctcctaagcatgctgacagcatccactcacactgaccatttgcaaggtactacttggacaccacagttctacctatgctggaggaaatcctaggcctcccacatctgcaaatttccctttgacaaattgtgattccctctcttcagtaaagaatgtcatgaaaaggcctagatatcagtaggagggagccctgaggaggtaacctcagaggaggagcacacattggcacaggggacagacatccaagttgctcttccagacatctccttctcaaggatagttaagtcccccctcaccaacaagtccctctcaagagctgctgtgctactattctccacactgacaggacctttctccttggctggaccactctgggccagcatgtgaaacccaccccagagcacagtccacggcaaacttcaaaggatgactggatcaaagactctctagaggagggttctccaaagcttttgatcgcatacttcattattaaaacatgattacacttggggaattcaaaagatccccaagatggaaaaaaatgattaagcatatgtgcttctaatagatatatagttactatttatttaatatatgcatataatatttgctagcataaaacataggcagaaattgaaatcttaaaaggacaagctaaaaataaatagagagatgcggctggcagacgcgtagtgtgggcacacacaactgtcccatgtgaggctcatggtagatgaggccctagtagatgggc

SEQ ID NO: 35768 - DNA, 1214 bp, Homo sapiens
taccacacacctaggctgcatggtataccttccgctcctcggctacaaacctgtgcaacatgttaccatactgaatactgcaggcaattgtaacacaatggcaaatatttgtgtatctaaacatatctaagcatagaaaatgtagagtaaaaatacaatattataatcttataggaccactatcgtatatacggtccatcattgaccaaaacatcattatgctatgcatgactgcatatcaaaaaatcaatttttaaaagatggaaaagtaccagatgagcactggctgatttggggaggctttctgggaaggatgataggaaacagcaaccctaggggaggacacattggtacaccgcataacctggaatcagagggtggaaactggggactggcccaaaagacccttaacaatgaggggctgaggcccaagggacacaatgacagagcgttcgagcatctctctgctgagcgactcgctgccccgggaccgctggggtggtgtgcgtcaggggctccctcacaccgtccttgaacagtaccgtggaccacaaaagagcaaggctgtcctaaggaaagactttgcctcttcgccggcctccctttgggccgtcagggtggcagcgccaccccgtggctgaatgtggtggtgtaccacgcttcacgcaatctccttgcccagtgcgtatcaggttctaccccagggcggccaccacctgcacaccagcgtgcctaccagtgagtcatcgcttagggccctgaactgacctagaggcggggctggactccggcgtccggtaactccgcccggctgctggggcctacgtttggcattgagccgtggggaactagacctgttcaatagcgacagctagtggtcaccctcaaaaacaaggtgctctgaacctcgcggggaaagcgctgtcaagatatgggaaaatcaggacagatgattggccttgagtggaagctggcacattttcgaagccactcttgggtaaaatggtctgtcgaaaacccaaacgctttaaagtgatgtacaacgaccttggctgcctctccagccacatctcgggccacctgccttgcttttgattccccaaggacaaagaactgccagtcctctgaagcaccctgatgatcccactgtgtgttggccatgccatctcctctgccctgagcgctcttcactctccccattgcatggttaactc

SEQ ID NO: 35769 - DNA, 1592 bp, Homo sapiens
tttctagccttatagctagatttatattccctctggcttttattctaaatttcacctgttgcaaattacgttctctggttcaaaccgtagggaatttggggcagaggcggaggcggggcagtgtttggcaaaattcacagcatttcgcccaaaagcccttctgggacagagctccaagttccaaatgtatcctttccactgacaactcccctactcttcccgccagagaatagttataagaatagtaatttgattaatatacaccagaatgtggactaacaaccatctcaccctgacacataaaaatgaatgaatgaaatccactagaactgcagaagggtagtattttaacttctgctggccccgccttccctttctgtccgacatcaaggaccctcggaagatgagatttctccgatccacacaccccacaccagagcatgttatagtgatttgctaaatgaggcataagtctgtctcacatacgttctttttccacgtccgctacaggttcgggggctcagaaactttttgcggcttcctgcctgctgccagaaaggcagctagtcccccacgcccagccgcaagtaacactggaaaacccgcctgcgctgggaagaccctcgcagcccgctctgctccagtcccgcaggcaccttcttgcgcatgcgcacccactcgagtgccgccctctttccccccattccgtgacgtcatccagccgctcgcgcgcctcgcgttagaatcactagctaggcagccttactgcgcgccggaagtttgggccaccgtgcggcccgccctttccggccagactgaacgcggccccatctgtcggcttaggaactgggaagggcggaagtaaacgagaaaaggcggaacctggtgaaactggtttcccgctgctgccctcattttgcttcgccgaacgtcctccctgtgttatgacgtctggtgtcccacttgactgggaatccagaaacagggcacacagcagttaataaacacctttgatttgtgtctgtggaaatacgttttgtccagacgaaacatacctcaagacaacatattttgcagaatagcctcacctgtgggtggtgctgaaacgttttaattttttttaacttgacttccctaaatcctacatttgagaggcctacaacagctctctagggagggtgtgaaggtgtgagtattcactttgaacaaatatgtgccagtcatgctgctaggccctggaggtactgcagtgagcaaaacagacaaaacccccactttcatggggcttaagttcatgtctactgaatccagtttgctgatttcaaataagaaatgagaagtgatgacacagaggctttccagtcaggtcattacaaagaaaaagtgttatttcacgtaagagttaacacctttttaactaccagcgatttgacccatgccacgaagggaaaggatttcttgagaaaaccccaatatctaaggaaatggccccaatttatttatacttggagcaggacagagattaagggaacagtggacacctacactggagttgtcactcctggatctatcttggtggtgccttcagtcca

SEQ ID NO: 35770 - DNA, 815 bp, Homo sapiens
aagggagacaagcaggttcgtgctaggtgagcctttccagaagagtactgcccagcccttcttcatcccagccttaacacactcaacaacccatttcttccaactgcaaaaaatctaaatgatactgtcccttttgtagtcagagaagtacatcttagatccccagctcagtctagctcagagaagaaaacaagaaaaatagagctctttcctcttaaagctaacacctgagtcacatactgtcacctaccccctctccctgccgcccccccaacacacacacactggtatttgagtggtaataaggtaaatgcctgacaacctattcttccacagaatccctaggctttctgtgtcaacagcttccctttagaagccaaatttgtgagctttcactccacaggctgggtgactttcagactttggcacccatttctatttagatatcaagcatagtttctaagcaaccagccagccagctcctctccctctcacttcccccatcagggagccagcttactatactagcagaacaggtcaaacagagctcgatcctggacaaatcagtgcttgaggaaactttaacaaaaccaaggaaaaatgtggtacaagaacaatgcagaaggattctgttccaggcagtttagccttgtacaagtagaagaaggtcattgagtccgttctaaagctggatgcaatttcaggcactactccaatctcttcactttataagcaataaatctgaagcccagaggttaaaggacttgttcaaggtcacattggaagcaaagctgcagctagaactttggtgtcca

SEQ ID NO: 35771 - DNA, 1749 bp, Homo sapiens
tgtgagtgagtaccttcaatgagtgggaaagaataaacggcttcaaccattgcagacatgcccccaaaagaggaattactatgcctgctgagtttgggcacccccatcataagcattctctctgtttcaccagagttttagatctagtgtattccccatgccaaaaaaaaaaaaaaaaaaaaatccagaaaggtctgatggtagaagaagtcctttaccttaaaaatggtattttcctcttcttgttgagggctatgccgggtggcatgtttccagggaatctggaagcgtttagagtccctgtgtagccagatgagcccagggtagaggccactatccacctgggccaccagccagggctttagccggactctgcgggggtggagggccatgatctgggggggtcagagggagaaatgggaagagcagaagaattaggccagccactgggaacccttcccagccacctttcccatctactagagctacagtttcactagattacagcaaagaaactaaatatgggaataagctgtgccaggtgggaaagaaaagaggttaaaaggtcctttttattctgattccaaagccatttacacttcatgctctagccaaatcagacttatcagctaagtagatcacatttcttctatttaaatcctgaagcagaaaaataaaaaggtgatgtcatcctgctggaacacagtccttcctgaagcaccaagggctttggaagagaaggaaaattgctcttttcaatctcatctcaggagagggaagaaaaaagttatggaaacagcaacaactatataagtgagaaggtgacacatgttctctttttaaacaagacaactaaaggtgaatgggaatattttagaaataaatgacaccaccatgatgagggagaagtagataaggggtagatcctggactccagagtcctcacttacatggaagagcaggcagtgtgtccacagggatctgaagagtcggcttgtctttcccttgaccgctcaaagattctgtatggagaaaaggaggggtctcagctggctatccatacaacaatccagtgtctgggagaaggcttgggaacactggcgacaaaggctgagaacacgtctccactactgagtctggtaaagctcagaagccctagaataaccaaatactaaagtactaagagtacttagagtactaaaagcagtcatgagacaagctttgcatggctaggacagcctcctcccttgggtctgtttatctcccagtgaaggctggagtgaaccaattggttgcaggagccagcatgggtaaagtctgcaattgattcttgtaaaaatacatgggcatagcagataacattcaagagcagctggcactcacagcagaaaacaaaagccttcccagattgggtgactgataaaaaaacagtcactggagaattgtttgtctgagatgttgtgtttggattttttggtgttcttattttgtttttacttaagatgagaatgagatgcctggaaaaagaacactcattcaacaaatatttgttcatcagctactgtgtgccaagcacggtgttagttactaaacactgacgctccatgttccttcttgagaaactccacactggaacttctcaagccccacaatggcctgagaaggaggggaagataaataggtcaccttcatacccagaaagatccctacctggaccacagttctgaaaccaaacaaccttacagcaaa

SEQ ID NO: 35772 - DNA, 514 bp, Homo sapiens
aagccacccactctgaggtacattgttatggtagccctagcatactcatacaagtgtgttgaagagccccagattgataataatgtaggcatgattccaagtcccaatttagctttggaatgtagccagcaaaggcctgggaaggcagcaaggccccaaggcctgactcagccagcctctgtctcaaccactgccctgtggccactcttcccttcactgggggaagggcaagctcatcagcacagctagctgtttactgctgatgagctcactagacaaacagcatcttccatctggcccagggctgggctctggggaccaaacaagctccactgcaggtgtatgagagggatgaggggtaaggccattgggagagtgtcatttgaggggagtcaaaaccccagtggcatacaagtatgagcccacacacaggcactcacttttgcaccagctgaaattcccatgactaaggggatgtcttaaggaccttctttagaagacatatattttggaa

SEQ ID NO: 35773 - DNA, 1210 bp, Homo sapiens
ctaagcatcagtttccttatctgcaacaccaggcttattaacaagacctatctgtacactgttgtggtgatgaagtgagatgttcaggcacccttaaatgttggttgatatttttattgcagtatactgtaaagtcactgcattcgactatctccgctactacacatttacgcagactgatttccataaccaaaacacaagcacaaagctcatgcccccgactcacgcaacccgggaagcccagctgcccacgttctagggctctgagaacactagtgaacgaactcccgtgctttcaaagagctgcggtagggggcagaaccgggaaccggatgttctaagcctgtcgtacgagcgcgacgtaaagcggatctgctttatggcaccttgctttcgccgtaaagcgcagtcagcgagcccacgtgcttgtgttgactggacaacttcctggtggaaaaccgcgactcttgcaagtgggcaaacttgacgttttcgctatgggcaaacgcgggagccggagccagagccagctactcaacaccctaactaaaaagcagaagaaacatcttcgagatttcggcgaggagcatcccttctatgacaggtctgaaggggcgtggcagggctccccagtcgccagagatgtatcctcgagtttggtcctctggtctcccagatagtgctgctccggccttttcccactattccctggctcccgctgtgctcggccggggagattctggcgccatcccgccgggagatggagtgcttcacgggcctttttgttgagcctgtaatttcctgctaagaggcacgcccgttgtgtgggggaggattttttttttttttttaagacggtgtttcgctctgtcgcccaggctggagtgcaatggcgcgatcttggctcactgcaacctctgtctcctcccgggttcaagcgatgctcctgcctcagcctcccgtgtagctgggattacaggcgcccgccaccaagcccggctgattttttgtatttttagtagagatggggtttcaccatgttggccaggctggtcttgaactcctgacctcaggtgatccacccacctcggcctcccaaagtgctgggattacaggcgtgagccaccgcgcccagctatgggggcggatttttgtgtggtcagagatctaggaattttttgtagacacacatatatatatgtatatatat

SEQ ID NO: 35774 - DNA, 3445 bp, Homo sapiens
gcgggggaaaccaaagccccgacgcttactgtcaccgctggaacaataacccagtcctcttaaatcttggtccaccatctctgcaactgtaccaagctgagtccactgcactccttggggcttgaacatcagggttataaggttgtttccatttagaattacatagaagaataagaggcagattatctatgaaacatattataatttggtgaattacgtgatttaactggggttatgtccattgtttacaataggaaattagaaattaaccattttttaagcatcttcggtttttattctcaacagtaactttaaatatttttgaatatgcttagaaagctgagtcctgtttttcccattaattgtggtcatttttttttagaaatgctttattgtcatttctgaaacactgtatagagaatgcactagaaatgtaatgatgtgttaatcctttttcttacccgctttatttcttctctacttgttccatttatttattcgacatgtatttattcactgtgtctttaggataaaaatattgcactaattctgtgggagacacagaaatctttccctcaaagagctcatgtgtttatgtccttgagtttttactggtagacgtatctgttagaggcattggcttattgtaaaaggtatttccaaattctgcttgagaaatgtctcacgtggactgatgggtctgaagtccgcaggtcatggtgctggggttatgaaaggtgctcagtttctggtgttgagccaagccctgcgcaaagcgggtaacataggtatgtttcttggctgggggccactgctctacatggagctttttagctccacttcctcagcagtttcacctcaagatcctgttccttcctcttaccccactaaggctgctgttgctgtctgcacaggtactgatagtggtgccattccgggaagctgctttgcgggtggtgcagctcttcatcagcctcctcgagggtgacagcaagaagaaaatcattgtgagcaacaaaaagaggtttcagggagaatatggatcagatcccgaggagagaccacccaacttgaagaggcctgaggattatgaagccgtatttgtgggcaatattgatgaccacttcaggattggtaattcttccttatcaactttgagacctaaagtgtgaaggtctacatagctggagaccagaagctggaattagatattttcccagtggatcactcactgtgcctctttaacagaaccagtgtgcctttgagacatgttgtttgccatgggagagtcttgccttggctaatggggtggacattaggccagtggagtcgggaggatctctgaggccatatatgaaaggcacatgtacatttataacagaaatttatagcaagtttataacagaagtgtgaaagcacacccatagctggtagcagatagatgctacaaggggttctctaggatgttggaagtgatggggctgatggggtcattctggggaggctgaataaaatgactgtctctacataaaggtggactttctcctgtgtgctacatagatgcctaccctgaataatctccacacatgacttccacccaaattttcacatttttgcttgtctctcattcagctcccattgactttggttggttataccttttatagagtaaagttcttggggaaatgttcattagtcacatatgctcattcacaaatacttattgagtatctacagtgtgccaggcactgttaagaagctgggaatctacagataaatatagaaataaaagttatagttcccattgctaaggaaatccagcctacgacagagcaggcagtgcaggatatgtgtgcaacggttgttctcggagcatttaaagcaaacccccttacccaaaatgggggcagggtggttagggaagatgtcgtggtggaggtgtcatctgtactaggtggaaacctgtgtaggattcagccagtttcaaagggaggtggctgagtggaggaaaacatttcagacaggaaactgcctgttgcagaggcatcagggtgactaagcttggaatgacctatgattcacacaggcttcggtatggtggaatgtaaggcataaggagacaagagctcgtgttttgtttggaacatatatagctgtccaggaagcagttggtatattgttctggagctcaggaaaaagatatgggctggaaatacacatttgtgtgaaggtgacattaaagccatgatcagtgagtcagttaacccaaagctttatgcagcacgagagcagagctgacaagtgaatccaccagtttgcagaagagttatttggatctggaaggacagacaagggccaggtcagtgatagaagcaaaagtgagagttgaagtcatggaaactattagcaaggaaaagagcattgcaaggcagctgttagtacattctgtgccgtttgtactttcctcataagaagctctcaaaagtgttcatcctgttggtgactgaggactgtggggaccttagcaagagtcatttctctggagtcctgagaatcagaggccggattgcagtggagtgagaagtgaaggagagatttgaaagtagagagaattctctggagcagtttgatagtgacggaaaggaagagaaggtagaagctagaagggactatagatgcaagggagagatttctcttgttcttatgttttaataattaaagcagttgagcacagttacatgctaagaggaacaaaagagatgtggaagcaatagaagtggtggactgctttgagagggtggaaggtaatggcttggtagtgactaatgaattggtgtgtacttggctgttttgtgtaggagtggcaatacttcagagaagcatccgactctatgccccgttttactcctcggatatcctcattgcttcccccctgggcttgaggaccatcattggtggagaaggagagaagaagagagattttgactttctgtcttctatcgagcttctcatcattgatcaagctgacatttacctgatgcagaactgggagcatgtcctggtaatgctggccattcacattcagtgggacagtattcatatttagagggataagacacccagtggtttaagtcctaaagaattatttaagtccagattagaactcttgtttggaagcaaggacacacactccacattttctaatttgaaaaagtcttttgtccccttttctacccagagattgtccataattaaactgtctacagattaaaattcctgtcagtcattttcaaatctccagaaaagatttctttcccttaaaatttctttctactaactttagggtgggtggatgggtggatgggataggttgatggatggatgggtcctcaccaggaacatctttacctaacataatcccacatgtggtttttgcttatgctgt

SEQ ID NO: 35775 - DNA, 1384 bp, Homo sapiens
tttattctatttgatcttcactctaatttacaaagaaaagcagggaagtctatttctgttttacagaggtgtacagggaggctcacaggggctaagttcacacagtaagccctcgaagctgccagggctgcaaagcccaccctctttccaccgcaccgaactacctcctttcgcctacaaaacgtaggtggggaccactggtgttggaatgacggcccacctcgagtttcaggtgacttccactctgcaattaacttgcaggcagccccagacctgcaatgaacacacgggtgggggagagatatgcacgccagggtcagtgggaaccaacagccgaggggtgagcggggctaggggccccgggccgccggcggggcaaacgcggttcagaaacgcaggccgcgctctggcccgccccctgcagcagcacggcctgctcgccatcgcccggagagcgccgcgggttcccgagtccgggcgcggagggcgcgcgggcacggcggcaggggcgtgctcggaggacgcgcgctgcgctgctcctccaaagggcagctccgggggaaagagggtggcgtcccggggaagcccgcagccgccgccgatgtcgctgggactcggaagtgccgaaagaggggtgttgggaactcgcggcgcgcgtgaacgttgccgtcgccgccgcccgggacagcccggaggttggtaactggtgaccatagggggtcctggggaggttagatgctgaattttctgcgtcagtttactctgttaaaaaaaaaatgcacaaaacgctttccgtttcctacccaagttcccgtgtgcgcgcccgagggcgggacagaggaagttcccggtcgggcgaagaagacaaaagcggcgggggccgcgcgcgcagtgcgcccgggcaaaggcggggatctaggcgccgggacaagtccgcgcacggccctgcccacgtcctctctccttggcttcgtccccagcttccggaactgctgcggggagttgcgaactctggtcctcttggcagtatcggcggtgcgcctgcctgcctgctgtgactccagggactctaaagttagagacttcctttgcgttctatcttcaggactcagttttcttcctctgttctgagtctaaccttcaggtggcaggtctttatgcggaaaaaccctcccgctaatcctcaccagaggtactttacgggtagcattggtgttaagaaatgtgctgctacctgtgtacattgctcttggatcagggttgtagggctagggcatttggcatcctcagaggtttgcattacgtgggagtgagacattgcttctctttctgtttttgttgttgtttgtgtttttgaggcggagtttcgctctggtcgcccagg

SEQ ID NO: 35776 - DNA, 1256 bp, Homo sapiens
taactgtacactggcattaatgggattggccatggcagagtggaggggcaggggcctgggtccaaagacttggctttgagccttggctcagttatttacttatttgtttactcacatatttagacaaaaattgtacatatttatggtgtacaatgtgatgtctagctatacattgtgagatgattaaatcaaggtaattaacatacccatcaccttacctgcttatcattttatggtgagaacatttaagatctactcttagcacttttcaagaatataatacattattgttaactataatcaccatgctgtataatagatcctcagaatttattcatcctgtccaacatcttttaaccaacatcttccccacttcccccgccccagcccctggcaaccacttctgtgagtttgactttttttaggtttcacatataagtgagatcatgcagtatttgcttttttgctctggctcagttatttctggctctgtgacctcatcacatttgtcatctataaaatgcctacctcccctgttccacttccacctacttcaccaggctgttgtgaaaacaaaatgagataatgtgtgaattctggggtttggcatgactgtcacatgttagaagtacttggtggggttggtgggaggtgctgcttaaaattttgctcttattttggcatccacaatgagacatacttgagaggtttaaataaagcagtaaaggccataaatgcgtttaaatttagtgaactctttgttacttggaacatttggaatcatttaatttgctgaattttaggacctaactttcctataccttctctattacttagagtatagtcatggctgccatgatggagagatctagaataggagaggcttaaacaacctagaaatgcatttctctttcctgtaacagtctagatctaagtagtctggggcactttggggcttgggggtggtacctggatttggggactgagaggcctctgtcttgtccatgtggctttcacctcttcatccacggaggctgttccaattctgttcaacaggaaagggagggaaagaaagagatggccacagccatgtcccttcactcacacccttttgaatggagctattcaggtgtccacacttagctacagtgtagtgttggtgtccagaggaaattttaattgatgtgtaagaagagagactgaattctgaaaaggggtagtgaggggcggtgggtaacaagcagtgtctgtcacag

SEQ ID NO: 35777 - DNA, 718 bp, Homo sapiens
gactcatcagcagaaattgcttcatttctatgctctcaggcagttttgtggagcactgaatttggggaaatagaaccagggcactggaagaaagagcaggttctgccagacagtcctgtgtgatggggagagaattcccaggcacagaaggcttcttttctgtttgtagcagcctcttgcttgactgtatttgacttaggataaaaactccagttctgctcaaagaatgaaggtctgaggtccctccctaagaataaaactgcctgtgccaaaattataaatataactgcctttgtaggactaacaaattagtcataaaattagaaattatggcttaggagttatgtagctagaggccacaagattctaaaccatcccaattgctcctagggagaacatcactattgtaaaacctaagcttggtgcttgagatattttgcagactttgtactggagagatcagctggtgccacccagatcgatgaactggctcatttgatcttgcggctcccactcaggaaccaactcagcacagcaggacagctttgactccctatgatttcatctccgacctgaccaatcagccctggccctctacctgccaaattatccttaaaaaaccccagtctcacaaggtcaggagttcgagaccagcctgaccaacatggggttttagtagaaaccccgtctctactaaaaatacaaaaattagctgggc

SEQ ID NO: 35778 - DNA, 3101 bp, Homo sapiens
aaagatgaagacattcccactgttgagaatggtgagaaatttctcagtcacaaaccagtcagcttacaagtcagtgcttactgcctgctttctgatctgggttgtgataatgctgtgggttaaggaattaagaggcattatttctctactcaacaagtttatactctatttgagaattccaggaggacacccctagctttaatatggctgatgtgtgaagtatttaacaagggccagagctgtacacagccaggacaattggccctgctcgtgggtcctgcctgaaagctggccctggcatgccatttaacaaagtgttttccatatgtatgattgtccctagtcggtgtagccaaaaattgctgggagagtttctagccttggaatgatcagagaagactctctggaataggtggattggagctgagtcttgaatagaagtactatgttttgaactgacccaagcctattttgttgtttaacaaaaataaagttctttggttttactcttggtaacttctgtcacttggagatggacaggagttaaatgtcttctctcccacaaccttgccaccaagtggtatgttaaacagtgaaggtgtctaactgaattctcctacaagtacaaacattcattaggtagggaagtacaaaaccatcattgaacttgttcctgaaagcttgtgaagcctctattgtctgtctttaggtactccaacaagcatcttgcacggaagttccttctgaggctggtgcaattctattctgctggctgaagcagttacccttctagtctgattagaggatagagccttattaaagcaaaggacacagaccaagagagtgttagactttcagtgctttgggtgctgggctcaagggaggtgtttttttttttttttgtgatccttctggctcagcctcccaaagtgttgggattacaggcgtgagccactgtacctggcctcaagggattcttacatacatgcttcattattacaagggtatcagagcctgagaaaaattttaatccatcacatattgagcaccatgcttttcattactaaaatatttatttctaacattccttatgctagtaaactttcaggtgcagctttaggtaccatgttggaattatttgaattgtagtcatgtctgggagtagatttctgattagaatccttcaaatgctaactcactctttgtggactcctcatttggatactttcaatgttaagaactgtccttagaggtggattaaagttaatttacacacaaacatggaagtgctgtaacatgattcagacttatataagtgccataacaagactcagagagaaagggggacgggattattccagcctagggcaggttgaatagtggcgggatctgaaatttggggggaggtatggggaagtgggaaggagggaaaacatttccttctctcagtacatttcctaaaagtggtgcctgtcagcattcttaaaaaggttattaccttttaaaatcatgacatgacagttgataagcctttgttaaaaagaaattaagcagcagcagcaaggtaagagcgagatcacaggggcacgtgggagaagatgtaaagtggggtgtctttgtgtggggaactgactgatgctactttcagggatgacaatagctgccgaaaagttcgagatggatgaaggtttgttattccatcatgattttgctcccaggtttaatgaaagcaaagctcaggtcaaattctatctggcatgtgtacgtttattaaacacttactaggcaagcagtggaaaccagtttacaccaagctgatcagtggaattgatggagtcctttaaggagcttgcatcaccaccttgcattgaatttgttactaggtagatagataatagaatgttatctagagaaggatggatttggggcttttttgcagacaggcaaccagaaattctcccaactatgtggctgagtttaggatcttaaaggccatcacttaagggggagtctccaaattgtctaagccagtctgtgtctccaatgttaatgttgctaattagcaagtcagatgtcaccagggaaagttacacagacttttatcatgcaagtattcagacctttgacatggaaaacaagagttaactgtctttgcaagttctgttacacaatgtttaaacaaacagtgacaatgaatcacttaagcctaaagttgcaccataatgttttcctctttaagtctttttttataaaacatgatctgcctccccagggcaaggcttacaaaaaattagcttataactgatttgtttctctccacggaaatctttagtaaaaggcgaaagatttattcgatctgaagagaaaccagtgtaatgctacaaattagttcaactcattgttgcagtaaccgcaactcctagtacgccgatggtgcctacagttcgcacaaaaagaattactgcctacagtttgcacaaaaagaattctttaatcttcccatagttagaaatgttgagtcaaaagaaatattcttttaagctttaaataatttactatgtgcagggtactatgggtatgcaaatgagatgttgagtcatcaccttgagattccacaccttgttattcaccgggtgcctttggtgctaccactagggggcgaagtagaggccatgctagctgagttctaaatcccatcctgggttaaccatggaaactcgttttagccctttttgtataatgggacttggagtacgatttgttatctttagcatcatcttattttgaaacaattacacatttacaggaagttgcagcagtagtacagagaggccttgtgtacctctaccgagcttccccagtggggaatctttttttttttttttttaatcccttacttttaattttagattccaggggtacatgtgcaagtttattacctgggtatattgtgtgacgctgaggttgagggtatgaatgatcttgtcacccaggtactgagcacagtacccagtagttagtttttcaggccttaccagtcctccctgccaccccccagcagttcctggtgtctgttgttgctaacaggagaacctgatggt

SEQ ID NO: 35779 - DNA, 689 bp, Homo sapiens
gtgcggagaatataaaatagaattgtgctagtatctctccctagccccctctgcctttactatttgccttctgcattttgtccagataatctacaaggatttgcaagccctatgttctttacagactattttctttttttccttttaaaaggtcaccttggcttcagagctttcaacctactttgaaagcttaccgtattatgaacttttcctcatgtggtgaaataatcttttaaatttcattcttttagagtatattttttactagttttaaggtattcctttctatggctttactgtaatttagttaaccaattctctgttgttgattatttaaaattttgcctcattataaataaggctttagtgaacatatttacataacccttttaaaattcacctgggatgatttcctcagggtaatttcctaggtcaaaggcttttgcaactcattgccaaaccagacttgagggaaggtagtgtcatttttctttgttgacatcagcagtgtttgagagaggtggttggtggtggactgattttttgttaatgcaattgatttctatttagaaggctagacatctcctgccacctgccccacccttctctattttctggattctccttccctgctatcctcttagggtgcttgtgaacattcctttgctcttggacagttacaggctctt

SEQ ID NO: 35780 - DNA, 1709 bp, Homo sapiens
gttgctctaactgtatttgcattacggggcaccccatgtccagtaatactgtgggtcttgcagactcatagaagtactatcttggttatcttagagaagatccagaagaattatctggattgtcaggtaaagactcttgttctcttcccttactttctcccagacaaatggagtctgtgtgctaaactgcctagagctggaggtggagtgacacaaaaactcctgtgggccaccactactgggactgcactgggtcagacctgaagctagcacagtactgggtcttgcccatgacctacaataactactgcctggctaccacctatgtttgctcaaggccctagcgttctataatcagcaggtggcaaaggcagccagacttgtatccttcccttcagggttatgggttcctcctggtcctgggtgggtcctaagatgccatccaggagccaggtcctggagtcagaaaccttaggaatctacttggtacattattctactacagctgagctggcacccaggctgcaatacaaagtccctgccactcttccttctcctttccacaagcagaggagtcttctcccttggctaccaccaccccaggcttgtggcaagtactgcttggctattgccagtgttcattcagggtccaagggctcttcattcagcttgtgatgaatgctgccaagcctgggtccttcctttcaggacagtaggctcccttctagtccaagacaggtacagaaatgtctgagccaaaacctggaactggggaccccaatagcctactcggtgctctactccactgtgggtgagctgataccttggctgcaaaacaaagtcctctttcctcttccctcttcttttttcaagcagaaggagttccccatagctaccacaacagggaatgtgctatgtcatgcctgaagccagcaagtctctgagtcataccaaaagcccacagcaagcactgcctggctaccactgttgattattcagggcctaagggctcttttgtcaacaggtgatttattttgtcaggactgcatccttcccttcaaagcagtgggttcccttttggcccagggtgtgtctagaaatgtctgggaggtaggggttgggatgggggcctcaaaactctgcctggccccctatcttactgtggctgagcacgtatccaaattgcaagacaaagttgtctttactcttctgtctcctcttctcaagcagaagtttggaaggaatctgtcttggagctgtgagctatgctgcctggggttgggggacgggtgatgcaagcactcccttggatgctctggctggtgactcactaggtcacgtgtccccaaaatcaactggcttgaagttgagcaaagtatgaggacttgctcaggaattagtccttgttgcctggactgcctttcaagtttatttatgaccttagagccccttagcccttggggacaagtgttgctggaatctaagttctgaccactggaatggatgcttcccctctgactagggctgttctaagtgtcccctccacaggcactgggctgagttctgcccatctttctgctgtgacagggcagccctgagttccagtgccaagtcccacagtcactgtgatctttctcccccaagtgtacaagttgtcactccccgtggctgctgttggaggatggaggagaggtggcattgcaatttaa

SEQ ID NO: 35781 - DNA, 926 bp, Homo sapiens
acccttgcaatgagcctaacgtaggtgttatcactggccccatttgacagatgaagggattgagacttggagtggttaagtggaagcaacaagactcgaacccagagagttaggttccagatcctgtccttttgccaattagttctaaacctcgtcactagtttaattcattctgaaatttcccctcttccacaaagccttctgtagtaaacaggaagaggaagttccccttccagattcactcaggctttgccgccatcagctccatgaaatttagacaccagctcttgcaggggtggaccgtgcctgggtggggagcattctacagagggcttgctgtgccccttctgagtccccagtcattgatatgtgcaggggatgcaaataacctttaatatttgcaggagcaaaatgcagcgtggaaagtaaaatctaacacaaaataagcaaagcatttgaaagtcaaataaaactgacctttgctttagccactatttgggattatgtgagccatggctggtgactcagaacctgtttgatggatacctaatgatttaattagaaccacaaactgtcagggctggaaaggactgcacaaatcactttgtttaactcctctgtgttaccgatgaggaaactgaggcccagagaagggtaatgatatctttgaggcctcttggccaggaaatactgggagccaattcttctgagtctcagaccatgcattactaagtaaatagaaggcaataaaaacacttactagcaattcgtgctaagaatagtggctaattctcatcacatcaccccaggtggatgctgttattttcattttgcagatgagaaaactaaggctcaaggatatatcagcaagtaagtgaaagaactccagtgttgggaagggccctgatgggcatttcctgctttct

SEQ ID NO: 35782 - DNA, 617 bp, Homo sapiens
aagacaagctctcaaaatgtatttgtgtttaacttccactaactggtgggccaggcattctactaggtggtttatatttgtgacttcatgtgatcttcttaacactttaaggcaaaaacatattccattttgcagatgaggagaatgagcctcagagagttgaacatcttgcccaaggtctcacagccattagctaagcagaacagaattcaagcctatgtctgtcaaatgctaaggcccaggctgttaatcattatctagttctccaaaagtcaataccacaaaggtacatattaaagtcagatttctaaaaaactaaatccatgataatagataatagaaaagacccatcgtgagggaagaaattttaggataaaggggtagtaaatgagtataattcgttagtcctaaatgcttcttgcctcctaggcactatactgtgccctaagaacaagtggtaaacaaggtaaactcaattcttccacttaaggagcttaagaagagagagatagtgaaaaggcagagagagatttaaacaaatacacaaatacaaagcagttcaaaaacacagcaatgcctggaaggaaagtagtcttgctcagagccatccccattca

SEQ ID NO: 35783 - DNA, 3122 bp, Homo sapiens
ccaataccgctcagcatacatctgcatactagaggctcacagttaaatcctcacttatttctacttattcgtcagtgggggggaagaaatcagaaaaagaggaaaagaaaatcataaacagcccccaatgccaggcagcctggcacgcagcagatgccctcaaatctggtgaaggaataaacgcagtttcctactcctttcgccgaatgcaattcagaaaagcattacagagcacaactccttccaggctggaaacgctgccagaaagcagctctcgcttcacctctgccgggggactccgccctctcccccagcgctccaagcggagaccgcaggtcagcaagaactgaaaacgcgtctactgggccaggtctcatgtttatcttatttccccctcactccacagcactcactccccagctattaaaacagagaagaaaaaaaaggaaagaaagatggtaagaataagacagtagggttaggatcggggagaggggcttcagcaaaaaacagttgcatcgctcagccccggaaactcatcccgtcatccccagactctctctcgggaactgggccctacttcagagatccagaaacaaaaattgtagcgtcgagatggttagggccgagtctacttctttcgccggttgggcctcagagccccaaggccgccctgctatactgcgcgactgcaccgcgggccagagcgcgcccctagctcgaggctgccagcggacaccgggaaactgagcggcctgcgggtccagacatctgaggaacgccgcgctcaggcccgtgcctgcagcccggtccgcagagggggggggccgctccccccggtcgcccagtcgggtcgcgccggtcctttctcagggtgaccgcgttccttccgcccagagagggcaaagagtcccgctccctcgtgtgcatctcccgcccgcgctccggagcgccccctaggaagaaagcccgagcggcggccacgcctcggtggcgattttattagcgcttggttggggtggcccggctgcctgcgagcggggtttccccgcccctccccccttcccctccccccaggcggccggaacctccctgcggagcggagtgataccggcggcggcgtagagcgcggtgcggccgaggggcgcccgggactgcgcggggcgggcggcggcggagggaggaggggagagaggcggggccggggcgggttgttgtgaggcgactgcgctactgccggagcggggcggttatggcggctccatattaacagcctcctcctcctccgccgccgccgccgtctcctcctcctcctcctttccctcccgcccgcgctctaagccatctccgccttcaccctgacgcctgcctcttcccctcacctttccccctcccctgttctaccatgcccggcatgatggagaaagggcccgagttactggggaagaaccgatcggccaacggcagcgccaagagcccggcaggcggcggcggcagcggcgcctcgtccaccaacggcgggctgcactactcagagcccgagagcggctgcagcagcgacgacgagcacggtggtagcctcgaactcctccccgccagcccgcctgcccccctccctcttcccctcccccagccccctcccctcgccgctctcccgccctccctcccctcagagcctgggcgctgcggtagcctcgaactcccggtgcagtgcagcagcacccccgcgaccccccgtccctccgccctcgaccaatcctccgcctttgcccccccccgctccccgcccccaatccgctgccatctcccggagtgccccgagttgatatcttcccatccacccgccgcttctttcctccatctagcgatttttattttttaagtgtctcttcctttttctttcttttcttcttttttattttttatatatattttttggcattgctttgcagatgttgggatgagagtcggagccgaataccaagctcggatccctgaatttgatccaggtagatatatttgcttaagcaaaatctcatatcccctttcctgggcttggtttggggtggacgggctaggagtccgggcatggggccgggaggggatgcggggttgggctgggcaggcatccgtggcggggaggctgtcaggcttggccgggctgtgacactgggcgtgtgggcagatgtgtgcactgcaaggttaacatggttcccttcggaggccacttgcccgctgggggcatcgccttcctagcccttgagcctggggcagggtcggggtgagcagagggagacggcccttggcggagtccagggtccgaggccgcgggctggaggagcaggcgtgcggactgtatggacgaaccgtgcaaatgtcaattgccacctcgctcgccccggcgccgagggccgcgctctgtcgggcgggtggcagaggccagggcggctgtcaccggccggggaagccaagggcgagccctgccgacctgtgcgcagccgggattgtctcttttctttctttttggctaggtggtgtagctttggtcgcggcagctctgcggagtgcaggagccgcggagagaaaggggtgggggaagggggtggggagacgccagcggcaggcacacctcgctcgccagccagctctgggaagttagaccacaggacagtggctgcagctgccaaggagacattttctccccgaccagccaggttccagcgtcctctgccaacccagcttgcgggctccctgtctacttttctccaaacaggctccccggcggtcacgagatttcagcctgtgcagggattgggcgagagttccgcatatggaggcgcccttgctggagcctctcggagtggagcgcgtttccttctccccaccctgcctgagacccttctcagttaaggctttggacagactttgaaagggacccacctttttttttcctccttacagtttgtcaatttttgcccagtgcccataatattgcgtttgtgtcagacattggatttctatgttagatattaaagagcttacttgtattttcttggagagaaacaatgtttaattattaggatacagaggcgtgtttttttgttcctcctctccccattaag

SEQ ID NO: 35784 - DNA, 1112 bp, Homo sapiens
catgataaatttatgtgcaggtctgattgtacagtttaaagtttggtctacattttgtttcttcctggctgagcacctctgtgttgagtgctaatagcttttttttttaatctaggttaactactgtgagatagtggggccccaatgaaacatataagcataccttttaaaatgttgccaaatagtcttcagagaacatacttaatacaaaaatgctgtgcagacatcattccgattgatcgactgatggatgactccgcagtttggattagagagagtaagaattagccagccagcatgatttgaaaatgtcacaggagggtgccagcaggatgatgtcagcccttgctttggcctatgcagcatagcacagtcatttcataaagaattgatactatgacacagggtgctggatgtgcattgggcacatctgtaattatagaactgagtttctgaatgagtcaaaacaaggtttagttagttcataatgttcaaaaatagctgtttttaaattagactctgctaatttaaattattgtttaaaaaattagcattttcagtggctgctttatattcctttagagcaatggcctacatgtttaatatagtcattttgaataggcattgctttttattcatgtaaagtctgtatttccctctatcttagtagcctggtaaaaactgaaccctgatttccagtattcagttgtttaaagattagtatattaactctgtatttttaagaaattttcccagtgaaagaattttctgaaaagaatgtcataggaaaatctaggctaatacttctctacacagcactcagtatttgttattgctctacagagtaatttaagttatagagtccattgaatcttgtggctgggttggatattacccaaagctgcattcaaaggaagagcagtggtaatatctaaatatatagtttgaactatatatgtggacataacttacaaatattaaaataaaaggagtagtcatatatataaccaaacatttcctctgtactgaggtatattcagtattatactatgtacatttaaaaagtaaccctgtaagttacactaatgcaggagtttgtatggaagtattgc

SEQ ID NO: 35785 - DNA, 1242 bp, Homo sapiens
ctgcagagcttgctgagcgtgtctaaccttgggtacgtcactccacgttgctgctctggccctcagacagctcatctgtaaaatggggatgaccaggcctacttcaccagcttgttttgaggaccacaggagatgtttgggaagccaaccggggagctctacaactctcagagattgctggtgttaggccaacagcaagaggagggctggcaaatttgtgctaccctgaaggaaagtccaggaaggactgatttgagccagatctcaagcaaggccttgagcaaatgggtcaacacaggagaggacgggctgagccttgttgtgcctgacggaagagcaagacggccacaattcagacgcacgtgagggaaatcagatgactggacttgtagatactaacggttctgaagcgggtaggttagctttccaaccgcctggatgacggtctcagcctcctcccgaccccttcctgcgcgtccgctcttcccctgcgcccgcccgcgcccctccgcccgcgccccggccccgccccaggcctcgcctccgcttcgccgccgccgccggccgcagccaggagcagcagccgcgcctgcagaccggcctcgcggagcccgcgcgccgagccccacgtgagtccggcgggtcgccgccctgggcaccctcgcgacggaagggccggggtggggacaccgacgagcgcttttcatctcgtcccagttactttgaaaccgaaagcgcctgctggcgtccggccggtccccgaccggcggggagggcgcgaggcggcggctgggccgggggaggcggaggggcccgggcttgcgggagaccggcggggcaggtgaccgccgacggcccggggacagcgggagcggtgcggagcgggtttcttagccggggagaggtgtggcgagggcggagactgggggtccaaagctggggagctggtccagagggcggctgtggaccggaggggccaggttccgtcggggtgcactggcggggaggactttcaggcacgtcccgcacatccgcactgcaaaccaggccctggcccccttccgcacccgaaggcaccctctccacctttgcagggctttccaatcaaagcaactccagaatgaaacttcaggattgcaaggaatggaagcctctaccagctgttcgtttgcgcgtcttcctttagaaagcagctacccccctcccccagaaggcgagctctaaggaaccttgacgcaaacc

SEQ ID NO: 35786 - DNA, 1535 bp, Homo sapiens
acaataacaaaaatagctatgaaaaaatgttaaatgcgcacaacaccaagcgaactgcaacgctttacctgaaaaacaaagggagaactgaattaatttaaaaaaatagccacattgctggacgggaattctcaatattgtactagtatccaatctcggcaaatctacaaaaatatggaatcccaaacaaatccctggaaatctttgccatttgggcgccaatctactaaagaaatcggccccagggtgtgaggtttctcacatgtgcgtgaaaacgcttcgagaggggtgcagccgcggacacaaaaaccgtggcttgagtccccgcgcccctcccctcccctcccctccctccctccagtccagcagctcttgcctaaggctcccgcgaccggaagagtcgcttccgctcccgccccgctctgtggcgtaggccggacatttctagtcgactgttgcgcgtgcgcgcgctgtgacgttccctacgcggtcgggcgttgggtttcgcggcgctcgccgcactggttgttcagcaccttcggtccggttgaggttgtcaagtcggaccaaacaggttgtttctctgcagtttccagtaagtgaccgttccagccggggctgtggctagagtgtgaaggcaaaccggtagaagccgcgccgccattttcttcccacctcactctttcctcaatctcccttcggtcactccgaggggactgttggtagcccccctctgcccggtcccccgctaatgaggccgctcccaagctctgagtttccccaaaagatgtgtcctttgtcatgaaagctctcgtagtatttaagtgctaatactcgacggccgccgacttctcagatgcaccctggagggtgtgctcttggcctgacacttattagcccttccgcttcctacagttgtgatgggccctcagatactcaccaggaaaatgtgatgcccgcaccaccacttcttactccaactttctttgtaattatgtcctctgtttcagaatcctactgccgcggaacaaaaatgtaccaaggaccattccacttaacgtccctcccttccttctcaaacccttaagagtgccttaagagtaaggtactgacctaagtgctttacatgcattttatttaatcttcccacgcagtccttaagtaggcagacatgagaaaattgaggcacagaaaagtttaataatttgctcaaggcaacataggttggatgtggtagggctgaaatttggatttattgtgtagcttactcaatctggtgttgttatcattcattcctttctctttcccaaatactgagtattcctttttttcttagttgcttctacagaggaatttttttccttaatgctgtttagagggttcttcttgagaaatttgggttctgtctgaaaacccttttctcagagctctccttacacagacgcttaagtgttgtttttccaaatctaagctctaaacttaataatattttgcatatccaaaatgtgctcatgcttccttaaaaaagtacccct

SEQ ID NO: 35787 - DNA, 580 bp, Homo sapiens
ccaggagctttatatgccttgatatcagttaatttccacaaccacagtgtcgtgcaaatattgttactcaaatgagaaaactgagactcagcaaagttaagtagctgtgccaaggtcacactgtttgtagatgtcacagcaggtgctccatgtctgcagctgagagaggatgtgacggcgcaagtctcttgtcctgccaaaggctatcctgggcaaacctgcaaagggaggctgcttccggctggagaagaatggtgcactcagagcgcactctgctccggtacaggcgctgatccatggggatcccacagccagcacaatggactctctggctgagccgcccgtgaccaccagggggccttcacgggacctctgcaaataagaacaaacttgattcccaggaccggctcgcatctgaagatggctttaagcccaacggtcaaacatgtcacttttacctgttctgaggacaagggcagcacctgcaccctcccactcacctttactagctccagctgcctccctcccagttctaccacttggcacaagaagcaggaaagagttccctacaacccactcc

SEQ ID NO: 35788 - DNA, 1621 bp, Homo sapiens
ccggcccagaatattttttattctcatttttgtaaataagtttcttccctggtctttccaccggagcctgtgaatcgcagcctcgtggcaccaccacagttggcttctcaagtcgggaggctgactccttgaaccgggcgcctcacttcacgattgctttcagctcaaaggagcattttacaacaggaaccattatccctggtagcttgacgtccagccctgacacgattttctgattgactaaaattagggtaatgagttatgagggcagagaatggagctgcgatccctgtaggcgggggcagtaccgcctcttatttcctctgcccaggtggttaagttggtagattggggtgtaggtgtctctggagttgggcagcaatgggtggggtagtagaaggacacctggtctgtgtccggggctgggttcgaatccccactctgcctgtgagctgagagcccatgggcacatcacctgagctttctgcgtttatctgtaaaatgggcaagaggcaatcagtcatttatatgaaagcggcctgcagtgcctggcaccgaggcgggcacggatgggcatttggtaaggcagggaggaggagcgcggcgcctggaggctcccggggcaggggagaagggcatcgagaacgggggcggcgtgcggggtgggaagaggagagagttcacggcttgctccttcccctgcccccagccgcctcagcccaggcctgagtctctccccgtctgggcctctgcttcctgcaggcacagccagggccaagacgcgcccctgggcctccctccccttcgacgtctccacccggtatggaacattaatcattaaccgtcctgtggccaggcccagcggggcgcccgcttcagctctcccggtgccacctagctgagtcaccgcggtctgggcagctccccgcagccaggacctccctccgggccgagggtcgcggggttcgagccgcggcgaggtcttgggcttcccaggggccgctcctcggtgcgccgccgcccacaatcagcagggggcgcccgtcccgaccgcgggaagccggcggggccaccgagcggcgggctggcctggcggggcggtgtcagggcggcaaggcggcgcctccccaaagccgtaaaccttcccgcccggctgactacgccggcccagccacgcacgcgcaccccgcatgccccgtggcctgtgaggttattcaagaagccaaggtcgggagtggggaaggtcagcctctagcccggcactgtctggaaaagatcgaaccaattaattgactgtaagaagcatgtaaccaatacaatggaaggcattgctacccttcctccaccaggttcaggacctcatgcccaaggaacggcgcgcaggaattggtagtaggttgtggagggtcaggggctctcccagcatcctgaggctgtctcctgtgaaggccactccagaggttaaagctttcccgggtgccaggagagctctcctaattcagccgtagggatcaccagtaaagatgctcaaaaatcccagcatctcccacttgcaacccacaggggattctattctactctctctaattccccatggccacatagttgaggtcacttaaca

SEQ ID NO: 35789 - DNA, 682 bp, Homo sapiens
attctcctgcctcagcctccccagtggctgggattacaggcatgcaccaccacgcctggctaatttcgtattttttgtatagatggggtttctccatgttggtcaggctggtcttgaactcccgacctcaggtgatccgccctcctcagcctcccaaaatgctgggattacaggcatgagccaccgtgaccggccggtcacttaacatttaacctaacacccacctgccagcaggtcaaaggttattgcctatgactggccaggtttcacttcggctgccgtggtgctcctgatgtgactgcactgggcagacggacctgaagtactgtccctgtattaagtggagtggccccgggaatgaagccataacagcagccagagacagcagcccagattggctgtcttgacagcccagagccagtgtggtcaaatctgcccccatgatgcctgtgtccttgctattcccgccccagtcatccccctctgaaccccaaggagtagctgtgagggtgcaggtgggtgaaagagacaggcagtggacattagtgcaagaactagggtcatgggttctgagtccagctggtcactgcatacctacgtgatgacacataatttctctgagtctcagtttccccagctgtaaacagcactaataggaactgtgtggactacctcaaagggt

SEQ ID NO: 35790 - DNA, 705 bp, Homo sapiens
tcttgttctgatcctggctgtctctctcctagtcaggtcgtggactagcctgagaccccagagccctattcttgcatgggaaaccctaggcccctcatccttgttttaagaaaaggagagagaactgcatgtgccgctgtagctcatggggaggcaggttgagggtcaaaggcatagactgtgaaacaaaggtgtttcttgccacggactttccaggacacttcccccaaggttttccctttgcaaaatgactcctccccttctctgctgctagcctgctctctcctgaactttctgctctctgcactctttccaaaaatgtgttatcaggtgtccatgcagtgtttgcttatttcacaaatgacccagttcttgatgatgtcccaggtcccactgacctttcttggctagagtaagtagcccatgaaataatatcttcctggaactgtttgacacctagtccctctcctgggtcctggccaagagctaagaaccattcatccagggctcattattaatgacctattacatgctagacactggagatgcaaaatgaacaaaacccaatcccagcccttgagaaacctttgtgccaatgattttgaagtgtgaactggaccatcattaccaccctcttcaccatattaaaacctcttttctgcacacttggcttttgagttgtctcaaagatcattggccgggcat

SEQ ID NO: 35791 - DNA, 1090 bp, Homo sapiens
tcagtgactcttagaaagcacaaacattgctggttgtgctcaaaaagctccatttaaatccattcatgattggttatcatgaaatgaccttgaaaattttttttcaaacgcccggtttaaaagattacattaatcgtttgcgtttagcatgtaattattaggtgtcaacatccttaaaaatacttatatattttgtaaataaacttgcagctcaatgtttttataccaatctttcaaagaaagtaatgctggtgaacatgtccaagtttcagattaactttggtagaataaaaagttgaaattctcaaaataatttagaaatgtagtctcaatattatcatacaataacctaaatatttagtttggtaaactttcttccttgctcttactaccccatttgccccattgtgtgtaaactgtagttcaatttgttaattatcttactgtttaatagccagcaatacagaatacaggatagtaactgatcttatttcctactaatagccatgagtcactcttaaaatatgctgccattatgctatgtaatgatctcaaagggcaatatcacctaaaatgtcaaaggaaacaaactgttgatgattttaaagttctatcaattataattctaataaagtataacactgggggaaaagaaaagcagagaaattccagtaacaattttatttatccccctaatttttatcatgggaaaaatccagaaatcaaatgtcattatgttatataaggtttaacttactttaaacaaaaatgtaacatagtgttaaaactggctttccaaaacagtcacagcatagctgtactctgtactaataatcacaaaattgtaatatagaactctgttatgcagtcccattatgttcttacaaaaatagaattaaactgtgtgaccagacaaggacttcaattacactacttggcaaacttagaatttcagtggagtctttttcctcttgcagtttaaagcaaaagtcaaatatcacatctttttcaagactcacaaagatgattcaggttgtttgtttggcatgtttttaatctctatcacaacagcagggatgttttcagcttt

SEQ ID NO: 35792 - DNA, 4711 bp, Homo sapiens
gatgcatgagtactattaattatttctacaaatgctttgcaggggtcagggaaacatggattcacacaaaaatccccttcagaacaacctttccaagaaaagtaaaagactaaggcatttactactacaatcactgaacccaaggcatctccaaggacatgcagaaaaactccacgcatgttaagttgtccagccctatcttcttccagttccatatggtcaggttctctgacaagatttccattcacttgtacttccactgtatcaccacttctggggttttctgggtctacaaagaaataaaaattttatatcaaatacatttaaagtgtttatataaacatccttgtctaattctttttaagtggtgatgaaggtgaaaattttttcagaaagtacaattaaaaaaatgtgctcagagcaatttaatataaattgacattctgggaatgagccaggacataatagccagggctaaattaagtcattgtgatactgcttcttcaccctcctaaccactctcctgcctcctcctctccaaaatagtgtatattttctatgggggtggagtcctgcaaccattctgctatactttatggtatatacaaaggaaaacataaaattgaatgctaacaccaaaattaaatgcagctaggaataagtctactaatacaaaatacctgatttgacactcgggcactctctagtcactctttgtcactgaggccaattgcttgagaataaaaccaattttaacttttaaacttttattatgaatataaaagtttcttggtaggggggtttaaaaactgacaaatcaacaataaaaatcaataatcacagagattattagaaaaattgaaactaaatgactacctgccctactaacttttaaatcaaaagtattgatcttttcaaaaagtattgatcaaaagtattcaaaaagataaaaagtattgatcttttgaaattacacaccagagaaacttaattttctttggaataacaccttgccgagtggagtgagaggaaaaccaattacttattaaacctttccaatgtacaacttgaatttcactaacttcatattctgcactcgaaaaggaaaattatgtagcataatttataatgatacaaggtaaataaacgtaagtgaaggaaataagaccaaattgttaagcaccattgagcttgggtagtaggacactggttgagtcatttccatctcctttctttcaacatttattttcaaatttccttcaagagcacttaatgttaaatataaaaagcatccactaaaaatataagatgaataaattaccatcacttttagttcagtacgattatgaaaagtcctgggaaaatgttaaacatgcccagacaggtcctaaatctatgatttccaggattagggatcaattagctgaagcatacactgctgttcataaaagaaacctttaaccagggtttacacgctctgaatgcatattatgaaacggagttcaatgggcataagaactactttggcagagcaaggtttccagcacccaactactggggacgaattggggattctctccgtttcccaagagggccaaggaattgaattgggaagcatttctgacgctgttataaccataaccagacaagtctccagcaaagttgctgcagcctgtaaagacagccaagtgcgggtgtggactgcagcgggatgatgatcacctcctgaccctttttcttagggtctgacccacagcccccacctacaaatatgccagacgcgtcgccggctccttgcacccgactgagggggttctgatttcctggagcagcagcggggcgtgtgcaggacggggagggagcaggcaggggcggcgcggcgcaggcccgctcgggcagcagggggcgtgcgggccaccccgccgaaggccaggcgaggctctgggcaccccaaacccaaccacctgcggcagcgactttcccggctcacctgcggggtccaatttcagcccgttggagttgctggtattggccaccagggtgttggtctcctcctggtcgggaccctgctcgcccggggccacgttgatgtcgctgctcccggggcgggtgctcttaacgcgaggccccttggggaggccgtggccgtggccgtgacccccgtgcgagtggccgtggccggagtcctggctgaagccgctgtgatggtggaagaggcagagccccagcacgttgaccagcagcccggccacgccgaccccaaggaccaccagcggctgctgcatctcgtgcggctcgatgaagcgctcgatggcctccagcaggatggcgaaacagaggccagtcaggaagatggcgttcaccagagcccccattacctcggctcggatccagccgaacgtgttcttctgggtggcgtgggtccgccgggcgaagcgctcggccaccagcgccaccaccagcgccagcacgtccgacagcatgtggaaggagtcggagagcatcgccagcgacgaggtcacccggctcaccaccacctccagcaccatgaacatgaaggtcagcgccagcatgcacagcagccggccccggttccgaccccaacaccccatggctgcggctgcggggcccgccgagcccggcccggagactggtgcagcggcggcgttggcgggacgcggagggtcggcgaccgcgacacggaggagcgcccgagtcgggccgttcgggaaaccgctgaggggcccccgcggccgcacggggacaagcccgggtcaagccgccgagccccgcgcctgtgggcgttctccgccagccggcggcgccgcgccgcgcagctcctcaggcgtccgtcctcagagccggcgccgaggcccggctcagcctcagcagcccccacacccaggcggcggcggtggcggggagctgggctcccggagccggggtaccaagagccgcagccggagcaggagcaggagggcggcgggcgagggcggcaggagagggcgacgggcagcttcgcgccgagaaagctccgagcatctgagggctctgcttgctggtctcctctgcggcggctggactgaggagcggatggctgaggagctagagaggcggcggccacggcagctgcactcggcccggtctcgggcgccttcttcgcccccccgcctttgcagacggtttacaaaaaaactttgctttgcactcggaacccccgttttcacacggacccgagcgtgacaaggccttgccgccccgcccaccaggcccggcacgcttccccattggtcaggaccccctcacgacagcctcggcgtcccgcccagccacgctcactattggatggagcctcggaggggcgggaagggggcggggtcgcggctccaacagataggggcggggccttttcctcccggagccgggcgtgggccggggggccgtggccgggtgcagcggcgggcgaattgggggcgcgggccgcgtgcagcgggagggggaggggctggccgggtcccctcgggtgtggcggagtcctggcctgcggaccatcgcaactcccagcacacctgcgggggccgggctgcaaagtctgcaaacagactttgatcctccgagcccagtccacgtgggggcgggccgcgcggcggctgtgtgacagctcggcggcgggggaggggccggaggggagcccctgagcgcggggccctcgagtactcggtcctgtcggaggaggccgacagacgcataaacaagtgcgactgtaacttgggactctgctggacgccgagctgaggagttagtcctcccgaaggtctgctaggggcgtggaccgaatctttgtacatgttttgggaaagccagtttctcctatcaccatcaacccctggagaccttgtgtgaactcaggtgtctgtcactgattatctaaggacagttcagggtacagacttcaggcaggagaaacctgggctctgctccttgccttgtcaatagccagctgtgtggctttgagcaagtcacctaatctctctagacctgtttccccatctataaaggactggacaaatgcaactctgaagatccccgtctgactccaaaattctaaggctctatgatttaacatttatttatagactacacacggtggaatcttgtgctggttgctatggggaggtggaggggcagtaagaatacaaaggaacgagtttctgtccaggtggaggtaaaatataaacacgacattttaaaattacgatggaatactcttgataaattgtgctattttagactgaatacataagcactgtgttgtgggtggagatgagttgatctggaaaggaacagcttgcccatctaaggtggggtggtggctggaatcagagtggcttaagctggacctgaaaggcctcaccacagcccctgcgcagcagaaggacctccccacccactgccctagattactactggacaaatgcagtgccagctattgcctggagatgtgtatacaaggcttgtttggagctgttattttgcattgttttggtattcttgtaattcctatgaaatttttttcacttgtatgtagtgtgtttctagtctccccatccagactggagagctggatcctcaccttctgtttctgttttgctggaatataaagaatggaggaaaattttcaagacattattaaggaaaaaatgatagaatt

SEQ ID NO: 35793 - DNA, 712 bp, Homo sapiens
gtctctcttctccggagagggtggatcaaagaaatgcagagtataaaagagccaaaaattcagaaacgtctgcctttgcctgctgcagccccccacagagcctctccaagggtattgttcaagccttctcaggagccaactcttaaatagaacaagcaatagagaaacactgtctctccattaaacactagttgggaaggtagaaagggcaacaacaagagattttggttagatttaaggaagaactgtgaggaagggagaacttgaagcaagaggttggagtcattgtgaagcctttgcccccagttgttagtcttggacggtttcattgtccacctgcagtgaagcaaatgaaccaaatgacctcttgaaatccctttcagctacagtgtcctttgattctagaatcccagcaagtttcccttctgctctggttgtactctgaagtccatgtgaatgaccctggctggcctttaatggctgggtccctagaatttctcaactgtaaaacacaggtggctgtaacgggtgacaaatccaggtttccaggaagctggaagacttgcagttgccaggtatctgctacatagcccggcacttttgagatggttgatgatggtatgtagctcagctaatcaacataggcccagtgtagagagattgagcagaagttctccagagtagccaaggatgtttttctccaggagaatgc

SEQ ID NO: 35794 - DNA, 814 bp, Homo sapiens
ctcctgcctcagcctcccaaagtgctgggattacaggcatgagctacagtgcccgacctacttcttctttcaaaatactttattgtcctccctttctttggtttctcattccagttccttagtttcagtcctcattgcctctcccctgggttctctaatcaccccactggtttgccagccttttttctactttcatccaatctatggtcagactaatcttcctaaaacaccaccaggaagaactttcttcccagatctaaaaaccttccaatgtcacctggctgcctgtagaacaaagtccaaacactttggctggttattcaggaatgtcttcaactgtcactggcattgttacttaggttctccatatctgtggcctgcgtggcctttcctaatgggagttccccagccacatgcccagggtatgattttacccaccccctgccttaggagtggggctcaaatggcttaagcccaccaacatagccccatcaccctggccctagctactggctgaagaaaagacactgagctagatccaagccagccagcatgttctccaggccacagtcattggctcgggggaccacttgtgagccctgctgacccaccagagcaaacctcaggacttgtgctggtgaggctgggcatagaggctctttcttctcctggacatgagtggagaagcttacagtccaaggagctgctgccaaccatcgtggttctcaagaatagctgcaaacagggcaattggcctaaaaacaattttctgaaagccaattcattgaaagccaatttctgaatcaatttgaaa

SEQ ID NO: 35795 - DNA, 846 bp, Homo sapiens
atatatatatatatatatatgtttattgactgttttaaaaaagcatattccttaaatcatgtttttggcaaatttgtcatttggcacattggcttcaagccagggaggtggagtcaggacgaagccttcggaagaagagaggaaagacacaaatgcaaggtccttggtgtggctttgaactctggattggccttgactgaagcccgccacacctcctgacttttccaaaacatgagtcagtccattcctgttagagtttgacccaggtttgtttgggtttcctgttactggcaagtgaaagcatcctcacaatgtatttttctgaatatttccaaattctgatcttccaacacttggctccaaccaaatcagtctactcaccttgccccaggtcctcttcatgcttttccatagcgtgatcgttctcttctgctccttccttcagcccctctgcctgtttggcatccccctggctttccagacaggagcctctccctgttcctggtgcaggcccggtaggctgctactgccctccatgccccctgcagcccccaacaactcctgcggccctccatgccccctgccttctctgcatagctgtccagcttctttggtcactgggatcaaaaactcactgagttccttcagaaggccagtgggaacaaaggcagctccccaatggctccttcctgcctttcatcaaaggccttctggtggcccccacatgctgttctatgctctctctgtgtgcctgctcttgtcccagctctgcggacaggcagcctcttcaccgttgctgttcccttgtgacggctgttacccccacttctacctcaggatgtcctt

SEQ ID NO: 35796 - DNA, 682 bp, Homo sapiens
cagaagtgacagaatggaaactccagcactctctgggcaccagtcagtgtccagcactgttacttcagggtctgtgaggagagtgctggtggcgtgagagtgagaatgaggggtagggcagcaggcttgtagtcaaactgccttagagaaagacaccatgagcgtcccaggaagaggctattaataggcctccctgaacatgctcagcggtcctgggctggggctgtgagagcatgagtcagcagatggaagggctgatggtgagcccaggacacagagccagctccccacaggggaagtggaggctgtgagactgcacttttgagcaaccctggtctcgtgccgccccaccctcttttgagtatgtaatctgtttggatggtatattaccagtgttgtaaattccaattctggagccagaattttttttttttttttttttttaagagacagagtttcactctgtcacccaggctggaatgcagtggtgcaatcctggctcactgcagcctcaacctcctgggctcaagcaatcctcccacctcagcctcccaaatagctgggactacaggcacgtgccactatgcctggctaattttgaagccagaatttaaagcagcaaaaaatccagaaaatcctttccccccacttaccctctcttactttctcttcattgacaaag

SEQ ID NO: 35797 - DNA, 1628 bp, Homo sapiens
tacagctctacaaccacattctcgcccaagctccacacagtcccccggggccttgctcagaaaggccactgccaagcaacgcatctaagcgcagtgtgcttttgaggcttggaaattcatggtggcagctctgccacccgcagccaggctggtggctgccgaggcctagaaaggacagggcatccaccaggctaggatgggaaggctgtgagtaggggtgagccaggagtcaaggttggaggagctgctccaggctgcggtgggatcaaagctaccatagccccccgacatccccgacctggctgctggtcagtagaggctaaaggaggctgcccgacatcgccttcctgttcctcctcctatggaattcccctcggcaagggccaccaacagcacagccaccccgtgcagggggcactgccagacaaaagcgctaatggctgcaagcagaagttgctgccagtggagtcttgtgccaagataggtactggcagccgaggtacccttgggccacaccctgtgcagtggggattgtgggtataccatcccaagctgtgagttttctgtggttttccctaagaaaccacaggctctgttacaggcctgggattttttcccctcctgctgcagagtcatgcgtcagagggggttctctgaaagccatctctcccaccccacccagagggagccatgtggcctggtcccggaggaagacagtgagggggcaggcttcgtcgggctgtgctccgaggcacgggcctgtatctgtggctggacaggagagaaggtctccgctggcagctcactcagccccgcagctcctctctccccacatgggaaatgcagccaaggccacaggcctgtgcctggctggagaacgctcagtgttggcagcatgcttgagaagcttgggctgttcccctcacctctgtcttgggaagcttccaggggaagctgtctctgggggaagggctccacagactgtgcagttgggttcagaaggtgcagagctcagccactgggagctggtgtctcagcccagccacttcctacgtgtgaaacttgggtgagccacctggcctcatcaggtcccagctttgtcagctgtggattggggaatgtcagcctgcacggattaactaaaaccatacctataaagcagcccttagtgccttggcagcacatagggaggggcaggaggagggagatgaagagatgaactcagacaggtcaggaggtcagtgggtggagactagagccagaaggagaagcaggagagaccgcgagcaggagaatgcaagagctgggagatgcggagcacacgggaagcgaggcagatgggacgatctttcacggcagtcatcattcattcattcactcatttaacacatatgtattgaatgccagctgtgcagcaggccttctggacacttgagtgaatgaggtagtgcccctgcccttggagccaagggctctgtgatccactggacccatagaagatgggtagctcttacttctgggtccctttcccacctacacacatatctccaggggagacttttcctctggcatcaataaatggaaaactatttcactaaaaaactgtcattacatcaacctctccagtg

SEQ ID NO: 35798 - DNA, 1321 bp, Homo sapiens
ttgttttcttctgtaatttttgaaactgggcaacttctcggaagatgcatcatctaggcggctcatagctgtaagagacctaaacctcaattcaacaatgaagaaactcattgcttcacagatccacagatccacaaatccaaaggttcgtggattgccaccttcaaagcacctcagtccagtggcccagcgatccatgcagccgtgttctccttcaagccttgcttcatgcacaagctggctcatctcagaggagcagaattaaaattaaaaacagaattagacagaatttaggctgcagtgaccagcctaaaaaggtggaggtgatgcccatgtccatcgatagacgaatgtataaacaacatgtgatgtatatggccaggtgtggtggtgtgcgcctgtagtccctgctgctccagaggctgaggcaggaggatcgcttgtgccaggagttcaagaccagcttgggcaacatggtgagaccccatctcaaaaaaacaaagaggttaaatgataaattttatgttttaaatatgttaccgcaattttttttaaaatggctatagtagccacagaattgccaccacatccccctgaagagaaagactctctttcaagggaaaggacacttcttttccagatactactaacaaaccagccctctcattaaggtcacattctctcactcctgaatcatccctgtggccaggaagcatgctctgccctgctgggctcaggcccaggtgcctgccccaatcactgtaacaaaaggcctgtgttgacctttagacccatcaggccaaccccaatggaggagtagagtcggctgggcgcggtggttcacgcctgtaatcccagcactttgggacgccgaggcgggtgaatcacaaggtcaggagttcaagaccagcctggccaacatagtgaaaccccatctctactaaaatacaaaaaatcagctgggtgtggtggcggcctcctgtaatcccagctactcaggaggctgaggcaggagactcacttgaacctgggaggcagaggttgcagtgagccgaaatcacaccactgcactccagcccaggacactgcaagactccgtctcaaaaaaaaaaaaaaaaaaaaaaaaagaggagtagagtcaactgcccctgcactatctgggacaggggctctagggggaggcagaggagcatagggatgggggagtggggcagagtggacacctgcacaaaaaaaggaggcagtgagaaggggcagggacaatggaagctggtggggaagcagagactgtgggccatctgccaacatccgttcttccctc

SEQ ID NO: 35799 - DNA, 1297 bp, Homo sapiens
agtgttttaaattcagttaataaaccacttattccctggaaacagctcctgtcatggcacagcccacttcaggaaaagttgtaccaggcagcctgtgagaacattttcaatagaaatgagtggaccaggaacaaattttattcctactcaatggctgtgttttctttggcagaagctagaccaagtttcacatcacagttgagaggagacgtgcataggaactgcgtcatctggttccacactcgctccagtgatgtttgagccccagcatagatcagcatgccaggaagcagcccaccggacccacccctgatcatggcactggacattgttttccgtgcttttctcaggctggtttctgcctgtcccaaccctggccatggctgacaaggggcccagggacactggagcagagagacctgctggtccttggggtttcttgcaaggtaggactctacatcctcccttgggaactaattgatctgtcagtaaaatgtaaacttctgactccatgggtctgtgaatcagctgcctctaaagggaaatatcccaggagtgatgaaaacttgaagatcgaggattggatataagctcagaggtgaaggagggaaattcctcgggtcaactttagcggactgatccacggggtctgccaagagacaggagctcgagggttaaacccaagcactcgggagtcagatgtatgaatctgaatctcagcctctcggcttgctgtgtaatctcaggcaagtgacttttctgttctgtaaatcaggctgatagcgggggaacctctctcacagggctgctacaaagattgcatgagattttgctcaacaaatattagctgttggctccagagtttaatacctctgatcactacaagctttgaaggcaagataaaataacttcaacatgtgagtaccaggaggccttggtgaaaagcaagcctgccgggagataatgcctggctgggtcaggattcttggtgcttattgaccactgggcacttcagagcagaactcatcaaagcctctgtattgggacaagggctagggtggaggggaggattgggaagggagaggggagactgtccttctttctactaaaagttactggcaagagaatgggaattaaccaggcctggaaaagtaatttaggtattagaactttgaactctttttttaaaaacaaaagacaaaaacagctttattgggatataattgacaaataaaaattgtgtatatttaaggtgtacaacttgatgttttgatatatgtacacattatgacatgat

SEQ ID NO: 35800 - DNA, 1174 bp, Homo sapiens
gaaatgtgagaaaatgcatgtctgcagctattacagggtctgacctggagtaaaagctccatgaatgccggctgtcctgtggcctccccgacacgtcccccctgctggaaggctttcctcaccatctccctcataaacaaagccaaggtcaaggctgcagcccatggtgagagcagggagagcttgtgggaagttcactgccccgccatgcccctgaatggtgagcctctttctttgatgtgggctaacatccgtggactcagaggcccagaaagtgcgagacacgccaaggctcggcccctgggcgtctgtttcctgagcagcctgggacacaggttgccctggtgagatgacccacagtcagcaccctaggccttggcattatgcgggcagctggtatgagccctgcctcaccctgcacagaatttgccagcttcacagcattcctgccagcccagcctgctcccagacccagccaagtttcactcaggcagcctgcattcccattttgtgcgccttgtcctgcccagaggcaccggctgctgagggaagcatgaggtccttggaaaggagctgccccagcaggccggtgtgctgggagccctcagcctcttctacactcccgccacccccagccctgcatcctgccccaagctggctgcctgccagcttctcgggtctcatttacttactgctgtttgttttggaggcttctgggaagcaaggctccacctgaggaatctttggctgaggggacttgtgacacctgagactttgaactttcaagaaaacataaggctccgctggccacttccccgggtgtggggacaaatgtcactgcagtgccgtgggcttgcaccaggcccctcctcctctccaaagcagctaaggcagagctcatggacagggacctgcctgaagcagccgccatctgggggttgacggctgcctggtctcttgctctatctggaaaaagaaaccataagcatttcatatttatcttataattcatttggatttgttttcatataaaagtaatgtctaagggaggattagtcaagtaaattgtgcacatgttcttgtgatgacctattagcagatgccacagatttaccctagtttgagaaacaaaggtgagaagtatcttttgtagaccaggtgcggtggctcacac

SEQ ID NO: 35801 - DNA, 3952 bp, Homo sapiens
attttgtcacattaaaagtaaatcttagatatttttattagaattgcataagacttatgcatttgggcaaatggcatttgacagtgttgagttctcggtgtggtgtgttttgccttttatttaatgtccctcagtgtcattcagcagattttttgttatgagttttgcacagttcctgtatacttcattccttggctttgctattgtaagtgggaactttttgcattatattttgtggccagttcaccctagtgtatagaaagctatgaaatgggtactagtgtttctcgtttacagatgaaggagtagaaattaagggcacagtgccaggtgagactctagttgaggacagggctattcagaggtgcggccgtgtctgaacctgcctcagtcataaccactctcttagaaggaagctgcccgtgctctccaaagacagtgtctggtcagacccagcttggtgtctgctgcctggcttggtgctcctggcttggtgtctgctgcctggacagttccagattcaagggcagccaaacatttctgggcagcaagctccctggcctgatcaagctctgggccatggctgtgccccgcaaaccccagaacccaataaaaggagtccccattaggtgggcatggctgcaggtgactgttgcacagtaggactttggaccacttatttgaaagctgctgttcttactgttcagcatcagagagaatttgatgaactctatggactctcagacaaatgccccaaatgctgttgacactttcagaggatgtatggacaaccccaaaacacacccaaggatcttgggttaaattaatattcctgtgttaaaacaatggcccagacagggattcctccaggtgggaggtgcccagggatggggtcacgttcagaggacagaagtccttgtgtctgtgtgactttggatgggtcacttccctctctgaatcgttattttctccatgagaacaatatctacccagtctagttatggtgttgtttgggaatcgtctggtatcctgtcttgtgacagtgctttgaaaactgcagttaagtaacacaaaggtaagaaatgactcatgccaggaaagggaatagcatgaggcccagctctgatatgcaaaggcctctcagattcttagagaatattattggctctcacaccaccagctgctcccagtgaacttggccttcgcccccaggaatggctgataaaggccttcactgctttccacttctgagctgatgggactgttttagctgacccagctaaaaccatgattaagtggctggatttggaaaagaagtgttggggctcatggttcacagatacgtttctgggttgttataaaaattaataattaggctgggtgcggtggctcactcctgtaatcccagcactttgggaggccgaagcaggaggaccacttgaggtcaggagctcaagactagcctggccaacatggcgaaaccctgcctctactaataatacaaaaattagccggatgtggtggctcatgcctgtaatctcagctactcaggaggctgagacaggagaatcgcttgaacctgggaggtggaggttgcagtgagctgagattgtgccactgcactccagtctgggtgacagagtgaaaatatgtctcaaaaaacaaaattaataattaatcctctcctgcatgctggaggggaactgccagcagcctccgagttatggagagcactcctggccaccaggctccccgtgagtcctggctccgtgtgagcccaggccagccctcctctctactgccctccactgggtccccatggtaaaataaggggctgcacttgatgaaagtgaatttgcaactgaaaaaatatgtaataataaagccagatcccttctaagagactttaaaggtcttccaacttgtcttcttcctgctcccagtagattatgtcccctgtcctcatgccccagcgtgaactttaggccctggacacatcagcttgcacacacatgtgtgtttgtgtgggggtgggtgggtgtgcatgtgtgtccttgggggaagctgggggaaaggggcaaaagagaaccctcactgggaacctttttctaaatacaaatggctgcccccttctccctgggaaatatctgaatggggtgagggatatactgctttggtcttccgaccatccagatccccatctccagactctccagccagagggcagggcagtagggggactggcaggactattttgaacgcctggttctcagaaccacctccctgcagtgctcctgttcagaggtcagaggtgtgcagcgtcctttcatcctctccttggagagcaagcctgatgaggcagggaatatctttctgactccccggttcctggctccatggcaggcatgcaacagaagctctcggacaaataaatgggaccttcccccatactttgcctaaaccttcttatgtcccttctctgctccctctttaccaatgtgggtatctcctctcctcccaacttctgctcaaattgtagcttctggggatgcctccagctgaacccccaggcctccccagatctgtggccccagccctgtgtccctgcatctttgctgatcccagccagaagctgccaggtatgcattttcatcaacagtagtgaggactatttattaatttatttatttttgagacagagtcttgctctgtcactcaggcttgagtgcaatggcctgaactcggctcactgcaacctctgcctcccaggctcaagagattcttgtgcctcagcctcccgagtagctgggattacaggcgtgtgccaccacgcccggctaatttttgtgtttttagtaaagacagggtttcaccatgttggccaggctggtcttgaattccagacctcaagtgattcatcctccttggcctcccaaagtgctgggattacaagtgtgagtcaccatgcccagccagtaaggactattcgttaagcagcattatagatcacctgtgtatgtctgctaaaaaaaaaaaaaaaaaaaaaagggcaccctctctacccagatgagcaaaggtattttttctgatacctgtaacaaatctaatattgccacaattgctacatgattagtgagagaagcatttgataggctaatcaattgattggtctggggtaaatattcagtgaatccaaagttcaactctaatgagccacttcacttctcctgggccctcttggtaatgtggtaccaggaactctggaagtcctcatggcattgctcaagggagtggtgggatgggtccccagctgctctttgcacagctctctgctctaggtgactgtctggtccatgagctgggctggcccagtctgtctctggcaatcctggggacatctgctgttgacatccttggtgagtgtaacctccagcttacacaacccattggacacctcctctgctctcaaaaactctgctgacccccaaagtatggttgtgactcccattaagcccaagacccacgtagaccctatgcccccagccagatcctcattggaaacccccatgggaacatacaagaaagtggatctcttccagttcctcccacattacgtggcatcaagggctttgggaatgtcaaaccaaatactcccctgtcctcagcagagcaccctcccctttcccaacgcccccccgccgccaccaccaggctaacgaagttctaaatgggggtcagggcacaaaatactctgtgtttgccttttctctcaatctattcaactgctcaccccacccaactcccaccaatccagtcctctaccctgggactttagcctgcagtaggaagatcagcccacgagtgtgaccacccaggtccccaacctcagcccatcttcttcccagtttcctgggcctggaggggagctctaatccctttcagttttagcctt

SEQ ID NO: 35802 - DNA, 739 bp, Homo sapiens
gagctccagggaccaggaactccagggacctggatggagaagcccccgagcagcactgacccgccacccctgccttgggccccgtttaaccgtcgcgggccctgatctcgcagtctattggcaggcggtgggccgcttcgcctctctcattggctaagaagaacacaacaataccctaggcattttgggaaaagtgtcactaggcaaccgcgtcggcgtctgcttttaacctgtgggagaacccggcgagctaagccaaacggagggcgggagagaggaagcggcagctggcgcctctcggcaactctaaccctctgatagagatcgccaaggtaaccgagatctaaggtcctcccctcaggcttctttgcacaccgcttccaccagatgccttctgacctttgcactctggcccctcacactacctactctccccggcacacgcattcctcgctcaggttccagtaccctgaacctgggtggggtcacgttgaggatatgctgagagctgaatacaaattagaaatacagactcccgggtgggcgcggtgactcacgctcgcccgtaaccctagcactttgggaagccgaggtgggtgggtcgcttgagcccaggagttcagaccagcctgggcaacagggcaaacctcgtctctactgaaaatacgaaaattaggccgggcgctgtggctcacgcctataatcctagcactttgggaggccgaggcgggcggattgc

SEQ ID NO: 35803 - DNA, 2630 bp, Homo sapiens
tcttcctgagattctgaagagaaacccaatagaactgttttctttttatttttttcaatagtgaagacatgaaagcatcctcaacccaaagtgtaatatacatttaatcatggttcctgacaaattttttcttatgcattaaagaaaagtgttctcactcttacctgtatatccagcataccatccccaggaagctaccattcctaaaagccatttatacatgattccttcgatataccagaaccgcttactgtccagcactcgaaggggctgaagtataattacatagcagatgtaggatggaatagcaaccaggttgttgacgaccatgaaggcaaacctcatcagtgctttcaccaagagccagcccagccacggagcttcttccaaagttatagccattctcacactggactccgtcctgtctttctggggtgaaagaaaaattcacttaaaaaggaaaattcattaaatacatctaaacagtcaccaacatagaaatcgcccccagcacaaaataaaacagcgagggtcgaagctttccgggtgtagtacctcggtgatctctcaggggaaattccagagggggacagagagcgagggaggaggagccgcacaaggtcaagggagctgttcaccgaggcacgaagtatgtcacaatatatttagcaaatgataacacaattcccattcagtaatcggtggccgtccccgcaccgtgtctcactgcggtcgtctattggacttagaaaaatagatccactcgcttcagacaacctcaggatctccaaactgaagacacaagtgacatgaccgaaacagggtcccctcaataagatttcccagatactgaggacctcagtctcctcaccaccacgattcctgcacaccgatgcattcctttaaaaggtctctggctctagcgaagagttaccctcaaaattctcatttgtagcaatagggtttttgtttcccttttttttttaagaaaaaaaatggggggcctagaaaaaaagcttacaaggtgagaggaagaaagtagggggttataatgcgaaaaagaggaaggacaggagtagggggaagggagcaaaagccagaaagaggtaaaagccaaggaactggggatgaagagaatgagatttccgaccagagggcaaggaagcaggggatgatgaaaggggcagagaagaggcgaccgcagcgcggggagccggtggagcctgcagcggtttccgcggatgtggaagggtcgtggcggcgggcgcggcccgcgcgccgggctcacctcggcgggcgcggacggcgggcggctgcggagagcgggggcgggtgtcccccgccgaggggtcgcggtcatggacgcggtggcggcccaagcggcccgaggcgctgcgcgagcgggcgcgctggcgccctactcccctcgcggctgcctgcggacagagggacggcggggactcagaggccggacctgtcacccgggcgggtcccggggaggcgggcggatgccccgcgcccccgcctcctccccggggcctaccgcgccctcgtccctcaggccgctgccgcctccccgggccacgcgacgacgacacccccttccccgcccccagcgcctcccctggcccggctccgctgccgctctggggcctgcgaccgcggagccggaggttacctcgggctggccgggccccagccggggctttgggagtcagaggagccggaagaatgcatggccggcggcggggccggcggaagaaggcggtggcggggccctgccccgctccggctgtggcgcggcccgcgcccgttccccggcggcgccgagactcggtccccaagggcccggccgcgttcgcccggactggcggggaggggcggcgggaggaagcggcgggagtcgggactgcggcggagccgctcccacagcgccctctaatgaaagcgccgccgccgctgcctggcccgcttgccccgcctggcccgctccccctacccctgcgccagcgagtcggggccctcggggctacctggacgctcggccaggacctcagtgagtccagaacatactgagggaaagggccgctcggaaagatctaggaatgaacacccatcctcacaccccaggagtgccttggtttcagttgagagccccctttcagccaacacggccgcctttcattgttagggctctcttctctgcccaaactaggaacctgtctccttgacggctaaatgtccacttttcattcttaatgaaacccggttgcactcatggcttttcttcttaacctctgcagtgtattattgtctagagtttcaaattcattctttttacggtcaaaagtcttgtttcaggaaagcagctggaacattaatggcaattccactttcccattcatcgcccccgcccccaccaccccaccaagaaactcagtgggaatgaatggtctacacagagaaactgaaatctggttagtcaagaaggaaaaaacaaccaagtgcctggcattaagtaagtactcacccgcccgccctcccccgcccgccataaaaagaaaaaccgaaaagacaaaaaacagtggccatgggaactcctagacagaccccgtcacttgggatactat

SEQ ID NO: 35804 - DNA, 1023 bp, Homo sapiens
acactctagggtattacttgtgtaaagtgtttcctggagaaattcacttttcaaaacctgaagaatgtttgtttttaaaatcaggaagtgtgtcccaggctgactttaatctgtctgcttcaggtcggcaggtctctggggagtcaggagtggcatcacataaatctgttttgttgcaggcaccctggcaacattttctgtgttgatgaagaatgtcaacaactcattccagtgactctgcaggcattctcaaaagatctgtttaactaaattctttcctttttcagttcaatgataattttgcctcactgaattttagtggcagtgcctgtaacctaattggtgctgtatttctgctctcgtgggtaccattcaacattcccagggagaggttgcaaagccttggttccagactcccctggtggattggcattttactcctcttccgggactttgaccttctgttctgcttgattagccttgctgcccctggtgcttgagctgcccttcctaaccaccttcctccccacagcacagggggatgtcagaggatgcttgtttgaactggattatagattacacaaatccaggaggtcaaggttcttagttgaactggttgttaacatttatttttgtatccccaggatgtagcacagtatctggctcaaaaatgtttgatgaatgaatgaatgaacagtcaaaggatgacagtttccccctcaagactgtgaaataccaaaggcagttcagcctggcaagccagtgataattttcctcattctttgtggacaagaagcatgagctgagcttctcaaatcttccctcagagcacaatgacctttacagatggtcttacctgtactttttatttcttttttatttttgtttcagagatagggtctcactctgttgcccaggctggagtgcagtggtgtgatcctagttcactggatccccaaactcctatgttcaagtgaccctcctgcctctgtcttcctaagtcgctgggactacaggtgtgcg

SEQ ID NO: 35805 - DNA, 1722 bp, Homo sapiens
tgtaaatgcaaacaccaccaccatgttccacatggggcagagaattcttaccattaattatactattatatttgagccccacctccaactacttgctaatcattctggcctccctttactagaccggccctgcccccacctctgagatttaattcccatcaaagacttcccaggaagatctgctatcttcatccccagtccgggcactctctagccaacagctcagctgacaaagacctcttagttctcccttttctctctctctcttttttaatcgaggtggggggtctcaccatcttgcccaggttgatctcgaactcctgggctcaagcaatcctctcactttggcttcccaaattgctgtgattacaacatgagcatgacacctggccagttctcccttttctaacaaaaaaaaaatttttttttttaagacagagtcttgctctgtcacccaggctggagtgcagtggtgcaatctcagctcactgcaacctccacctcccggattcaagtgattcttgtacctcagccacctgagtaatgaattacaggggcccaccaccatgcccagctaatttttgtatttttagtagagacggggtttcgacatgttggccaggctggtcttgaattcccggcctcaagtgacctgccaatctcagcctcccacagtgcggattacaagtgtgagcaaccgcgcctgacctctaaccaaaatttcttaattgacaaaccccatgccccatctcagccccagatgactcattctatattcagttatgtgaacatattaatcaggtgaaactcctgttttgcatttccaggaaactttcatttgttttctctttaaagtggctttccatatctctgctctgatttatcaatttttattttacttcctctattccaaaccgtgaggtcatcctcccagctggcctcactcttctccactttggtttcctctgtggttccagcaacctgtggtggtgggcttccttttcagtgtttagtgttgttgactattgtagctcaagggcacagcctaggctacgaggtcagtacccccttgtgggccacctctgatccaccctctgcccatgcccttcccttgttccctagctactgcctcactcaacagagaagcacagagtgcctaccaagggccaggcacagagccgcctcctttgactacagggtatatagacctgggtgttcctcacctccaaagcccacagcgagggagtcatggaaacaaacacaatgtggtccctgcattgttggaaagatccatgtaagagaatggaggggaagctccaaactaggaaagaggaaagtggcgtggggaggcttcctaagaaagagtaggcctgagttaggccttaaaggatcagtagacaatagcctgatgaagataaggagtaaatgtgtatttatcattcatccaacatgcatgaatgataagtgcatgctgaggacctgccatgcgccaggctggagactagcagtgaacaaaacagaaagtccctgccttcatggagctttgctactcgtgggaagagacagagaataagcaaaataaataagtaaaacatagtatgttagaaggtgatatgtgttctacagagaaaaatatatccaggaaaaggattcagttgtatgcatagaagacgggtaattttaaaaatccagtagttttaaatatggcagccagggactgtt

SEQ ID NO: 35806 - DNA, 1658 bp, Homo sapiens
acagcccagctccttgatccctcaggtgctataaacagccttcttctctagtttctaaaagcactttgtagctctcatatcacttcttcattatgagtaaattacagccctgtcttcccctctaaactgtaaacttcttgcaaattgaaactgtaatgggtatttattggaagatgacatagtatgctttctgccactctctgatagtatcccaaatttcactcagtattcactctctggcctattggctttggaggaagatgattccaacccctagctccagagatgagtttttattatctagaggtaatcattcccatgctgtttgccaagccaactggtgtatgcctgggtttctgaaccatacaatgcatggcatttctctggatacaggaattaattttggaaagatcatgtgatccaatgtgaaccaatgaagaacaaggcaatcttcactaggtgtttctgggaaaggtgtttctgggaaaggtgtttctgggaaaggtgtttctgggaaagttctaacttccattagaacttttcctctcttttgtaaatcctgatgtcaaaaagagccaatctggcacaatgagggaagccagtctgaagaagagaccagtacatgggagatgacccaaaagctactgaatgaatctaaccctgaagcctgtcctacctctgaacttccttttacatgagccaaaacaattgctattaagttggagccaagttctttctagcttgcaacatgaagagttctagtggatacagggaacttatcttcaactttgtatccaccacagtatctgccacatggcaggcatttgataaatgcttataggtttgcatgagccagtgattctggtatagctgtttgctggttctctggatctttcctgcagagttttcctgttagcagtctgccgcatgcaagttcccagcagctcctttcctcatttgagcttgaggcttctggtaggaggatgttctcattttcaagaactgaaacggagcttcctgaagtgacaggaatgttgtctatccaatccagctctcttggaaatccctcaatggacactggcaaatcttaactcactggctgtcctccctctagactttggactgccacctgttagattgcaattgtagttatcatttcaacagactctcatgaagttttaaacttataacttcctggtgctaactttggaatcaccctaatttaatcaataaactgtgtaaaaaatcacattttagttgggttattgttattaggtattcaattaccaaatagtttttttttcaaactcccatactctgaaattatataacttctaagaagtctcctgctaattattttctttatctctggatgtggattaagagctttattatcagtaaataatatttatttttctttcttttttcaattttcaagtacataatacattgttattaattgtagtcccatggtatacaatagacctcttagacttattccttctgtctaactaaatctgtgtcctttgaccaacatatccccaatccccttaccactggcctccgataaccaccatttaactctgtttccatgagtctgacttttccacacttcatgtataagtaagatcatgtggcatttatctttctgtgcctgg

SEQ ID NO: 35807 - DNA, 2745 bp, Homo sapiens
acacttccctatttctcccacaccctgacttctgtaatcacccctctgctctctgtttctatgagttcaacattttttagatttcatgtgtaagtgagatcatgcagtattcgtctttctgagtctggcttacttcatttagcataatggcctcaagtttcatacatattgttgcaaatggcaggatttccttttttttttaagtctaaaaaaatattttatcgatttcaccatatcttgccaaatcagtggggaattgagatcttaaataatttttagcaaaccagacatgggaaaaagaaattaattgtgtggggctctgataactaatttaagatatatgaatttcatatttacactctttaattaaaaaaaaaagaaaaggaaaaagaaagcctagcacagtgcctggcataaagtaggcacttaaatgtcagttccccttcctgtgaattccctttcagcatgtttattcctctccaggggctgtcctggctcacctaaaaccaagtgatgtaatccaggatggcagagggagctgctgctgcccagagggcccagagcaaaggtggtggcagcaatgtaatgtcaagggttgtctagtaaaatggcaagtgccactactggggagcagcaccctgaacaccgagaggtggtgacgacctacataacccatgcacagccttctcctcactcatccaggaccctcctagctggctctccccttctcacccctctctcctctaatagccacatcctatagcctcaaggccactatcactggcttgccgtgggaaggaaacagcctgtaagggctacagcagcaggggggcacgtgttatgtagccccccactgcaggagctcacccattgcatgcgtgcacctgctgcctaactgatggggacaggggtgatcccccagtaggcacttcacttcttgtttgttctgttcaggcaggtcagaaagtgcaggaatgtgatgtgatagattttcctaagttcaattagggcgattaaatagatgtctctatttttggatgtttgagtaaattcctgtctggattgcctaagcgaaaggtcactcccgttgaatctaaagcctcatgttgaactatgtccaccgtcaagaagcgagcatccataaggagaggaagaaaaggacaggacaccaacgacattgctatttgggaagctccctgggaaagaataagcatgaagattattatgttgagctctaaaacaaaacactcagaaccacacacacacacacacacacacacacacacacacacaaattgacaccagttgtatgtgaagccttgtgctaggtatgaaaaggaaagaggaagaagcccttgttctgaagtccttcagttgcacaaagaaacagggaagacaaacttatcctaaaagaaatgttagtgaagtaaaacatagcatgctccatatgtcagagggaagggacagtgaatgaaatgaatctggaaaaaaaatgagtttgtttaatcattcatttattctttcaatcattcactctacagacatttactaagtacgaagtatgtgccatccactgtgatagggactagagacacatcaccaactggacacagaccttgcccttcaggggcccctgggtagaagtgggagacagatagctaagcaagtagaagcaggaatgtgtcatcggggctatcatagacatggggacaaggttcagggtgaagccaaccaggagggagtctgtgggcagaggccaggaggaggcttgggagaagcggtggcgaaggtggcagttctgacaagcaggtgtgtggcaagcaggcgcagttctggggtggtgagagtgaaggtgggagctagtgctgggagacggcagaggcttaggaagccaagctcctaaaggaatttctcctgctccatgccattaaaatgtggaaagcaacagtgttgtaggaaagatgcccactgttctagggagaatgtgatgatggagataggtgtgtgaccactgaactctgtgaactagcttcattgctgctggtcagctcctgtgctcatcagagcagctggctctcaggctggtgacacctaattggcacaggggccaccttgatgatgcaaagagcacgctgtctcaccagacctccttttaggaaatgttactttaaaactgccactctgaagcagacagaaaagaagcaggagctcctcatggactctgcataggtgcaaacttgtgttggaagactggctccttatttaacaaatagacaaagcacttgtattagtaagagcttattggttgtgagtcatgggcactcaagctggcataagtaataagaatcaatttattataaagctatagggctgtctctttactggagggcaggaaggccccggatcccaggaagaaccaaaaacagggaagtgggcagccacccacagggagccaagtggtgcctctctctgtctctgtatctctctaggcatctgcttcctctttctctctctctctgtctctgtctctccctccctcctcccctccctgaccacctcctactcccatcttcctctgtctcagcatagcagaatatgaccatcccttgcccttgcttcaaattacagctcccatcccacggaaagcgtggatctgtcttggacacaattccagatgtgtgctctctcggggaggggctctgactcagccaaggacagacagcagggttcacactgaatggaggg

SEQ ID NO: 35808 - DNA, 4654 bp, Homo sapiens
aagctttttcttacgccacgttgcaacctgaaaggctttgtccactggacaaagcatcaacagacacttagaatacagagggctcttttttagccctttgcaatcacatgacgtccaagggcttgtcactgaaccaatgtaactatctagcacaagagcagaaaggaatcaaatccaacactctcattgtatagatgaggaaaccaaggaacagtgaagtcaagcaactttcccaaggtcattaccagaacaagaaaggaagacaccttctacaaggaaagagtatacagatggtacattttaggaagggcacggcctgtggaaggtgctaatttctagatgctactttagagtatgactttgattgattacttgcaaaagtagacctatgcttgttagttatgcctctttcacctgctactcctccacagttggtcaagaccaagccctagtcatccttattgattgaattaggagcaaaatctaggttctagtcctcctaattctactacttacaagttgcctcaccttaggaacgccatttaactgctgtctccttattttcccagtctggccttgtcctcaccgttgtggggtatcaggcaagataaagcacacaaagtctctctgcatgccggagagcattttgcagcatgaggagatgttttctgccccacctatgtactagaatcctccaaggagcccgtaatgtgagtgtaggggtcaggggcaggctggtgactggatgcttttgtttaagttccaccagtgattttgatgcacatccaaatgtggaaaccactgacaaagtacaaaagacaaacaggagaagagaaataaattgtgagctaaagatgcaggcatgttttaagctctctttagagtggataactaagggccaacttagagaacaattaaattgcccatctttttcaaggtacctgaaaccctaatctcaagtcccttttttcttcctggaaaagatgtatatgacttcaattacattacttttcttacctagcaatctaaacacacactgaagatttcacacgcacacacacacacacacacacacacacacacacacacttcgtgaatcatctctgcctggttgcatgctgaagtcagattccgagtaatgtctgttattctttaacctctgagtaatcactctggccctggtctgctctttatcgtccaggaaaacaatctgatcaagccttggatgatggattcatagttgctcaagtctccagagtgctgtataaaccagactattaatttattccatggggatattctgtgaaagtcctacttctcctttttaataattgagtggcctcgagcaagtcactcaatctctctaggtctctaagatgattatgatcactaagcatcactctttacaaagtatttccttctttgtgacatctctctttaaaatgtcagttgaatgttctcagaaacttgttgcagtgggcataacattaaagaaaatgggtaagaatgagaacaatgaatttaaggaacatttcattcagtccatgggacaccagagtggacagctgtgacttgtgtctgctcagcacttcttctgctcttcaggggacagaacttccttccatgggggaactgctcctttcttcttccacctggttgtgaggaggctgctgatcaaaggaccctggcctcctcttcttcggccacaggggtgggcatgtgaccctgattcaaccgtaataacaacctactcacctagccacagtgattgatctgggaattcatccaaggatcaatctgaaaagagagagagagagagaaaagaagaaagaaagaaagaaagaaagaaagacagaaagaaagaaagaaagaaagaaaagaaagaaagaaagaaagacggaaggaaggaaggaaagaaaggaaggaaggaagaaaggaagaaagaaagaaggaaggaaagaaagaagaacaagaaagaaaggaagaaggaaagaaagaagaaaagaaagaaagagagagaaagaaaaagaaagaaagaaagaaaaagaaaaagaaagaaagaaagacaaagaaagaaagaaaaagaaaaagaaagaaacaaagggaaagaaagaaaaagcaagccagggatttttctaaattaagcttgtagggaaaagtatcttccctttctggtcaaggcgctttatcaatatgaccccatgtgccacatgagaaggctgggaggacaaggccaccagccagaaggaagaagaaatgaggcagtgagagacagagatggaaacaaggaaagggtctgtggtgtcgagttcccaggtctgactcttcctggcgtcatctggcaattgttcttttgattcctcgagctaccccagagctttccccaaaagtcactctctctttttttctcacttaggtcagtttgttttagaatttctaccacttgcaacttagtcttgatgaacagaaactctccgacagttttcctctcaactataccttaaaagaaacgtggtcccaaatttgaggctctatgtcctcttgtcacctggcccttgacggcagccagtcttgccttgctttctgcaagctgcaccttgttcacccacgccaggccaagcagtgactctcgtgattcttcacctccccttttcagatctttacttccccactttccccactgcattgtgtaagatctcattcttataataaataccttagtccataataatcagtggttctgcttccatggtttggccctgattaatgcaaatgctattgggttggccctgacaaagaagcttccttcttcttattattattattattacttttttttttttgagatggagtttcactcttgtcacccaacctggagtgcaatggcatgatctcggctcactgcaacctccgccgcctgggttcaagcaattctcctgcctcctcagtagctaggattacaagcacgcgtcactaggccccactaatttttttgtatttttagtagggaaggggtttcaccaggaatgttgaccaggctggtctcgaactcctgacctcagatgatgcgcccaccttggcctcccaaagtactgggattacaggcgtgagccaccgtgcccagccaaagcttcctgcttcccttctttgcttcctgcccacaccccctccatctctccatccgcccctcctctccagtcaccacatctccatctttcctcatcctctccctgcgtcagtgggaaggtctgatgcagccgctgctcctcttaaccactatgctatttacagtctcaagccctcttctctctgacctctgcctggtttccttttgcactatttcctgagctccattcccagtcgcaattctgtgtctggcaggcagcctgaagatttaacacaggctggcacccagcaaaggcaaatgccaagatgccctgcccagagcttcccactcattatttccaattagaaaatgtcactagggaagaaaacaaatacgctcaaagataactcagagagcactgtgtgtttgttgcctggaatagatgccaaataaatattttatcaaaggaatttacatagtaaaactatttgagttggaaattatccaggaatactttcaaaatgaacatggtggttttttattttattttattttatttattttttattttttggtagtatgcatggatttgaaattccccctgggagctggctctgtttttgatgagctcaaggtctcttccagctctgtgatgatggctcaaaggccagagcttctgatcccagcccagccattgctcaatgtgagtcagctgaactctctagactttgcctagtctatctggatcaatgaaataatcagagaaaaaaaaatcaaaatcattgtatcttaggcttggaagcaaccttacaggttatccctaattaaggaagctggctgttgtctgtctccatccaacccctctggcttcgccagacccgtcacttagctgggaccccgtggccatacagtattgtcttctctcagcaggcagatgctgggtatggtgactcaggcctctgtccaagagttgggacaagtgtctaatgcagaattttcttcatgtagaattagacactgtaaatcttaaaaggacattgttacccaggttgacatgggacatgtgagaggaagaataggccaggcgcagtagctcacacctgtaatcccagcactttgggaggccaatgtgggcggatcacgaggtcaggagttcaagaccaggctggccaacatggtgaaaccccatctctactaaaaatacaaaaattagctgggcgtggtgttgtgtgcctataatcccagctactcgggaggctgaggcaggagaatcacttgaaccagggagtcagaggttgcagtgagccaagatcgcgccattgcactctagcctggtgacagagcgagatgctgtctcaaaaaaagaaaaaaaaaagaataatgtattggaaacaagaatgaagcaggtagctactgttcttaggcacctagtatgtgctacacaatttatatctatgttaacatttagtcctcacaaccaccaaggaggctctctccaatttacaaatgaggaaactgaggtccggtaatcccaagtagtatccctcg

SEQ ID NO: 35809 - DNA, 1975 bp, Homo sapiens
ccatgctagttgctgatctttttcttaatgatttgtaaatgcctttatatattaaggatattactctgatatctattatgaatgctgcaaatatattccctataatttattctatcttagagtttggcttatgatactttttgccatttaatgttttatttctttcccctgggatgtgcaaactccagagaaatggggtcagtgctcccccatttcaagttttaaattaaaatttttgtccaattagtgccatcattctttttttcttacaggctctgccctttctgctgttggaagcaggtttaaacatgcttttctactccaggatgacgcatttgttaaggtgactttttatttttcatatttactgagtaactggttttcccaagttgctgtccagagatagcagtggctgggtcagggtgtgacctgctatgcagactttagaagcagaagtgatgatgcagcttctgttatctggagatctgttttcatcacacagaggatgataagtgaattcacttgtgtgctaaggccagtcctttgcttcttatgcaaaggatgtggaaataatagtcctttctccctagaacccagcaggtaggctgggctcattacaacagggaaatttcaccaaagcaagaacacctgagggacaaaactggcctgccaagaccaaccaaatgaactctccagcaattgcctggcatgggctcccctcccacaggggttgctgattgctcaggcttttataattcttgagccctgttccaaggagtttttgtggtttaaatcaatatgcttctgggaataagtgcccttattatttcctcgttcacattatttgctgtgctcttatagcaccctgacataatattctttgtgctgcagtacaataacagtcctttcaggaatctctaacagctttctaattaggacctacaacctcacgacagatggagaacatgaagcccagagacagggatggtgaggcttcaccttggtcacaaaagagccaagcttcagggcctatgggctacactgcttatctagcagtgattgcagaattataaggctgcttcagggcatggcagggaatgctggatcctttgcagtaaggcttaggggcacccgctattgaactagcctctgccatttctagccacacccaggaatcggttgagcaatagctcttgtgtttacagccacttctcagtggcaaggctcagaccggaaactgcatgaaggctaggtaatttgacactgaattttgcgttaaatagttaaactttcttgattacctaccatgtgccagccaccatgttgagcaccaggaaggcaaagatgaactcccaatccctccctttggatatttacagtctagaagaggagacagatctgtgagcagaacattataaagttatcagaagccgggtgctttactagagagtagaacagaaggccagtagtactcagccccggggccttcagtgttcttcctgcttcctggaaaggaggacttttgacttgggtaaatcataggagatgggctggagcttgctgggcagagttgggagagaagtgcgttgcatgctgagagccaagcaccgacaaaggcccagagacgtgcaatgtactggggttcagggagcaatgagaaagtcagcatgtccaaagtggccatggtcatcccactgttctttctcttgtctattattacaacaaaaatctctctgtctatgctcaatattttatttcggatgttgaaaaggctgaacattgtttttgtctttgccttgttgctttaacccttcatttctcctcagggacttgtgggtgcctctgaggagggaaaggtcacgtatctttcctgaaaaaaaagcacaaagatgaatatctcactgcagtatgaggacacaaggtggggcagttcagggaatttggggcaggaacccagctgggctttcttttacca

SEQ ID NO: 35810 - DNA, 1174 bp, Homo sapiens
taaaatggagaaaactaaatagatgtgtattttttgtggggagggattgggtgggttagggagacacttattttccaacttctgacgtttgaagggacctcctgatgtaagagagacctttcgttagattaatattactgacctagcagggaggaggtgagtcttgctgatgggtgactttctgggcaggaaccagacatgggaaggtaagcacttgctctttctcttctgctttgggcacctgagtcctctgtgccctgccataaattttataggggcaggctcccatacgtactgactgaggctgggtgaaaaaatccaattcaggggtctacggttagaaaggccttgctgccaggcattggagttaggttttcccacagctccaacagtaataaaactcatattttgatctttgcctggatgctttgtctctatcaactggttcagggagagaaaaagaagtgtttatcaaccccttacagccccaatgtgggcttttaatttatgtccatctgatccctttggaggtataactgcaatctatttaaccatgaaaaacactggaaaacttccatcaatgagctcatataaaacctgtatcacaattctgcctcttttctaaattaccttgtagtcttgtccagatttactctgcagtgtggaagaaacattcagacagacagactgaattttgcggaagagtcctggtttagatccgtgctgaaccactccctctacctttagcgccagctgctggttattctggacagcaatgggctctgcaggattccggggcgatggtgacagagcaagctggaatgccaacactcaaataaatgccaacaaccaagagcaagcttccttccgacaaacatgtctgtgctaatcactggttacaggttaacaaattcgattgtgcactcccccacccccacaggacctgactgtgccaggacaacgagacagatgtacctttaaagtgcctccttctaaacatcactgtggttttcatcccaaacctcagttctatttgaggataatagagaattagaaaaaagcaaaggcactattctcccaatttttgtggtgaggcatttctttgacaatgaaccacttctagtagggaaaggcattatataaattttcattacctaagagctgtctctttggt

SEQ ID NO: 35811 - DNA, 1222 bp, Homo sapiens
tcgctctgttgcccgggctggagtgcagtggcgctatctcagctcactgcaacctccgccacccggttcaagcgattctcctgcctcagccgcctgagtagctgggattacaggcatgcgccaccatgcccagctaatttttgcattttcagtagacacagggtttcaccatgttagtcaggctggtctcaaactcctggcctcgtgatctgcccacctcaccctcccaaagtgctgagattacaggcgtgagccaccgcacccggccaggatgagtgttcttaaagaagaggaagagtgaccagagctctcgatctctccctaccatgtgaagatgtaataagaaggtggctgtcaccagggccaggaagaaagtcctcaccaggaaccgaatctgctggcagcttgatactggactttcctgcctccaaaactgtgagaaataaatgtctgttgtttaaggtaccaagcctacggcattttgttataaaacctgagcagagatactggggaatggtcagacagggaggagaaaatttgggtgagagtatgttagcctgtcctgtgactgggaaatcaggggagaagataaaaaaaagggtgagtgctctgagaacttcttaggaagtgccaaaggcagcagagattcagcagggtaaaggctgaagagtgtactgaaaggcattaatgtcatcacctggtaggaaatgactcattgccagtcagccaacaagccctgttctttctgtttcaattgtccagtggttctcccaaccatggcagcatgacagaatcacctgagtgtgtgtaaaactactaatgcctgggccacaattccagaaactcagagttagctggtcaggggtgaggcctgtatattaatgtattctttaaaaagccctcaaagtgattctaatgtgtagcctgcgttgagaattattgcaacttcagttaaattgttaaaaaaagaaaaaattttatttgcattctggtagagcagatttttatatattaatataactacgtagcagctagagatgtgctaagtactttcatggattatctcatttactccccactacaatgctgtgaggtaggtattaaccctgttttatggataaggaaacaggcacagaaaggttaatttgttgaactcacacagtaagtgccataaatgtatgaaaaacccacatccatacaataaaagctcaataaaacaaat

SEQ ID NO: 35812 - DNA, 872 bp, Homo sapiens
acatcttatatatttgagccatttgttagtgatgatttagacatactaaatttaagtttgctttttaaactacttttggctacattgaaaaaacataataaacggaaataaagatttaccattatttatggaaataatgtaactttggaaaatccttgattttattttttataaatattatctatttatttaagcctttgcttaattccatatataagccaaaattaacaaacttcaataaaaggacaaatacctagcttgaaaagtgtttaagtattataacccaacataatgctaatacatgtctttggaattaaaaaataaagaaaaagaaagttattgtgcatgtaagtcagtttggtacaaaaaagagaattctgagtcagaccgctgagttcaggcctaggctcagacacttcacaactatgtgaactttggacataccgtcaaacctttgtgagtctcagtttcaatacttataaactcctttgcatatgcctcacttgaaaggctacttgtatgggaaagctctcatctattatatgattaagactttgtctatcacagctctttcaaagtgcaatgttggtgaaggatgttaactgcaagctaagaaacacactgggtgatttatgcagaaaaagaatacattgaaagcaccctaggtatatggtacgttgtttataaagaaggctgtgataatttctcacatcccttgtggacatgctcctttaccatgtgatcttccaattccatgtgacttgctttggccaataaagcattggaaaacaggctgcaagcaaaaggttgacaaatgcttttgtgttggtggcttgctttcttttggctccaaccaacatcctgaaaacaaa

SEQ ID NO: 35813 - DNA, 873 bp, Homo sapiens
aaacttcaaactaggagactgcaggttttttgtgtgtaataatatttttaaaattctttttaaaataacattttaaaaattcttaatgtcaacatttaaatatagtgagcccaaatagaataatttggtttttcagattatcccctctcctttgccaaaaacctgagcactgggcatccattcctgcactgttaacaataggctggtgccatggggcactttagatggagtggacgtgcttcagttcaccacagttgccactaggggacactgctctcactgacaatgttcacctggcccctgaaagcgtgtgagtttgtaactcctgctttgccacccagggactagcaatttagaataaaacaaatgtggttatggtaggagattggggggggagggggcggagaacaggattaaataaattctaaaggtcttatttggcttggcttgttactctgatttaatatccaaaactgatcaatacagatactagaaaaaaaatccatcagtactgacgaagatatgtgatctcaagccaggtcattatttccgggagaagatatgaacactgatatcaaaaatataagtcttgtcagctggccacagtagctcacacctgtaatcccagcaatttgggattgctgaggtgagaggatcacttgagtccagaagttcgaggctgcagtgagccatgattgcgccactgcattccagcctaggtgacagagattcatttggtattttttaataaattagaagtacatcatattgaagcatggtatattaaaaactgtttctacataaactgctaatttagatgtttaatcatcatttccacaagtgaagaatcttgctgtttctcttacttggtct

SEQ ID NO: 35814 - DNA, 1103 bp, Homo sapiens
gtcgcccaggctggagtgcaatggcatgatctcagctcactgcaacctctgcctcctgggttcaagtgactctcctgtctcagcctcctgagcagctgggattacaggtgcctgctaccacccccggctaatttttgtatttttagtacagatgggatttcaccatcttgggcaggctggtctcgaactcctgacctcaggtgatccgcccgcctcggcctcccaaagtgctgggatgacaggtgtgagtcactgcgcccggcctaattctatatgattttataggtccgcttctcaacactctcagactaagtgtggtctggcagcagagattctcaggagaaagaatttgactcagtgtgggtcacatgcctacttctgaatcaatcagttatggtatggaattagtcacctggaacaaatctggctgctgaggcctttctcttgaggagggcctatgaagatacttccccaaaggcctcatatttgtttactgaaacaccaacaacatctgagccatatcgataatgtaaaagcaatctgtggtctttcttgacaaactttcttgatggtctgagaattcaggtattttggaatacaggtgaggtgacaccgtctaagggggaaattagagtgcagagacagttgtcctgattcacatcatttctctatttcataactaaatttttcattaagcacaccatcaaggtttttcacacagcattacattcaccagcacctctagtaacaaatctatcctctatatttcctcccttcccattgcatcagctgcaagaaagggaatgagtcactgctctcttccccattgctttcatctcatcctttccaaggtcaacattgcagaaggcagataggctgaataatatcatttaagagactcctcttttcccagggggaaggagatcttgcataagttttcccaaatcatcaggataaccttccatcagctgatctaaaaatgtttagactaagaaattatattagtgaaaaagttacactaatttttgtgagatgcatcctttatattgccaattatgtatagtaatgatcatatcatgaaatgtgtcagataaacataagct

SEQ ID NO: 35815 - DNA, 1794 bp, Homo sapiens
actaaaaatattcacagtttaaaaaataaacagaaaaagagtcccaaaaaagttaatagacatgtccaactcagaaaactgggaagtggctcaaacccttctgagttctagtccagttctccaacattatatattggctacgattaatcaagatttaattgtataccagctgccgaaatgtttcccgtacaataaaaatcctcaatatgaaataaaggtttcatattactagtcgagttctttactaacaaatttccgaccttgcctcccatatccacatctaagaagggaggtatatctcttcagcatttactaaatgcttcttttgcataccattaagtcacttaatacaattctgccggctcaatggtactgtacccactttgcagacgacaagccgaggctagatgaagttaatcataaaatcagcggcattgaaacttaactcagtgtaaccccaaagctccctctacaccaagctgctccctgtacggcaacagaactcctggaacttgtccgcagagaatgagcagggcccttgcttttttatggtcttggccaggtttagcctgccttgtaacccgcaggtaacagagctatggaaatcaaatgaatcgctgtcaagtcggtgcaagattactattcagcacatttcatgaagacctggtctcaactgaacagactgaaaaccaatttcacaatttctttgcagtgtctcttagaaactagccactgtcactgcttagaaaatcgggggactgctccctcaagtggtcaaaacgggcctctcactagagctcgctacttgtttagccggtataaggccagtcacacaatcctgcaaatttcccgcaacctcccgaaggggtcaaagcccacgccccagcaaaagcacaggcgctccccgcccagcgaagacatgcgcatgcgcctatccgtcttctcccaaagcaaccaccacctggtggcgccacttccccccacgcctgtttcacccattcagccctctctttcgaatacctttgtccaattccataagggcagagttggcatccagttcctgttcgccatagccggcatctgccaggaaagacttagttgagtttgacgccatgacccgaatagttactcgactagcctagtcagaaagcttgcaaactctaccccaggaccgccatcttcccccgccgccttcttgctggtttttcttccgcgcgctgtcaagccctgttacgcatgcgccctggtcaccccgcggtttgtccgcgcctctgctaccccctgcgcaggcgctcaaggagctcttggactccaggttcccgcggctgggagaaaaggaggcggggatccgaagggggaaatgactctgaggcgcccggacgtcgctcggaagccaatcagagagcgtgacgtcagtttggcgcggagtttggcggccggggcttacagtggcgggagttggaggcgataacgatttgtgttgtgagaggcgcaagctgcgatttctgctgaacttggaggcatttctacgacttttctctcagctgaggcttttcctccgaccctgatgctcttcaattcggtgctccgccagccccagcttggcgtcctgagaaatggtgagtaacggtcccaaccgctgctcggagctggcggaattcatttcccccgaaacacacgccacctccgaccagggccgactccaattctgaactcagcttctgagttctcccatggcaagggtaaattagtgttagcagggactactaaagaaagctgtactttcatcccctc

SEQ ID NO: 35816 - DNA, 829 bp, Homo sapiens
tggcctcccaaagtgccggcattatcggcgtgagccactgcgcctggcctatatctcacttctgttatacctgcttcatgtctgtgcatttctttcaggtcaggtaaagaatcctaccctagttctctgccagatggcacactgctatctacttatcaaagcaggcaaagaaacctcactgtggctgtgaaaaaggtgttttcccgcaaccagtcctctcaccagctgcagactctttttctaacaacatcatttttagcctgagaatgttgaagacagggacagttacaggtgtctttcagggcaagaaccacgtcattcatctgcgtgttgcctatcacagggcctggtacactttcagaactcaatgcttgtatgttgagtgggtagaggtggagccagagtccaactggggcggccaagctgataacaaggtgaccagtaggtcactgggtcagagatctagagcccagttggggtggctcctgtgtgaccacaaacttctgaggcatacaatactgtcaatcagactaccagggagccaggtggccttggatttggtgaatcaggccaggcaggaagtcagcagcaggcagacaaggcagtgcccacataggcaccaagagaggggttggggccaagtgggttcaagaacctggtgtgagtagaagctgaaatggaaggggcacatcagaaacctgcaggagaaaaggagcaacttaaccagaggcagcttcctgcaccatgacccagtactgatattgtcctctgcagtgagaatcagctcagcttagccacaggctcatgggccacagcatgtgagcgtgag

SEQ ID NO: 35817 - DNA, 970 bp, Homo sapiens
ctattgcttctattctgtgtggagagaacaatgactgaattggctggaatagaacaaagttgttaaagtgaactttctccacacctcatctctaatccctaaaattttgacttaaacaaaattttgagttaagcaaatttgaattaaaaattttgagcagatacagggaatgaatgcaagaagctcttgattatcttcatggtggactggctcattttcattccgggctgacctcgttgatatgttctctaccacttctccttgctgagaagtagttggcgtctattcaaagtacacaggccatttaattattaatcggagcaaaacattattagggaagttaaactgttgagtaggtgtgtgtgtgtaaacatgtggatactttcttgattatctagctgttttgttttgccttttgcctttctgggttcctgcccctctccatttgtggtgatacctgtaaggtgattatgccactgaattcctaagagctttttggtccctctctcattctccttggatgtgtgtggaaatgtttgtcagcaggggcggaccggggagggttcatgtacacaagaagtgactgaccttggccgctgagtggagtgtgtatttgtgacgaggaaagggttcagtgtttgtgtttggtgatggttttatgtcctgctgtcattagagaggactttataggggtttctgatgacctagggctccaggaatcatcatgattatttagacaatgattttaatgggcccatataaacttattctgtttttatactagtaacagagaagaagatgttggaagattaaatatagagaaggatgggctttagcgtcactgttcagggacattgggaattattctacagaattcgatccagcctattctcattatttccttcttcttatgactttcattctttccttaccttcctccttttccctttcttcttcttctttttttttt

SEQ ID NO: 35818 - DNA, 1739 bp, Homo sapiens
gggaggccgaggtaggcggatcacgaggtcaggagatcaagaccatcctggctaacatggtgaaaccccatctctactaaaaatacaaaaaattagccgggtgtggtggcaggagcttgtagtcccagctacttgggaggctgaggcagaaaaaaggaatttatttcttacagttctggaggctgagaagtccagggacaaaggattccatctagtcggggccttcctcttatggggaccctctgcagagtcccaaggcagcttgggacatcacatggtgagggggctcatgagagagaaccaacctggctttttataacagacacactcttgtgataactaacccactcacacaatgataacctattatccattaacccaggaatggactagtcaatccaatcatgagggcagagccctcatgactcagtcacctctgaaaggccccacctcctgatactgtttcactggagagtgagtttcaacatgagtttcaaaggggacagtttcaaattataacagtagaattatgtgcatgtccaggtgtgccatttagtagctgtgagaccttaaacaaattactgtgcctcagtttttttatctgtaaaatagagataataatactacctacttcaatggtttttggtaatgattaaatgagttaatatgtgtaaaatgcttggcatagtaattggcagatggtgtgtactatgttttagcttttaatattattattatgcatattattatgcaacacacccagtctaatacctggcacagaggaatgttaaaaaaaaaaaaaaaagtttgaatccctgtgctctgacacctttagctccaaacttgctgctgctactcaggatctccttcctctctagttgtcctgtttagctgagcctctctccagcttatgtgaaaccgtgtcttggtagctgctgggcaattaggcattcaaggcccatgtttggtggcctaggtaggccagcaggcaagttcaggagggactgaatcggtgagaaggaccaacaactttcactgacctcatgacttcattccctttatttggggttctagcctcaggacacaccagagagggaagccacggcgtgtccttcaggccttctcaggaagcaggctttcctgaaggaagcagtccctaaaacagacttgcacctctacattttgtcagccctggcacatgctgtaggaggttctgggttagcttcgatggggatgttttttcaagcctgcaaactgcaataggtgacaacttccagtcccaagagtttggctggctctgcgttgaacacaaagcttccacttgctgctgagggctgctgtgctctgcctgccttccagggagagttacttctggaaggctgtcatggagggaggagagctaggctgccgggccagctgcccactacactggttcaaactggctgtgctggctcaacaaggaaaagacaatctcactaatcagcagaatcaatcacagattaggagcttaccctgcgaaggcacagtggagggtaaaatggaacagaaaacaaagcccatgtcctcaaggagttcgccaagctggtggaggagacgaaaacacttaaagagtaaactaataataacagggtatccgaagtcaccagtttgtccttgcaggtatcagtgacctatagcactccttaaactcctgtggttctaggtaaaacaaaccttcccagcagaggcataatactacc

SEQ ID NO: 35819 - DNA, 1916 bp, Homo sapiens
ctgtgcatctgtttctcactcatggttgcttcatttctcttttactgcagacaggctatctccatttccatggccatatttccataggacagtttctatcaccagagatgaacttagctgatctttcacttgttctaagttaagaaatcccaatgggagggccaatgtgtgttccagctgtgaccaggttctgggtcatctaagaacatgatgtttccaacatgaacacattgtctaggggaaaagcaggtcttagaagattgggaggtagtgggctaagacgaggatatccttcacccctagctattccttagagataataagtttgatgaggaggcagaacaattaggtgatgagtgagaattcttaagaagtgaaaataaaaatcctgagagtgtggatgtgcctggccagggtcatccatttttacaatgttttgacatccagtgaaaaaataattgcagtgaatctctccctgacttggcccccaaagaggcagacctaggtattttaggacctgagtcaagtttgaagaactgtgctgtctcttcccaaccttctcttcagagaactaaaccacgggggtaacaatcctgtaattttggccgtatttataaatccctgatcctttatgtagcgcattttttctactctgcgcttagtctgaatgttgctattttcacagaggaaatcagaggaaagagactataattataggtcaaacaccagctccggaaacagtgaaggcagcagagagcctatgactccctgccctcttccgggttacaccctggacatctccccgttctttcctggagcctaggtcagctcttcgcctctttatcttcatatctttgctgtcttgttttccagtccagcatatcatgagacaaaaagggaaagttacaaccaaaagccagtgagttaaaactgcacgatacttgggcaagcctgcctcttggagataattcaaatggaaaagaaaagacaaaaaaccccacaacatttcaggtcattggcctttttaaacagaccgccggcaatatttactcctcctgaaatagcacagtcacatgaaataaaaccgtgttcggtaaagcctgcaaaacaaaaggacaacttacaggctggcatgctcactgagggccttctgtttaccggccagatcagggctctgcttccgggctctctagccaccttctgcccaaacctgctggagagctgtgggggtcaaggtcagattttcttggagaccctccccactcttttccccttaaatgatttggaaaggcaggttgagagttgggaacagggctgtgaagagtatgtggctgatgtggcctctactgtagaagcccaggttgtgaatgtcgcaggaggagcttctaatggtgtctgcccttgtccagcatggtcacctctgtttcctctctgttctttactccttacttcttaatgcatttacctcccccacacctcccccagacccctgccttctctctctctcatctgtttccccccctcagcctatcttgtattccccttttgccttctctcctgaccttagttctgccaaggacccttcatggacctttagtgattagtccaactgttgcctggaaggtctaaagtagctgctaatggtgaggttaatgaatgtacagtcacaggccagatctggggtcatggtgaattcccactgagactgagacttcactgaggactcaggggaaccttctcagtctcattctttaagcttttcctctccattactgatatttctttgtaaaaatccaaaaaccatttaaaataatacattataccttgtttctcaaagtctttttatatccgttgatttcatctttacatcaaccttgagagggaggcaaaacagttgaggaaagagaaaaacaaag

SEQ ID NO: 35820 - DNA, 3010 bp, Homo sapiens
gatcgtgccactgcactccagcctggggtacagtgagactctgtctcaaaaaaagagaaagaaaaaaaacttcagccaaaaagcaaaaaggtggggaggtaaagggaggatagattaaatacgtatggcaaacttgatggctattgaaactggttgatggggtcataggggtttttatgtaagtctgaaaatttttataataaaagtggtttgtttgttttttattttttttttaacacacttgcacatcatctgtagcttgtctgttttttaatgaatggcgtagacactgatggtggagttcagacgagggtgtagtagcaaagactagaaccactacagaaagatttgcgggggagatggaagtgtgcatttccttcctcccttcctccctccctccctctctcccttcctgtgttaccatctcccataccaggtagggtgcggtattaaaacagcatggcaggagtgtgggtatcttttggggaggtgggagattgcctggggaagttggtggccagaatggagaggaatgtggggaatgccaggctgggcacccggctggaccttgtactgaagccagtgatgaggcttctgtgcaaagagagtgatgcaacctgtgttccaggcagattaatgtggataatgctggcgtgagtccgagaggtctggtaaggggctgttacccaggtccaggcatgaggaagggataaaagcttgcattgtacagaagtgacagtgacaagagacatttcagatgaatcaagaatcagcagaatctgctggtgaccatttatgaagctagtatgggtgaggcaaagtagtacttgaacaatgggataaatggctgtcctgtttaatggaaataaggaaactgagatgatttgggagatgaggattaggggttgattttgaacgtgcaaaatgggtggaaacagaacaaccaagctgagatatttcaaacaacagattgttccaaacaataggctatttcaggggtgagatgaggagactcagaatcaaatagatccactgggatgaaatcgttcaccccggcccctttcccatataaaacctgattgaagtttgaggatgaaggtctgaaaatgaatctgggaaagtgagtggtctagccaagatggaactatgggggagggtgaggagacaagttggtgtctccacaggtgctgaagaaacctcgcttttgacatcctgctctcctgtgactttgcttcctgttgtgataggagaacctgcccagtgttccatggggcatggctctagagtcattctgtttacaccgagctgcctctcggttggataactgtgtggctgaagaacgacacggagcattaagctaggcccccgagagtggggaccagctctatttcccctgtcccaagtacacaggatataacgtgccctccctggagatgtccacagggtgctgctgacctcccaggtccctgcctcacagaacagggggattctcttcctgtcatgactatttagttactgggctaacaaacaagaaaaagtcacatggggcaggatttcaagagcagagttacttcagttgcctgtggaaataacaccaggttgtgcaagaagacttttaggctgaaaaaggcatgttaaatcttggtctgatggtctgaccatctgaaaaacacagcccgttttttcttttttggagctgcagataggacaatgatgagaccgtacctctctcatgccccacaaaagacacaaaaagagagaggcctgagttttgtgatacccgagaagatttgcattggtttatctgagtcctcattttcagcaaatgacagcaagaggccaataagacacaaagggattttttttttctttttttgctcaactgccttccttcctgctaaaaatctctcaagctctgcccatccctcttctttaccccaccctgtccctaccacaaacccacttcctcctcaaagtcccagccctcccactagcacactctttctcccctgccccttctgctcccctcccatggctgctagctcaggggtcatgcccaggcagcctgatgcaggccaggattctcacttcactcagcagcccccaacaaagctggcactgtctaactgggtcaccttgggagaaggcaggcaggagtgactggggttgtgtcctgagagcacggccaacatggccctgtcttgttgtaatcactttcaatatggcttcttattatcactatttacaatattatgaatgtatgaagaagagctaccaccaagtgagtacctactgtcttccaagcatagtgctccacacattacatgccttttctcctttaatcaccccgcaaacacatgaagtagcagctatcacaataccctttttaaacatgaggaaataaggtttagagaggttaagcaacttgcccaagaccaggtagcaccaagcggcagcactgggatgcagattcagatgtgcctagttcccagccccctcctcttaaccatcttgacataggcttgagtggcatttatcttgacttattcccacctaatgaagtaggaagaccattcaaacaggaagccatctggggtgaggggaagctggtcactggggatctggggtcagactgcccagaaaccatggggatctagaaatggtcatctgcagagtagcctgctctttctcaagggagttgtggccaagctctatctttgccaggcctctgggctaatatcctagttggtttagtggtaatagggccaaggtcacgaatctgattcctttgtgggccagtgaacttccatccactccagtgtcacaggcagcactcctaactttgaccaacggttctcaacttcagaccattggatgagaataaaaatggtttaggccgggcgtggtggctcatgcctgcaatcccagcctttgggaggctgagatagggggaatgcatgagcccaggagtttgagaccagcctgggcaacatagtgagactccatctct

SEQ ID NO: 35821 - DNA, 1623 bp, Homo sapiens
aacaggaagcagcattgtccaagttcattaaaaatcagcattggagaacacttactgagtgcctaattatgtaatcagattttggcctggggctgggaataacatttcaaagagagaggaagagtctggctgaacctggttggatttaaaaaaaaaaaaaaaaaaagcaagagtgaaagatcaagccagctgggtccctatccatgtatgctggtctctgttagttccatgtccttgagccaggtggccaaggtaactagacttggcatgtcctacttccccagatccagaaattagcgatcctttcccagggatagtgtcagacccctttcaggtgtgattgtcattggggcatcatgcctagtgggaacagactaactttgaataaaaaaattttgaggcggtaagacatgtctgtatttttcaaactcaaatgagttgatacccagcccaactcatactgcggttggtgacaagaactgaatcacacctctcctgacttccaccatgctgtctccttttctccttgccaattcactatcaccttggagccacaaaaatgcaaaacaaacctgaaccttgtgttgtgaggtaagcccatgagtcatggttgaacagcagtttctttttctccatgttagctgtgtttttccttcactgtggcccaaacaagcatcaacttggtgacatcaattcatcatgttatggagtaggcactgtgtttggagatggtagattctgcaatgactcaggtggtagggtattttcttctgatagagtacccaggagggatttatgagttcagaaggcagtagagtagggcacctgctttcattcactgtcaggtggtcagcaaaaacttcaagcagaagaaagaatttcaaaacatgttaaatgcctgggtgtggggaaagctcccagggcaagaggaaggcaactctcagaatgagctgcctgagatttgcaagataattgattggctgaggccttgtggcaccttctaaaattgggtgtggctggaaatagctgttgggggaaccatgggaaagacagagctctgctttgagttccaggactgtcctgcagggcaggtgtccactatgctcctaatctctgctctgtccttagccaccacctccgcccttctttttccatatcagctgtactcagccctttcaagcttatctcaaacttttgcataaaactccttctatcccgtgatactttttgtcctttacagagtatacccagatctccagggtcaaaactcctttttcccttccaatttttccaaatgttcccacttggtggccaaatgtttttttgagcaattatcatgtgctgttgggaaattcacaagttataaaacagtcactgtagcctgaccagggagacatacaggtgataatattaaacaataatacaaagtagtataggattacctgacaaaaatatacaatgggtgggaaatgtctcaggaatttagagggttaggagattatactggggctggaatccacagtgagggcctcatggaaaagcaaaatttcagtctagctggtgagtgagtggggctaggaaggctttaagtaaggcaagtttagggaacatatacttggagag

SEQ ID NO: 35822 - DNA, 2516 bp, Homo sapiens
ggggccagtaaggcgccaagacccgcccaggtgtccagacctcgcaacgattggacgagctcaccttctcgccttccccgggcccctcgcccgtcaatcacactgcttgctcgccacctgacctctgctgcgccccctttcagtggtgtaacacctggcgctctttcgcgccccagccctccggcgccccaccaatcgcttcagttcttcattggccagcagagaggtgagggaagggaaggggcgctctattttgctctctgaacgcaccctctcaagtttcccagtcttctcgtagacggtcaggagagcaatgacagcctggagcagtcgcgcgtgagcgcaaaaatgcccgctggtggaggagcgcttcccctccctcccaagcgatttgccgcatttgttctgacgcaggggcaccccgctcgccgtcttcacttacgattggctgtggccgaagcccgtcacacagcccgccccactcctctgcctcaagaggccgcacctcacgccgtcgctgccgcttagccgtgtgattggctaagagggctggcatgctttcccgccccctcccccgccgccgcaccaagaggcgggcgggaccccgcggaagttgtcagtcaaactcctccttcccaccccttgcgaggcccctccccgggccgcgcgccctggcgcgcgcacacgcgcacacactccccagtcgcctgtaccaaccaccttctcaagttgtagcggtcgctcgcctggggttctccgtgggcggccgacgggcgcgtgggggagggggttcgggccgcccagcgcggcaaggagcgagtgtgtgcacgcagagggccggggctacggggcagcgccccgggcgatgaggggccggcgttgaccgggaagagcgggcaccgcggcagtggctccgaggggacccgcgatggcagcgccctgagaggaggctccaggcagggcgggctgcgctggcagcggccgctgaggtgctggccggccggctggctggcgacgggggcagaagcgacgagaggcgcgctcggcacccgcacccccgtgcccccgcctcagttgtctaaacttcgggctctcttccacccgctctgcgcgcccagagtcaacaacttcttcacccccctccgcccccgcccttccctccgtcagccccgggagctcgccgcgcgccggggaccaggaacctccagcgctgagatgtggccgtgaggcgttggcgggcggcgaggagaagctcggcggcgtcccggggccggagggccgtggggccggggcgcaggggcgcgagcaccccgcgcctctcccccgcctcctcctgccgtctccgccgctgcccgtgccttgcaagcagcagccggagctgccaagcgtcagggccgcggagatgtcgtcgtcgtcgccgccggcgggggctgccagcgccgccatctcggcctcggagaaagtggacggcttcacccggaaatcggtccgcaaggcgcagaggcagaagcgctcccagggctcgtcgcagtttcgcagccagggcagccaggcagagctgcacccgctgccccagctcaaaggtaacctccgagggcgcagccccagcagcgagcgcaggggctggcaacgcttgcctctgcgccagcagagccatttcctgctgggtttctcctgctcagttgggactggtagtgtgtgagccgagttccccacaatgccttggcgtcacctcacgccctcctccttattcaaacaggttttctgtgaagtcttggctgtttccttctaattcccacctgaactctttccatcctaggggaggccaacacccttccccacctgcgcgcttgcttaacctgcacttcctatcttgcgtcccgtgaagtagagtccttcactcctcttccaggtttgccctttcccggtcttgctttaacaaccgcacgaaccttccccgaccttcactttcccgagtgtcagctcctctgttcggccacttttagctagtcctttacttttacagttataaagccgtctgcacccaccttcttctcaacttcacttcccattgattgcccctaagagtcatcagaccaggaatccgaatgcaaacaacggttaagagttagctggcctttggatgtatttataaagaaaaagcctaaaatttgaccagtgtagtatcttattcacaggatcgttagctttaaatggtatcctttagctcaaggaatagatttaaaatattctgttgtctgagccgatacacatggtctatttggaaatacgaaggagtaggtagtgttgctttgcagtcgaatgggaacttagtttgccaggcagtgattccagggactttgtaggtttgtacaggaattcaaattggtatccgtgcctaatgccttgcaggagaacttggcactctttttggctcacttttcccactaggtttagaggattttcgatgttatttcctggtgttctagtttattctttgtgtattactcatgctt

SEQ ID NO: 35823 - DNA, 703 bp, Homo sapiens
tgaaggacattaaaagtgctactccagtgaccgcatgaatgataggaaagcaaaacagccttattgttgatttggagaaagtttgagtggtctgaatagaagatcaaacagccataacatttccttaagccaaagcctaatccagaacatgtctaaaaatgcccttcctgaacctctgtacttaattgatagttgactagttacagagttctagactggcattagaattctaataggatagccccattatcttctggcatgacttctgctgataagaaattccatggatatttaacctttgtgggtgacttttttttttttttttttttttttttaatctgaaagcttttattcttctctcctgggcatctgaattttcagtaatgtgctaaattatccctttgggatcatgtatttctctgtatttggttttatgtcatgttgcagtctctggcgatcctttattttccattaatatgtatggataaacaaaaaattactgtaagagttggttggggcttattgattatctggttttgtttagagtaattggttagggatctagttacatgctggaatgtaggaacctcctctggcactgttcagtttctttagggaagaaccttctaattttcttttgtctgaagcgtgaatgcttgactgtcttttggagtgggatggtagactcttcagcaagtccaga

SEQ ID NO: 35824 - DNA, 957 bp, Homo sapiens
aggaggcagggcttgcttgaaggaagcgctggacgcacagcctgcagcgcaggacagagaagagacaaagaactggaaagtgataaagtcgtgggaggaggtgagactggagggagagacgaagaggagcgagaactagcagagtccatgaaggcactttttcaaagttaggtggtcaccaaaaaacaggtaatcaatcctgtcaccagccgcggggacagcgaggccttgggcttggagggggaggatgccgacgatgccgaccgcgcatcagatctcgccgggaggagggcgcgggcgctccacttgttgcaaagaacgccgggttcctctgggccattgggctgccgctccggcggggagcgcggaaggctgggcctcaggtagcttcaatcattcacctgctggttacgggtcgcggcgccggggaccctactccggacctcggccatgcaacccgcagcatacggagaacgctgggcgcccgctccgctgccccgcttccttcctgcccctgggccgctcctctgcaccccgggagccctcccctgacgcacccgtcggtccctcggaagagccctctgccgcgcagccccgacaccccccgccccgcatccgcccaggcccccgggaccctgctcctccgcctcaaacttcccttccgtctctcacaacctcgtacctcctggtaggatgtggagcgctcctgccggatcatggcactgaccagagcttcggcacacctgagaccgccccagcccgcggcgcacggacgcagcactgcggccgctgcacctggacctaccggctccgcgaggcgaaaccggtccggaggggcgtcccagagaccaggcgtggcgatactcggcgcatgcgcctggccgctgccgcccaggagtcgcgaaagtgttgatgggaaatgtagttctgggcgggggcgcccctcacaccagctct

SEQ ID NO: 35825 - DNA, 1207 bp, Homo sapiens
gtaacagcaccctaccctttgcaaaaatctccttgggaaccagaaacttaaacacaaccaggaagaaaaaaaatcagccaaaaataaaagcgaattaagacagttggggtcttattttagaaatatacctttctaggttctggtatgttgggctctgtcatctttctacctgatcaaggaaccactgtgacattttttggtaacttccagtctgtagtttggatttaggagttcaggattccaatcctaatttccaggttccagctgcgtggcccgagtagcccggccagccccaccccggggcgcaggaggcgcgcgaagggcgggagttctcgggtccccgccctcggggaggctctgggcgcggggcgggactccgggacgctgggcgggcgtgctagggccccgccgccctggcccggccttgccttgcgctgcgcgctcaccatggtgggccccgcgccgcggcggcggctgcggccgctggcagcgctggccctggtcctggcgctggccccggggctgcccacagcccgggccgggcagacaccgcgccctgccgagcgggggcccccagtgcggcttttcaccgaggaggagctggcccgctatggcggggaggaggtaggcgggggtgtcgcgggccgagggacccggggtggcgtccgatctgcggcgagccgagcggggacccaggaggcgccggcggcccaggaagctctgggggacgcgcggcccgcggcgggcgccctgggccggcggggggcctcctctctctaggccccgaaggatggccgaggggtgaggacgagtcctcaacagtcggagcgctccgctttgcccgcacaccccaccctgaacttctccctcggtccccgggagatttcccctctagccgccttttcgttgatgatctgcgtacagacctcagaactttttggttttcatgttagcatcagccgaggcgtttactgtgcccacgcatagtggggagtggcgggggacggagggagggaagcagagcctgctccctgggttaggtgggaattgagacaggtcctgggataagccagtctttgcctgcacttccttttcctgcccctgtatcccaggcctctgcatcggactcctcaaacccacttttaggtcatgtacccctggggctcagccaaagctggaagtgagcgcagagggtggactggaggtt

SEQ ID NO: 35826 - DNA, 576 bp, Homo sapiens
gcgtgagtcaccatgccttgccctctgttattgtattctgtggactttttaaagaatgctcaccccacctactaaagtgactccatgacccacttatgggtcttgatccacagtctgaagggcattgcattagggccagcccagggcgagtggccttagctgggctggctatagcgtgtagcagaggtcagtatggaaaatggccctaggtgcattctggggctccccttggggaaggttcctcttgtggggggttccctagagggtatttcctccctgtagtcatcacattccaggggccagttttccactttgtaggcctagaaatccaagttggttaggagccttggaggtggctgagttgaggggtgactcacactgcagcccaagtgtaaatatcagagtgctgattcagtcgctcacggtgaggatccagctacccagtgggctgtgttcacccatcagcacctgttctccagtagggaattctacccagaagtccaaactgtcatcagaaggtgcttggccagcacagtcctggagcaagggagttaggagaagcccggagatacctgc

SEQ ID NO: 35827 - DNA, 1443 bp, Homo sapiens
aggaaaataaatggacagaagcagagggaaggaggggaatccagggttttccgataccagccagcctgaagagaggaaaggggaaaagagatacacaaaagcatatgaggtagcaggacctggccgtgggcctttgtggctgatccaaagaggttcagaatcttaagtatgttctaggactgacacaagaggggctggacaccatcatttcctctgcctcagggtgtcagcccacaagaaatgagatggctccaggtccaagtcctgccaaattctctgtagaatatgtttacaatctggttatcttggaaacttccccaccctagtccaggtttactatttaccaaaaacaaacaaattaaagagccaagcatcagaaatgatgcaagttccgtgtcagctctcagaggccgtgaaacacctgggcaatcagcaagggtgtgatgtcatccggagaaatgcttggctcacagacatctctggtcacatgggggctttccccactgagctcagtgtttctgatggacaaccaagacacaacagaaactatgtcacaataaactctgtaagtcatgtgatggaacacaaagctgtagccacagagcaaagattgagagcaagcattacttagcagaatctggctctgctgggatgctggcctgctttttgctttggctggaaagtcagctccactgcaatttcagccactctccttccaggaaagaagctctctatgaaagggttttatcagaggcaccagctctagaatttctttagcaaaaatcctgaactcaacaccagtcttccctactgagctgctgtctccttgtgtgggcttggcctccacgtctgcccccagggagaggcaggcagcctgagccagccactccttcatcccagaccagagtggcccacatggaggctttaatgattactggtttaagccaagggaagggtatggatttttgcagacaaagcattctgctcagaaaatgcctggtagcaagttgagaattttaggaagcagaaaggtaaagaggcatcgcgatgggagcaggctgtagcctacaccattctcttgccctcattcttccagactcccactctttgcaaaatagctgttgaccacctggaatcctggcactgggcccaatgatgtgggcagttcataagtggacaaccaggtcactgtcctcaaggggcttttgttctactcaggaaaataaaactgccacagcccaatgcaataacaagcaatagagaacagcatgcaatctaccataacaccggagcagaaatgccacacagggggaaaagcacagatgttcccaatgcaactgaattctagcccagccactcactagcagctgtgcgactttgggcaagttgctcaaactctctgagcctcagtctacacatctctgaaatggagataaaaatgcc

SEQ ID NO: 35828 - DNA, 1018 bp, Homo sapiens
ggggggccaaggggggagaatctcttgaggctaggagtttgagacagcctgggcaacatagtgagactctgtctctatgaaaaatttaaaaattagttgggcatggtggtgcatgccggtggtcctagctacttgggaggctaaggtgggacgagcgcttgagcccaggaggcaggttagagtgagctatgattgtaccactgcactccagcctgggtgacagagcaagattctgtctcaaaaaataaaaataaaaataaaaataaaaattgttgaatgaatgaacatctgaatccctatcctgctctacagctagctcagagtgcctggtgctggggttaaagtctaccacggcaggaacaagaaattcccaggaagtctccctcctaaaacatgtagcagtttttcattatccagagtgatcattctgaaattgctttagggggaaagacgtgggaacttcacacttccacccagggtgccccctcagcaatctggaatgatggactaaccattagctgagggaggagggggcaggacaggatgatgcaaaaggccaagctagccgactgccaaatgaaattgtagtcacttgacagggcaatggcatgagcaaaggtctcctgtctcccagaactgttgccaagcattgtgacacacgggcctaatcgcatctgagtgcggtgctgcagaggagcggcccacgcggctggcagggcttcagtcactgcctgcttgcctgaggaagcccatgcatcacgatgggggccaacagggctccccagttacacacggggagtgaggaccaaagcgggagagcaagtgcctgctggtccccttggaaacaacacaagaaaataaacacttgtgggtagaagtaggtgtccaggcctagtcaaggttgccagggaattttgtgctaatgggggttctgtttacccctaaggcagcagcttgggctgtgagcagagcaaggctgttaggaatctgggttcaaatctcagctgaccctccaagc

SEQ ID NO: 35829 - DNA, 2433 bp, Homo sapiens
gaggaaaatgtggttgcaactttgtcctacaaattaggacaaagagacctttgttgccatataacaatattaaaaaaccagtatgcctacctctggatgtatttgctacaaataccagtattagattgtaattgccaatcctttaaaaccagttttaagatggatataaagccctaaaaatcttgcagcttccacatgcacatctgaaaaacttccaatttacaaaggacattgtggtatttttggaaaacaaaggaaaatgacacatactaatttctgtcatttattcacgtcataatccccaaagctacctttattccacgactctttccaccattttcctacagtcagctttttttaaggctatagcctttaaaaacttgaaacagaaaattttaaggatgcaaccattagaaaatgttcccatactaccatttaacattccccatttatcattatgtttactatcgtgtaatttccaacataatattatgaggtcaaaggctctacgaacgccgttttacaatctacctagggaggcaatggctgtgaaacacaccacaccaatgacaggaatgcgggtcactgtgacacaacggatccctctgcaaagtcaaagctaagagttcactttacgctgacggagcttctttccaggacccccacccccacccaaggacaggagagtgtcgatttcccaaggtgtctggcactgcttcttgaaaacgcagctctcatctggttcctggaaggtcatactggttcgcgcagggctcgggacggggcgcttggcttctgaggcacccgcgctggctcctcacccggtgaccttcaggcctctgcgcttggcctgaccctagaagggccaccgcccttcacagcgggcgggcaccgtccctcccacggccccgccgactgctgacgcggtggccccaagggtccaggcccgcacttgccccactcccgcggcgccgtcccccatagtcggtccccgagggccgcgcccagctcctgctcggatttcagcccgcaccgcaccccagccgccagggaaccttccagaaccctgcccctctggctttctcccgaaagcccagggtcgccgtccaggaagaaacttcgattcatttattgagcgccgactgtgtccaaggccgagggaggggcggggtttccacgcggggagaccccctaggttctcgcctcggtaagcgcccgcgttccagcacctcgagtcgcccgcgggcccccacccctcgggccgggcccggtcctcgaggaaaacccacggcggggcaggaaggaacgaggagagccacgctccttgcccgcctcgtcccctccactccccttcacctcacgggaccccagggaagccgccggagctaaaattagcaacccgcgcagcgcgcgctcacgtgcgcgcggcccggcgggggcggggagcaaggggcgcggtccgggtgagtcaccggccccgccccactcgccaagaacgcgctgacgtcagccgcttccccgaagggtgacgtaagcgcgccacggggaggccgaggcagctgatagaatgttctgagtttcgatgccttaaagggaccaggcctgggatcgtgaaacatctggggaaacgactccactcactcacctgcagactgagagcccatcttgtaccgtgttatactttaagagagttgactgttgagatgatgatgaaaacggaagaacaactgagcctagttggaggctctttgaagtcccagaacctcctcctggaagccctctttggttaaccagatggacatctcagttgccctctgagcctgaaccaagtgtcaggaagagttttctatggcccttgactccttaactctttgcttatagcgtctctgctctctgatgcctctgctgtcagagaaaggctgtggtttaaatatttatttatgaatccatcagcttgggccaactaggtccatttatcaccgttttgactgtgtctaaactgtcattagtggtgtgactagaaaccagttaatttcgctgggtggtaaattcgtggactgatctccaaaccctcctactgtgctaatgttgccaatggaagtttccagaggccaggatccctggccaacacgtgatcgtaaacaacatcagggcctcacagggaactcacaatttactgaggtttgctctgtgccaggtgttttcatgatcctccatccccttgtcgtttagtcctcttctctgagtcctccccattttactgatgaggacggaaatcgaggcacacgattaagcgtttccctgggtcacacagctaatgaatggcgagctggaagtcagtcccaggtcatcagactccgaagtccatggttttggtgatgaaggtgggctgtgaaatgtgtgtcttattctatgcatgtgagtccgctggaa

SEQ ID NO: 35830 - DNA, 3310 bp, Homo sapiens
caattattgttttgccatctactattacagttatatttatttaaaaagtaaaaggatattttaataatatctcaaccactgaggatggtaagatgagcaaaataggatacccactcccaaggagttcataaaactgtagggaaacacatgtataaaaatatgtatataaagaccaaatagatgtgtagcccctaggactctttggctcgttagaaaaaacagtacaaaatggcttaacaaaaagtggagatttgccggttcatatagctgaaaactctgcagaaagtgtggctgccacccagcttgatatagagcctcttggctctaacctttttctccagttgcccatggcaacctcagcagccccaggctacagccccctgccttcaagtccagctagtgagctgcctccagcagccccagcccggtgctcccgcagctcagtggctctacatggatcctgagccccttcctggaccaaccacagtggtccctggcctggtttgctctgactggtcacccaatgcacagggaccggaaatgtgcggggagtggctttctcggacgaaaactgggaaaccattactcgaattgggatggatagatgctgaatggccaagaaacaaaaatatcctctaagaactatgggaacacagaaaaggtgcgtccacggctagcctcataagccggatgacctgttcagtcccacccttaacaagtttcacattggcttaatgctctgctgtcactgactcaacattcttaataatttctgaacaaggggctccacatttgcgtttggtaataggccccactaattacatggctagtcctagaggtgactaacattatattacctacacaaggaagtgactttgaaactggattttgaaagatataatgaaacagcagttttgtaaatggaaaggtttgggtggcaggaggaggaggaaattccatcataggcaagaatgttagacgtgagaggcttgatgagaaaatgaaaccactagcgcctcaagtggttggggcttaaagtgactgtggggtgtggccccagtggagtgggaacaaaatattccttcgatgaattaatattccttcaatgaattaataaacacaagtgaagtgaaatttaacatgagaaaaaatagtttatattttttaaacctccatgattccaaatggccgttacaagataactcctattttccacctcacttttctactgcacactaaggctaactttcccctgtgtaacataagtgcctactgatctttatcactagcgtgttagcaaggttagcattccacttctgtgatttcaccatccaaatatttatgaatcagagagatgtttctaagaacatgttttccaattgtttactttataacaataatagtgtgctttaattacaaagatgacgttttacaacctaaatagaacaagcctcagttgtgtgggagttcattgctttggtgataaaagagaaacacagacagtgactcaggtggaacattcgtttcattttcactttgtgtttcctttggttctacatgtcaggacatgtaacagagccaaggcagaagagtgctgtggggggtgtgaaagttaaagctaaggctctatatgccagaaagaaaggacaatgtcccctctcacccactggctcccctttcaaggccaatgccaagggggaaaaagaaggtggcttccctctggcacatgaatggtgagctagttaacagtcagtgttttgttcccaaattctttaaaggaatgctgaagagataacactggttcttctgaattgagaatctctttgaattcccactgctgtcttatttccatttaaattaagcttaagaggagaaattaatgttggggtatctgctaagtgcccagtgtggagcctctttctgtcttgttcattcttggatgtccagctcttgaacaatgccaggcatacagtaggcactcaatacatacacgaggaatgagtgtatgaatttattcctcacagcacttttatgtgaggaagatgcgggggcaatcttcagataagaaaatagacattaagtgttggaaattgagagaaagaggtggtttgtccagcaaggcatgtccaacacagacagagacaatatggggcctcctcggtgactcacttttatgtgactaggtatgtgtctcttctgtagaaacttggtcaatagggaatgacgacaagaaaaaaggggcccttagaaaataatatcaccatcatgatcatcatcttcatcatcgactgtagacacagcgcttataatcacaaaattgaagaactgtaaggaatttcagaatttataataatagaagctcccatttactaatgtgttgttatattctgggtactgagttacatctatttatctatctatctatctatctatctatctatcatctatctctctatctagctagctatccatccattcatctatctagcaatcatctatcttttcaccccctgccccatatcaaccctgcaaggtgggtcgtattagctttatgttcaatgttccaggccagtaagtggcagaggttgagactcttgctgccttctggagcccttcccttagcacagcctccttgactaacacaggaggaatttgaccctcagagagggacctcaggtttctcagctagtgcagaaccagaacttgaaccttggcccgagtgttgtttccacttaccacagtgttctcagtgtagatgagtacactttggatttctttccgtttcgcttatataagtcactatgaggtttagcaggacaaaaactgagcttattgaagattaattcatcattccatctcctaccttagaaacaattttattctttcctggattccatctcagcccctggcacatggtaggcattcaaggagtgcttgatacataattaagccaggatttgatttggatggaatctcagtcttaggtaccccttaatggcaggactggaaaaaagtaggcaaatacactcttcgaaagacacacagtaatattagtttttgccttcatgaaagtttatactttcatcttttaagaattaacacatccgcactatagaacaatgggataattcagaaatatataagtagaagagaaaaaaagttacccacccatacttccaacaactaaatacttttaatattttatggaaatttctttatttcccttattctacgtattttgttgtttatttatagcttttattgagttatgattgttctgtgttgatatatatcttactttttaaaattt

SEQ ID NO: 35831 - DNA, 4275 bp, Homo sapiens
ctcaggggctctgccttgctctgttcttttccagtctctcaattcagcaggcatttcacggttctcctgggggctgaggggagggaggcaggcaggagtagttttcgttttccctgggtaagagtttcattcaagtgggagtggacttagttctctgtcaagattcttatcacttttcgggtttagaatatcaggatcagacttccgtgaacagctgacagcatttctatccaacttggagattccaaactaagagtaattagaatgaagcaagattgataaaaagaactggaggcacaatggtaataagaataacccgaccggggtgttgggggcttctccccccaccccaattatccttcccttgcattgttttgtggaggacggtctggctgtttgtttacttgacgccctaagttgaatttccccttaaggacaggagcagatctccacagatctggcttgggtgttttaatggaatcatagttcaacctgtaaactggtcaaaatttctgtttcacagcagaaagagtaaaaagcttcacgtgttctccctcctctccttgcttcactttataatggtgctatttattccagaacaatctataagtagataaaatagctaagtagagataacaaataacttcattcaaatgcaaacactcctccacctaatcccgcccggtgtccgccgggctgctccgacacgcccggggtttacctgcgcgcactccagcgggagggcgggttgtggaggtgtgctgagcggcgcgcgggggtgagggcgtggaagcggagggtggggcccggagagccgttaccagggcgaaaagtaaagcgaaaacacccgccctgcacttcccgcgcgacgccgctggaaatcggttcaggtccagagcaggatctcggaggatcccgcgtggaactccagggctcccgggtccgccggggcgcaaagacttccgaggccgccctccgcgtgttcccaggcccgtggagaggtgggtggtctgagtgaggtcgggcttggcggcgaggaaccccggtggggggaactggggacttcaagtgagacccaggctccagacacctctagtttctaccccaaattaccaaactgtgaccttcggccgcctctctcccagaggcaggtggaaaggagcaggtgtttctgcccttcaccgtgcccccacaccctgcggccgcgcaggtctccctcccaggcaggtgcgaaagtcccaggccacacttgtgtctacaaatagtcatccacgggcagtcaagaaggttccttggttctgccgctctctgagcagaaattgttggggtcggggaataagaaccaggaaatcgtttttaaggttcaaacccagttctgctgaggtctcagctcgaatctcggaccacggggccccgcctttcccgccaccctggcttgagggcagaggggatttctgctgcgggttccgcctgtggtcattgcgtccccattccgggccgtccggtcccagtccaatcggctctgggagcagaagaacacgtgaaagctgaacatgggttttccctaaatattgcctgagagcggggcgacccccaggcctgggcaggttcgcggaccccaaagcaccttctctttccccctcctcctggccgctggcttccgccccctcctaccctcccaccgggttgcctctgattcctcctggactccgatcttttcacgctcttgttggtttcactgacatgttcttgtcaatttcaaacgctttgtgattgtaaaaaaaaaaaaatcgaaccgatacggtcctaccactcgccctagtttcggagcccggagctgtcctgcgtgtgcgtccatgtggagtgtccggggctgcgggctcgggcgcacggtgccagccgagggctgccctccgcttttgtgttaaccggcgggcttctcgcggtccccgccgcagaggtcacacccggcgggtaacggcgtggatacaccgaagggtgactttggacaccttccccacaccacagactaacgcttctgcccctactccgcccctgctagagaagtaggaggccagtgggggagggggtattttcctgaagctccagaaaatgaccacgcattttagagaaaggtcgtgcccgcttcccagcctcacctagtctgggctggggccgggacccgcctccccaccttccccgccccccccgctcttcaacctagcggagggacagatgccagcgcggtggagtcatgccgctggcttgggcaccattggtcatgcctggaacacgcagcagcgagtacgcacatctggcggctatcccgggcggctccggtcctgatatggagagagagggcgggctggtgtgtgtctcagtgagcgaggctgggggaacgcgcctgggctggctcctccccgaacttgcatcaccagtgccccctctctccacccgccttcggccccgccttggcccctcctccaccccccttcctccgctccgttcggccggttctcccgggaagctattaatagcattacgtcagcctgggactggcaacacggagtaaacgaccgcgccgccagcctgagggctataaaaggggtgatgcaacgctctccaagccacagtcgcacgcagccaggcgcgcactgcacagctctcttctctcgccgccgcccgagcgcacccttcagcccgcgcgccggccgtgagtcctcggtgctcgcccgccggccagacaaacagcccgcccgaccccgtcccgaccctggccgccccgagcggagcctggaggtgagcgctggaagccgagggagtgagcgcgacgagggctgctcgccttcattcccttcgcgcccctctaagtaaccagtccgccgacccctgacccaccccggatccgcgcccccagcctccggcttggaaataactctggcttaaacttcttctaagccaccgctgctcctcggcgcttcgaaaagtttcccgcaaagcgaaagaactaactttctcttttgacttggggcgcgaaaggttcctggtgacggaggtcgggcgtccactctgccgccagcctcgagcgccgcttctctccgccgacggcgctggcttgcccggctgggagagggcgtaaggtgggtgggcgggtgcgttggggtgtccgaggctgcctcgctcgccgtcccgctccatccctcgcttcgagacacggcactgtgggagccgatccttcccgggtgggggggggggggcgcagagaggcacgaaggccggaggcttgcgggagggctgccccacgcgccgagaggaatgaatggggaaggggcgagagggcgggaggcgtcccgggcgcggccgctgggggtcgccctgggtaccccgcagcactggcggcaggaccgtgaaggcaaccccgagaaaaagttagctgggataagcttggaagtggcgagcgctggtgtcgcgctgtcccggggcggaagacggggagggctcccggcaacggctggtgtccggaccccgagcccgggactcccacacacctgggactctcactctggcttttccttcggcgggtccgcgggagacccaccgtggcggggaagcgagggtgtggagccacttgtgcagatatttgagagaatggctttgtggtctagtgccaggactctgagcgcttacactgcaatcgatgtcgttgggcctcagtatgcggagccgggaaataagggcacatgggcagtaccggccccctctgcgtgttggagggcacaatgcagtggttggaccagataactactaaggtcctttctgtctggagattttcagattttggagtggtgtagtggggagaaaaggagccagtgaggggacttgaatggggtgggtctctatctaatgtcattcaccagtgtccagacagtgggggaaaggggacttttctgcagggcatcttttccctcaccagctttctttccactggattcgttctccttctctgctccccccactcccattttcatttctcatctacttcctttcctcctaaacattttcttttccctaatttcattgcataggtcacatatgctttcttacaaataaaatagttactaaatccttgatgaacccagaaagaaaaggagagccagaaaatctggatgttctctcagtgtacccctttcgttgtaggtgacagtcatatcttctgttcgaagtttctgtctctgtaacttaaagtgaaggcaaaaaattggtattactgtcccc

SEQ ID NO: 35832 - DNA, 932 bp, Homo sapiens
ctggcctgcatactctaaggatgatttcttccattatgctatcgtttgagaagacaggagggagtaggggagaacggtgggggctcccagcaaaaggacaagaccctcagggcctggggtagaactggaagcccactcttgacaatcagtccttacccaggagcacagagtcagggaaatctggtcccagcacccatgcccccttcccctcctggctccctgacgcaggagaaagccccctgggactcactgcgggccggcgggcacctgtcactgatgggaagagctcctgtttccttgccttgtgccaagagggcccaaggcagacctgccagcagccacgagatggcgctgcgatccaggcgactccgggccctgcagccaccctccccgaggctgccccgcggaggacccaagcggtcgtggaggacgctctcccactccccagcttccctcttccctccctcctccttcctcgccccctggccctgcgaagagtggaggccgcatcagggagccctaggcccaagggcgggctaggactccccagtgactcccaggcagcccggggacagctgcttctcccctcccctgccctcccttcctctttccctgggctcctccccagccgggccagccagtcctgggccactgcgctcccacagcacaactgaagcaggatcgcaactcgcagacttaacgactgcacaactaaacatcaaaaatgaactcttcgttagaagacatccctctgcttgaaaacgtagccgtcgaagttccctctatgtgtcaaaaataagttatgcgtaggagccagagtcccgtgcctggtgtcacctctctttcccaaaatcctctcccatcaagaaaaccatgcatgtgcgtgggtccgcgcgcgcgcacttggagaggtagaattttgagttgaaaat

SEQ ID NO: 35833 - DNA, 1063 bp, Homo sapiens
gagtcggccctttgtgggttccctccgcccaggctgactagtccggcgttctccattcccgcggcagcaccccccccacccgggggaatcctggaggggctacaggcgcgggtggtggggtggcagtcgctggctgcgccaggatggggcggccctcagggcagtgcggagcccacgtgccggggagcaccggccatgcccggcccagccaggcgtcggcgccctcgggcttcttcccccagagggcgcaggagctggctcaggagccattccaggagccgcggacactgtgcgcacgacagggtccctggatcgcccccattccccaacatccctacgcccctacctctgcttgtctccggccgcacccgccacctctgcacctccgcagtcaccaccacggaactccagcacccacctcctcgccccccgcggcgcgccggtccccgcaccccacggccctccctgagcctctcgccctctacctgctgctgcggctgcggctgcggctggttcccgggcgccgcgacgctcctctgcaggacgctgccggcggccgggagcccttgcgacatgccgggcgctcctctggcccggcccgccccgccccgcccgcgcgccctgcccgtggggctgcctacgggcgctgtcccgccgccggcatcctcgtgccgcacccacggcctcgcgccggccccgccccctcaggcttcccgctctccccgctactccacgcgtcggcccagtgtccccgcgcgccagtcccggcagccgtccttcccgtcccacgtctgccccgccctccttctcccacccccgcctcgtttcctcctctgcccgccctctctccgcacctcggggtcccaaatcccacccctgccgcggctttccgccggcgccccgcgcttcgtggaagtcacgtggtggctctgaaaccccggagggaacgcgaagcccacccacgcgaggcgacgcccgggggggtggggaccaggggggcgccatgcagcctttggggtccttcggcggctgccggggaactcaggttgagaaacacagtggg

SEQ ID NO: 35834 - DNA, 805 bp, Homo sapiens
ccccaacagaggcagagaagtgttggcctcgagctctgcctatgattttcctgcagaactaaactaccacaccttaacctgctctcctcaggggtgaatcaattcagtgtctttcctcttggcaggtgagtctcattctccaattgttttgccactttggggcatcccctgagccttctgagaggttgagcgcaaggcatatttcttctaacaactagctcactttattgacattcacctacctgaaagcaggaagctggatcagataactttggggacttcctttcagttttgactttatgtgcgccctctcgggacctggcttaggattctgctcatggtaaatatttggtaagccttactggttgtatgactcatgagtgtggttcctaataagagtcacagaaaacagtaaaagcagttccaggaatttgctgcttactcagtagtggtggatgcagcagggaaaataatgcaggcttcctgcccatttcccagccacttctccgtatatgcacctggtcacaaagggatggtcacaaagaccataagacagaccccagagaccccaggcaacgtgttccctggcagggagtgtgtcctgcggatggtgttcctcaaggagcacaggcttcttaggggcggctttcactcaacttggaagggaggtctaggtagaggggttcactcaagtggactccttctcatttcctcgtttctttctaaggaagccacttttaagtgtgatggcattgagactgtgtattgctgcaccccagtgccagtgaacctatgaaatacagcc

SEQ ID NO: 35835 - DNA, 2036 bp, Homo sapiens
agcgagactctgtctcaaaaaaaaaaaataaaataaaataaataaataaataaaacatgcaaaaggaaagatcaaatgctgcttgggtgaatggctgacttccagaattaccctttccaggagaattcctcattgtctgcggctgcattgtccaacaggtgagccactagccactttgtagttactgagcgcttaaatgtaactagttcgaagatgtgccgtaaatgcagcacaccagatttgaaaagcttagtacgaacaaaagaatgtaaaatatctcattcatttgatattattacatgttaaaataccttggatttattgggttaaacaaaatgtcttatttccattaacttcacctatttcttacttttagtttaaaactacataaagattagcttgccttgtattttcactggacagcgctggtctaagtaattaataagacccagctgacattagcatctatttctttctcctctagcgtttctcgaactggttctacagtagcctggggcaccgttaattctgccaaggcctggcgtgggatctttctgaatcctaagatcctgggtgttgggtaagaggatgatgagtaaagaactggctaactggtcccgtacccactgcgcatctcgcagagcgggctcccgaatctcctccggcagagcgtccccgagcttttgcacgaagcggccgcacagttgtagcatttcggtcacagcccgcttcgaggtgcagcgcacccgaaagtcttctcggggagtggcggagaccaaggcctggctctctgtgccagccgcgagctccttgtcccatggagggtcaaggaccaccaactcaggagaccccgccatttttcgtcggaactgtgggcggggcactctgggagcggaaaagcgggttcacactggtgtaaccagcatgcatccggctggaaactcaggacgctgcagctgaaacgttccggctccggctctgctggccggtctaaagcggcagccgccggggcgcaatgcgagcggctggcgtaggcttggtggactgtcactgccacctctccgccccggactttgaccgcgtatgtgagggcgatacgggaccagagggagcagggaggcccccgtcctttcccctcgtgttatctttgctctcctcccttgggacgaaaccccatatcccccgcccagacccttgtttatggccatatgaccttgcccctcatttccctattccctatttaacctcagacataccgatttttttttcctgattcagtagcggtaagctatctccacaaggcttttgtttgctcttctgagttcctggaatcgttccctcactccccttggctggcctgtttttcccctcggggctctcacctcctggctgagatgccactctttgtgggaagcggtcctcgaaacgcgttcaaatcggggagaggtcgggcgcgggctcacgcccgtaatcccagcactttgggaggccgaggcgggcgctgcgcatctcctgtgtccaggagatcgtgaccagcctgggcaacatggtgaaacctcgtccctacaaaaaaaaaaaaaaagccggtgattgtggcgtttgcctgtggtcccagctactcgggaggctgaggtgggagaatcgctggagcccaggaggtggaggttgcagtgagctgacatcaagccactgcactccagcctgggtaacagtgagaccctgtctcaaaaaaaaaaaaaaaaaaaaattcacaaatgggggagagaggcaaacaaacaaacaaaaatacatggccgagtgtggttgctcacacttgtaatcctagcactatgagaggccgaagtgggtggatcgcttgagcccaggagtttgagaccagcctgggcaatgtggtgagaccccgtctcaattaaaataataatacacacgtaaaatcagttacaaactgttttacccattacgtgggaaactagagactaataatagaggattaaggggggttttatttcagggggaaatcctcccaggagctgaca

SEQ ID NO: 35836 - DNA, 917 bp, Homo sapiens
taggataaattttatgttatgtgtatttactacaattttttaaaaatcgtatatgtagtttaacaggtgtggtcaatatcaaaacttaggtatttaatcttgttaaattatataagcagaaaatgctggaaaaagtacctgtcatagaaaaaaataaacttcctaaatcaaagtgattttatgaaatgatcttcaataaatattttgaaatgaattcatttatggaagaatcaaaactaggtcagattgtccaaaccagactaagaaactgaatagggtattttatgaggtatttaatgactcatcagcaccattttaaatgaaattcctacatttaacaggagattatattaaaactggacttttaagctctcttccaactctgtatttcttttccctatttcctaccttctgtacacataccctttgtcagactcttaccattaaatcgtttaaggttcaagttaaattacttcatcttgcctcatcacccagccagacatgatctttgccctctaaattgtttagccattttcttcatgtattcatccatttgtttgtttcagttattaagcccctcctcctataggctgcccactagtctaggttcctaggttacaaagatgaataagatatgatctttgccctcagttcacaatttaatcaaggagatagccaagtggacaaataatttcatagcaatgtgagaagtgctattgttagaggaacccctgcttaccaggcctctggtttaataaaacatgactagaggctgggcacaatagctgacgcctgtaatcccagcactttgggaggctgagacaggcggattacttgaggtcaggagttgaagaccagcctggacaacatggcaaatccacatctctactaaaatacaaaaaaatcattcaggcgtg

SEQ ID NO: 35837 - DNA, 1181 bp, Homo sapiens
gagattttggtgcacccatcaaccgagcatatagtcttttattccttgcccctcttttacctttctttcccttggggttcctaaagtccattatataattcctatgcctttgcatcctcatagcttagctcccacttataagtgagaacagacaatatttggttttccattcctgagtcacttcacttagaataatggcctcctggccgggctcagtggctcaagcctataatcccagcactttgggaggccgagatgggtggatcacttgaagccaggagtttgaaaccagtctggccaacatgacgaaaccccatctctactaaaatacaaaaaaaaaaaaaaaaaaaaattagccaggcgtggtggcaggcaatcccagctacttgggaggctgaagcacttgaacctgggggcagaggttgcagtgagctgagatcacgtcattgcacttcagcctgggtgacagagagactcagctttcacagaattgaagagagttggggccttgctctgggttaggctttgacttaaggaaatgttgtggctgggttcatctgtccagatcactgaaactttctccctatcagcaataaggctgttttgctttcttatcatttgtgtgttcactaaagggaattttaaatttccttcaagggtttttcctttgcattgataatttggataaatgactggcacaagaggcctggcttttggcctatcttggcttttgccatgccttcctcactaagcttaatcatttctagcttttgatttaaagtgagacgtaatacttcctcctttcatctcaggtgatccgcccacctcggcctcccaaaatgctaggattataggcatgagccaccttgcccagccctagagttatttttgaataaaacaaacacatgactgttacaaattaactctaaacacagtggagaatctcagctttctacaccacactgtatcacactctactccacttcctaagagcactgggcaagtgtaaagtcacagccacatcaaagaattgaaatctcaagtgtggtgattcttttgtttctgatctaaattaataatttgttggttgtattagatatgattacacacccccttctctttttttcaaataaatgaaaaaatgctatctcagctgcctgcctagactaagaaacaagtat

SEQ ID NO: 35838 - DNA, 1725 bp, Homo sapiens
gatgtcctgagttttttttttttttttagacaaggtctcactttgtcgcccaggctaggctggagggcagtgtggtgcgatctcagctcactgcaacctccgcctcccaggttcaagtagttctcctgcctcagcctcctgagtagctgggactacaggcatgcaccaccacgcctggctactggcttttttttttttttttttttttttaaatagatggcatctcagtatgttgcccaggctggtctcgaactcctgggctcaagggagactcctgtccggcctcccacagtgctgggattacagacgtggccaccgagcccggcccagccctctactcagagataacgtcaatgcgcaggcttaggttgaaggattaatggtcattagtgcaccaacagcccctacctttagtgggcacatcagcacattccacgattaatcacagctcctcacagctgcctctaagtagtgacactaccgaaggacgggagttcctcctcctgcagtctgaggacttgcactctctaacggagtagattccaataaacttgcttccttcactgcgctctgtgactcgcctccaattcttccctgaagtagacccaagaaccctctcttggggtctggatcgagacccctttttccagcaacacaacccgcggggccgcctcccgcccaccctcaggtgcaggagaccccgggccatgcatccttccgggcaggaaaatgtcagccagcgctcgccggccgctttcctcccccgcctcccgaagttctcgcccggtagctccccgactggctctcgcgccggacaaaggcgcacgctgattggccggagggccgtagtcatgcaggacgcgcgactctaggggcgggaccagacaaggggtgactgccgcgcggcgcgggggaggagaccttcatctgttcacgcggtagcgcggattgcggttcgcggcgcgcgccaccggggaaggagcggtgggccgaggggttggaggtggggccccaggaggacctcgggctgtgggccgggagagcggagtcggggagtggggcgggggagcgaggtggcgccggggagcctgggatatggcgcggccagacgatgaggagggggcggcggtggcgcccggacacccgctcgcgaaaggatacctcccgttgccgaggggcgcgcccgttgggaaggagagcgtggagctgcagaacgggcccaaagcgggcaccttcccggtgaatggggccccccgggacagcctcgctgccgcctcgggagttctgggcgggcctcagactccactggccccagaagaggagacccaggcccggctgctgcctgcgggcgcgggagctgagaccccgggggccgagagcagcccgctgccccttacggcgctctccccgcggcgcttcgtggtgctcctgatcttcagcctgtactcgctggtcaacgcctttcagtggatccagtacagcatcattagcaacgtcttcgagggcttctacggtgtcaccttgctgcacatcgactggctgtccatggtgtacatgctggcctacgtgcccctcatcttcccggccacctggctgctggacaccagaggcctgcggctcaccgccctgctgggctccggcctcaactgcctgggtgcctggatcaagtgcggcagtgtgcagcagcatctcttctgggtcaccatgttgggccagtgcttgtgc

SEQ ID NO: 35839 - DNA, 908 bp, Homo sapiens
ttttcccaatgatttgtaattcattactgttgttattttgtactgaaagtgtcccagatttgagcagtggaagctaactctttgtccttctgcctttgtgaaatgcccttattattttttaagcagctaatttctgacagaataagattgtgatagttaattttgggtgtcaatttgactgggataagtgatgaccagatagctgataaaatattatttctgcgtatgtccatgaagttattgctggaaaatactatcatttgaatcagtgaactgaataaagcacctggcccttttcaatgtgggtagcatcatccaatcctccgagggcctgagtgaaaccaaaagttagagggaaggtgaatcttctgtctctgtttgagctgagtcattcattgtttcctgcccttggatgtcagtgctcctggttcctggacttttggactcagacagggacttagactatcagctccgcaattctcaggccttccgactcgggctgaattataccacttgctttacctgtttgccagcttgcagacaacagagcacaacagagcatgggacttcttgacctccataaccatgtgagccaattcttataataaatagcctctaatattatctctacataacctgttggttctttttctctggagagccctaatacaaaggcaatctgggttcatcttgtatttaccctgcaccagccatggaactggccatttcttttttttttttttcttgagatgcagtctcactctgtcgccaggctggagtgcagtggcacaatttcggctcactgcaaccttcacctcccgggttcaagcaattctcctgcctcagactctcgagtggctgtgactacaggcgcccaccaccatgcccggctaatttttggattttta

SEQ ID NO: 35840 - DNA, 1696 bp, Homo sapiens
tgcctggcaaacagctggtactcaggaaacattgttgaactgaattaccatcaagtcccaggcctatgggagttacaaccaaatccccatcgcttatgtaataatacatgctgtgtttcccaagcgtggtgggtggtacacgagtcggtttcacagagtacacagttaaattacttgattgtaatttctaaatacttatgttagtttattaggaaaaaacataatcgcacatcaaatccaagactctgcagacactgcttagggtgaagctaatgtgggcagcacctactgaagtgctttttaaaaaaaactgagtcaatttaaagaaaaatatccagtaaataatacacgtgaaacaagaacttggccataacagtaagggatgacatacaagtgactaaagtttgaaagacactaacacatcaacaaaaatcaagcccctcctgggcgtgtgccacacacgcgcctccaagggatcaggcccgccgagacctactgcggagaggcggcctccccgccgacgctcggttcccgggacggtgctgcggagtgtgtggagcaggccagcgctggtctggaggctgggttgggggaagcaggccagggatccaaagccactggcacaagcctggccggcggcccatgaactccgcgccaagaccccagacctcgttggcccagcgtcccgccagctgcgcggcgggtttacctatcccgcttggtctctggaggctcgtcccggatgcaccatcgcccagaccctcttcctcttccttccacccctagcccgccccgccccgccccgggttagtcccggacgcccgcccgctctttcaggccgcccgcccctctctcctccctccgagtacccagccctactgaccggcctcttcccaccacacagtggccgtagcccttcctcacacagcgccaggcttccatcttcgccctccgcgtgcgtccagttcccaggccccgggttccacctcaatctctataatcgatgcgacggcctaaagtatctagggaaccccatcactcttaagtaccgactccagtcctggctgcaaggcatgctgggaggtgcagtctcgccggccggcctacactccatcttgcgcagtcagagtccctgaatgccttaacccggaattctgctcaaggagcatgcgcagagcgtgggacgcgcgtgcaaccatttctgaagagggcaaaacacccgaacttcgtcttaaagaaacagaaataaactttcttttttttctttttctttctttctttctttttttttttttgagatggagtttcgctcttgtcgcccaggctgtagtgcaatggcacgatctcggctcactgcaacctccacctcccgggttcaagcgattctcctgcctcagcctgccaagtagctgggattacaggcatgagccaccacacccggctaatttttgaatttttagtagagacagggttgcaccatgttggccaggctggtttcgaactcctgacctcaagtgattcgcccgcctcggcctcccaaagtgctgggattacaggagtgagctaccgcgcccggcagaaataaacagagcagtgaaaatttttaattgcccaaagtgcagattcccagctgaggctgaacaacgcatcctctgggtgcccatggaactgaggtaccacagaattttgcaattaa

SEQ ID NO: 35841 - DNA, 1633 bp, Homo sapiens
gtgcggagagtagggaggcaaaaggaagaggaacagagtctttaggataatggcaaagacttggcatgaatattttgtggaatgaaaaggaaccttgatcacaaaaagataaaggaactgccaagcgttgataacaacctcagctgaaattggaaactgtagtgagtgactcggagaggtcgagtgacatatttctttcttctagccagaggcggactccagattttcgaacctgtggggatttttaaaagattgatattggcttgggagcttttttgggttgggggcttgctgtgcagatgtgttacagaaaggcgctcaatggaaggaaattcgtcttagaaagaagtaagggatatgtctcagagaatgagatgttgctgtgggtatttaaaatgataggctgtgaataggtaaggaaagaaggtgctaggctatggtatctctccatcccttcaacactccacttaagtttgtaccacggcggggcggaggcagggaggaccacgctctcccggtgtggcgtggctataccaactctcataaaatctcataaaaggtgacggagctagcgtacaagaggtcgtctttagtggagaggcctgaggtctccgcagtgacgggggtggcagcgcgaccccttagtcttcaactacaggccagtcccaggtgccccaaaggggctagaatctaaggaggagtctcccctccccctagaagcgggagatagcctggcccggaagcttctctgctgacccggaagcagagctgtgcagctgaggcgccgccgtggagccgccttggagccaccgccccctcgccgcttcgccgctgcgttggggaacctggaccgcggcggcgccgggtttccctcatgatcccgggcgggtggcggcggcggcagaggcggcgggaggatgacctcttaccgggagcggagtgccgacctggcccgtttctacactgtcaccgagccccagcgacacccgaggggctacacagtatataaggtcaccgcccgggtgagtgccggtgtcgggctggggtagagcttggattgggacctgaggatctggggtggggaccctgatgtgagggtacctgactctggctcagagccgagggtgggactgggtgctgctcctactggcgggacttgggtgtcggaggttgggatttttagagtagtggctgagtgtgatatgcccagggcttcactgtagtaggtcgtggtagagtcctctttctgggggtggggcagtcagtggttgatggttttaaattgatgactcagttcccatcccgtttggactttctcttctgagttcgcaatttgcagaagtggttttgcttgctccaggaagataatgcagattaaaaagtgttaatttatgtattgtttggcttatgtaatataagttgttttttctcttgacctttatcaggtttgctgtgagaaagacagattcttgggacagatgtcagtgttaggccaccaacctaggaactgtggatccgggctttgtcaaacctttgagtttttcatgtttttcagtaggagacgtgaaaaaaatctgctgagggtggcttgtgtgagctaccatgagggcacattttaaagttgggaggctcc

SEQ ID NO: 35842 - DNA, 1055 bp, Homo sapiens
attataaatgatacacttaaatgtcttatttcacaattacagagtttgaatttcagagaagtttagccatgtgccgaagatactccaggtatttgatagcactcacagaactatattttgaaatgaagagatttcattttatggaggggaggcggggagaagacatatttggtatagaaaactcagcatgagctacttgcatactggtaatgggcttgatgtcctggaggctagagaaagttatggagagtagcagagtataaagttcatttggcaaaaaatgaagccaagtgatggatctttattatgataagatagcagtattagggttgtaattaagattgctgtgttgttttctgggcttattttgttgttttaccaaatctgtacgaggtattctgaggctctttttgtacattttcaaggatgaagcataatagacatgacccaagaacgttataaaaatgtgaaacttcaaaggaaaggttcttttttgtaacaatagctattactaaatgatgaatagggaatcacatacaggaatcttaactagcattaagctttggatttaggtattcacttaaaatcatatttataagggcttctttcttaatggaaactggtatgtatgtcttctaccttagggtaacctttgttctactggctagataacttgctttgtgcatggcgcatgagtcattgctactaggaaaaatagaaattcctttttgttgactatggcaatatttgaacctcagggctcagtgaaagctatcagctaataataatgaggccatgtattttatatatagtcacccatgagagaccacctgttgttctaaaggaaaccgatctctttttacagatggtcttcaaatacagatttctgatagtttatagtataaagatttattctatggcaactcaacctgttcccctggggcctgtctttcagagatggtgtcctagacagatttcactatactgccctactctgagcagttcaaagcacagaggtaagggtaggtaggtgaactgggatgctaaataaacgc

SEQ ID NO: 35843 - DNA, 669 bp, Homo sapiens
cttctggaaaaggcaaacccatggagacagtaaaaaggttagtggttaccagatattgggcaggaggtagggatgagtggtggagtgcagaggatttttagggcagtgtaactattctgtatactagaatggtggattgtccaaatctatagaacatactacagcaagatagaaccctaatagaaactgtgtactccagatgataatgagtcattggtgtaggttcatcagttgcaacacatgtgccactctggtacagaatgttcttagttgcggaggttgtgtgtgtttgaggccaaaggaactttttattttctgctcaccatttgtatgaatctaaaattgttctaaaaaatgaagtctgtttaaaaggagaaaaatcaatacagtcactgccatgtttggtgaaaggcatgtggtaccttcaatagtgtgccttcatctaaaattgtgatactatagttgatgttaaaattttaagagatacaggagaaattttgagctgagtgtcccagacagctggctagctattccagatgtgggacagaccactgtgtttctaggtggtttttagtttgcttggggtcaaagtcttaggattacatattatgtgtacaccatgcagaattctaagctctctacataaattatttaatgctctcagacagt

SEQ ID NO: 35844 - DNA, 1645 bp, Homo sapiens
gtagattgccagaacctattcttcctgtctaactgaaacttttaccctttgaccaacgtctccccttacctcattctcccctggcccgcagcctctggtaagcaccattttactttctacttctattaattaactgaactgttgataatatatttagacctgtcttttaaacagctgcaatacctattgtgttttgaccttcatgcttttcctgtcttcacttatttcaaggtcagtgtgaaccaagattgattgacctttgctttcaaatggtgcatgtactgaagagcataaaatgtatagatagtactcatgctataaccagtaacactatattagagctccacacctagtatgccttgattgaatttgcttgcccacaagtttggaatccaaatagcaagaggtctgactagagccctgagattctgcctcccaagggctcctcagagcatatttatcggattcacttagggatatctttctagtaaagatgatcagtttctaagcataaaactgatcatcttttttctttagaggacttgatttaaactctggtatatctaaatggtttgggcagtggagcctggtatttcaagctctttcttcgagaattgtgcaataatgcaaagtctagagtggtgtcctggtcatgtctctgtgactaattagccatgtaaccttaatcaaataacactctcctggacctgttcccttacctatagaatgagagggtaggtgagttctaagctttacaagtatatgatggatttttggtttttcagagtgagctaatttgataaaacaacattataggaaaggcaaggttaatgaaagtcttaaattggtacttaactgttttcttattgtttttctagtaatcctagatgcttgggttgctgccgtacatctgctcagtagcatagcccttggtggttatatagttgtaaaattacaattaaaatgagatattaaaaggttgtttctcattcagttctacactggaaaaggagagttgaaggtccagatagcagtacataaaggtgaaaggaggttaggaccacacctacgtttgcctgtttcctagacctttctcagtaactatggtggtatttgtacacctgttgccctcatctgtcatattttgtgtgtttatttgactcagtcctttggcaggcataatcagagtaaaaaatggatactttctgttcctatttagtgcagaacattaacctctaccagtctaggtaatttagatttttgattattttatgtctactaggctcattttaaggatttcatattaagccctcatgttgaagggttactgaatggcaaaagctgtgaagtcagctatttctaaataaagttgtaaacagaatagcagcagggaaatggaaagcaaagtactacaggtttttgtgactcagcatcacttactctctcaaggacagtaaataggaaaccggagagcaagcttcctttttggtaagatttatgatcctgctggtgatatgtagtcagatggtttggccttgtatttttggtccctatcacatgatttgccaccttgatctagctgtctcatctcagggagaaatggaggcagagagaatttgtggcggtgtaagagagaaagtaacct

SEQ ID NO: 35845 - DNA, 444 bp, Homo sapiens
aaaattttttaagtaaaaaggattgaaaagaaagtgccagatattgaagtaggcaagaagatggaacttgtttagtagatcacaaagaaaaccaatgcaagggaactgaactaataaaaactaattcaagaaaacttctgaaatttaaaaaaaagcaccatatgaaaaaagcacactgcataactgagagtgtttacagtatgactaataccaaaaaaaggaaaaagtactttgagcttctagaagaaaaagcacatgatttacaagggaaaacatttctagttacacttctcaacagcattttatagaagggcaaaagtaaaagaacatttaaaatactcagtgaaagaaagagagccaaggattttatatccagcaaaactgacttttaagtataaagggcacatgtggttatcaacatggagaaactcagaaagtattttt

SEQ ID NO: 35846 - DNA, 1061 bp, Homo sapiens
cactttacaaaataagaaaccctgccacttctgcataacataaacctgctgggccaaggcagtggcctgcactgaaatggggcacaggctttccggttagctgccgagcacactgacctcctccactcctgacctcacctctccaggcatttgaacttgtgagtctgggggagggggaccagaatgcccactccctgctcgccatcatcctggagggtcttcatgaacatactccagtagtcacaggactggacaggagtcagaaatcttgagctgtctgtcattccacctctgtgagtttgggcaaatcacttcacctcttccttactgcaaaatggagtcctgccatctttgctgtgcagctcccaggaattctgttgtaatggagacaggcagcggaagtggaagctcttcataaactgttgactgaaaataaaggataggctgcttgttgtgatgaatgaatgggtgggacctgtgcaggtgggtgctgctgagagaggggtgtctgcctgcaccacttgggccgcggcctccagcccaccttctaacagggcacctgaaaatggttgttgacaagcataagctcagcttctgggcaaatgcccctaatgtttgccttcagatctattgagaaaccacctatcaggcaggaatgcaggtgcaggaggctccctgaggcctttgtcaacaggccctttggtcctgcacatagataggcctggccttacgggattgggcatctgcgtgtggcccatcctgtcgagggggagcaggctgggtgtctgcccgtctaccctagcttttttctgtgtgagttcagcagcaattgccctctaaccatttctgttgaactccctctcttgggaacttcgctttgtcatttaaaatagtttgggaacttcagatttagcccagtgtcagagcagtttatttggtctgtaggcatttttgtttttaaaattcatgacaagttccgtgcaacatgttttattatattttcaccacctgttctaccttgggggtggtattaaaatctgggaccatccatctatcgctct

SEQ ID NO: 35847 - DNA, 1335 bp, Homo sapiens
ttttaccctgaggtaatataacagctactgtggagtcactaaaatcaagtaaatagatcatttgtggtcagggcagaagcatggaattactacctgaatagcattcagccatcattccctcacttaatcattcaacaaacaggtattgagaaactcgaggtgagtttgagacattttctaagtgttgggcagggctacaaagaaatctaaggcctgctgcctcaaggagatcaaagacttcacccaaatcctttccataggaagttaattgaagtcattgtgctctttgatcgataaatgtaagagcaagggaagtggctctcttagaaagcaattggacttggagctaggaatgcaaggggtaacctgtacagttttgcttaggagggcatggagtaaggaagagaaggtaacactgttcaaacgctggagactttacccaagaaggctagttatgacgcagacctgggaagcctgggtgtgtaggaaactcagctctgtcacttattatttgaatgatttggggcaagttactaaacctcattgagttctagttttctcatttaccaaaagggatactcatagtatttatctcagggttattgtaaagattaagtgagattgtgtatgtgaaatgcctggcacacagtaatcgctcaaaaaaggaaagagttgggtgtcactgaccaaagggagcattccaccctgataagaagaccaaagctctgagggtctaattctgcccttgttacggacccacgtcccaactgaaaaagagacccatttcctcatggttcctgaagaagcatccccttttgcaggagagttgtagcaatcatggcattctgtgtccaggatagaagaacatgtgctaccagtttttttaatgccccctacgaaacacttcattctttgccagtgaagaacttttcatttcctctataattgaaacaggacctctgggtcattgggtgagtctcatctggcttgtgagtcacccagggcagttgtccactttttatcaaatgagtcaggaatgtattgacccaggtcaaatggtgtggagggtgagaaattatctaatgaatctgagcaacccagccctacccttgtaccacttgaggggcacaacacccttccacattgatcccatctactcttccttgtcaccgtgaaaccagcctaaccagaaggggcagaccaaattggacttcttttattccagcactaatgaggaaaagatgctatgaaatatctctttatgtcagaaaccaaagttaaaataatgtcatactctgataattaatactatcaggcttgacagcagaatacgtt

SEQ ID NO: 35848 - DNA, 383 bp, Homo sapiens
ccagaggactaataaatcttatttccaacaagcgactgccaacattaaaacatgcaaaatttctcaacataaattttcccaacaattgtaactcattacttggatacgaggcatgcactactgcagtctgtccacggtggtgaggaaaacactgggcacgagcccagcaacacattctttgacagcagcatgaaatattttacaacagtttccaggaagttttcactggctttctcaattacaatgaagtcttcttgtgggcatctgttgcagtgagccttaacacacacatcctccccgtgctctcaggccgctcggcagccagcagatgcccaggacaagagaagcccttgtttcagacatttgctttctcaaaggcattc

SEQ ID NO: 35849 - DNA, 854 bp, Homo sapiens
attctggcttctgccaatcaaatctagatgtgtcactcctccgcgctcttggctttccatataggtcacagctcctccgctgtgcctcgggaaaggtaggcacagagaagttacagggctggcttacgtttgcacagaaaatttaatggcagtcagaagtataacttaggtttccttattccccagaacatgagggttttttttttgtttttttttttttttttaccagtggacgatgctgagacacagggcagggtaagcacattttaaaacagagggcaaaggtcagcacagagcatggggagatcagtaaatatgtccaaagtgcttagtgagaggtaaaagtttaaaagacgacagttaggttttcacaatagtgaacggacaattcaatgccagaggtcctggaacctgcagtgttttctcattgacctactatttccctaggagccagagtcagcatgacggtagacttttccagaagtaagcaggttacctcttatctcttctgtcatccacatcctcgggtttgagggcttgaaatcgtgcagtatttccctcttgtaacccagaacaagcatctctaactttagatcgactcctttggtgtcctggggccagtgaatcaacctgcttacttccctccatttatggctgtgatgctcctttgtaacaagggatcaagaactgtacctgcgcttccaaatgcagcatcatttattgcttcctgatgcaaaaatagcttccttgggcttaaactggccaagatcatcttatttgtcatgtttttgttaccattaaaggatcggggggagggaaagacttcctggaaacctgttggtctctcaaaatca

SEQ ID NO: 35850 - DNA, 769 bp, Homo sapiens
caacttgctgaagctcacacagccagtaaaagggcttaaaccctgtctggtaagtgcacatcacctctgtcctcagcccccagtactcagtggcctggcctactctgtcctgtcttcttcccacagacctgtcagcccagcctccgcagctgtagatccttacccaccatgtgggaggcaatggtccttaggacccagggatttcccctaaggtactttagctctgtcagtattgtgagtgggcaaaatgccagtgatcaaggctccatcttcccctcccatgtcctctagcaagccccctccttctccctcacctagcacagagccaatgcactcccagtaaattcagtgtttttccattccagtgagtgcagcctttactttgatttgggtgcaagcagctgcaggtgcctcaagtcatcatgtgctctctttccccctcgttccctgcaatgtcatccatgtttacttgctgctctggactttagattctgtcagcatgccagtcggtggggccgccaggcaccacagctgacagtcaaatctgtgatgccgaatccttcttctggaaaaaagggctaaagaggttaatacactcaagtcaggataaacacaccagctgttagagtttctaatatttaatatcattatcaaataaataactcaggaagaaatcacacacatacatacacacacaccacaaacacccacagccgctgcttcatttacagtggttaaaaaagaatattcataaattatcttaaaagcc

SEQ ID NO: 35851 - DNA, 664 bp, Homo sapiens
taaggaccatgatgtgtttttttttagcatcttcaagtcacatgttgggggggcggtggttctgaggccagttgatgcagctttcagggttcgttgtcccagcctcaaagaggtcagtaacagtggtcaatcagctgcacccacaggccaatattgctgcacagatacaaagacatctcataaccagagcaaaggacatgatcccagttggaaatgactaacagggatcttttgcctctgaggcaacagctggaatctacaaccagttagcgccagttccactggcatgttctgtctacataatgcagactatggcatttggcagtggctcttaaatttggcacactccacattcctcctggacccacaagataacataaccaaatgttttctgatgctgtaagaaatgagtattttgcaggtaggaggaaatgcaaacatgccccctacaggaggctcactccatccaatcccaagggcaaagtggctcactccctcttgaccctttcaaaggttaaatgtggagcaagggcccagataaatggtcacaatgcaaacaaagtcatgtaaataaatgcatctctgatctatgcaggctggtgatgccaaatatgccatctgcatcgtttctcatgatgagctggacttttttttcctgcatgtc

SEQ ID NO: 35852 - DNA, 756 bp, Homo sapiens
atcacagatgcccgcgatgccagaccacaggccccgccacctgggtgtgattttagagcagtctattggtggcccttccctctcaaggggcgagaagacccatggcaagaaggaattttgtcatttgcccatttcttggaactaagtagctgcccactgtcaacaagccaagaccaagagagtggtctgtggctcgtagataccagtggagtgggagaacaacaagattcaaatgtggcgttaaaaaataaaagaaagaaaaaacaaacagaaaaacccaggctaccaaccaggcaggagcaggaaaccatcacaggttaattccacagccactcacctacagagagcaaggtcagaatttggctggcatcccgtgtgatatcagtttggtggtttcagtctatgctccagggaacatttgtctcggtgccaaaccaacaagcatgcatggttggcaggctgtccactggaggccagggatgaggagctgtggaagtgtatctattttcactttgcaagtatttgcatgccaacacctcggccattgtggctctttggagaaagaggggaatttatgctagagagcgaggctgtgttcagacaacttactccacattggggtgctggagctagcagttccattccctctatcctcttgctttggtgagtattctgaagtttatcactttgtcagaggtgaaaataattgagctacttcctagataagaaaggtattactgggaccacctgccagac

SEQ ID NO: 35853 - DNA, 827 bp, Homo sapiens
aaccatgaatttataaatttattttaatacttccttagagctgtgtgtgtctatctttggagaaagaggaaaaactctaactcagccacccagaggctgtctgacaaacaatacctgggtatttggcaataattcatcaacaaatatatttttcattttaaatgatttttatataggcattatcatcaaataattgcctgtcaaagtaagaagaataaaggtcactgactctttttagtcatgaggactctaaaatgcacctcctctccatttgacgtgaatagattaggttctccattgtgcaaccatcggcacaaacatcaccttagacatgcaaaagggacaaggtgggagacgttcatttaagttacctttgcccaggttttatttgttctgcagataaaaaactttggacttctttacccaaccagtcatcttgcacaaacagtaaactccctcaaaactttctgttcccatgggacccttgagaaaacaaaatgaaaaaaaaaaaaaaaagcatgattgaaatctactttcttcggtcaacatcctaacattgagcaatttcttcacatcttaaaagggactgtcctggcgtcagattaagagttagtgaactccctattgatcaaataactggaactagtagtaaccagagtcagaattccgagattacaaacacttgttccgtaatcatttcccgttcctccccatagcatcatgaagcccttattcatgttcaattcacctttggaaagcaatggtttctaaatttttagatcacatgtggtaaaaatttttgaacatgtccatcctatgtattctca

SEQ ID NO: 35854 - DNA, 621 bp, Homo sapiens
tccaggtaagtaaggcaacattcatattgttgttgttgttttgcttaaaatatcccataatttctttttatgctgtgtaagacaacataaagataccaacataagaaggcacaacataatactaacctcatgtcgggaacttgacatgtgtgcacaagaattgtgcatgctcttggacctgttcaagctttgacctttgtttctgaaatgtcaaggtatctcttgtgtcatcatgagcctcctcccccagcccctcatagttgtaccactgaatggacataacctatgccagaaacgataagacctgagatttgctgaacaccaccaattcttctgtcaacattcctgtcctgaaatctccttttacttaacaaacctagatcactttctgtttatggcacaagagagaagaaagtggaggcaaataatcaattacttctctccaaaagataattcttaggaaggaaactgataccacctgtctagtttatcatgcactgtctgggttcactttttctttgtcattgtcacaagctgctccacctgcataccacccaaactgctaacaagaatggaagctcatccggggcaaaatctgacttttcaatttattttatattc

SEQ ID NO: 35855 - DNA, 1503 bp, Homo sapiens
taattttcatgctttgataggaatgtgcggttgtttatcatttcaaaagcacttctccttttatcacgaatcgaagaagaactaacattgagaaacaaggaaccagaatatttagagatgctgggaataaactacaaactaacatggtcaagggagagaaaatatgatcctctcagaagaataatgtaacaacaatcagagcacatctgggatttgattcaaaccaacctggaaccagattggatctccaagctgttctgtgtatacacacacacacacacacacacacacacagacacacacgctgagatttccaaaagtgaaatttccagaagttatcctacagagttaaccccagaaaggacttcactggcagacacaggcataactttactccttttgtgatgacccatgagtggggtctatggcagtctgaatagatgggcctttctgttgaaagattctgcctaatccttcccaccaaagcagggttctaaaggtgtcagcaggatttggctgactggatcgttaatggagctatggttaattattgactgattagggatttaccttatctttccgtcaggagctggctcaagacttaacggtaagcaatttagagccagggtgaacctacacacatgcctttttcttcttttcctttgggtcactttagcttgcccctccccataattcacattcaggacagaatggccagtccttacaaggcgtgggagtcctcaagagcaccgaaaatgagaggggccaggtccacgtgacaagtgtccagagacagaggcttagagaaatgtgccttttgcaaaacagtgtttatgtgtaaaggttttccagttaagtccctgggagaaaaaaaaaaaaaagcacttgctttttgtctctaaaaggtctggtgatgcccgtgggtgagaatccaccccgcactccccaaggccccttggcaaagccagggaatgagtacaggcagctcaggcccagctgccccagataagaggtggcccgtgttaatgcacaggcttcctctgcacctcagcagggccttccttttctaaacagtctccctttaatgttggcgaatgttgtttttccattgactcaacatctcgcctggtggtaagccagtgaggaaagttgcagcgggggagggggaaagtgggagagagtgatgccaaagcaaaagagcgggacggtcagccaggtttccaaacaagctagacacctgctttggaaagacagtgaccaagcctagacttctggcttcctcttcactttgatcagccttttgttccctgcgggtctgtgatgggctccctgcccctcccctcaccactgcccccttcactgggagctacttcaacttagaaaccatcaaaaattcatagcttttctctatgaatgtaactgtcttatctgaagaaaagggaaaacagttattggaatgcatgaaagaagagaaaggaattctaaggaagagaagatggaagg

SEQ ID NO: 35856 - DNA, 8766 bp, Homo sapiens
tggattttccttttgatctcaaaatgatgacaaacagacacttagatacttcataaaagaaatattaccagaaaaaatatagaaatctggctttcaacttcatcttgctctaatttaaacaaaatgcaactttccagttactctctccaaatgcatccaaactgggagcgtccttctcttttcgctgcgtcaggcaggcacctacttatttctagcccactcctcaccctgaataaaagcttctggtaagatggacaatatggaaaacttcagtcctatcaccaaagcccctgaaaatggagcacccccgaattcacatccttgacgtgaaagaccaaagagagggaagctgggagtaacggccaaacatccttagagtaattgacaaaagaaagggggtgggcagaaagggagatttccatcccttcaaacgtgcacgcccctcccgcggtcccgggagggagtcccccctcccaggtcgagcgcgtccaccggctgtccccacagcaacaggcgggcggcgggggaggagaggccgcgggggcagcgcaggcctggcggcggccgaaatcccccggccaccacgacgttccccggctctgcggcgcgccgggagcaggtggttgccctctgcgtccagggcgtgtactgagcccaggctagctgagcgaggctgcagcccctgcgatggcccgggaagaggcaagtgccgcggggccagagcgaggagggaccagcagggcggcctggacccccacttggccgcgcaggcaggaggggcgcgccctctgcggagcgcggcgccgcggcagccgcagcatctggcgctcgctctctctggccggagaggccgcgacacctagcgcggggccgaggctaggaagggcgggccggggagggaggagggcactgggaggaagccgcgggcgaggaagccccgctcctgccgagtgcctggagaggagattcccagccttcctgcccaacccgaaacttttccaacacacgcaggcgtattcctcgcaggattcggcggtcccgagtcgcagtcagggaggaggctcgggaagcacacgtgccctggcacactggaggaggtacacaggcacaccaggagggacagggcctcttgggaggcggctgagggcgtgaaggcagcaggcggccacacatccgaaagggactccctgcgagcgggatcgagcgcttaaaaccctgccacagcttggaagtgtagcggtgcccagaggctttgcgtaactttgcccactgcgcccccgcgtgcaaaggtgtccccttcacactcacaccctcaccccatctcactccccttgagttgcggcccgagactgcctttgtacttaagcgacagcaaaagatatgtggatttgaaccaaagatggtgggcaagagtgttgtaaattgtgtaaattccactcgcgggaacccccagatacgtagggagagcacccctttctcgccgaaggcatcccctccgtttctctcagcctttgggtttccagcttcttcgctactatggactgaagaagacaaagcacagccaaatcaatgttttgggtgtttttgtttttgtttggtttttttaaatcacggcctctccaaatgctaaccctcaaaacgatgggtggggttggagaaaggcaagttatgtcagggagcacccctcggaaggcgcgcgcgcggcctggccggttcctcgccgggctctgggcagccgggcggagtggctagattatgtaagtagcagccctccatgtgctcaccaccatctgttaatatcttggtattggaaagttcggtgcctgaggcaaagccagggttggcggcgaagagctcccagcctacacttcactactccagggcagggaatgtacttccctttgattgttttcgcccacttccataaaatcaagtagtagtgtgtcccttcaatcactgacaacctcctcatccccgcgggtgtgtctttgtgggcgaagagtgattttcttcgaggtcaacttattgtaattagccctttcgatgaaattatattttcatgacaattctgcgctccttaaagcaatgtggcagactcttatttgggagtgggttctttatcattttaaaaattactttctttctgccagcacccctggatccaaattcttgtaagggttatatttcaacttctttggagtgattggcttctgtttactttgaaagctgttggttaaacaaacatcactcaggaggcttctaagcagtggggttcccaggagagaaaacgctgcagctgctacttgctactgatcttgtggcatttcacttcccccccattcagaacaaatccaggttgggcttggcgtcacactgagcacaggagatgagagtgagaggccgtcagtcagttttgcctctagaaagcttgcagcaggcaggcctgcaccctggggttggttttcctctcttcccttcttcagggtgctgatagtgatggtggtagtggtggcggtggtggtggtggtagcggtgggtggctgacctggaagtccttaggcacccttttccaaaatccacgtccacttttgcctctcaactgaatctggttgtaattctcagaattggtttgtttaggatctgataacagttgtttgtaaggttttaaattacttatacacactgtcttccctcctgcccccacctaacagctttaagaaagaacaggaggcgtgagcatacaccgagcaaatgtcaaggcgaagtgtatttaacccagaaccagatgcatgggtgataactgcgagtttgtctaagaacacacagatcacccttcagataaataagtaaatgcaacctgcacggatagagtgtgttacaagaccggtcagaacttgcgttaacttctaagttactggggttgtgttggaagtggggcggagggaggagttgtcttaaccctaggcttggcggctggtttcagagatggagccaatatctaggcgactccttgtctccaggcttctcccctatcagaaaacaaagcgggagtcgcccgagatagggggctcgggcctcaagtcttgtccagggcagcccgagacccaggagaatgccgcagctctagcaagagaggttgccaggagcctggcctgtacgcctccccgacagtagaggacaggacacgggacagggctgcgccgaggcagctcacggagctgggctgcgaaccgatctcgctcgcctagcgtggcgcgcgctcctatttcaagtcgccgctcctgcgccctaatgcgggctgcgaaccgccgcggcagagcgtcgcgagccgggagcctctgccgccgaggctgggggtgggagagcttccttgttcggcaagcgggttaccccgacttcgactcaggcctgcttttgcccacggcgtgacacaggacttactggggttctcagggaacttttcccgccgccagttcccgggcgtggtgtgtgcaaaacgtgcattcaagcgctatgtgcaattgacacaaacttgtgggctaaagtgcaagccatttttttcgcgtttgaatctttttctctgtccctgactcctttcttccccctactcccccctcctccttctctgctctccgcccttttaaatgtcaaactgagcagatggttttaaggtgtggaaaggtatatagcccttactcctaccagtttatttgtgggctggcgctaacttatatgtacaaaccaagattcttaaagaaaactagtaggacgaaaaataagaaagaaagtagctttgatccattctcagatcccaagtttccccgctcaatacacccgcttacctcgaagggacccaaccaatagaagcattattccgtcctgtatctaatgggcatgttgattatttctgctcccagcctcaactgtcacatcccggttagaacacctgatacaacagtcaatagttggaggtgtgagtggtgcgtgtgcgctcctctgtgttgcttccgtgatagacgcgtggggggagtgtgtgggggcggcaaaaggggaaagaagaaggctggggatgctcccgcaatctcttttcttatcgccgacacctaacctgaccgacctaattttttttctccttttcactgtttgaaattcgtgccaaaagtttcctgccgggatagactcggacatactaacatcgctattcttattcaaagggagggcttaatatcctctttacggtttggtgaatttgaggctgaaattgtaaattccctaggaaggagtgtgtgtgtgtgtgtgtcgcagaagacattggtagtgtttggccagtgtacttgtaacacacctcataaataccctgttgtcacgacacagcatgattcaacctttgatctgattaaatttgagggacacacgaagactacttgtcctcctcctacttacaaaaatgagtgtctaatagactatgtatgaatgtttctgcttcgcagctcttgcaagtcccagcttttataggatctttaggtcataaacgcggctgctttattaaaagccgtttactgtgcccggtgaaagggacgttctagctgcggctgaggctcgcttgcatttgtaacttgcaaagcccaaggagatctttaagagccacattatctaaagaaattttgctggttatttttcaagcaagaaatgtcaaaccaaagtaaattttctagggctttattttagagcctgcgatttatgcgtttgaaatttcttgcctaataaactttaaagtttgttgcccaggcgtcaaaactgtgtaaatcctgtattgaacagctatctttggtctttctggggcgagtgaattagtgaagggtaatcgccagatgtttgcaacatatatatttttaaaggctgctttacctacaatccaactaatgtcagaggtaaccaagggtaaatattcctcttcctgataatttggactggagataaactgggactcagccaatgttgatcttcgtctaataacagatgcagcggacccgatgtgaaacctctggcacctattattttaataccaaacctacctgtattttattgtccacctcccctttaaaaggaaccaagggtgacacgtatccttgacactacctatgatcgtttaaaaagtggaatgatttgcagatccccccctccctcctcctatgccacccccacccctaaaacccccactttttctcccgtatacttttccgtgccttcctccacccaagtcggaggagcgctcactcgctcggccactcggcgaactcgatcagctgtatctgggaaatgaaaaaagaaaaagaaaaaaaaaaaaaaagacctgcgtcctggaagagctagtgtgagccgggcgccgctcgcgccgtctcccgctttgcatagtgcccgcagatggctcgctccggcccaggcgcggcgatccagtcgtcccgaagctgtggcagggtgggggtgggggtgggggccggggatggaggccggggagggggagcgcagggcccctctcccctcctctcttcccagcccctcacccccaccccttttatatttttttttcctcccaagttctcttgccttgctatccccccttgaatccgaaggcgcctcgcgattgggtgctggggccgggtacgtcagatagactgtgacgtgcagtcttcctgtttccttcagctgtgtcttaaagtaaatcttgttgtggagcggagccctcagctgagggagcgctctgaaataatacaccattgcagccggggaaagcagagcggcgcaaaagagctctcgccgggtccgcctgctccctctccgcttcgctcctcttctcttctttacccttctcctctctcctcctctgctgctctctcctctcctcccgctcttctctctcctcctctcctgctctctcctcttcccttagctcctcttcttttcttctcctcttcttccctctcctcgcctctcccctgctcctcttctctcgtctcccctcccctcccgcctctctctcccctctccctctcccactcgccccgctcgctcgctcgctgtcgcacagactcaccgtcccttgtccaattatcatattcatcacccgcaagatatcaccgtgtgtgcactcgcgtgttttcctctctctgccgggggaaaaaaaagagagagagagagatagagagagagagagagagagagagagagaggctcggtcccactgctccctgcaccgcgtaagtatcttcttcttcccctcgtgagtccctccccttttccagaatcacttgcactgtcttgttcttgaatgagaaaggaagaaaagagcctcccattactcagacccgtgtaaacattattccccccaggagaaaatggtgttattcaaatgaatcataataaaatagcctctaaacagtttctaagcgggagcctccgtggaactcagcgctccgctcctcccagttcctaagagtaagtgatcctcttggcttttatttctttctctttcctgctggtggctgggggtggcggtggcgatgggggggaggctgatgttgctggacttgtcgctgatcttgtcaccttttgtgtactgtttctggggtgtgaggaggcgtttgctccctttccttctttctcctgctctctcttctcaggagagaggaccgcgagagggaccgggtcgcttttttgttcgtggagatccccgctttccgccaaaccccatccttccgatctccccaggctaaaactccggggccggtccccttgtcctttctctttgtcttgtttattatagctgcctttcttcccggctcttccaatttgcttgtcatttgcatacctttcacttctccttttttaaccccagcagaggaccgggaactgggaggaggagagagggaggtgggggggcgctctgttactttcgtctcaaaacgctgtcgaagccgaattgtggaaatccggcttggaggggagcggtgatgggtcccgggaaacgcgcgcggcgcccctcttccgagctcctggacccagggctgggtcaagttgagtagggtaaggcggcaccgggaggctcggggggtcgcgtggcggtgggattgggacaccagcacgaggaggaccggaggatcgcgggccgggtaagagtagggggttcttgggcagcagaaatgggaggcgatgaatctcccagccatcgctggcagactatggtgttgggcagcttcggtctggtctcgtctgggtggtacctaccgttttgccccagttaggaggactggggagggaggacaggagaggtgagagtaattgttactgggaagactagtgaggagggcgggaagagggagggaagagctgctatcttgcctgagcagatcaggagggggacgcagtgggcggggggagacatcacccaaagtccagtttagcaagttgttgattcttctggtgtgccagcccgttactccccctgctgaagctgaaggttggtggagtgatggagcgtggggatggtaaaggaggagtaagtagctttccacagactcccaggtctctggccccttcccagcttcttgggaaattgagagccctccaggcagacagagaacagaactagaaggaggggtggtgcttagtcttaaatagctcaaggaggcaggttggagtgtgaaactgctgttcttggcaacccagaaggctactctgcctgggggaaggctggaaactcacctgcttgtttttatttttccgagaagatctgtgctgtctccttgagcttataaaaacagaggaagcacagggtggcctcctcgcaaagtcaaggctagaagactcccttctcctgttctcttttccactcatgccctcccttatttaaaaaaaaaaaaaaaaagaaagaaaagaaaaaaaaaagaactcatttcctttcctaacctaggtaggcagaaatctattagcagagtgcgcatgggcagggcctgacaggtgtgttgtgtcaagaaagacaggtgcaaatttcctctgtgtctgtgtgtgtctgtacagctctagaccacaatgcttgctcgagggttggagaggtttatgaatttatggttgtcctggttaataggattgtctgggctaatgggaattgggctgttgttcttttgagccctgccatgtgagttcttggggtggggggtgggggcaagttggtatgtgtttgtttatttttcttaaggatattggcagtctactgctgaggctgtgtcccaggcttctgtctgccagtcagcccaaagcacccccactttaggcagcaggtggagggagactgacttttcctttgcttcctaccagtttatgcctatctcccaggtctgtgcttggcagagagagagagagagagagagaactgtcgtgtgtgtgtgtgtgtgtgtgtgtgtgtgtgtgtgtgtgtgtttgtgtgtgtgtggtgtatgctttggatagcaatgagtggtgtgtaactgccaagaattccaaagtcagtttgaaagtgttactgttgttaaagcttatctttttaagcatgctttctccttgcccagaaagaataggtatgtacataaactctttcaagtcatatgttaaataatctcataaagtagaatgagcctgtcattgtcccagacatgtgccaaatgtcctagatatgaatttgatggagaaagaaaatctcaagtacatgagaaggtaactgtgcttttctat

SEQ ID NO: 35857 - DNA, 4414 bp, Homo sapiens
gatccgtacactgcagaccaaaattcagctcctgtgatgcttttccatggagtttccctgtcaattcaaggtagatcctcaacctccctccttggcagtttgcatgtgactgttcattctttttattacatttcctccagggggccattttcaccatgtcatatctgtttgctatcagcatttataagggctggtgtggcattggaggatgtcaagtggtctgacttggaagtgtactgccacaaactccatgtaggtgacaggaggagagacctgctttcccgttgccactttttggattatccctgcaactctttccgtctggctgacaaaaaccttggggctattgggtggctcatcacttctgctccttctctagcctttccctgggtttgcttcccccaacccccacaccccctcgcacattaacatgacattgcctggtgagcacagaagagagcagcttccaccagctgaaacctctgatctcaaactcactagagagtttggcttcgggattttggcaagaaggccgattgcccatcaggtcagcatgaataaagatttctttcttcccttcttttttaaagtcaagcatcaaccgaaactgctcccaaagctctgtctctcaagacaatttaacccctttcacctaagtacattttctattttgaatgcatggtactttgttttattcttttcctgtgagatgaccaagaaatctactatatgtaaaatttgaaagccaagtcaattctaaaccaggcttatcatttttaaagtatgtttatccagctttgtagtaggaacaagcagactgtttgaaggccacatacttttcaaaccctggttgcaacacgtctgccccgttttgaaactgtctttatctagccgagaaaacgaaaatctatttgacaaagtggcactctggccagtttatcttgcaatatggctttagctcactgagtctattgatttccttaaattaatgtttacagaatgctactgaattttgctcaacagaacattgttctttcgaagctttatatatatatatatataaaagagatacagactgttattgccatgtgttcctttgtttagaccaaggaaacatagtttttaggtttttttttttcttaagacagccttgaactatagccacttcctacaagcatttacttttcacatatttaaacagcaaaacatgtaactagaaagtgggcccaaactgcatgggtattagacgaatctaatcctcagtgttcctgaaagctgaatgccacctggagcatcagagggagaaagcctttagtcctaagcccagatgttgctggagaaccttcctctgcctcatttggggtaactcggcaggcacccgaaagcaacttcacagccagtgctcctggatcctgctagtttttccaaacacaagcatcctaataaaattcaaacaccatttagctgtttgggaactctaaatataacatcttgccctttgaccacggtgctcagtgttcaatacacaaaacctaatctctaaagatgattttaaaactgaccttcccagagaagtacacgtatccattcagctacgaacagtgcagaaaacaggattttgactcataattatgaaatggccaaaataaaacttagggaacacaaagcaacttttctcaaccggttgactcagccaacaaactcacccaagcgaacctcctcagagcacctctcaaaacgatgctttgcagacatttattaatcacagtgaatgcttcccaggaattagggctcctctttaaaatctcaaacttgtaaaccaccttatatttggatgatattttatgcttcccaaagtgcattcatgttttcttttccatttgatcctcccctggaatgagagggcactggaatagaatctcaggattcactgtgtatagcatcctgcaccattccttctcttctggagggcctgttagtccccggctgtacacacaggataaatgcatgcatgactgcaaagggagacccttagtaaccacatcttgtgaccatattttacagctccatgattcctcttttcagcctctggcaggagagtttagtgtgagtgagacagtgaagaggagcagcaataacgtatctgttcttggcttttcatctgataatctctatgaggagttactaaagcatctgagtttatccatttaagtccactctgtctgcagtgtaagtccccagcttgtgccactgctgtcaggagatgagtctctccttgatcgatatttacttaacaaacagcagggatgggagagtttgtttagaggaatcatgtgcactctagggtgaatgaatgctcgggaaagtacttcaactatttgtctccttccctaagatttttgtgtacgtgtgtgtgcacacacgtgtgcagatgcccattctctttttaacttctccaaagacacttcgaagtcatctagaaaaatacctcgctatgtatgattggtacatcattataccgttaaggagctaatgatgcagatgcagtttttctaacccagcaaagtttggttcttcttttgtgctcttatatagagcacaaaagagactcttaggataaactaaatgcacaagcatctacctttgacccctttcagatgagtggaagggaagaaaatacggatggaaacaataaaagcagtttgacaaggcagctcttcactatgtatttttgatggcattacctatatatttttaaaggcccacagggacaaaaagtaactttctccaatttttcagagctgcttcagcattagatatatttaactctactactgtatatgaattccacggtgtgaaaattgagagagcactgttctttcgagttccctgaaacaattgcttgaaggctcaagtcagcctcttgaatgcagttgacttggaggcatctggggctagatcgaggggttttgtttctgggtgtggggagaggctggggggtggctggggagttatttatttatttgattttgtgaatcggagttgtaaaagccatctgaaatattcatgcagaatagtctgagaagcccgtttctgttttatttaccgcacagtagaacagccacagcggattagttctacaatacccgtaacaaaagcccaacagctgatgcatgtgatgttaggaggtgacaaaacagttaaagtatgctgctggctacaggcaagcagtcagcagatgcagacaaaagggtttgtgacaagaataactctctctccaaggcgagcagtgaagagtatccaaaataccagtacccttttctccttgacattgtcttcttacagtcagcattttattgcccttttatagtataaaaaaaaatggaggaggaagaagaaggaaaacccacacacaaactaattcaccaaaatactaggcaggattgtactttcccattcgctagccatgcctgccagtacacgtgtccttttccatttctccatcgaagcaagtttgaaaaaaaaaattagcttaaaagatcagctataaagatgatttcccttgaaaagtttgtaatctattgataggcttgataggccattggagcctttggttacgggttggggggtgggtggccagggaaagaagtcgatgcctggtttgttttctgtccatttcagtgaagatcatttcagtgatgaaatgaggccagagggccaatttttaaaggggattgaggagggaggagtgtccatggagaactgagcaaggggcaaggtttaggtcccccgcaagaggctgatgaatgagcttacggacggttcagaggtgtgaaaaatgagcttctctgtctccagaaaataggagaggctgtcttctttttaacctttgtaattccccttctattctctgtgacattcattcagctgccaagagcgtttggcaaggtttgggccagcgagcacacttccagtgaccgctaaccttggtatgtcctgacacttatgatgagtatctgcaggacacagaaggcaggcagcctgctatgtcaggcttttattatgtactgcagaggctagggacagtcagtttaataaaacaaatcatccttgaaggtaaagcaactgggaagaggaggaagacaggagaaaaatgtgtctttgccactcattccgatggaaaaaaaaaagaacagcaaaacaaccacccacccaacacaccgtgtgtgtgtgtgtgtgtgtgtgtgtgtgtgtgcgcgcgcgcgcattcgcgcacgcacacacacgcgcaacccagctgtggactgggcagacttgaaaacctcctctcattttctgcatttcatggaagcccagaaggctcttgtttgctctgaggagactcaagtctgtgatgaaattggtagaagctgat

SEQ ID NO: 35858 - DNA, 3993 bp, Homo sapiens
tgtgaccagtgcccactttagagttgaatgtataagcttctcaacctcataataaagaaaagattggttttattcatttttatctccattaatttttaaaaattaacgtttttcttcaaaagcaaggctaaaaatcagtacatatttacaattaatttaatacatgcagaggtgagacacagatgcccctgaataaaagtcatagaaatacatcaaatgtttgtcatgtactgccaaatgctggggtctatggacattcctgaattttaaaaggcataaaatataagaaaagggtgtacaaaggaaaatggcagatacaattttagaaaataacagatataataactaagtaaatttattaaagattactgaagaaataaattgtgctgtactcccttaccaaagatataaccatgtagtagagggaggctttacattgggataaaaagctaaatagtagcttttgaaactaaagaagtcatcaagagagtattgctttgggtattaggagacctgtctccaatccattcaattctaaaactttttacacagcctacccggagaaaactaagcaagtcacttaatgcttcagtgtcccaggagaattgaaataattatgagagctaaaggattgctagattcagtgtggtcaccatgttgactttcacctgccaaggattcctacctgccaagaaaatggtgtgttaggatgtttttgcttctcgtgagaaggcaatttaagtgacaagggcaaaattctgaagatagccaagtgtgactctagatccttctctctctgtttatgactggttctctcttgggtaagtgtctctgcttcttgtcaagcatctggtgctcctgggttgccccagccctccctctgttcacagcaacaagccgtctacgaaagttaacattaagatatcactgacttgatatgtttctcttaccaatggtacattcataaaaagatatgcagtgtacaagaatacatttttactgcttctgtattaggtctgatgtcacctgaatgcaagtaattatggactggaggccttccccaccaaacatcaggctaggctttttgaatggtatcactcctggctgcatcttgcaaaaaggctgtatggtctgtcaagccatttctgtctcccaggcctccttcccctccgtccccaggactggcttcctgcccatgatcatagagtccttctacatctccccaaaaatcattcataagaactcacaggaggaggcacacttctccactaaagcctggtttgtttttctggttccaaagaaaaattattatcactgaagatatttcagagataacctaactcagtggcttttattccccagatcgctagagaaatgtggttattatctcaggggccaccagattaggacctcaacaaaaggagcttcatctttatattgaggtataataaaatattcatttaatataaagagttctctgcttaaaacagtgatctttttgagtaagataaaacagatttctatgtatgaatgggagtattaattaacaagtaattctaccaaaccttcatttaaagaaaggagttctctgctcaacaacacaactcaatactctcattgggtagggtaagagatttttaaggatgaacaggaaaattaaaatagataataacacataaaatgataataaacctttaaaaaagagactatttttgcaccatggaaacagcacagagcctggcacctggtttgtactgaatctctgttctctttcttctcttccagtcagtggttttagttactttgccatgttgttttaagttgtgatctaagggcttaaacacccacacccattccaacttcccaggacattcaaattttgaagaacacagaagtgcagcaggaactaaaaacttctgccccactcttgccatttccccaggcccctgtgttcagcctcaggcctatagctgctgtggccacaccttccgccagccatgcttgcctaggctccagaataagagtgggacagctcagaaagattaaggtgccataacacactgaaacagaatcacttaggctgcctcaatcctggcaaaggggagggtattatttgcaaagccccctgctgagtctcccaggtgctagctagacaggctcaggagatagtttggcagccaccctggaaaaaatgcctgtgtctctgcaaataaatctgccagtgtagaaagcactgggttttccccagtgcttgtgcaaatagtactctgtgctttgctggtattggaaattccttggtataagtagctctagaccatgaaaattgaagttatggatttcttgtcattgttgttacccttgacctgttgggaaataattccccaaatcaatggtcatacttccgattattcacaactgaaaaatctttagtaaccagaaaacaaaaaaaagtgttccctgaattccccttcacggctcagcaactgacggtaagactgagcaagtcttgaagtctggcacaaaggaaggtagatgtgcaggtgtccaagcataatatgagcctgggcatctgagtgtaggtatctcctgctagaaaaattcatgaacaactagaaaaattcatgaacaactagaaaaattcatgaacaacacataggttaccaatggagcattattgatgtcttttcttcacttaacatctaggaatttgtagaatcaacagtgtggttacgtatgtgaaaaatctcagtaaagtggatacatttctaagcaaaatacaggtatcaacatttactccagaagcaaaaaccttcaagacaatcaaggccacagaagaaaattttaaagttgttctaaaaacagaacaaacatcagatcaaaactcctctcctctccccaaaggcacctggccttcagagttttatgggtgaattctatcaactattcaaaaataagttatattgtataaatagtatacatattacacatatatacagtatttatacacatatgtacagtgtttatatataactcaatttctttataaagtccatatgtattaatgtaagtacaaaacataatcaaatccagtccagcagtacatatagtaaaaataatattatactacaaatagggctcattacttgtaccaagctgatttgaagaagaatctggacttgcttctaagtgaaatgcaggagaaagtttcttgatagattgatttgctttttctaacttctaataatggtgaaagcaaatatttcttttctgggctgtcagctatctgctactgggcaatcactatgggctactgtcttctaattttttattttactagggcaaaatagcctttgctctttcagccattttcgtgtgcaaggttgcctgactcagaggccctgacttacttgaacaaatcttttttggaactctgagtttttggaaaaagccagattcatcttgtgcaattttaaggacttccctcagttaacttaaataaagaagaataaaaaaaacaaatccagcaaagtaatgccaataaagataggccattcattctacataaagggaatcatgatatttttactttgtgaaatattgaattaaaattaaaacctatttgtttacattctaaaaggaaaggataagtagggtaagttttgagttgggcagtgctgaccccaatcaatttgataaagcttgtaagagttgccattatatgcaacaggaggactctttgacagaaataatatatgaaatgtgtctctttatttttaatattttaatttttttcagctcattagctatcataagtattagtgtgttttatgtgtgtcccaggacaattttttttcttccaatgtggcccagggaagccaaaatattggacacccctggcttaagctttatgccttgattctttggtgctaaaacttttgaaactaaaaacactctttttattatgcacacaaaaaagccatgctctagcaaatt

SEQ ID NO: 35859 - DNA, 3281 bp, Homo sapiens
gcaaactaatgtgggaacagaaaaccaaacactgcatgttctcacttataagttctcacttatgagagttcaacaatgagaacacatgggcacagagagggaaacacacacactggggcctgtcagagatgtgttggggaaggaagagtatcaggataaatagctaatgcatgctggactttatacctaggtgatgggttggtaggtccagcaaaccaccatggcacacgtttacctatgtaactgcacaagtatctcagaacttaaaatgaaagaaaataatttagaaataaataaataaatgtcatttctgagtagtggagataggcaaggaagcatttaggtaaggggttaatttttatgtttactttatgcatttccaaagtgtttgaaattttttagcaagcaagcacaacttttgtttgcaggaagcatattaagagacaagagcagagaagcagtggggcagggtttggggctgaatgtacccttcactgtcagagaggaaacaagattctggcctggatgcatgcatccccttgtctggtttgtgctagcccatgggcactctgcactgaccagcttgcctcggctgttggagactccacctgaagaaggcaggagggagcagtggcacagttactggcttgggctatggagtcagacagacctgcgtctgaagcctagtccatgacttgctcacttgtcagtcttcttgagtcatagtttgttcttttatgaaataacacctacccctcaaactgagtaataaatgagatgtgctgtgggaggtacctggtataatagcatgtgcttagtagagggtagaggaagaagaagtcggataggacaaattactgttaaccttgaggagtgcacctacggggtggtcactggcattttaaatgccaccattggtgccttattccttttttcttgtttttcttcaatttagtagcccaaatcaacccacactgtgcacctggtaaaggaggcaagcagaacacacgaacaggagtgagctatgtgccctgttctcaaaaggtggaagctcccaatgggtgtacaagtatgtgtgttacagatgggagggagggcatcaaatacacacaagtcgtaatgctgcattgtgctgttctcagtgtggtcgtgggtttgcagttcttaccatggttaagggaaaagtggagtagagtggggaaagaggcagaactttatttaggaagatgggggttcatggtaagtaatcagaaaagaaattaacttgcaaaacagatggcacaaaaatcccgctctgagtttgagtagagggcaaaatgggagaatggaaggagatggtgaagaaggcacgctgctgctgaaacgtgctttgggcttagtgagaatgaacactcccacttctgggaattgagccttgggcagagcatgcacagaagcaaagctggaaggcagaggaaatctgggccacccacgcccacacctgccctgacctctcaccctgaagcctcaggaaagggaaaatcgatgtgctcccgaagtgcaggagccctgggtttgggactggaatttgacccatgcggagtgtttactgatctggagacggataggctcaaatgagctcatctttatcttgagaggaaattaggcagcccagacccagacaaagccatgttttattcaatgaaaatttaccaccaccccaccctcccaatgcacacaatattacatgaaacatctgcctaagtaacctagtctccaaaggttggttctgaaagatcaacaaatagagacttaggagcttagagaaaaacgaaaaaaaaaaaagttatttcagaatatcttacatttacccctcatgctgatctgtatcctctttttttcacagtttgcaaatattgactaagttcaagggcagtggtttaaggtctaacttcagagttagcatgaggtgacatacttaagatggtgcaatcctgtcctaatgaagaacatgttagatcccaaggttggtttatgggcagttcttgttcttgtcccagttgatatttgttttatcaagtcaggaactatttttgtcatcattgttaatcttcctcttgccagatctgttttggccgagggcatgcacttgaggtatgttagaagaatggagtgcagtattgtgggaaagaattatcactaattctgtctgcctacagcttcctcggccctgttcatctgatctcaattccctaaacaaaattgtagatggaaagtcctgcaagtccatgacctggttccagaaagtagatttttgagctgaaagagcaagatcgcagcattcccatgatgacaataggtctttgttatgttggaaagaattttgacttgtccatcaggggagatcttgacagaatattttgccaataaagaagtctaccactaaatgggtaggtccaactccattaggctcatctttggcctcaatgttatgcagatttttgcctcaaggattcctgagacctggcctaagatgtctggtagttctagctggaaccagaatcagctggcatttctgacccatgggctttggaagaacacagatcctggctcaaatcttaatgtctccgagcctcagtttcttcatgtatgaatacagtcgtgacaatgttctccttgcaagcttgttatgaggattaaatgtggtattgtatctgaaatcacttaacacagtgcctgttgcttaaaatgggattaatatgttctagtgtccttccttccgctcagccactccagctgctggtgtatcccctttctctgctgcatacatttgacatagtggaacaaggccagtaatgcttgaggggataccatcctagttacaatgaatagagaaaaggaaaggttcaacaatgttcagaacaccaatattcactttaaacttgtctaagcataaattataggcgctctgctgacatttgaaagaatggaaatatataaataaatgtatagttgtgtgactgcttcctagacctggacacagcttcacccctaaaagaaaatctccatgtggagacctttggggagaattttaatctaaaaatcctagagattatcacaatattcttttgagtattaataaaaggacttagttacccaatgaactgatgagtccccggataatttgttcaaaggagaggtgatattcttttagcctcatagcagcttcagctgctatctcccacctagagttctacccattaatatctcttgttcaaggtatcacatctaaaatttctagt

SEQ ID NO: 35860 - DNA, 1114 bp, Homo sapiens
aatacacttgcccttcgtatgctgcctgacggcaagtagccattaggtgtgcccgggctattcctcctttcccactcggggtcaaccaaggcaaagcaaagctaacctcaatattgatagaaacccactttagcatgatgaggctgactgataattatttagaggactggacattgacttcttgcacaatgttgaatctattaaagaacacaagactgtgtgtatctttctattgttttcctgttttagtgggaatttttatcatgtgaccatttaatactctctagaagtcctgtatgtttaaaaagacaaaaacaatactatattttagtgaaaatgattattattattaaggtataattatttgcagtatataaataagtgaattgtattcagtaaacacctcttttcggccaggtattaccaaaaacagagggagattcagcccttgtttaccttgtaggaaataggatgaaacagcagttgatttttgccaaacaactgcttattttgaacaccatcaaaggaattggttaataattgtttgaaattattgtgtgagactaagtggatattggtatatttttttctaagctggcttatatgtatagacatgacccgaggcatcagacaaacaaaaatacatacacacaagcatgttattgctatttagtattggggatgtgcatatgtcatggtgttgtttgttttctgtcagggagaggatcagattcttaactcttccagggaacttgacaaaagccctggattaaacccagaaagttgtttgtcctagaaaagacttccagcctctttggggacaagcaccctgttataacccctggcatcctgtgacattcattctgtacacaaatgatgcttatggacagagggggtcactgaccccttgaaatcactctgtaaactcagcatgtctggaccccaaagctggcagccactgctgcacgatagtgaaagttctaacatccacttttaactccaattcactctagagccttcataacttcagagatatattaatcccacacagtgatgtatgtgaaagtcagttctctttggttaagaactgttcatgatccactcaggtaagtat

SEQ ID NO: 35861 - DNA, 839 bp, Homo sapiens
gggaagcaggaaaacctccccacctttcctctgctcatccccttctccaccactgccctgtctgctgtctcacttttgccccaccatcctaaaacacacacctgacactttcacctgaatatctttttgccttcattccaggttgtttgagtatcaaagaaatgttctgtgtgcaaagcaaacacaaagaggtggaatatcaacaaagcattattaaatagctaatggacttatattctctggaggaacagattctggactaggagaacctgactctgcacacacaaaatctaccaaaatatgcctcccataactttcttttacaagtcagagcagggtaaggtatagaataatcgtgtgacagatgatagtatatgattgacgatggggtgaggtaggacttgtgaaaatcccaggaaacgattgggtaattttatcagggattgaggaaggaatcagcactttgtacagctgtgaatgggaaagggggaaaaggatgatatcagaacccctggaaatccctagggacctcagtggagtttgccccctaccctgggtggaggttttgctaggcagcctttggttctaatcagctcacaccaacgtgaagattccagtatttgtctagcgctgagggatgaggtgattagggaggaggagggcagagagaaatgaaaatagaaggatcagaggaaagaacgaggaaagaagggggagaggaattaaccaataaagggccatttcagcttcccctttcacgcgggttcagattaatgggggaggcgcgcgcccacacacatcaaggagagcacagaaccaagcttttcaagcaaagcctc

SEQ ID NO: 35862 - DNA, 1324 bp, Homo sapiens
tatccctgccacaggagcccttaggaatctgagaactattaataaatatgatgttattgtatttgcaccctgagtttggcttcctgaagaatccattatagtggcacataaaacccataaactaatgaggaggcttcctccatagaactgaaggcatttgtagctatattgacacttaattcactgaagacatttgtctcacactttattatattgagaacttaacccagttttgcaaaatagataaccatcacaggagctggtcttaattacctcttgccctttgtgtgccttatgtagaccttctctttgaaataatgtgtgtatttttcagtcttctcttttccttcttaaggtttttctcaagagcctagcaagattccttaaaaaaaaaaaaaaaaaaagctgaaagcaaatctatctgttagttgcctttggccttaaaaatcttcccaacaaagctatagttgcctgacaaactttgatatctataaataatgctgacaaaggaaaaaaatcaaattaaagtgttagttcaagaattccatcccgtgaacacgttagagtgtcctacttgtcctcaggctaccatcctgcttgagctgttagcacttttcctgaggcagacaacttccttaactcacacctgaaacaaacaaacaaaaagctgatgtcagcccgggcggtcctttcccctcctggctctttccctttgctagagaactgaaatcagatgagttgctgacatctggtggtaactaagcggagtgtaatctcggtcttggaaggacttttgtctctgattccaatacactcccccagcctctgattcctggaggcctccccttgagcttacaaaattgttttatccaaagggaaagcaaaagagcaaactaagaaacaacagaaacaatttcccacggttctgagaagatgagtgttggccaccagaatgaaaagtcagccttctctagagacaaccaacacttcttggatttagacaaagattagacttgatcccaacagacttgatgagtcatgagaataaataacacagggaagtctcttttggttaaaggtaacatttttcttgcagctgggaataattctgctgtactcattttctcttggccattcaaatattttaaaaagctccccattttttgggggccacagagtagacagtggtttctgaagcattctgcattgttctactcttctacctctcagcatgttgcgtgaaacctcaaatccttgctcacaaaagttcttaaacttcatcttcagagaaaaatgtagaaccttcactctggataggacaaag

SEQ ID NO: 35863 - DNA, 885 bp, Homo sapiens
agacactgttctcagctctttgcgtgtcttactcatttcacctcctaagaatcctgtgtggcaagcactattcttatactcattttatacatgaggaaactgaggcctccttgcccacgatcacatagtaaatggcaaccccaagctgtctggctccagaagatttcctcagaaaggaaggtcagtttgttgatctaaatagttgagctgccatttttgcctagaaaacccgagtggaagatttcatcagtgtccccctcatctgctgacagcagtcagtgaacatccaacatcaactggactctgcctccttggaaaggccccaggcttgatctggatgaatgacctctgtgtacagttacctttgacttggcctcctacctgaaaacacaaagagggacagttacataaggtaatgctgacctatattcttgacaccctgagttgctcctggatccccagagcaaacactgaggttcaccaggagagaagcacaaactgatgtctgatttgctcttatctgtcacaggccctgccattagcccaacttggccaagaatcagtggatattgattggtttggttgtgctcctcatgttccctcagaggacgaccagctcctaagcaccaacccaaaatgaagcaaaataatacacataggccggacaaaagcttaaagtttcagattttaatggaaaaataaatgtgtaataggcttgttggactaacagaagggttctttaaagaaattgcttagttttcaaatactaaacaccattagataggcaagtactgccaaatgagtttctggagacagaatttaatgaacaagagacaaaatctttcaattatgtcattgtgcatatatagtttttgcatagatgaa

SEQ ID NO: 35864 - DNA, 2686 bp, Homo sapiens
ttgaatgaaggttgaacatcatcaggagagactcacttggccttcgtctgtggaagcaaaggatgaaaatgtaatagagaataatagaatagagacatcttcatggtccctgactcccagtaaagctaggatctttgtacctaatcataagtaacagggatattctgaaggggttctgtggccccttgacaatcataagtgattttgagaaataaatattttgacatctagtcccaaagcattagtcatgagactgacaatcattgatgagacagtggaaatgtggaagttggcactggactatgaaaatgcagttccgtgggacttggatgaggcatgacagccagaagatcagcttcagacacgaaacccttcctcctagccccaccaaaattattcttcagtgtgtagctccattgcatacgggctggggatgagccttttcctctatgttgctcccttgattctctttcatgcacattcttggcatgtcacagactctccccagccttgaattctagccccattccatctcatctggggcaagtctcacaattcctcatctattcagtgtgcacaattcatatctgctgtacctgactcaggattcctgggagaatcaaatgagattattcattcggcttttcaacaaatatttgttgagtagttgctgaataacatagtgtaagggagactgtgagagataatgatgaatcagactgcgtcttaccctcagggacccaggcaatgtacaaggcgagacaagttcacattccaaggtgaaatcgtcagtccaagagaggaccagatactgggctatgggagctcagaggtaatatggattattccagcaggaggtaataaagagggctccagaacagaggctgctgtttttgggctgaatttccagagttaaaatgcaagcagtttggaaacaaaattggtacacaaatattgggcataggttataaatacctaatttatggaattctctatgtcccagagtaatgcctacctaaactcacatagatttcaagcaaataacagataacatttatggagtactcttgcagtgcaagatactatatgctttatatttgagaactcaacgtaatctaagcaaaaccctaagaggcaagatctagtatcaaatccacattgcaaatgaggagaataaggcactgaggggttgagtttcttgctgaaggtcacacagacaataaattatacagccaatatttaaactcaggtggtcagagttcaaatactgcttctcagacaaaggaacaaaaataataaagtcattgctcaaataattcagtcccttcacagaactgttattttgaaaaaaataaatgttggatcctggtgaattatggcaaaatttatctgggaaattacatttcaggttgagaacgtacaggaataaagcctctttcttcataggcatcattgaagtcattccagagtattttgtgctatggccagtagatggcagaaagtgacaagaaaaggactggaaactgggacccccccccccaccacacacacacacacacacacacacacacacacacacacacacacactagctccctgcttgcaaaacaaaatgcattttgcctacaatatatttcgtttagagtagcaaacactttctccttcctcaaagcgagctccagagtagaaactgcaattgtgtatttgaaattctccagtcaccaaatccaagaaaggtgaagaggaactgccccagtggcgtctgcgaggcgtttcctctataaagctgtcgtccctagctctggtcagtgctgaccaagtcaccctggcctcctccccggcccctttttctactgcaggaaaggctggagcttcggaagagataacatcagggaagtacttggcaactatgaagagttttacccatgttaaaacaaaagccagcaaagcattccttcagtaaagatatgttaagcacctatcgtgtgctgggctctgggcacaaccaaaagcttggcagctgctatttaacctcctcctgcttcaccagcagcaaactgttgccaaatgagcctaaaaagaaattagttccatggattcctttgctgagtaattctgcagtgaaaataagagaaatcagacacactggaaacttttaattacaagaaaacctggggaatcctattgccgtcttagattttaaaagaccgctctaagtattgaactcagaagctttaaaaggaaaagatattattagacttgactacataaaacttttaatcatctgaacttcaaaaagcactttgaaaatcagaagaaaaaataaaaagctgtaaaacatatgacaaagaattaatgttcttaaatataaatattctaagagctcttataaatcaataaatgtatagatcaataaatcctgtaaatcaatattcttatcaattgatcagatgggcaaacggcatgaagaggcatatcacaggataaaatggagcaaagggccaatgaaacattggaaatgtgctcaatttaattcatagtaaataaatacaaatttaaatggaaacaatagtttatttttcacccctgggtatggagtcagccttctcctggggtattggtaagtataagttggcaaaactttttcaagaacaatttgacaacatttaggaatatgtttgcattt

SEQ ID NO: 35865 - DNA, 2224 bp, Homo sapiens
ccaggacttaccctacagatgtgtgtatgtgtgtataaatatatattcaattaactatgccttaatagggactagttaagtggattataattttttaaaaccctcagtttcctcatacaaaaataggatagaaaaaagtacctatctcatatggtttttgtgagaataaaataaaaatgacacctggtacttggtacatagacacattcaacaaatgttaggtactggcagctcatcactgcttggcagccgataaaaagaatgagttaaatcaaatgtactgacctggaagatgtccacaacatatggttaaattaaaaaaccaaggttgcaaagcaatgtgaatactatgctcttagggaaaggcccagaaggagttcagggaagcatctgaaggtgatgggtggctgtggtagccacctatggtgaatgaagttcacagagaaaggtctggggaagagagaagagaccaggcatgtaacgtatttgcttaaatatgcttctgtatggtttgaatgtttggcaaagcatattgatacttttacaatattttttaactttaaaagcagataacgccccagagaactactctgttgttacgctgtaacagggaaatgtgttgagcttccaggctgctaaagaaattttgccccagcctgccttgaatttttgtaggtaaaacctgacactacaggaaaagtttgggacaagtttagcaagcatattctactcaagtctggtgagaaaactgtaattgttagatttgattttttaagcaataccacaggatggctagaaggattcgatgaattggcaaatgtgaaacatggagcccttgtacctaatggctgtccattagataccagctgtgtcagaatgtgatgcagacaggaacattttcaaggactggggagagttattaaattgcatttgctgtttgttctccttcactgaacaaatatttattgagcatgcactatgtgccaggtgctgggccagacataggtattcagcaggaccagacagacttcatttttgccttcaggggaattccctccttttgtactcatgcaactgcaatgcttccagggttaggcaggatttcaggcagcctggttattcaggtagcatgcttatcttcagagctgtgggttttctgtctagaattaaactacaaagtgatgaaagcataaggactatctctaaatttggaaatttaaccaggatctttcttgagcaatgaaatggcatgaaagtagttcccaaatagcagtattccaaaagtgcaatgctaatgaaacaacacactacaatagcaggagttgtattccaccctttatgtagcagggatgaagactacaaggagaaaagtccacatgtttggtgaaaagtagcccattacctaaggagaggattctcttacaagtaaaataaaaactcaagccattacacctatgtacaagagtcaaagttccatgggcccttcttgacctaggatctacttgaagagggacacatgccccatgcaacagccgagggatgagacatgaaggggagaaggcggattgggatacgctttcaacatcatcccccagagcagattccttgctccaagcttggaggactcttcctgcaagagctgcatccatagcagaaatcatacacatttgagaatctgtttatatgggtttgttgtgctggccttccatccattcatttcacaagaattgcttgaaagtcgccgccatttctcttttgtactcccctcatgaggaacaatccagtgcctcgcccagagtagatgctctcaaagccacctgtacatattggggacaaaagaagtggacttcacactatctatttaacttcttgaactacaggaaacattattagagctctatgttatatttcctctgcattaccttgtggtcaagcagggcattgaacagaggacacagggacagcaaggctgactgtgttatcaatatttgtggaagggaacagagcaaaaccagattgaaggccatcccacagttctggcatggcttctatagaagcaggagatagacagaaaggaaagaaacaaaacaaaacaaaacaaagcctgggttgccccttttcaacgatccttcctcactaatctaatcctatcggctgctactccttatggggtatcctttttatctttggtttaaactaaaccagatctcataaaaagttggct

SEQ ID NO: 35866 - DNA, 2252 bp, Homo sapiens
aaccagtcctgaacttacacaggtaactgtttgaggtcctattttgaagtagtggtttctgctaaatgatctcgtcacaattttagtctttactgcatgtacatcaattccagtctttacataatcatgtggaacacggattatattttcctttctcatatgaaaagtaatagcgtgcatgtgtataggatttacgtttcaggctttgtgggctttaaatcctttgactcctaacccaagtgacttttctaagatcacagttcgtgggtggtcaagcatattaaaactactgcaaactctagcgcagtgtcctggacactggccacagcatcgcattatcccccaacagcctaaattccttgaaggcaaggttctctctggcttcctctgcaacgttcgcagcatgcctcagagactcggtgagctgggccggccaatgcatttcctcttccgtccatgtaattccactagaggagcagagggcaaactacgttcccattaaagccacaaggtttaaaaacctctaaccttggaaaagcacacttcaaccctctgcacaccaaacttctctactgtggtttcccctctgccgctttctccttggcgttccccgatcactgcctctagggtctttacaagggacagcgaacgtaaggtttcggagctggcttcgcccccttctatttaccgggggctggtcatccttcgggccaggctgactgtctaggggtggccctcggatacctggtccccgcaggtgacccccctccctcccaccgaggaggagggcgcgtcccgctcgctccgtggagacgccgcggaggcgcacacgcctcacgcctcctcgcagaagccacaggggctgcggctctttgtcgcggccacaccggaaacggcccggagcgcgcgcggggcggccgccgagggtcgcggcgctaggcggggccgccgggcccgtccccctccccgcgggggcgcgcgaggcccgggcggggccgccctcccttccggggagcggggagccgccgccgcgtccgccgggcggctcccaccccgccccccgcagctctaggtgacgcgtctccaataacagctcgccgggagccgcagctcgggcacagccggcggccgcgccccgccgccaccatgagggccgagggcctcggcggcctggagcgcttctgcagcccgggcaaaggccgggggctgcgggctctgcagcccttccaggtgggggacttgctgttctcctgcccggcctatgcctacgtgctcacggtcaacgagcggggcaaccactgcgagtactgcttcaccaggtagggcggcggcggcggcggcggcgggcgggagccgggggcgccgagcgggaggcttggacggcggcgccaggaagtgcgtgcggctcgcggggtcctagcgccggcccttggggcggggtggggggcggggaggggaggaggccccgcgctgcggccccgcgctgcagccccacgccaggcgccacgtgcgagaggaaacaggaccggtgccccgctgcacgccctgcactgcacgttttcagagttgctcacgctggatgcgcaaacccgggcgtgcaggttcctgccctcaaatgtgggctccgagccaggcttgttccaagcctgggcactcactgccctcccggtgcattggcagcggagccccaaatttgggcagccacgggctgtcacctttaacttatgcttcctgcggtgtgttctgttacccacagtccagccctgcctcagattggccgtttcttccaaggaatttaatgacttagtatatgtcttgtaaagtacgcttacatgttaaagtacgcttacatgggtgtttggagggacgccagtgggcactgaccacaccccctggattctgaggtgctgcgacgatgagttgcagtgtccagtttcggtttgggattaggaaaacatggtcgcaggaagggattgggcaagatgtgtggttgctaatggtatttaattgtaagataccatatgtatatatgtgtctgtgtttgtatatatgatgcatatacatttgcacacaccaacacataattatatcctcaactcttatgagagtttcagagcttaaaggcacattagaaatcaccaattcagtcttgtctttcacttaatggatgagaaaactaaagcccagagagaaagtggagttacctttatccattcacaccagtagtgaagggagtgaaatctggccttatt

SEQ ID NO: 35867 - DNA, 466 bp, Homo sapiens
caggctggtctcgaactcctgacctcaagtgatccacccacctcagcctctcaaagtgctaggattacaggcgtgagccaccgtgcctggcctagacatattttaacccccaatgtgatttgtctcagaaggagagaaatctgctttaacccagtgttccatctaaatattcattctatgtgccattcttcaggtaggcagatcttttgatctttagtctcccttttgatctttagttctcttggctcatgggttatttaaggatgagattattgacatttctttgtttgttctgagtgtagggggaaccaggaaagcccatttagcctccttggaatagagctgttagaacccagtttcagtgaatttcggtcatgtctggcttagattagttgttttaaaaattaaattgtttgcctgagccaaaccctgtgattaaggtgtcctatttcagcagttataaagg

SEQ ID NO: 35868 - DNA, 1111 bp, Homo sapiens
tattgagtgcctactaaatgccaggcactgttgtcagttctggggttacagctatgaacaaaacaaaatttctttattttcctggggagagacagatactaaaccaaacaactaataaatatataatatgctcaggtggtgagaagtactaagaagcagcagaaagcaaggaaaggaagaatgatggggaagtgctctttctgacagggtgattgtggcaggtatcttgagaaggtgacattccagcagcggctggagaggagggagggagtcacatggatatccaggggaggagagtgctagccacaaaacagagcaagtgcgaagggccttgaggcaggtacatggctccaggcgcagccaggacacttctgtggctaagtgcagtgaggcaggtgagagtacggtgggggatgatgggctggggtggtgcagggacgctcccatcacgtgtggcctcctaggtcacctttagcgcttggccttttgcctggatgagaaaagccattaggttttgagctgaggactggcctgatccgagttttgtcaacagaatccctcaggctgctctctggaacctagtccatgggagcaaggacagaagcgggcatccagttagaaggcagtggcaggacattagtcatgagagatgttggggctgcagccgggtagaaaggttgtggagctaagaagtgatcagattccaggcagagacagaggatttgccagaactgactgaatgtggagtgtgagtgagagagcagcgtcaaggatgactctagctttctggcctgagcatttatttttatttttgagacagaatctcacactgttgcccaggctggagtgtagcggtgcactctcggctcactgcaacctctgcctcctgggttcaagcgattctcctgcctcagcctcctgagtagctgggactgcaggcacatgccaccacacttggctaatttttttatttttagtagagatggggttttatcacgttggccaggccaatcataaactcctgacctcgggtgatccgcccatgtcagcctccctgccctgagcatttatggccattttctgagctagggaaggccaaggacagagcagg

SEQ ID NO: 35869 - DNA, 2632 bp, Homo sapiens
ctccagaagtgatgccaactctgactattctgtggtgggcaggactatgcaaacttacgctcaaagagtgaggaagctgagagacagaagaaagaagctgacaaatccagtttattagaaacatttactaggacttatgaactgaagccatgtctatgtcttgggcggcagcaagacaagatggtggatccctgcaccattacccaccagagccagggcttatataccatagggaagaaatgtgtacagcagttacaaggaaaggcaaggatgctatgcaaatctgcctgagagcaagatttgtgctcaagattgtattgacctaaggcaggatttaaggtagccatagacaaagtagaaatcttagaagcattcccagagcaggagttaaccagaaatcaacatggtatatcagcatccaagatgaaattgctttagccaccgtactgactgttctccgcctggtctggttcattcttgctgattgcataataattagacacctaatcttcgaagggccaaactaaaaagaggacaggaaaatgccatagaacttgtccttgtgatccaatgaaataggcagtgtggggcttagaaggcatatgtccaggctgtggaggtcttgctcctcagtgctgtcagagaagttggtggcagggcctctggactataaatcttttaaagctgaaattttggctgggcatagtggctcatacctgtaatcttagcactttgggaggccaaggcagaaggattgtttgaatccaggagttcgagaccagccttggcaacaaagtgagacccattctctataataaattttaaaaattaaaaaaatttcccaggtgtggtggtatacacctgtggtcccagctattctggaggctgaggcaggagaattactggaacccggaacttcaaggctgcagtgagctgtgattgtgccaccatactccatccagcctgagcaacaaagtaaatgagactctgtctctaaaaatgaaaaaaaaaaacaaactgaaatttcatccacttctcctgtatacctaccagccctcctccacccttaaaatttttctattttttaatctaagccaaatgtgatggaaatgattagcatgtatctgtccccagaccaagttaggatcctgggctgtgtaaacagaagtagaacatttcaaaactctgaggtcatccttcagctatgttcagcttgggtcaggtgcttgccgaaatgctacctcgccagccagccgagagtaacaaaggccattcatgggttgcctgtagagtgagaccaaaacatcagaattgtttccctgcaggaggttaactttcggatccttaataacagttatttttaaatttatgcagagtatttgggctgaataagtcagagggaataggatgactgggtgtgaggtatcagagtcagtaagtcatcagatgggatctccgcacatcttgggaggattgggtggccaagctggtgttttattattttgttcccctgaattattgatgatatttatagtgatatgttaagaattcagaagaggctggtagactttcctgaatgaaaagctttcccaagcgagatgacttataaatcttataaaaatgcatcccgtgaatggaagatttctgctccaaaaaagaactattgaaatatttcggcaccaggagggtagtctgaatgcaaagatgagtttatacaagcttcattcaagttttattataattactactactactaatagtgtattaaatgaaagttacctgcccatcttttcatctctataggacttgatgattaaaaaaacagaccatttgtattctagtagcttgcaaaggattaggggagacaggctaccaaactaccaaggggaggcttaacatgttaactagggaggtgagcgtgccctgctagaccacctgtatccccaaattgaatagccacattacaaagacatggccttgggccagctcctgagctctgcctttgaactcttgtcaacaccaagtttattcatgttctcaaagcctagcgggtttactattgttagctcctcttggggtgtctagaacaaagccagcaacgcgtttaaagtgaatctgggctcacagatacaaccaaaagtgttctttttgaaacacagaatttgagatcattttagcctatgcttaaagaaagtgtaaaatggatggggggtttgattttgttcctttttagaaggagaaataataaataggatggtttgtctgtagacccagtccttttaagtaaggaccctaaaaagttgttttccggccctgttctttcccgtaacaggtatttctgagcctactgtgtgcatagtattatcagggtgttaggtacacggtagacatttaaaaaagcgctttagaagagtctttggatttggctggtggagagccctagtggtggagtccttgagtagcttgttttacttccttaagaattgttactttttctttatgttgatgtaaaagtgaaagtgccactttattacactggttgttaaaaaatctgtatctgtgtgatttcttccccaattgctagaaaatccacccagagagaacaccttcggaaaaattgttagctgtgaag

SEQ ID NO: 35870 - DNA, 1945 bp, Homo sapiens
tgatttgggttttactaatcattaataatgtacgaagcctcacagtggcattgtaatgtctcaacctgactaggctgcactccatttcccagaatgttcttcccctatgtttctggttagtgtgggtcacagagaatcttctgccaggtgactgataccagcacagctctctgagggatgcagcagtttcctgctaccttctagtatatcttttcatttaaaaaaaacaaatattatttgaagacctactatatgctaagcacaatggcaaatgctttctgaactcatccttacaatagctatgctagcatcatctcctgattctaaacacaagaacttaattttggggagtttacagagcctgaccaagaaacaaacaccagagagtgaggtcttcaagtctgttctccttctttttcctttttttccccctacttcccacattaatgtatgttctcctttgtagtgttttttttattgttttatttccagctattattttccttgaagattaaaccaaaaaatactagttctttgctgattccaacaatcattcaaaacatacagagctctagcagatacataacttgcttcaaattttccatcagtatcctcatcagtagctatcttttcacagttggccattttatttcaaggatccaaattaccgacctttttcatgttttccttagttagacctatgggtttctcacattagtcactgtcataaacatctatcttttctaccttcttcaaaacatttatgctggtcaaaagcatttgcttccaacattgcttcatctctgtgattttctactaaaggaccatgtgtctaactcgcatttcagttaaacttacgtcaaagttgctgggatttgctctgaataacggtaactcatttttatgctggcagcaaacgtcaggcgaaatgtctactcactctccccagctgcaagcacaagattgacgagctgaccttgagagttaggaggctgtaaaccgaaacatgttgcaacatgtcccgctatgattacgcctcctctgcttttacaaagtacaccagaaagcagtatcattatttgagtcacacctggtaacttgacacctgctgacacctttctactgtttacttgcaatgtctcaattttccacccttctaaaggactcagtgtcatctgaaagcttggcactttcactatgtgcccagggctggagatcactgataaagacgttaaataaaacccattttagttccactctctacataatgctcgctatttaaaggactcactcaaagaagtgcctgtttccctctaccctttgtttcttctgtctgaactacttccttctctttgacaaaactcatcccttccaattccacagtgtgtcttagctgttacagctaaggggaggggaggggaggattggcaaagactttttgaacgtttaaataaatcctatctatgggctctcccatgtcagcatgcttggttcacctaaaaccattccagaaccaccttaagagccaggcttgtcactaaacagctgtgtgactatgggcagagtccctttatctgtctgtttctcagtttcttcatctgtaaaacaaagcaactggtctctgtgatttattgatatgtggggtctcatatttagatataaaactctatcattctggtctgtcttgatataaggcaaagggctctttctcaaataggctgtgtttgtttaagatttgaatgatgtctttattggcctataagacgcttggtactctttctatgcatgaaccttttatgggtaatcagagatgagacagatattgtgagcaataaagagaggaaatctgaataatttgagccatggctctgcagtagaaagttgacagggacatataatctagccctccggagtgatctttacacagaaataaagttttcaaatg

SEQ ID NO: 35871 - DNA, 1969 bp, Homo sapiens
ggtggtggtggggtgtgattgggagcgtcgggcagctgcatccccctaccgctgcagcgaccgcgacgtcgttcgtctttcatcctctagcccccaaggtctaggtatctctagttgcccttccgaggccctctctcgttcccaaaacgcagaagggaatggagagaggggaccagggtgtgggtttaaccacaaactccccagactgcgctcaccttccagctcgctcccgggaccagctttgcgcctcaccgcgggcagctcccaccgcgagataacacccctgcggcccggccaccccgcgccccaggctgccctgccaggcgtcccggggcgccaatcgcaagttggcgttgccagcgtctgcccaagtcatctgcagggcgcccggagcgccaaggcggcctccaacctcgggcccaactcccggcttggacggggcttacctgcttacatggcccccgtggcgccccggagtcccgcgcggaaaggctgtccttcgcggcggcggagccgattccccacggaattgattccagtgactggcggaggaggggcgaagggaaggagccgcaggaggcgaaaggggagggaggtttccgccgcgatcccggcgcgagagtccgagcagaggcgcaccgggggagaaaaggagaaaaacctaagcacggggctgtcccgcccgaggaggccggggaggatggctcagctgggaggggaaggagcgccagtggccacttgatgtctgtctagggctccccgaggacctgagccaggagagcaggcggctgagcccggagaagcacagcaacctgcccccgagtctgcgcccgctgcgctcactccgccgagaaaaagttggaaagaactttgaggggccgggagagccagagcggcaggaaatgcgagcggccgggagaggagggaggaaggggccgtgcgagtgggaggggacggagcaggcgccggcggccacggctcccccaccccagagccgggctccgcggccctgggggccgggaggcggagggagcgctgggcgcgcggccgggggcggggaggaatgcggcccgggagggcgcgcgccgggggcgccgcgggcgcgcgctgaaacgtggagccccagctcccgagctcccgagctggaggcgcgccgtccttggggacgtcacagcgctggaatccgaggaatgccgggctgcaggagctccttctgcaggcccggagaagtcgcacacttttaatggggtagttttggaaaatgttttaaaaggtgggggccgaggacggaggaccggatgaaactccctggagtaagagacgtggaagtggagagagcaaggcgaccgcagccaccccaaccctgggctgctcccgccgttggggagaaagaggcaaggcaaggaagagcccacctagacttccgaggaccgcagagacggggcggcggcaggaacttgctcaccccgacctacattcagaatagtccaccttatattggggaaccctccaagcaggacgtttcatgcagccaccccacaggggaaaacagaccaggagaaagtaaggtggcctcaccaagtaggcaatctcagagatctctccctagaatctctgggtactggacccggtgtcttagccttctctccctgccccctcccgccccgtaggaatgataaaaagcagcctgtgtgctgagagttggaaaatgtcgttttcccggtttgttccatgccacagaatcgccccaccctgcctgggtaggcactgggagggaacttccttagcactttcggaggtggagttaatgagacgcagctggtatgatggaaaaagctcggagccaggcgactgaacctgggttttaggccctgcccgattggataactgaggagtatcccagcccctgagatcctaggtttctgtagctgcaaaattaaataatttgtctagatttctgtggtccttt

SEQ ID NO: 35872 - DNA, 549 bp, Homo sapiens
gtataccaaatacataaaatggctacaaatttattgaataaatgcaactgcccaaaaagggcaaaataaacattaattgggtttgaacaaaaaagaggaaacaggattgaacaaaaaatggaaagaagaaattaggattgaacaaaagaggccatcttgaacggccaaaacaagagaaaatatattaaacaaatgtgtatccaagagaatgcaaactaaaagtgcactagattggataatgctaagtattggagaagctgtggtcaaatggtaagattattaatttggtgaaccagtttggttaaaaacagaaaaattcacaataaagttgaatgtccacataccttatgacaaagtcattccactcttgtgtatgttgtaagagaaattcttgcacatgtgccagggacttgcataatatcatgaatatcagcattttcccaataccagaaaatagagaacaactcaagtattcactaaccggagaatggataaatcaattttagtgcctcaattgaaaggaatactatgtatcagtaaaaataaatg

SEQ ID NO: 35873 - DNA, 668 bp, Homo sapiens
tctactacaaaggcatcttcctgtgcactcttcttgacagagaaccctgccatataatccagctgtgcataactgaatgtgccagttcagtaatcctttaatgaatcaccttttaaaatctgcccctcagccataagtatgtcacttcaacatcattttatactctgaattgaattacattaaagcagttacagcatggaaagaggcaagagtattttacattaaatcactggacaacaatcataatcaatagttgagtgccctagtcagtgagcccgaccatgttataaactgatttggcttcgacgacttttccagctaaagtccagcaaccagtgaatgtcattgcgtaagcaccaaattcctgaatttgttttgacatatattctcatcagtaatggcaatgatgcagaacaattgcacaattttaaaaataaaattttgggtttgcaaaacacttggctttccaggtgaagaaatttgcatgagaggtggctcaaagctatgttgatttagatgcagcttttatctgagatgtgtccaacctaaatcctacattatactctattttgttttgctttgtctcccctccacttcaccttgctgcctttaatgttcttgtcattaggacacaaaagaggagaaggatgaaatctgcatacctagct

SEQ ID NO: 35874 - DNA, 741 bp, Homo sapiens
tggatgattataataaattctgggggcaaaagagaaggtggaggagagtacttcttgttgatgtcccgtgggaagttcaggaaaccctcccttttcccccataacccagagaaaggtctactgattctgaaggaagcaaaagcttttgccctgcaagggagcaggaaatccctgaggctcagaccttgcagttacaaagtgaaaatctattaatgctggcaggaatagtgagaagaaggaggttgcgaaactctgtactgctcacaacctttcacagaaacatagcagagttgggtactgtaacaaggaagtggtaggaatactgagaaaccttcacccgcaaagttcaagagtacagggctagcctatgactgaggctgaatcagggcaactgataattcattcccttcaccataatcccacaaaaaacagcagccaattgctggaggaggggcaagtgcatggataaaggttatctctgtgtactggcaggcagggactgcaagtcacactatctggagttcctggctatgccactgttgcttgcatcaagagctagcaaaagcccaagatacagtgaaatcctggaaaaaactgtactcagcaggcaaccctcacaagagaaattgcattagctgagaagtgcagaaaagatgagctctccaggaactcgccctttcctcctgccctctattgacaaaaatcttaatgttataacatttggcaaaaatatgtatatta

SEQ ID NO: 35875 - DNA, 2237 bp, Homo sapiens
ttatcagtttgaattattatgatacaactatgacaaaacaattcatgttaagaatttagtaccacaaactaatgacctctgaaacataacgcactatctttgttagtctttgttagcagggcatcaagtattatagtattccgatttaaaaaatattttaatagccactaaggttttgggtttgaatagataccgtttaaagcaaaaacaaataaataaacaagcgcataaaattgtgtgttttctgcgtgtgtctaacattagttgagtgcttactatattccagaaataggttgctgggcattacacagtctaggggtttttgtcctttggtttccttcctgcttaacaaacaaaagcaaaaaacaaaacaaaaaaactgcttgggagattggggattaaattgaagagggtaaagtaagcagttttctggggtaaacgctgtaaggttttaaaatctccaaatgttccctgcatttgcactgtctacatttaggcatcaacttttactacctctaggattagtttttcctttcccaatccatgttgacaaagtgggtcataaagatccgtagatcgtttgcccagatctgccctcaatctgcgaatcagcttcctcgttttagaaaatctgaaatgtaaaagggaaaggggctgggatcgcgtggggaggaggaacgaaatggaatcccgcgtgggcaggcggctggccaggagcacattcccctagcctccctacgcgccagccccgcggcgttgggaagctcctccctgacctttccttcctcctcctcctcctcattctaggcggcagtggcgggcgaagcgtgagcgctgcggtattttgtcccgaacggtgacccctcctcccaggcaggctgcggcggcgtcggtggcagcggagcacggagaagaggcccgggcggcccggcggcctggaggccgcgaaaggtggaggccgggccgcccttgtgcaccgcaggattgacccgggaaggggcagaagctagcgagccccgcccggccgccgggaaggtgggggaagccccgtgcaccccccgccctccggccgccgccgccccgctggccctgcagccgtcgccgctgcctcgggctacagccccgggctcggcggtcccggctggggaaggagggcggcgagcgcgtccggagccgccggagatggcgggagggcactgcggcagcttccccgcggcggcggccggcagcggcgagatcgtccaactgaacgtaggggggaccaggtgagtcggcgggtagcgggcttgcagcggggatgccttggcggcctcctcctttggtgtcgacggggaccgagagtcgcaggaacgagggcgagcgtgggaggccaagcctggaggggaacgtgggggcctccaggcggcaagaacgtcgggcggattttggagctggtgaagcatctgctctgggaagggagaggcagaagggacgcttggaattaccgaggaccaggcccatgtggcagagtagctgctgtcctagaatgccaacctttgcccctcccaacaggcaaggagaaccattacacagccttccttacctcatctcagattagagtgtatttgaggactttatttagtagaaacctggctttgtggtttggatgttggagatgaacttgctttcctttctctttggtcaacgaggtgtcggttttcttagggaagagtgcggtgttcttttccgcgcctaattaggggatttgtaatttgaaagatttctgtgatgggagtgcagtaggtttgcagtacctagttatttattttcagaatttcttggtgcatgggcttgaaggatctgttcaacttctaggacagtgtgtccagaaactgcagtttgaacatttgcttttaggaagctctggatattggcacggtgtgacgcccttggagtaaacagactgaatgctcttctctgtctgttctctttctggccttccgcccccccccccccccgccccttctgtgcctgttattaagtttgttgggggaaaaaatcgtagtttttgtggatttcctataacttatgagtcactcctctcagaaaagggagtttgccagctgtttgaaagaaggattagttgagttttaggcttggtaaggagataaacaaggaaatgctctggaatacagttaatttttctgtgcttgagaatatgattttcaaccagcattttaaaagtattttaatgtctt

SEQ ID NO: 35876 - DNA, 745 bp, Homo sapiens
agatgagattatatagtttttttttttaagtgaatccaagtttattaagaaagtaaaggaataaaagaatggctactccatagccagagcagccctgagggctgcttgactgagtatacttacagttatttcttgattatatactaaataaggggtggattattcatgagtgtttcagaaaggagcaggcaattcccagaactgaatgttcctcccctttttagaccatatagggtaacttccagacattagatgtcatttgtaaactatcatggggctggtgagagtgtcttttagcatgataatgcattataattagcgtataatgagcagtgaggacgaccagaggtcacttttgttgccatcttggtttcagttttggctggcttctttactccgtcctgttttgtcagcgggatctttgtgacctttaccttgtgctgaccttccttgttacgctgtgactaagaatgcctaacctcctgggaatgcagcccagcaggtctcagccttattttactcagtccccattcaactctggtttgaacacctctgacatgttttccccttcccttttacaagggtactcttaatcctaagggtttcagagggaggaagattcatcttctgtaacttctgcagtctgaatagggatgatggtatttctgcctattagggtcttctgcattcagagtagaggagagctcagttagaaactgtcagtatggtgagaactctgatttct

SEQ ID NO: 35877 - DNA, 1236 bp, Homo sapiens
cttgaacccaggagctggaggttgcagtgagtcgagatcatgccactgcactccagtctggatgacagaagactctgtctcaaaaacaaacaaattaaaaaaaaaaaaaccttggtgagtggaaattaattgattagtgtctaaggtaagtaccactgccagtatttgtttagtattgcagggaatgaaaggatcttcaaaccagtaattaaataacaagcaaaacttaaacttagctatactgtatactgtatggtcttgaaaaatgttgatgaaatacaaaagacactctcattccttggcacctctgcctatttctctccattcagagtatagcctaaaatccttttgccagtttgggtctgatgttcaaagggtatcttacctgttcacaagacgggtgcttggaagagggtcacagcagcactgaaaccagagcttgtcacatgagggggagaagtgtgtgtgtgtgtgtgtgtgggtgggtgttgcaggggcatagctcattgacctactcaagtgaaaagacagtcaatctggaaaactgagcaggtgaatctggcttgttcctattcagattcttccccttgactggattctttcccacctgagtagatgaggagcccacagtcaccaacagggacttcattttgctctactaatacaaattgtactctctttagtttggctaatttttgacaatgtctctcatggtctccaactttgtgagagcagtttggtttaaaaatatttgtaaaaagcaacagaagaagacttgcaaatacactgtcaactggataggattaaattatgattcaacaggctcaggggaattccacccggtgccctggtgtatcccagatttcacttctgctgagacctgcctgcaatgaatggcttccctgctgaggatgagccagttccctgggcccagagcccctggcagccagccagtccctctatgccttcccatcctcacacctgactcagtcttggccactcagtgaaagaatcagttgggtgccactgtgcatttccccgatggtaaagggtgtgcaggaacagggtgtttacattcttttgtccgcttttctcagctgaagcctaagtctgtccccagaggcggcttagcctgtgtggtgtcaggacagcaaggtctaaccagcaccctcccaccacctgtttctactggttatcaaacagtacactgcatacaggttttgtattatattatta

SEQ ID NO: 35878 - DNA, 2949 bp, Homo sapiens
tatttttatttatttatttatttatttatttatttatttattttttgagatggagtcttgctctgtcacccaggttggagtgcagtggtgtgatctccgctcactgcaacctctgcctcttgggttcaagtgattctcctgcctcagcctcccaagtagctgggattacaggtgtgcgccactatgcctggctaatttttgtatttttagtagagatggggtttcaccatgttggccaggatggtctcaatctcacgacctcatgatccgcctgcctcggccttccaacatgctgggattacaggcatgagccgccgcacccagccaggcaggtttattaagtcttgtggggaagataggagagaggctgacaagaatcatgcaggataggcgaaggcagtgaaattatgttgtcagcttggcaagctaagcaggggtgcggcaggggtgggggtggggtggccagagatctgctcccatccagccactgctggggccagcacagaaacctgtggatctgatgcagcggccacacaggctggtgtggagatgtgagccagagagctgctcatctaaatctaatacccacagccaggtcagaagaacaagcagacacaactgcaaagcccactcactcactggacaaatctcccccttttcaacacctctagaactccatgggcctgcgtggtacttcacactcacactagcagggaaagacttaaaggaaaaaagttcagaactggggtgaaactattaaaggcaggaacagatggtgactaaaactaaactttgaactccgtaagaggagggatattactttgccaaccctaactctgctgccgatcagctctgtgattaaatgttggactctgacctttgcttctcatctctaaaataaagggttgagtcaacactccaatcaagctccagcaggtcgaaattcccctaattaggaaccaatgtgtgttgtttgattaaaaacaaaccagcctaggttgcacactaaaagagttgtttcctctgtgtgtggcacagagagaaaacaacttgttggctgtaactccagaaactgatctgatgggcccagtgggccccttgctccacagcacgcaggggaagggagggcagcctgcccgagggaagcctcaaaagggaaatagcccttagaacagtcagaggaaaatgaggtctctgccactctcctgcttggaggctgccttcaggcaagggaacaggaatgtttttaaaaaagttacatcatgaaaattagaactgacgatggatattagttgggcagcacatcttggaatctgccagagcattgcacaatcctcagagttcttcccctctgctctacccaaagcccggcctccagacacagtggaaacctcaattcgtattcatgagccaacgggggatttctcctttttatgaagacctcgagatcaggatggtgtccctttatcccttcccttctgtctttttgaagtaccccttcaccttaagggactctacctgtgcatcacatgggaggttcactgtcagggtttgaaactctggtggctgggcctcagatccaaagaaaaccgaaaccacagccagtgtcagagtaaatccgtctctgttgatggcctgcctccaggaacaacacacttcccattcaccaaggaaactagactggcagggcttagaaggcgagcaaccttggttttccggcatcactcaacacgtggttctgagccctgtgtcagaatcactggacaggacttatttaaagagcagattctgagcctccttgagtctgaatctctgccagaggcccgggaaactacaataaacaagcacatgaggtgattcctatgcgtacttaacttggcaaaccattgcaaagaaaaagtcccaggccagaagtcaatagaaaatctgtgttggtgttctcatcccagtaacaagctagcagagcattcctggataaattcctgtgtcccttatacctccacttgtccacttggggaaatattggagttgctaacagaatactaaatgagatctgttctatcctaccactgctattaaatgaaataagccgtatgagaagaattaagtgttgtaggaaattttatatgacatccagacatgtaaagtttggaaacatagaataatacgttatttttacaaattgaaactatccttgacaataatatacatgtttcatcatgtatgagactctgtctcaaaaaaattaaaaaaaattttttttttaaattgtgtttcagaaattttggacatgtttatttttcaaaaaaaaactctatacatgcaaatttgatatatcattaattactggaatttaaaataggatatcaatcccgaatctgttttagtggaaaagatttggcatttctctaatttgcttttataaagtatcacaaatttagattcagagactatgagtaaaactcagtttaaaagatgctccttaaaaattaaaattgtacccgttgagctaaattacccgatatcaacagtcaatcataatcttttatggagaataaaagacactttccaaatttatcattctaggctttgaatctagaatattaacattatgatcaacatgaattggctgaatattttctttcttcttctgatctctcctctaacttcctctgtaaatcacctttatgcacgcgaagtcatacaattctttattgacagggtttgtggttaggagaaaaatttagtttgagctctctggtcttttccatatttacaattcaatatttggcattttaagagtacattctggccaggtgcagtggctcacgcctgtaattccaacactttgggaggccaaggtgggtggatcacctgtggtcaggagttcgagacctccctggccaacaaagtgaaaccccatctctactgtaaatacaagaatcagcc

SEQ ID NO: 35879 - DNA, 1563 bp, Homo sapiens
ctgcaaatgggaaggaaagaaaaccttatttatcctgagcagtaactttttcacaagaagggggcacttaaaccaagacattttaatggtgagcatctgctggtcagctttcagatttagcatcccgtaaagctggggaacagagcgccttccacactgagaaacaggagtcagaaactaacttttgtccgccgttctcggtatgtagagggtggtgtccaagccgctgtacacgcgtcgccctccgtcggttaacacgtactccttcagttggccgttcaggaggaaggtgtcactccagttcacacacaccacagacaaattgctgtccaccgaaaatggggctcggtactgaggcactgtggggagaaagttgtatgttctaaaaagggtaacctctttgaaggagtgcaggtgtgcactttaaaaaaaaaaaatatgagcaaaatcaaaccgaaccaatccaaacaaaaaaaaaaaaaaaaaagaaaaccaacattgctagaatccttcactttttcctcagtattacgaaacaaccagtatcaggggtgaaaagaaaaccaatgggaacatgtgtgaaatgctttctcagcaactttatgcctgctttaaaaaaaatcgatagagagtggtgttttataaataaaactattaacatacaatggatctgctcaccagcataaccctggagctcatattttgttgcattttccctctttttaacaggtaaagtatccttaatactattaagtacagtagatagctatttttcatatcaaatcaatatttattgccacaaagccccaaggactagatgaagttaatatatttttttctccaaaccaaactgcttagatggtgaattacgtccttttggcacccatttattgttaaagctttttctcaaactgttagtttgttttctaagatagttaaaaagccttgcaaacagtaattcaagtataataattcatggccctgactaatcaatcaatagcatagtacattagtatataatcaagctcaggtgtcctaagtattatatcacatatagaagcaactttgtgtgcatttcacaggcacattctcttgatttttcagttccttactaaaacaaaaagaaaatccttaactggggctcaccttttaaatgaataatttttgtggaaacaaatgaagggataccatgtcatcttgtcaagtcagaagagatttatttcatgagatcttattttctacaaaataatcaatatatttgtaaaaacattaagattcacctatataccaaattggcttttaagaaaagaaaggagtgagtagtgagactaaattgaatctgattctttttctttaaaaatcaatccatctatttctgatgttaggaaatataacaaaataaggaataattatgcttttgtaattgtaatattcaaccgtaaagacacagttgattgttatctttcaaaataagatattttcataaagccataagaaaaattttctgcaaacaccaaaacaagagttatcaagccctctttaaatctcaatgcttttccaaca

SEQ ID NO: 35880 - DNA, 1111 bp, Homo sapiens
tgcagccttgacttccaggactcaagcaatcctcctgcctcagtcttctgagtagctgggactacaggcgcatgtcaccatacctggctatttaaaaaaaaaatttttgtagagataggtgtcttgatatgttgcccaggctggtcgtgaactcttagcctcaagcaatcctcccccattggcttcccaaagcgctgggattacaagtgtgagccagtgtgcctggccacaggaagaaaatcttaaatcagttcactttgttcttccaagcataagaaaaaaaaaattctggcaaaagctaagcttcatgactcaaaagggaattggttataaattacaaagctcacctagctgttctctggctttctggccacatcaaccaaaaaactgcaacatttagcaaaattggcttctggatgtagtgcaaaggagattacaaaatcagacagcacacattaagaatcattacagtttgctttgaatatagtatgggtgacaaaaaatgctgattgagcagtgtcaacaataaacatgcagtgttaggtgcactcgcttattcattaaacaacattgattggaatctaagatactgtgcccagtgctggagatgaaaatggagaaagtgaggactaaaggaagcatagcttgaaggggaaagttgcaagctctgtctggggcctgtccaatgtaagctggttatgagaaattcagagggagatgtctgtgaggaatctgggtggaggggtatacacttcaaaacagagcacttgactaggaggtgaccactggagtttggcttttggaaccaaagccttggagcagatgaactcacctgatgagggaggaggaaaggagggagtagagaaacggcaaggggacaaagttaaaatgtttaggattaagatttgggcagcggaagaagatcaaccaacaaagttgactaaaaatgaaaatccaaagaagtagaggagaaaccaggagagggtggtaatgaaaatgagggtaaaccactttttaaaaaaggattgaacattgaaagttcagttgcgttgaatgctactggaaagtcagtgaaggtgactcctggagaaacatgccttctggatatatc

SEQ ID NO: 35881 - DNA, 789 bp, Homo sapiens
aaatcattcaggttcttgactatgctaagaaataacaacatctatcccacaggactattttaagatttacatgcaatattgtttctagaaatttctgaggaatggggtaggggatgaatacatttataaatatttcattgatttttgaaagtcccaaagctgcatacaaatgcaatttggaggtaactgttggggtagaatttaagaaaccagtctttgaaactgaatcttaaggttcgaatttgagtccttcaacttatcaactctatatccttgggcatggtatctaatttttcaatgcttcatgtttctcacctgtaaaatagtgtcagtaataacacctatttcaaatggttgtttgagattaaattagttaatatacatgcagttcttaacacagcccttagcacacagcaaaccctaaataaataatagtgattactatcacattatttgtgtgaaaagacaggagagaatgacttaacagtttgggggatctagtggggctagatagcaattgtgcaactcactcctggattccagttagttgttacacattaataagattggaaaactccccacagcatttggaatttagcccacacctccctgtgtatctttcttccaggtacttctgtactgtagagctttgagggttagagtaaataaaagcctggcttttcaaaaatattgctctacaatgaaatttgttaattggatggcttctctactttgttttataattagttaaaatttctcaaaaagtcctcaaacatgaacaaaagaaaa

SEQ ID NO: 35882 - DNA, 710 bp, Homo sapiens
gtttccacctgcagattagattgcttcatatatcctgagatgtttatttacaatttaaaggtaataagctgttggttcaagtacttaagtacaatcctccttaagtcttcagatttacttagtggtttatcaataatcatagattgacaagccaaagctggccaggtgatcctctagcccagaaaggattctactggtgaaggcattattatatactggttgagaagcagcatcaatctgagtgtgggggacgagctggtttttccccagatccatcctctgcccttctctggcttggtctgtactctggaatgctgacttcatcagactgcctcacctggaatcttttctcctctggctcctttccattaggttttgatcaaagggaagagagagttcaggttctttgtttctcctgctcctctctttggcactgcatgttgacaaggctgaatttcctctcaatgacccactttcttccattgtccctgcaggcctagaaggtaacagcttctggctcttcctactccctgggtacttcaacatcccttattgattctcttaattctacccacacctccataaatagcctcttcattaaattttcttcaaataccctttgaatgtgccatatgtttcctgctgagatcccgattgatacagtggagaatattttgaaccattacatgggtaccaataacagtaggtgg

SEQ ID NO: 35883 - DNA, 578 bp, Homo sapiens
tttataaatttaaaacatgattttccactgcaaagtattttcaatctatagtttgttgcctttgagcatattagactgtatgccatgtttttcctatccaatcaagacaacaatttaaaattaaaattgcaaaaaataggccacctttcacagaggatcgactagttaatttacttaagatagcaagttgcccaaaagaagaaaatgataatgcaacaagctttcgcaagactgaccctcttctgagagttaacctttgtgctcacaaatagttatctgaaaaatttccaaggtatgaatggaaataacagcagattgcattacctacatcccgaaggtcagaggttcagattaccaaggtaatgaaacttcagtgagctgcttcagatctattaggtttgtcagtttttataagcacagttacttcaggaatgcaattataacataaaggacctatattggtggaaattcaccagccggatcttaacagaagtattcaaatgtcagatgaggggggagagcctacctttatgagtaggcttttaagatgaatcagttagtgaggtggagtagagagc

SEQ ID NO: 35884 - DNA, 1064 bp, Homo sapiens
gaaataaaagttttatataaattctactgcaaattatatttttaacccttcagtagttgaatatttctaatttactgaagtgaatttgtttttatccctacccatcaggtcttaacctgaaaagagtttgcccctattcatttttcttctgtttaaatctacaagtgagaattcgaccattactcaagaatgtatttaccaaatgcagacttattttcccaagcttactgaaaatgcatttcttaatatgttattgattatcttccttgctattttgtttgcttgtaaacatactagctttggtagataataaatgtgagaggaaggcaggtagcaaaatatttaggaactggatttattctgctcctgaataaacaataattggataatccatgttttgtttgttttacttatctagtgcaaacaccccgaaattcccccaattcccaaaggtattttaattttgaaaatggaaacgaccttgatacaaggaactctcaaaaccattaaccatgttcttccaaccctgtaaatacttctctgtcttatttatacaaaatgatgtcaatagaagatgaatttggtacagatatgtccctacaagctcagaaggatattttatcttagccctatttgtcaaaagacaatgttttaagactcttcagatgttaattatataaactgagtagcttgaatttactagaatttcaaacagtaagaaaacaaggttttctttgaggagagatgtagaaatgggaatggtttgtgattaattttgtgattaatccaaatttaaaacaaaatgaagacatgccaactttcacttggcaaattgaaactaaacaccaaaaacatttaagtcctatttgcttatgagattgtaatccttttctggtttgtttcacaagtttttagatatccagccaacgctgtcacacacagaaaatgtcacaagagaaagggccaaaagccctctaggaagaaaaaagataagcaaaaattcctcaaaactgtcctgtatattaaaatctccaggttggcaataaatatttagaagaaactca

SEQ ID NO: 35885 - DNA, 849 bp, Homo sapiens
aataaaagtctaatggatataaagaatctctgagagattattacaaaaatacctgcaaaatagtgtttaatattaattgctagtattcttcattcgtaatgatataaaatcccatattttaagggaaaaagttaacacttgtatggctatagacttcactttggaaattgctcttatgactttagctttctatgtgctttttaaaatagcagacagttcttcacttcccaataaaactgtgaaattcgaccgagaatggcagattgaattggagtgtgaatagtgtgatttaatgctcccgctagtctgaaatgttttcctgttaggcccttttagcgacccctcccaaaagtttgtttgcattacctaaaatcagcgctccaaagttcaccacattgcgaaacacacagactgctattattttcacaatgctaaacacttttttttttctcacagtaaagtccatttctcgtttgattgcatgtaacaaaatttgtattctaaagcttcactgtttcagaatcgttcatcaaagttgtgatataggacttctggcaaaattatccaaataatcccatataccctaagacattgttttcaattcttttgtttttaaatttagtttcttaggggatggggtctcactatgctgcccaggctagtcttaaacttctggggtcaagcaatcctcccacctctgcctcccaaagtgccaggattacaggcatgggccactgtgcccagcctcttttcagttcttttaaaaaatagtactgttaaatatatattatgcttaaagagcattttcattcatgggctctgctatgtctactttgtttctttttttaa

SEQ ID NO: 35886 - DNA, 1481 bp, Homo sapiens
tcaaaacccacagaatgtataacaccaagagtgaacccccacataaactatggacttctttgggtaataatgacgtatccatgcggattcatcgattgttaacaaatgtaccagtctactgggaaatgttgataatgagggagggtatggatgaaggggggcgggtcaggggatattaactctgtactttttgctcaattttgctgtcagcctaaaagtgctgggtttttgttttgttttgttttttaacttttaagttcaggggtacatgtgcagcttgttccatgggtaaaattgtgtcatgtgggtttgctgtgcaggttatttcatcacccaggtattaagcctagtacccattagttattttaaaaataaagtcttaaaaaaaaatcccaaataaataaatccactcttgaggtatacagatgactgcatttatctgaagtcctgtgaaaaaactttacaattagggaccatgtcgttttcacccagatttccggatgtaattccgtgttttgaaatgtacgcacaagagtaaacaatgcagaatgatcagcctcacagcgggtcacaggacacaaccgccgcgctctggttggacgcaggctgcatcctgtttcccggacacatttattcagcccaatctttcctgtctgaacacagactgttgatgataaaatagcatctcaaattatgagggagaaagagctgcttcggcgttcctccccggttctctgcctggattgggctcccgtgggttgctgaggccctcgcggaggcctaggaagcccggcagcgcgggcggcagcagcgggttggggagcaaggccggcttggaacgcgggctcctgcccactgccacccgcaggctgccccgggctcccgggcgggcgctcggccaggggctctgctcgctccatggacagctgggtggaaaggacgccccgtgaaggacacccggccgtcggaccgcgcccacccctgggcctcccaggggctccctccgcagactcccagggacttcctgggagccaccgcggagggcgctgcgcgcgtccggagccgacgccgggcttcaaacagaaaccaaagcccgctccaacgccgcgaaggaggggggctccaagcatcctagaaaagaaagctggagggagcgcatcagagacacaagtgcggataagacttaacacatttcctgaagaggattccttgtcgcgagttgtcttggttatgacagaggaagaagacttcaaagtgaataagcaagggggtgcccttaatcagggcagaaatgtggtggctttgggatttacctatttcgtacaagttgcgttcttttcagtggcgtatttcccaggtcccttgcaagagctgttggacccactcccctcttgcccacaagttggaatattatttcattaatcacaacaggaggcagatgttacttaagatttagaaagagaaataaaggcatagatgaa

SEQ ID NO: 35887 - DNA, 1336 bp, Homo sapiens
gagggtggaaacaggtaggttaccctctctctttaaaaaagggggtgagagggtgatgtgttttccacgattgaacttccagaactctagatttctggaatttatcttccaaaagacttggtataatctggtaaatattgaaagaggagtggggaataaggcccggattaagataaattcttcctgtccctagtgttgtcaacaatcaatgaggagatgaattgctcctggagtacaggaagcttgacttctaaaatattgttaaacaagcaatcagaaaacatttactgtattctttcacaaatctttggcacacacccaagagctccctcaaactgcgtgcatcccaggaatgagtgagagcaaggcctagatgtcttcagatcatccatcacagctccctcccgcctccattccaggtccagcggagcggcctcgggcaatcacacccttccctgacctccccctccccagggccgccagcctcaccagctgttcccggctgctggagctccgatcggttggcgcccggcggccccgaacattaacgacacccgggagcctggcctcgaagctcaggcccgtgaacagactccaactacaacagcaccggcgacttccaaagagcagttcagcattttgagatgagcttccggaagccgacaggcggcggaaaccggatgcccggagcaaccattagttctccgcgtttactgctttccccttcctataatcccctcttcctactcgcagtagagacagagacaaataaattaaacttttgtgctacacagaaatttcttaattctctttttagtgctcttaaagtcaaagcagcatgagagaaaagaggagtgaacaaaaagtcgaaccccgggagtgagctatggtttagcccagttaccatggagaccggtagtaacaccagttgtaaacccaaggccaagagaccatggccacgttagcccggctgcaagctaggtcgtcgactgtaggaaatcagtactactttaggaacaggtaagtcaggaagagaaggatcgcgtaaagggcgggcgtgactttataccagttgttcctcagcgggagtttccaattaacgatttaacgattaccctaattcattaagtagtacccaattcttcccttaatgggctgcaaacataattgggagtttctgttaccatacaacgaaattctaaatagagaggggccgtagatattcagtgtgagatgatttaaggaaactcccagcatagataaaattgtaaagtgctttttttcttcgacatcaccactctgcaatttgatgaaacctatgttcaataccctgact

SEQ ID NO: 35888 - DNA, 1823 bp, Homo sapiens
gaaaacgctaagtttggggaaagcctttagaacaagtctagccagtaaaggtttgctgcattatccatctgagtcattaactttgtcaatagttatattctgtcactcattcattgattcattcatcccttccaaaaatatttttggaaaattcacttcaggccaacttctgttgctaaccttgaggggacatggtaaatgaaatacgttcccctcctgcgagaagccaacattttaggggggaaaatgaaggccgactgtggtaggtgcttcgatggaactaggagctggtgacagaggctaacttcagagaaaagctagccccgggtgggaggcaggatcctcgcgcggatagcaaggtattcgcaccctcggtctgcactgcgcagtcgggcgccagaaaccctccaggccccagccgggtccgagggagaagggtgcggttggattcaacacccgccccagggaaagaaggtgagtctattcggtttgcaagaaaggtctcgcgtgttatcttgggcggggggatgatacgatcgtattctaattatcggcccccagtggatctgtcccgcgtcctagctgctgcggcgttcagtgggcacgtaagagacacctgaggaggacactaaaccaacattaaggcagcagacaagggaagccgccgaggctaggaaatcaaagtggaccgcgctgggctggggacgggctggggacgcactggggcggaggaccagggcacaggcgagctagcggaggagtcggctgaggccattcagccgctgattttcgtcctggaacggacttcgcgtaaacacaccgagccattcagagctctctccaagtcacattctgaggctccggccccggaactctgggctagacgaccccgccccggaaccttgtgttaccggcactaaatgcagaagttcctctggttgccaccggacgcaactgtcaggtgacgcttccggcgcagaaaaatggcagccgccgctccggactcacgtgtgagtgaggaagaaaacctgaaaaagaccccaaagaagaagatgaaaatggtaactggagccgtagcgtcggtgctggaagacgaggccacagacacttctgatagtgaaggtaatgtggtagggctgagctttggtgtctgggaggaaaggcggggctgagttcgtgtcaagcagcgcttgcgacttcatttgctgctagccacctgggttttatcttggcaccacttcagaggggcgactttggcttagtgaggaggcttggggaagtcgtgttcagagaagtaacgctgtcaactgtaattttgagtttccacattcttttactaggtattttcagggtcaccattattaattataataaaatgggtgaaacacctgcagctaccgagaaacttacagtagcaaagggtgaaaggaagagggtacttgaaaacaggagaagaatgggtctcatagggtgtaagaagcaaaaggttaaaagaggtaagaggaagaagggggtgtacttgactttttgtgcggtagatgtgtgcgtgttttagagactaaataatagtgaatgaaagaagagtttggtggttaaggtcgattaaaaactggtagtgtttgataactatgtctctcagagacgcttgataataaaaggaaggaaggatgtgtttttgaggctttcaaccatgctgtgtctgttgctcctctttaccatcattcttggcaccagcttattaggttacaaggaattgcaggtaatccctgacttcctactgcccagttattgctcctttgtaccagctgatacccaaaaaacag

SEQ ID NO: 35889 - DNA, 4820 bp, Homo sapiens
ccatacaagaagtggcttaggcagcaaattataaaggtgaccattcattcaaatcagtaaaacaaacaagtataccttattctttaggtaaaattgatggatctctgttttccagcagttcacaaacagaggggtacattgtaaacaacaaactaacaaaataaattctgggatggcaacctgctaaggtatcccagaaaataagaggtaggacatgaatttaaaagattggaaggtatgtcttcagtactggcctggccctgagtagactagtgctccctcccataggggtgcgtgtgcacacataatacaggagggaagccttcccttctagagcaagtgattcagcttgggaggctgtgactgagctacactaagtaaaaacgggagacttgattgtccttccttcaacagacctgtccaaaatgactggaaagtaaataccgtaaatcactgttgtcagggcgcacattccacctccttcctcccttacccacagcggtcctcatttccacactccctcaacggttcggggagagctcgtggtctaagtaacgagaggacttctgactgtaatcctagcacgtcactttgttgaaggcagacacgtggttcagagagaacttataaatctcccctccccggcaagatcgtgatgttatctgctggcagcagaaggttcgctccgagcggagctccagaagctcctgacaagagaaagacagattgagatagagatagaaagagaaagagagaaagagacagcagagcgagagcgcaagtgaaagaggcaggggagggggatggagaatattagcctgacggtctagggagtcatccaggaacaaactgaggggctgcccggctgcagacaggaggagacagagaggatctattttagggtggcaagtgcctacctaccctaagcgagcaattccacgttggggagaagccagcagaggttgggaaagggtgggagtccaagggagcccctgcgcaaccccctcaggaataaaactccccagccagggtgtcgcaagggctgccgttgtgatccgcagggggtgaacgcaaccgcgacggctgatcgtctgtggctgggttggcgtttggagcaagagaaggaggagcaggagaaggagggagctggaggctggaagcgtttgcaagcggcggcggcagcaacgtggagtaaccaagcgggtcagcgcgcgcccgccagggtgtaggccacggagcgcagctcccagagcaggatccgcgccgcctcagcagcctctgcggcccctgcggcacccgaccgagtaccgagcgccctgcgaagcgcaccctcctccccgcggtgcgctgggctcgcccccagcgcgcgcacacgcacacacacacacacacacacacacgcacgcacacacgtgtgcgcttctctgctccggagctgctgctgctcctgctctcagcgccgcagtggaaggcaggaccgaaccgctccttctttaaatatataaatttcagcccaggtcagcctcggcggcccccctcaccgcgctcccggcgcccctcccgtcagttcgccagctgccagccccgggaccttttcatctcttcccttttggccggaggagccgagttcagatccgccactccgcacccgagactgacacactgaactccacttcctcctcttaaatttatttctacttaatagccactcgtctctttttttccccatctcattgctccaagaatttttttcttcttactcgccaaagtcagggttccctctgcccgtcccgtattaatatttccacttttggaactactggccttttctttttaaaggaattcaagcaggatacgtttttctgttgggcattgactagattgtttgcaaaagtttcgcatcaaaaacaacaacaacaaaaaaccaaacaactctccttgatctatactttgagaattgttgatttcttttttttattctgacttttaaaaacaacttttttttccacttttttaaaaaatgcactactgtgtgctgagcgcttttctgatcctgcatctggtcacggtcgcgctcagcctgtctacctgcagcacactcgatatggaccagttcatgcgcaagaggatcgaggcgatccgcgggcagatcctgagcaagctgaagctcaccagtcccccagaagactatcctgagcccgaggaagtccccccggaggtgatttccatctacaacagcaccagggacttgctccaggagaaggcgagccggagggcggccgcctgcgagcgcgagaggagcgacgaagagtactacgccaaggaggtttacaaaatagacatgccgcccttcttcccctccgaaagtaagtacttattttgacttccatcccctgaggtttagctctgcccggagctctcaaaaccgcagcagctcccgggatcgcccttccctctcgcggttcccgttcgctcttttcccgttctcctgtccttcaccccaccacctccttttcagttgtatgcttgaggccatcaggctttaaaatgtttactttctactttattttctccatctttcccttccccctaacaattcggtgctttaaaaggcgttattctctttttctcttccctgaagttctttagtcggccaccagctaggagtcagccccactctgtcaaactagaggtgctcccaggggcagagttaaactgaggaatcttggtaggtttgttttctttgctccgattggcgtggagcgcgccgaactggtgcacgaagggttaaaaaaagtgtctcaaaactagcctctccggaaggcgccccctttccgtgctgacctatcagctggttccccaagccttctctattgtctctaactaccctaaaaatgtcagcatcgccgagacaaaacccggtttggagacccctcgagaaacctacctggccctcagtccttgatgtatcatttgctatcactaggtgtttcattacccaaaggcaaaatcctataaccacgttcccttttcacttaacctggagtgtagaaaggacaactccgtttctgactgtgttttaaaaggttttgttcacgttatttttcagaatacactcaaacctgccttcttcacatctccagtgtagcagatcatttttcttacgggtctgttatcctgctcctgccttttcgtaggcttcctgcagttacttcaatgcattcctaaaactcagagtagacgacagccgtattttttttttttttttttactggcttctctgagaacagtgtcctcaaaaccagctggcatacagtagcaataggagtgaaatgatttattgcagaggaagggaacagacagtgtagaatgatttcagagttcttaaaaaaagaaaaaaaagaaagaaagaaagaaaaggggcagcagcatccacttgatacctgagagggttaaataccaggaagaagaaaaagaaaagtgggggcggggtggggggaacctcttcaacatttgtgtattccaaatcccaagtcataaacttttcattggttgctcatttctctcctcccctttccatgccctgtatacttgctggctgcctttgcaaagtctctgtgtcttgcctaaatagataatatagccatcttggtaattttctcttaaaggttctagttgcagggtggtgcttttcttttttaatatttatttttagtttgacaagtcctagctatgtgacctgccatgtcttgtacttgatggtctcagaagtcagcccatgtatctaaccccagtcttcctagtgacccttattttgctgcagtttctcctgttcttgttcaatagcagaacagatgcagagaattctggcaagcaggatgattttattattgtaattatggcactatccgcaacagcggtgataaatacactccacccctggttatcccctttgggaagtaaagctttctatctggggtggagccaaggagatattaggaaagaaagttcattgtaattagtccaaaaccattgagacaaacaaggagttcagtcagtttgctttctctagcatgtgcatcggttctaccggtatttgggcagagcggaaagtatgttatgtagaacctgaataactcatctttcaatgtttatatgcaaaaggtctaataaactgccagcacttctataacacagaaaggagctctgatcccatttactgaataggtgtggagagagcaagtaacccaagagggcattagttctttgttctctgaagcacacttcagtctgaagagctgagatgatccaacccagggtcatggtcatcaacaaactggaaaaattcctagattattaggaggatttcagagtatggcatttaacatcaatgtgtggattctcctttccatttcaccccagccaccaaataaatgaaaacctccgatacgtccaagataaataaaatatactgccagttttcatacaaagaatacaggctttaaaaagtctgtattctgtatggaagtttaggagcagaaagccatattaatagcaggttcgatactactgtgcaaggactggataattttatagaaaataggttaactgattttccagcactttttagttatactggaatatagcaaacccttccaaaaaaaaggaaaaaaagaaaaaaaccatatttttaaaaagcaaattgaaagtacagcattggcttatataccagctttccctctttaggacttttctgcctaacttttaactcagctgtcactgaagtggctgtggggagggagtgtgcctgtcattccttg

SEQ ID NO: 35890 - DNA, 2034 bp, Homo sapiens
cagtaccttttctttattttttaattttatttctttttctttctttctttctttcttttttttttttttacttctgcgagcctggaacatcttttctttaatttgatgctgtctttcttcctctctaatgctcaaatctagctttcatattttttctcaaggttgtcatttgacaggaggttttatttaaaagttctgaggttaaatacctggaagataagatgaagccagttgaaaacagtgtcctttttctgttctcatgcctgagagaagttcagtcagtcctgatttttcaatcggggtagaccaaagtttaagtcagctggctgtgatacaatcttattttaccattttctttcacatgcttttagttaatggaggaagctgggtcttaaaatatccaattgcatttaacttcttttacttacttaaggaaccagttaccctttgataagtacctatgtctagttccttttatccacagttggtatttagtcaataataacaataacaacaataataataccgatgcggtgcttcatatactccaggcactcttctaaacacttttagagacatcgatattcatttgatcctggcaataataggtattattactctctttgtttcacatgtgaggaaaccaaggcagagagagattaaataacttgcccaagctgtgagatagtagagctgagacatttacctatcaaagtcgctgccatcgtcagcactcactcgcattcattggaagctcaagtcggtgaccaatcatgtgtccctaaagcagcagtacagtgtaatgattaagggcacaaactctggaatgaaaatggcctaggtttgtgtgtttggggacggacattccactctagaagtagattccacctggcctaaaatgtgtaaatcactgtgctatcacaccaagttagaaactcacatggtgcacacacatgctaagctccttacagtctgaaactggcaacagtaatcagcatgcaaagttctctttagatggcctgttttttttttcctagctaacccctttgattagcaaatagtacaaatgtttatagagttggaagatttttaatatctttatttgaattgcacaaagcagccaaatgtagtttggccctaggctgcagagtatatgtgtccgggtgccaagaagcaactgcactccgcctgggatgccaagcattccagacctgttaccttgtaagtgtaatatttaccagatttttgcttcatctggagatgaagagcagagatgaatagagtgggggtgggtcaggctgctgggaagggagctcagtgttgagaggaatccctgaatgagtaggtagctgggaagggaacagagatttgccagaaaaagcccttttgctggcaacttggaatctaggaaaaaataacagaggctaacatgctggggtgcttaccatgtgccaggcatagtgccaaatgttctgctttcatgagcctatctcatcctttcaattctatgagatagatgctattattatccctactttgtagatgggaaaagtgcagctgagagagttaattacccaagatcaattctcttctgttccaaggtctctttgttactttagtaaaactagtacagagcaaggaatgacagtgcatcaagccgaaccccaacaagtcaaggcacttacagtatcttctgttggttcttactttctctaaccttcgcaactgccctgaaagttaggtgttgttaacattttacagacgaggaaactgaggccttagagcttaagatatttgccaaaggcacatttttgtttttgtttttgtttttttttttttttgagacagagtctcgctctgttgcccaggctggattgaagtggcacagtcttggctcactgcaagctccgcctcccgggttcacgccattctcctgcctcagcctcctgagtaggtgggactacaggcaaccgccaccaagcccagctaatttttgtatttttagtagagacggggtttcaccttgttagccag

SEQ ID NO: 35891 - DNA, 1199 bp, Homo sapiens
ttgagaccatcctggctaacacggtgaaaccccgtctctactaaaaaatacaaaaaattagccgggcatggtggtgggtgcctgtagtcccagctactcgggaggctgaggcaggagaatggcgtgaacccgggaggctgagcttgcagtgagccgagatcgcgccactgcactccaacctgtgcaacagagcgagactccgtctcaaaaaaaaaaaaaaaaaaagtttaggtgctcctttgtctttctgtatttctttgtagatttcttttcttctgtcgtatatttcagcagttctgaaatgttagggtacataggaattgctcaaggagtttgctaaaatgcagaccaccatccatactctttaagaaagactgttatataggatccatatatccactgcaatgagcaggaacctgtgctgctttgtaagcctcgtttagctttgcctctaggagggggactagcttggacttgatgttgaggtaatcggtgagtacctcaggcaggaggataaacaaaacctccaggccactaccaattccgttcatacccacaccttctgtgtttcactttgaactactgacctttctggcttatcttggaaaatcccccacgaggacactgagaccagtgcttgtctgtccttgacaattgtggtcagtgctgactccaagaaagctgatattaaacactaaagcctccttcttcttttccccggactttatcaatctgcttttaattgttaactaggactggtttcaccagctaggagtcaaccagtatgtagtcacacattggttctcaaactttgatgaaatggtgccatcagactttcctggatgattcacatttatcacggattcctaggcaaggctgatgccgtgggctgggagcctcactttaagaaccactgctttagcaaatacagcaaatacctataggttcttgacccaagcatttcaacattcacgcactttcttcctgccagttttgtggtgtaaccaatctaagagggaataaacaatagatagatggctgaagcattgccctcctgaagggctgaaccctagacatcattgggggacttcttgcaagcctcaaatctacattctgtttcagagctcatcacatatgagtgacattgtaagacctttattcagttttgtttttttattaacctttaactttattttgaa

SEQ ID NO: 35892 - DNA, 815 bp, Homo sapiens
ctaataagcactgcctatgtcaaggggtttggtaaggattccatataaacggaaaggccctctctgtgtaaggtaatgtgacaattttgctagcattgtgtcagcacagtgcgggcccttgattgttcttgctgactttctgaagagccacggggtggaggggatgaggcctgaaagggaagtgcgtggagcttacttaggcaggtggccaaaatggcggcttggcctctgcagcagaaagacaccgggcaaaagtgcatctaggatatttgggaataagattcaattgtctcgagtccattgccttgaaccctgggtctatttctcttttgtctgtagcctgtcatctgaaaagtgtcgtgttccaaaaacattttattcattaaatttagcccctgccttcctctcctaaaagtggatctgtgttgtccaggtttctgacgctccccctcctctcctggaagtcccctgggcaagacaggagtaagtgcagtggtcgagatcatggcagcaaaggtgaccttgtctgcaaattgcacatgtccttccttgccacagagatgggattccaaaacagacccggtaaaagccagttgaggagtttcacagagtcacagcagggtgttcagctttatacatagttgtgggatgactcactaccaaatgcttcctaaaagagactccttaagttacggtaacattttagaatggtatttatagtgccaatagaaaataggaggggcaagttatttggagcattgcctttttctgcacactctcctccctgccagctatttctctttttcagttttcac

SEQ ID NO: 35893 - DNA, 8672 bp, Homo sapiens
ggaaggtacaaggaaaggaataagagattttcaaatgtatgccacctgctttgaatgttgttcagatatgtgtcttacagtatgcctggtgtgcctttgttagagattaattggacaaatttgattttatagatgatatgagccagaattgcaaaggtggtgtttctcctcttatgtgaagaggaagtcagggggagatgaaagggagaataacctttacctcataatttcctttcccctcctctctgtgtaagccacattagtctctcagcaaaggtacttggagaaacttgctaaaattttccctcatgcttgaaatttacttaccctgggtaacaggaaatgtggagtcttgtgatgtagattgttataccagatggtaatcttagcacatgctatttatgtagatcagccatgtgtgtgagtcatccatgtgaggctgacctcagccactgtgaaatcgggttccataccgccattattaataaataataataatggtactgattaggcatcattttgatgcacatctaatgaggccattacctttatatgatattaaatctggaattgttttctttttctaaataatactttattaacaactggccatgttgttagattgctattttttactggcaagggcaggcacacaatttaactcagctaagattaggtaattaaggtatctgccacttgcattgcgctattcattgaatgccctaactactttgttctttctttgaagcaaatgcctgtccttatttaagtcatcctcttctaggtcctgtggtttgagttattattttactgatgataaatttgagtgggtaatccacactctttcatcttgtctcccttttaaccactagctaatttagcgatggagaatagtttcgcttttattacagctttgattatctggtggttgcaaataagtcagatagggaagcctgcgcaaagataaatgctttaaaagcaggaagtgtgttttatttcctttcaactagccatctgttcaggattcttgcctttaatccttccctattttctttccgccttcttttcttgcactttcccttcatagtggctagaactgtgctctgcacaaaacaggcaatatctttttggctttgtaacaaccgcagagattttctaatatgacccacttttccagaatgtttcctgcttgtctctttgagagacatgccgtcacttttttttttctgtttctcttacccaaagataacatttcttacccaacatcattagtgtaaagattctaaggttttaatggtaatgcattacatacatttgttttctcttggctcgtgattgtggctggagtccttcattttgtgactgaattcagatcagaatacaaagatagcaagttcattagggttttaatttgcacacagttccattggagcagcaaaatgattaagggtacaaaagagacgggtttcaatgagaaataagaggcattgatttacctcttgctagtgggagttagggagtgaattgttacagaaattgtgctgccaataatacttaacccgaattttaggtaattttttttcttagttgctgtcctgagtgaggcgtacagctatgagatgtacggaattctttagagcaaggtcctgtatcatcaaaaacttgctaggcatagatttccctgagggcctacagtggaacccaggagcacatccagctctgtcttggcagttcaccctctctctctcctgctttatagaaggaaaaagtgaaaagcacccatttttccttcagaggaaacaactcttacaagtttatccagatctaagcagggactcatctgagacagtctcatctcagcactggttaagtggttaagagatgaggctttgaaatcagatcaatgtgggactgagttccagccccagtgactgtaacctttgacaagtggcaaaacctctccttgccttggattcctcatgtcttacataggaataatatagcacccatctcataaattggctgtgagtattcaatgagagaatcatgaaaagtacctggcaccagcagatggcagctatttttatctatgatccactaggtagaacatttctgtgctttccccagtctgaaatggagatgcctttacatcatccttcatggctattcttaattactcatgtcatttgacttttaagtgcccatcattagctttctatcaagccaaatgcctatgaaacaatagggataataattatataggcagtctttgcggagctttggaatactgacattttgtcagaatttctggatccctgatcaagataagcaaaaagcagaacatttctggttgaggattattatcaatattaaccacttcttctgctcctgaccctctcccctgtcccataaaatactaaactcctataattacacaagatgcctaggtagtaacaaacgcaagtggaacttaagagatcaagactggagtcaggagagtttcagagctggctcattcagccctaacatcccatgatatgtgactgtgaactttttagctagattataaactccttgaagggcttgttgatttctggagggaggaaggtggggttagaatttgcagtgatctgaactaggataacttcctatatgtcttccagggcttatctgaaaattccacttgtctctgaaaatgaacttcttattcccaaatacttaactttattataatctctatacatagcaagcatctatctggtgcctaacagatctcttattgtacaaagctcacacttcatatatgaggaacttacacactaagttgaaggtgattataataacctggttaaggagataaacaattcagtcttgaaatgtgaagaacacccattaaaaagattttaggaacatagactgtacttgccttctcaattttccttaacacatagaataaatatttgatattgagttattttggtattttcagcaacttttaaaattatttattaaactcctaaatatcatctttataagatactgtaggaaacaaaaattagaaaattcttgaatacgattattattggtgtctattttaaaggctagtcatttgttagtttgagattctgtgtcaacagatatcaacgtgacggctgatcaacatgatgatcctgttagaaaataccatgagtccagagacacttttgtaatgagtcattgctatttagcttcttccacaaatggtcttaacttgagcaggactcttaaaccaacaaatgttagttgctagaaaggcatttggatttaacaaagaagatattaattgttttgcagcttctattagcagttctttaacctacagcataaaatttgaaatctgaaggggacttagagactgagacaagtccttatccagcatgtaactcccatcccaaactatctagaattgtctagcctcttttactaactgttcactagagatagaatgtgagccaaaaaagcaaaccacatatgtaattttaaattttctagtagtcatgttaaataagtaatcagacataggtgaaattgattttaatactatatttacctcaatatgttcaaacgattactacttcagcatgtgatcattataagaattaatgagtgtattattttgttctcacgttgctataaagaactacctgagactgggtaattttatgaagaaaagaggtttaattgactggcatttctgcaggcctaataggaagcatggttggaaggcctcgggaaacataatcatagcagaaggggaagcaaacagttctttactatggcagagcaggagagagagagagataagggggagccactgcatacttttaaaccatcagatctcctgagaacgaactcactgtcacaagaacagcatgggggaaactgcccccataatccaatcacctcccaccaggtctcgcccctgacacatggggattacaattccagatgagatttggttggggacatagagccaaaccatatcagcaaagacacttttttttttttttttttttttttttttgagatggagtctcactctgtcaccaggctggagtgcagtggtgcgatcttggctcactgcaacctctgccaactgggttcaagtgattctcctgcctcagcctcctgagtagctgggattacaggcacgtgccaccacgcccagctaatatttgtatttttagtagagacggggtttcaccatgttggccaggatggtctcgatctcctgacatcgtgatctgcccgccttggactcccaaagtgctgggattacaggcgtgagccactgtgcccagccatcggtgagataccttatatttctctttttcataccaagtcttcaaaattcagagtgtattttacaactaaagtacatctcaattggtaccagccataattcaggtgctaactagccatatgtggttagtggacactgtactggacaagacagttttatatagtcacagaggaagaattcactccagtactctctgattttcctccagaaacccattacggtgttaaacagttctcaatatcggaaagttcttccttgtgttgcactaaagcctgcataccatactttccatttctaccttagtctttgttctactttctcaatcatatttttaatactacagaaaatgtcatattataatagctttcagtagtggcagtatattgtgatataactctcgttactttcaagtattctcttcttgaatctcatttcaccctggcttacttttgaaattggaatttttagatcagctacagaattttctactcagagctattatacccattgctccagagtgacaaagcttcttttggaacagaattctttcaactaactaatcaggtatccctctcagcttattgttttctatgtatctatgtagtcaacacactgtcaggattctcgtttaattcagtggtaaacacgttgactgagataaggcataagacagaggaagagccatccatggctcactctgagaattcttctatgttaaatgccctccatagtcatcccacttaggatacagtcattcgaccagttacaaagtcacccatggactggtcatctcagcccacatttcttcatcttctccacaaggacatcatgactcaccttgtcaactgtccttcccaaacagtcaaagttctcagttgtcagaacaggaaataagttcctatttcttgcttaattcgtgaacctcatggtgggcttggtctggaaccacattttttcttctccagtgttctgtcacctttcatattcttcatagttcctcaaaacaattgctaatggttcatggttctcagcttttggtttcttatctcagggatcttatataaaataaatagttttcactctatttcagcataaattattttctattgatatttattctatgctttgggtataaaagttattgtcacacattctggtataggttatatgactatcagtttttaaatagtttccatggttagtttatggaaacaggtgtgtgtgtgtgtattttcctgtcattgcaaatttctacagttcgaagtatcctgtaattagggtcatgagaaagtgtttatttcctgggtcagaggcagagagaaagcaaactttttgctatggaaaccatgatttccaagagtctaccaataccactttctattttctttatctttttctcccctaccaattcacttttattggcagcactggttgttctactattctctttctattattccaacttgctgattctcttcaagttaaagagatgggcatcagtttctactaacatgaccaatgggtctgaagctctgtctttttggaagcacagaaaatcaaccactcagaagcccagtggaagaatacagtctatttctctagctccttttgaagtcaggtcttatgtgtgtcccaaagctgggtcattttgttagcttattattgactatattgttttaatattctgctttggtgtgtgtctcatctattgttttgtgaactcctgggctatgttatgttaggggctatatttttatcaatctttgcattctctgtaccctatgattacttaataagcacttcataaataatgtgttatgagtgaataaattaataaatgaattgcttatttgacacacacacacagtttccactggaaagcttcctgttgtgaaatacttgttactttgcttgtcaaccctatccaacaatgttggatagctctaatgatagaaagcttttattttgtattaacctaaatcttaccctcagaacttccattttcccatagaaaacatcttctctttcccaagtatttattttatgtattaaactgaaggcttcaggcctgacaaagatagcaattttgttttcaacaggaagtactgtgcttattcctttgcttgttcaaccatcttcattccagtggcattccagtggcaagcttctggcatgcccaccacgcaggtcatttagggagaaatccaaattccatttagacacattttgaactcctctaaatattgtgctttctcaggcttccagggagccagtgtttatcactggatgaatacagttacagagagatcaaggacttagtttattctgggtcacatccattataatggcatagtttaggccaaggaatcctcttgtccccaacaactttcccaggtctaagacttacattttctgctgtgttgccctcctttgagggataaacccatgtggccaggctgggactgctctttctttattctagagcagcaggactgctttgcgtagctagctcttcctctctcctacactcattgccagacaatacagtatgcagaacccagcatctgacactcatacttggctcagggctggtttgtgaatcacatgtcagagcaggacttcaaatctcatgtccaacacaaagaaagatgacgccagtgctttgaaatgtctttaaacacgaaatatgtcaacttagtgacccctcaactctgtcccctctctctcccttgcactttttttcaagatgtttagaaactgtgtcatctttgtttctgaaatattgttttaggattaaggtttgtcagcatcatgaatctgcactaaaaatactgcaaggaacatgagaccataattatatcagctttgatcacactgattccactaattaaaaattccactgagaagagtgctgcggaatcatgtaaaccctgtgaattacctaataatgatagaaatattcaaagcattagtgattaatgaacagatgtgaagaggcaatacaagcttatgggaaaccatttctaatgatgatgtcagcaaggaacaatttgcagacataattactgaaaaattatcagagacttccttgtcaagtattttgtatgtttataaagctgttggtgactcattttagaagtctgggagacttatttgatttggaatcaggattttattatagcttagctgttatgtaatagtttactcagactgatggggagatattcttccatgtcaacataacttgtatggtgtgcaatgagatttccttgtagttatttcagcaattcatatctgaatgctttcccatattttcagtcctgaagtatattctcagtttgtaaaatggagtgcaagacaggctgtgagatagattaattgttcaatgatttatcacgaactctaacagtttactacattgggacaaagttgttttggtttataaagctggtagtgtcatatggaatggctatctctggcatgccataaattcaatatatgagtgttttgccatacatatgtgtgctttactgtggtcagtatcataattagccaagctttacccacatgccccaaaattccaatgcttgagagcaaagtcatctggatacaactagtttttatgttggctggggaactattgtttgatcaacatctctagttgctaactagcggtatttcatttggagtttccaaaacactaatagcaaccagatagatattgtgtctgtcccttgcctcaaattttaatcatgttgttgtctccagaacaattccaaaagaaacatagcccgaaaaatgtggtgctttccaagaaaggttgggtgttatcattgctctgaaggggacagtgtggggaaataattaaataggataagcagggagggctcccgtattcctttcctggctcttcaactgcctagctgctactgtaccattgttagtttttctggtttctctctaaataagtttctttatctaatgactaaaggaagaagaatttaaccatgagactacataattagcttgagtatttgcctacatgggtttatatgcagatatgtggatctcatttaaacacttttaaatgaatttattttatttatgtatttatgtatttatttatttatttatttatctattatttattttgagatggagtcttgctctgtcccccaggctgaagtgcagtggtgcgatctcggctcactgcaacttctgccttctgggttcaagcgattcttctgcctcagcctcccaagtagctgggactacaggtgcacaccaccacgctgggctaatgtttgtatttttagtagaaatggggttt

SEQ ID NO: 35894 - DNA, 4064 bp, Homo sapiens
tatacgtacctaccacgttacctgaggacaaggcctaagatatatttatccatgttggctacagtgtctaccaaggtccatgcatatataggtccttaattttcaaataaattaatctgtgctgcttggcttgagcccaggaaactacaggaatttgtagctatataggctgaaattggaactacaagttcttggattattgattatctaaggttgctaaattgatgctatgaaggacttctgaaatattaggatatttactgaagtacataactatgctaatgttacagacttcctaaaaccatgttatgatggaactgtatgggaactttgcagtctctggatttgactatttaatttttttgataagaaaacggggccagggaggtgcctgatgccatcagccatcactgttagagcgaggcatgggtcgaaagtctgtgcttctggtccagggctcaattgctgcaacttactgtcttgattttctcagggcagtccctgttttgatcctttataattaaaaggaagatcatcttcaaaaaaacaaaacttatctaatcaaatttaagttaccgtttgtgtctggcttgggaaaatggggccaatactcagaacgtgtagtttcttttcaatttaattgtgattattcatggctcttaattttgtgttactcctattagactaggtatttgcatttgaaagcaggtacctgattcttcgggacacttcaaaggtcaaatttcactattaagctacatttccctcaaaatacatgtttaggccaggtgcggtgggtcacgcctataatcgcagcactatgggaggccaaggtggcggatcacggatcacgaggtcaggagatcgagaccatcctggccaacatggtgaaaccccttctctactgaaaatacaaaaattagctaggtgtggtggtgcatgcctgtagtcccagctactcaggaggctgaggcaggagaatcacttgaacccgggaagtggaggttgcagtgagctgagatcgcaccactgcactccagcctgggtgacagagtgagactccatctcaaaaaaaaaaaaaaaaaaaaaaaaaaaaaaaaaaaaaaaccatgtttaggtgccagaaattccttctagctgagtaatgaatgtttctgagtattaaataatcacagtcactggaagttagaaaggatcttaagactattgatctctgtgatcttattttatattcagggaactgaattttaaagaggtaatggctttctgaaggctcccatagcagtcaggagcaggaacagaagtctttccaagataacactcagttatcatcatctttgggtaaagtcagaggaaaatgaaggaaggctttgcccttatgagggttatataacaatgtgatagttattggccacctcattagttaacaagcatagtagagatatttccaatggaaaacaagccagattcagacattgatacgacctggatgattcaaagatgagtgttaagagacatcaagtagggtgatgatggagatgcaagctgttattaaaacaaccccttgccttgtcatggccacagccttcagtcagtgagctcacagaggtctggcactttcttccatttggtatctccagcatttggaacactgtctagctcacattagtgaatgtgtttcgaatgaatgaagggtctgatgagagagaggtgactaaacaagtatggctttgtaattaagaaaagaaaggaagagagagagaaaaaataaataaatagcaaaaaccaaaactcaaatatatttttgatactgagttataaacatatagtgtctcattaaggctttgttaagtaaatctggcttgggaaattgtacttcaatcacttagatatgaaatacgagggaaagatgagtaaactacacagtattgaccacacaaacagtgagtgagagaccagatacaatctacccaaagctggactcctgggtatatatttgcccaattatttatttattcattcattcatacaacacctgcataagtgccatttggttcgatacaaaactgacaaggtgactacttttaaggagctcaccatgtatctactccaaatatattcagcgacttccctctccacccccactctaaatgtgtatgttctatagcataaaataaaatgagaaaatactaaaaagacaacattttaagggagtttgatactattctttatgtgttgtcaataggaatttaaggatgcccacttaattcgtgattttgtccccagacctgggaattcacaaatgattctggaatttccttcaaacaagatacctttcctccaaaggcatttgtacatctcaggaatgtagttagtggcagctgctccccccccccccacccccgccaccaaccaggtctaatgtcataaactctgcaggaatcctgtctgtggttctgcacattcaggactcgcaatcagtccttacatgggcaaaagcttgtttgctctgcacttgcattaacctcagatcagttaagcaaacccaaaaacacaatggcttgggtataagataccattctacttagagtggcctaagatttctaaaaatgcccacagcaagcaactcaggatgactacccaaaatgtagatagagtaatagggagatgtgttctagctaaaatcaaccaataaacagaaaactggtaacccatgtctgatgttctaatccaatgttgttgttgtttttatttcattgttcttggtgaattctattgaaaagcaaagattcttttcaaattcaaagaaattttattatattatacaatgactgtgtaaaaattaagattatatagtgaagcacactgagcagggatgataaataaaatatttcactagaaatgcattcaacagtcagaacagatactgaccatagacaactgctatgtttgtactggtgcatattaataccagccctgcttctgtgctgagctcactgatttgtgttacatgaaaatcacactatatatctcttacaggtgaagatcaacacataaaacatctaaattacatttaatgcccattatacaggtgaataacaacatcaaacacaagaatatttattctttgtcccaacttcatccatttcatcttctctactagactatttctattaatataaaagcatattgtatattatgtcttcctagttaaaaaaacacaaaaaaaagcccaaagcaaaatatttcctttatactatactatcctctgtctactctgttctacttcttttccttatagcagaatttctggaaataattttttcacactcactgtcttcctttctctttcttttacttgctcctgaatctcctttaattgggctttcctccctcttctgaaaatgctctcattaaagttaccagggtcatgctcattgccaaatcaatgggcacctctcagacctcctccgtgtgaatgtttgcagtattcaatgcagttgcagttggtttcactctccttattgaagcattcttcttagccttctttgctgaatccttcacttttcagttttgaatgacatgtacactcttggagatctcatccaactcccagacttcagtgactacttctacagaaacctccccaacagggaggccttccttgaccacgcaccctgcagtagcaaccattgcctgtctttagtctcttgctctgatttgtttttcttcatagcacttattactacctactgttctatgatctatctagcttatctctattgtttgcctattgtctgtctcctctgccagaatacagctccagaggatagaaactatcttgtttactgatgttattttaatacctgaaaaaagtgcctgtcccagagtatggactcactaaatacttgctgagtaaataaatgaatgttcacaaatggggactaaaaggctaacaagcaagatctttttcacgctatgtaaatttatgaaaagtgaccttattttaatttgcaatggcaaattatggaagggcttggtcaggtctgccatgggtcaaatcc

SEQ ID NO: 35895 - DNA, 6402 bp, Homo sapiens
atctatctggttcccttattttgcagatgagaaaacagagatccattgagattagataacatgtcttttgaatctgggacaaaatcccaggttctcctgattcccattccatgtgcttttgatatttcattctattcttcatactacttttcaaatctttatgaagtgagagatttccccttactagcaagagtagacctttgaccaaaaagctgaaaaagagaagtgctgttaaaacctccctctgtgcttttgtgccacaaggcctttttcacatcgtttagagaaaggagattgcattgcaggttgctcctttgtggcatttagggatcatttctctgtgagaataagaccctcagtggaactgttgattgcgtggtatatggtgattgatggatatcaatttctgcttacatatctctgctctatgacatcatgcatttggagacatgcctccaaacacacaaggttggccaagggaaagaaagacatttctcagcccagcctgttgactaaatagccattatattcttgaaaccaagatgatattgtttctctgagctttttctcaggttgctaccctcagcttggtctggaggcactaagaatgcttttgctatactacttgaacatgcccagttgcaacttctgagtttcgttagtggcttaccaacaactttctggcacaaaacaaaagaatgccttcctgaatggtaagtcgggaaagcccagcacctgctctgcctttgtattctcccctccagcaccctggggataactgctttgcagaacaggagctggtctgtgctggctgccaaatggagaaccctgattagaataatgcccagcaggtttctgctctctcttctcctttcccacccttaaacaaactagaggatggctgttgctaagggccaaaataacaagacctgcgtgcttttaaccgttattttaacaattaaattaacggctttttaattgttatttggaagtccatgaaccgtcatccacgggaaggaaaattcaagatactggaaaagttaaggtaacttcctgaacttaaagaaagagagcaatttattcaaagaatgaacaaggaataaatacatttatatctgagaagaaacattctctgttttaactaatattggccagatcagacagtgtgtgagtgtggtcagtaatccagtcaaagtgggtgatttaaacactgttttaaattaggatttgaacttggggctaggtggggctttgactcttttagtatctttactttttctcattatatagatgagggagctgcttctccgggcttcttctttcttccctttccttccattcctctcgcatcctcttctcctcctaaagcttaagcagagcccgagttggggaataaacagcaactactgaagtgtccattgttcccccacttcaagtcctgcataaatgtaatgatggtagttcccaaacaaaatacttcctcactgaccagacacaatctatgtagggtcaaagggccctctgaaggtttgctgaaaaatcaactcttgaaaggcagactgataggagaaaaggtatacaaatttatttaacatgcatacatggagggtcttcagaatgaacacccaaggatacagaggaaatcgtccatttttatgcttgggttaaacaaaatatggacagccgtgtagaaatatgattaggcaaaagggttatggtctaacgctaatagactgagtggggaaatccagcaaggcctgtctgcctagattcttctcggcctctctgatcatcccttctttccttttaaaaaggtggggtggggccctttctggaatgggggtcttatgacctacagtcaaacaaggtaggtcagatcatttctttatggccaggttttacacagaaagggagagggaaaatgagaataatatttttaggtcttatggctggctttggggcaaaggggttttgtcctggagacccgctagaaaagagggattccagtttctatgctagccttaggagagaataagagtgagacaggagggcaggagaaggtcagagaaaaacgtctgctttctgaggctgttgctgaggctgtcgttttggggtattctttcttgaggcccaacatctatacagatttcagtagataacatgtgtcaactgaaaatgcttttcacgtgaaaattccaatgacaggtcatttaagaattctaaaaatactgtctatcttctcttatgcattctttcttggggacacatttttgtaagaaaatgtgaactcaataggaaagttagacacaagtaagttagaagagttagatatgtaatgaagtcaaaggagaggcaaaaaactatctgtattttttgttggtattcaaccaacaaaaaagctaaaagtataacaaaataaaaacaaaaatcttagaagatagtgtctttatcatccagagtggtcaagctgtaatcttggccaaagaagtaaaggtgcattagaatggaatattaccttgttctgtctataaattgttttattttttttttctttggatgagatcagatacttcttagaacacaacttgatgaggtcttgttagaatagagaggaatggagaagcagagggcattaggatattggaaaacattgcaagacccagcagttttaaaagcacttttttccccatccctataaaaaaaaaaaaaaaaaagagagagagagagagggagcgagagggagatgatctcattcgatcctgtgaaggactgctactcagtaaggaagaagtcctgggcagtgtgaatcagttcaagtcaacatcagtgatgacttatgttctgggcatttaggggagggtggaattccagaccatcctgctggtaacctcagaaggcttgtgctcacagtgactgtatcccttaaggcagttagaggctgagaatgtagatggagtaatgatgatacaaatgttactaaactttgtcctctgagaggagcctggagtgttgcagtataggaagctgttgattatcaaatgatttttccctcttggaaccttaagaagaaaacactagtgtgtgtcttcagtaagtcctctgatttatagggcgctgataattgattcaagaaaaagaaagtatagatttatatatacacacacatataatacctatgcatgtatatcatatgtatatgcatgtttatgtatgctttgtgtatgtgtaaacatcttttggtaaaacttattaatgaaatatgaagttgatgtaaatatctttgggctgaaaacagttcatatatatataacaattaataagggcataatttttcactttgcaaaacatttttttccttcacaaaatgattcctcacaagattataaatgaatgaactaataaacttccacatgtctcttaaaataggatttgctatattagtatttattataataataataaaattaacatttttaaaccttttgtgccaagtactgagctgagggctttatgtgaactacctcatttctgtctcccagtcacgctaggatgtaaggtaacatcattatcctctgcatttgaaaacttgaggtttacacctgttcccaaaaatctattgaaataaaataaaaattaaaaaaattttaaaaagatattcagcctagttgaaaagcaaacaaacaaacaaacccttgaggtttagaaaatttcataactctcccagagtcacaccttaataagagatgtagctgggattctgaccccatagcctgtacctccctcttctcaacagtatttctatattttgggataccatgactcttatgcaaagcaactcatctgtacaaatagcttgggccaaagcaatcaatcatgtaacaaaggtgtaaatagaaataaaaatattaacccttggcttggatccaaatgtcattcattttagccaatgttttcctttccatcattaagaattctgctttttttttttttaagtttgggaaaatctgatatcaaataaattcattgcattctttctgcataaccatgtggtaaatgctagtcccgggcatggaaagacaggcacagtaagcaaagacagaatgaggaaaaactgtgaatctagattttttcctctgtgtaagaaagtatagttcccttggtagagaatgcagagactaaagcctttgactattggacaagaaactgttgacattgctgtagtgaatcatccgtcatacacagctcttaatggggatgggacaaattacagcatttcatgatgctgcccaaagataattcagtctagcacctggattgtttggaaatccactggatccctccttgactctcacatgctcatcctgcatatacactccttgtatagcaacaagcatgagattgagcgatagagttggacaaatgaccaatatttattcagttaataaaatacagagttgttttcctagaaacaccagcaaggcaaagggaaacagagagaggaatcctgctcctaccagagagatgaatgggtgtgagaaaatgtgagggagactcattgcataaacataactgaggctaaagatcgctgcagccccagccaggctaaaacatggagaagatgaccatgcgaggctgggcaagtggggtgctatctaccgaggagtgggtaggacaaggggtccaggccccatgcttatctattaggtgaagttttgatctcaaggctgggaaagacatggccagaaataaatgtttaggacataacattctttccatgttaggacaccacattcttgctatttggtgacaaatgactgaaccgggagcttggtcccatttatgatctaattctataaaaatgaaatcccgggcatctggttcagagcattccaggaaagagttaaagcccaatattgctgcctcactctgttcttcctttttggtgaatgataggctaggacgtgaacttgctgccttctggaagtgctttctctttctttctgtggattttattttctgccttctatgggagagaacagctctcttgcctttccacttcccctgggcttgaaaacactcatagtagaacatataccttctatctgaagacaacatatagaaggtaaaagaaatggaaaatcatctgcataaagaagaaaaacagagagtgagtgagcatatgggcgtgtctgagtgtgcgtgttcagtgtaggaagtgtctgaagagaagtccagctacaagaacttgctgcaataattctctaacagcatgaacaaagactccaataataaatggtgacatttacacaaatatttgtggttgtgctttccatttcttcttataggaaacaagtaagatttttaaatgctttagtgatgtgatcagtagacagtagtgggaaagaatttccctgaaacctgacttgcaatcaaaataaggaaggaagatctgagagaattgagaatatttcagctaatcaggatatggcactttccggcatctgggtgtccaaacaagtgttttgaattcaatactgttaacatgtgtcactttaatgaatattttcctttgaagttgattggatggttacatttttggcaataatcttgtggtctgttgcttacattacctgacccacagtccattttccttgtgttggctgtgggaaagaaaaagagtgaaaaatatctcagaacctgggaaacagcactgagaatgcgactcatcttttagttaaaccacttcagatagaagctctctaaggattgcctcctcactgtctgtgatatgtgtaaccaaaaaaaagaaataagttcccccggtgtcaaaaagataaggggaaaaatccacaaaatgagatgaggctatttttcttttttaagcctgaaataggaggtcagtcctttgcactcttccttttgacttctaacaaaaccaatcacagtcaagctattctcttgagttaaaaagtgttttcaggaagtccataacatgttctaattgattatttaaaaatccccacacaggaacatcccctcatggtctgaatgtctttttagccctctgctatttgcagaaccttaaacaaattgtaagagagagtccttggctaactccaaggacctttatgaggagtgggagagaaaggggaggatgtggattggatgcagcaaagtgctctctcaaatcagcatgaggccgggcatggtggctcacgcctgtaattccagcactttgggaggccgaggggggcggatcacctgaggtaaggagttccagacctgcctggtcaacgtggtgaaaccccgtctctactaaaaaaacaaaaattagctaggagtggtggtgggcgcctgtaatcccagctactcagaaggctgaggccggagaatcccttgaac

SEQ ID NO: 35896 - DNA, 1057 bp, Homo sapiens
gtgagaaaacccagaggaacacataagcacaaacttccagctcccgtttgccttgtgtgcctattaagtcttcatcaccattactctgccagagaggattgtgactctgccattagaaggtgtgggcttcagtcctgcctctaatctttttaaccttcatatgtaactgtaaaatgagtagattatatctatttcctaaaaaattgtgaggtttaaatgaaaaaaaagggtaagtgctacataaggtggctagaaattaatagatgctcaatacgtgttatatatgtttttattttttactcccgttctaaaggaataatatccactgcacatggttgttgtcaccattgagtgaaataatactgtgtttaaaagtggttattagttgttattatgcttgtgttatcattagaccacaagataagataccattcagcagactgcttatttcacatagagtttttgggaaatatggttcatggtttggtggacttccagagacccaagtaaattgacatcatctccagagcatgtttacttgggtgagattggtattgatttgttggagctcagaggcatgtttgccagagtgagtctgtcctcgattgtctgactttcagaagggaggtgctggcactggttggttggtttgtgaaagtgtgttgttcatagaggtgagttattgatagattgaatagggcaaaacatggttttgatgactatttgttacaaggcaacagaataatgaagttttcttaagtttgtaagaacttttaaatatttatctatcactttttgcatgcctactagtttctctagaatatatctcatctagaaaaataaatcttgtaccctctgatgctgaataccagggcacagctcccaagagaatggaaagaaataatcccctatttatggtttcaggataagccaagatgttttaattcaatatgaaagacttgccaaaatttgtcaattttgtgaattttcattttgtttcatctacatttatcaactgattggttagacagttgaaatttattggcaaatgtagcaa

SEQ ID NO: 35897 - DNA, 588 bp, Homo sapiens
ttgctctggctggtctcaaactcctggcctcaagcgatctgccctccttggcctttcaaagtgctgggattacaggcgtaagccaccctgcctgaccctggataaatcttctaacttccctaaagggagttattatgtttagcttccaggactgtttgctatgcaaacatcctagagaaaatagttcagaacaaaaactgccaatgcctgtattcagaaggtgtgtagaaatgtgagagactcagggataattttctcccaatacccaccgaaagtaacttaataaacaaacagcaaatgcaaagtgagcttattctgagagcaaatgtcgatgtcagaatattgaactttggaccagtagcatggtcggagagttgaaacaaagaacattagaaattaataggattctaaaaggaagttaacgtggcctcaggtcaataatatccactgattcccaacacaagcaaatagttatgaagagaaaaagtagtctcaaaaagaaatcattccatcattaagtgctcctgattaccatataataagaccaaataaatatgagctcacagttcagcaccactaaacacatga

SEQ ID NO: 35898 - DNA, 3873 bp, Homo sapiens
gcagaaggaggcaatcaatgctatgtgtcccatgaacagcagagatgacacatgctttgaggctttcaggagataccaagacaacttctattaaggaaatcttagaataattcatagaaaaggtaactgtagagatggagtttgttggatgagcagcacagaattatgaaagaagagaggttctcaatagggaaaatgtgaccaatatgtccactgtgcagaaaagtagagggggagaaagactgaacaaggtttgatcacaagtgagtacatttgagagagtatctgtgtgtgtgtgtgtgagagcgggggaaactggcagaaaattaaaatttaggacgtcaactgttttatctaaataataccacctcacatacttggctgactttaccatggaattaagctcatgtattcattcattcaatagatattaatggattgcctattgggccggtactagggatacaatagtgaacaaaacagaaaaatttccaagttctaaatccatagagcaagctagaaactcctgagcaggagctgatgctccagtccacaggtagaacttcttcagagagacctcagtgctgttcttaaggcctttcaactaattggatcatttccacccagaaaatctaggataatttcattcacataaagtcaacttgagtgtagatgactaccaaatacatttacagcatcatatctaccatatagctttatagcatcacctcgattagtgtctgcctgaataactgggtaccatagcctggccaagttgacacctaaaactgaccgtcacagatgactcaccaatttttacccagtaacaaactgactggctttgtgtggactatgacacctctttcctctaccttctgtttttttaactggctcttttgaattatgtagatggcttcagacttggatttcctgtctggcaggctatagtcaggttccaaatgacaaaatattaattaggaggactgtgcatgatcttgtttacaaattcattagcactgggagcttggctttggcagttgtttgtcctgatgccatgggggtacatttcagcccccaaatagcaccatctggatctcatgtccaactttgtggccattctaatcttcatctctttaatataagaagagtggtgctgctcgcactgctgcccataattcaatattaaaatactcctttaagaacaaaatagtgcctgtgtgacttggtgtgtgtcatggggaaattctagggaggagaaataactgctatccacttcatcctattgaccccagtgaactctgttcaataaatatttgcagagtgactgaatgccaaagcatgtcttgagtttatgcaacttggtgacatttccaccgctaaaactgttactacaaactttatcttggagaactcatgataggtggtgaagttgctccgaacctaggaagctgctattggccaaattatgtgctgttggagagaaacatttcctgtgtattcaaaaaaagtggaggcttggcatgactaatatggtaagaatgttctcatcttctccaggagaagaatggagtcaggtagagctttgcaacaatccgtggtcacaaacctcagtagacacccaggtcattaactaaccacatgcatgtggcacatggaatggaacatcccagagctctgaaaccacaggcatctctctgctggattaaaggaagcaatttcacaggcccagacagaaaagggatgtggtgatttttcaaacgattctgatttatagtcaataaggtgcaaggttatgatacacagagtaaatgaatcgtttacactcctcctcatcactcccttccagaagctctggcttctgctggtttctaggaagataccaagagtgtcacctttatgagcaccatgcctggtctttgtatctgtcatccagcctcccatctgtgaagtgattcttcagaaacccctgactttggttactagccaagccagggtgtgatattttttcctgtttaattaacaacaacaaaaaaaggcttgcgcatttacttttgccagctatctgaaagttcaaaaggtaaagaacatttccgtccacaaataagccatggaatgtatttggaaattgagttttcatcagtagttgctgttttgagccacttattccactgctgaggaaagtgaaatgggagttctttcctgaaagggggggaaaaaaacccagaaactttgtatttagaatttcacatctatggtagaggctctaggaatttgaggtcatctttctgacactgatttaggctagtacaccctcagatgggaggtatttattatacccattggtacaatgaaagttcaaatttatactgaaagaaaataataagataaaggcatggccattttgagaccttctgatgataggccatgatggtacttcataaaccaacctatccttagcaaaagactcgtttcataaattgcatttttaatttataatgatgcaaagctgaatgccatatttgccgtgtagggctacccattacagaccaggcatcctgtccatggaacttggtagaaaacccccaaagtatcccctttcatgctgatccaagagtccagatgccacattttgtgccactttatgaaggaagtgacatttgaattgaaggctgaaatgcaaggaggatttaaatgacagggaaggatgtaatttaagtgtctgtcatctgtctgatctcatctcccaacattctgaggctatttttcaagaattgagaaaactgtcttgaatccccatcttgcatatagtacaaggtctagtacccttcctcagcatacctcagaggtctttaagggtctatgtgtcctttgatcaccattacctataatgtctcgcttccactgacttctcagtctcttctgtgtctcatcttctcaagcaatttttttccagccctacatcaatgtggttctcagtttctcaagataccactgatataaagctgttcaacattcagattttaaggccaccaagaagagttgcaacatggcacagaagtggcaacatcttagattttataccatatattgacatggtatctcatgtcgaattttaattcccagtgttgaatgaggggcctggtgagaagtgactgaatcatgggggtggacttctcccttgctgttcttgtgatagagttctccgagatctgcttctttaatagtgtatagcacctcccccttacctcttatctgctgctggccatacaaagacgtgcttacgtccccttagccttctgccatgattataagtttcccgcagcctcccagaagcagaagcctgtgcaaccagcagaaccaggagccaattaaacctcttttctttataaattacccagtttcaggtatttccttatatcagtgtgagaatgggctactaaatatattcctcatccaatttctgtggtcttctcagccacaggagatatcttactagcctttctatttaggatgccacttgtcattaatctggggccacagctagagttagagaaggctgatgtaataaaaagtaaaatgtctcctgatgttatgactcgaagaactaaaaaactttctttttcacatagcagtctgaattaaggtttccaggctagcctttggttctgctccatataatcattcagggacctggctgttagtgagttgttgctttgctggtctctgtgtcttgtattgtttacatggccaaggctggcacaccccagtggttacatccagtatgaaaggggaagatattgcctactgtctatggctctggctcaggagcggcacaccctacttttgctcacattccctgggtgagaattcagt

SEQ ID NO: 35899 - DNA, 3117 bp, Homo sapiens
ggggtaaccccaacagcaagaaactggaggtgaatggcacgttcttagggtctgcagagggactcacaagaaattcatcaaaatgagtcagaggaatgacagaaaatagctttccaatattgggaatattcgaaggtactttgaaagtacctgcgagaggtacccagatagcatgaagacagcttagtttagaatcattttaagtagaggtctttctcacttgttagcatcccttcttctccacccatcactctgatctcaaagggatcagaaactacttaacaagcttggggattgagccgttaggaaaatagagaaatatggtagagaaatgcaaaaaaaaaaagtcaaccatgtcattcctccccacccctattccctgccgcctcccagccggaagcaggcctaagttggggaataggagaatattttactttaaatcaagtttaaagttgtcattaacattttggactcagcattgtaatttctaaattgggactgtattggtgacttcaagtaactctaggaccaatgtataatccgaaaattggccaacaaaaagttttatctaggtcagataaaattttgaagggataatggaaaacaaaaataatttcatttgattgcgttataagtactgtttacatctccctagagatcatggcttcagagggaaaagcacagtcactcttccagaatccataacagttcctgaaaaagacttcttaagtcagcatctcctccacacccaccaaacctgtgacaaggaagccatatggctattaacagccccacctgggtcacttagagaaagcaagaggcagatttcaaaagaagacactggcagcacatagatatccactacaacaggaagtgatggcatgtggattctgaaagattgtaagatgaatcactcctaatgaaaggactcaatcaatgcagaacctcaagttctgttaggtggactggcatacagaatatgggaacattctgttgggactcagatctcgaaagttagaaacccagcaaggtgaaagagtgacagcaggggcttccttgtgggctttgtcattcccatgtcatccatggtgccactcataggtcacttgcttcagcctggtcataggaccatacaaccctctcagatatgcctactgggcagggtgaaaggcaagcaccacagccatccctgtggattgtcctaaaccttgtgacgcttctatgaaccagtttagtgggtcttccagtagcctgcagacaggtgcgaagaggctaatacttccatatagtattgcagaaaaaattgaaagtacttagtccatacttaaaaggcatcttatcttgtaaacatcttgtgttatatgttcattcacttattaaaaaattaatatatatatttatactctgactatatgatcagcattgtgttataatctgggaatacaaaaagtatttagaaaaaaatgcctatatatttgtctccctcagcagaattgagttcttctagagtggataccctgcctgccttattcacaactgggtctccaacacctagaaaaatttctggtatacagcaggcactcaattaatgtggcttgattagataaatcaggacaatcactgtcttcaagaagattaaagtccagtggaggagaaagatatgtaagcacaatgaagtgtggtaagttctgtgacacaggaaatcataaaactatatgtcaacaaacagagggtgggcgtgagggaggagtgaataaggcttccaaaagatgatgcaatgtgggacattaatggatgaacggaacattgcccatttgtgccatggttctcctcccctattcttctctttgaggattctagatttcatgtgttctcttttgatggcttgggacaatgggcagagatgagcactctgggcctgctgtgtcctgggtgtggctgtgtgggtctttctgtagctgtgccaggggaatgactttacaggatctcagcaacaagcccagggtactgtagcttgtgggatcttggcagaactgtctcagtgctaaggtcagaattggggaaagatgttgtaattgccttaaaggcacgtggactcaaaggcaacgcggacactgaacacagctcctttcgcagactgcacttgcagggaagtgaatgggagcttttcccatgtgtggccaaatcgatggggttaaatatgattaagcccaaacatgtaaaaacaaaattcccaagttaatggtgatgtaatattctgttagggttaggccagattatagctgattgcgttgcttcatattggaacctggtcaaaacgttgattcctgttataaatcctgtagtcatccccaggaatagcattatccaccaaaaaaaaaaaaaaaaaaaaaaaaggcctttctaaagtttctagagagtttcaatgagaaatttcttagcaacacctggaaaaaccacaaacaacacaaccggctgttggggagccccaggaaaatgccacacatctagagtagggagcctgctgtgcccttctcaggcatcctaagagcgcaggcctgggttgaatgtgctctaccccacatcctaacagggaagaaaagcacgaggccattaaacaaaaaggaaaaataataccacacgtcgctgaaatcacatccaactggggccagggcttgatctgcaattcttcatcctttctggtcttcattcagcagccactgacacccccacaggatggattctttttccaaggcaacaaatgctcaattcatcagggaaccaaagcacagctcctgtgcaatttgtccaggatccttacaaacattgaatataaatggaaaccaaagacatattattttcggaagtgaacatattttcaccctagtttaggatgttgatccttatcactcccttccacatagagagtgtcccttctttgcaccttgctcctagtgacttcaaaggaagcctggaaggagccccgtaacattggttaccctgctgtgttccaaccatagtgtttctgacagcacttaagtgcaaaagcaaatgtttcgtctaggtaaggacctaaaataacgaggcttggctttttaaaagattaggtacaagaaa

SEQ ID NO: 35900 - DNA, 857 bp, Homo sapiens
cctaatgaaacacaaaatatgaaaggaggaaaaaaaaagttctgcattatattcagtgactagatgtttgagcaaatgaaatttacacattaaattagctggtgaacttctctagaagctacaggagaggagcaccatggtttacaggcctcactctgcatccctagcaccaagcacaatgcttggcaaattgtaggcaatcaataaatatttgatgactgactttccaggaaaacatactaaagcagaaaataatagcaaaatcttaactaaatgaaattactaaaatctacagctggcaaaactcttctccctccctttttcaggagattaattgctgtacttaacatttgtaaagtatttctgacacatcaaaatggccagaggggaattcatactgaaaatctaattcgttattattaataaattgctttgtggtcccagctattccctagggatgcagatatgggaaagaaagggaaactcacttttaatatttttctcaatgtcttaatttgggaaaactctgaggtttttttttggtggttcattctgaggtctgggcaaaggttcaagcccattcctgagttatctaaactgattcatcctcccccatccaaagccaacaattgcagaggtttgcaacagtactatgccctaactacttagtgctgagaggtttttaatctttttcttgttggtctccttatcttctggtgcttctctgtctcatccccttttccagaggctcccaacataatcagcatctcctacagctgatgacagacacaaggagcagatgaactaaaaggttaatggaaggggaatggtaaatccagcctgacctaaagaaagaa

SEQ ID NO: 35901 - DNA, 699 bp, Homo sapiens
tagaatgtatgaattatgtatgaatgatgaaaggaagatatagatcagcagtatatatctttctctcaggtacatatttaataaaatagtataccaattgtaatttaagaagagtaattctgaggagcagttcataaggcttccagctttgttcttgtgacacatttcctggtagaaatatgttatcctagaccttgaccctgcctacattacctccttagcaccctcatgtctgggaaagtccagccagttctacttgtgtggcatgggagaaacaaacattcttcagtagaatgaattatgcaaccaaatgtatcagtgataactgtggtttcagctacattgaagagtagccaaaaatcgaactgaccaaacttcagatctctcttggccttacttgaactcattcaatatatctgtgactctttaactttctgacttatagaataaaattaaaatgttctatactaataagcaggtaagactcagtaaaaaataaaatgcttttctagaaagaattcaataagttattattgattagcaaagacctttctttcctaattagattttgatgcaaatttatcatttaaggtctctaaggtgctttaagttttctaaaggaaaaaaattttataaacattgtatgttattacgtgggtaaatattcacaaaattatagtgattcactagagcaacaga

SEQ ID NO: 35902 - DNA, 1842 bp, Homo sapiens
aaaatgagacatatcatgtgtcttttcatttttatttgattatctattgcctatctccctgtttagaatttaagtcccacaggacaggaaagctggttttgttccttgctgttttcctatcacctggaacaatacttggtgcagtgcctcccttatgctaaatgacgagttaatgggtgcagcacaccagcatggcacatgtatacatacgtaactaacctgcacattgtacacatgtaccctaaaacttaaagtataataataataataaaaaatagagttatccaataattaaagccaagagtgtcaagttctcccctgagccctctcacttctgatagggacttgcacatattcctgtggcctctgaaactgagctcttatacatgcctggccctctgcgctctaaatgtcagtgttcccaccttcatcttctgctttctgtatccgcttcactcaaagatctcgtcaagtgtttccgaaagcctagaaatgtaacccttattcccaactgaaatgtatgctggatagtttggcttgggaatctaggctctaacctggaaataaattctgattatgagtgctgtagtggccaaatcaaaggctaaaggtctttctcttatctactactgttcattccaaatgcatattttggccaaaccaaatattctagggatatgcaagtcacagcctgtggcctcaggaaaactagtcatagagatctctgaaaaaaagaaatctgtcacctcatttctgagggtgtacttattttccctgtgtttgaccttaagatttacttttaattatcacattgtacaggcctatgttgaactattccaaataattccattcatttatagctgctttcctatatttctgctgacattatgtactggataaacccacttaattgactttcagacaataggcttaaagtactagataacattcatatttaaaaatgaattattcaaccatttataatgtatcatatctgattctatcactagaatctaacaatttgaaaccctgatatggttcttagggcccctaaggcactaagacgaattactactccccacctttacataagctctttgtagattgaatatgcagagctctttgaaggcttagttttatttaagcctccatttccaggatgatttcaactgaataaaaatatctgggctgggggagtgtgggaagactatttgccttatccccacatacccctagtgatggccctgatgacaacacacatcgggatgttttgaaccatcctgatgattgatttgatttttccactcctcacctagacttttggcattgcctagacagagctatagcactttgggctgtagtcagccacttgcttccagctgcatgttttgctccacactctgcttcacctttcttcttggctacagtcacccttgactccatatgtttttctccatgtgtcatcccagcctaactgagcacaaagtctctagctgttccctgtccaagacacacatcttccttgaatcttgctcagtaacaagtcagtgtgtttaatcaatcctttatagctttacaagatatagcaatggctaaaattggtgtggttagaaaagcccaccctcctagttcagaaatcaataagcatttactctgtgtttcctttatgtttagcgtgcaaccagatctggagaacctaagttatgaatttccactccctaatcttacctctgaccagggcaaactatctgtggaacaaatcaattccatttagcagatgctgtatttcttgagaggcagagtgctaagatacctcagggattacaaagataaatagcatac

SEQ ID NO: 35903 - DNA, 5747 bp, Homo sapiens
aatcaactgtcacatatattatgagctctgcatgtgtgtattatgaagcaatactgactatgagttcagccttttaccaacttatttagccaaggttgctagaagttacttaatgagcatgaacacacaaactttcaataaacctacaagaagaaaagtggcccatgacctaaaagaacccctctgttatgccagggggatgacaaagtatgttaagtcaccagcccctctgtgttatggtggttcatgttgccaaggcacgtgtggcaaatttgcagagttggggcagtgaataagagaaggtcagtttctaaaaattcatctcacagagtatatgaagtaaaaagcctaggagaagtacttttctcaattaaaacttaagaatatatgaatatttgtggcttctagagtttgacctctcagtacctaagctattcctgatttatacttggcaatctgtatttattcttcagttcatagaatattagggtcagaaagaaaggtttaaaatcacccattgaatatctggaaggcttaaagagtagcagttcaagaatcaggcagagctggcttgaattctggtttcacactttacaggctgtgtggtattgaataaagtgcttcaaatattgaatccccagttttcctatctgttaaatgaggataataaataacacttcctgaggagagaaacagaagattaaataaaataaagcaaaaagtaatatgctgtaattccctcagaagcattgtgtttcacagttgtcagaattctgagttctaagcaacagaaactgactttggttacattaatcagaaaaggaatgtattggcaagatatcaataacttagagaattaatcaacagttgagaattagactctggcagaaaaataaggaaagcaggttatgagcctgaagtctgcttaggacataggaattgatactgctgctactggattcttgctgccacaccagtagtctctcaaaccttccacattggctgggaaaaatctctaaccctcattattcaaagctacaggcaagagaatcttactagataaacttgagacatgtatctgtatgctattgtccagaggataaataagaacccttgtgctacatattgaaagagagggtctgtctctcaccttatgattcctccacataggaatagaatgggatattaagcatatcactaggctttaaagcaaatctcaataaatttcaaagacttagtgtcaaacataatacattctctgaccacaatttcaattctgttaaattagagctcagtaaataaaggataaattttaacctccctaatatttctataaagtgtaaaaaataaatttgaatgtaactgagtcaaaaagaaactataggggaagacacagagcaggttggcctaatagaactctccaacaatagtccccctacaggaacactaaatcgaacaactatccacacaagaaagcacttttatgagaaccaaaaatcaagtgagtgatcacagtaccaggttctaacatcatatcaaagaaagaggcattgaagaggttaggaaagatagtcttgaattgctgatgctgcggagaggatctgtgttcttgtgggggagagagtgcagtgatgtgggactttgcattggaactcagtgcagcccagccacagtagaaaacaagataaggcagaactcagccagtgcccatggagggagtccttatatccgtcccagcaagagaggaattgcccttcccagtggttggaactagagttctggctagccccactaccatgggccaaagcactctgggatactacataaacctcaaaggcagtctaggcgacaaggactgcaattcctgggcaagtcttggtgcgtgctgggctagaaggcagtagacttgggttgacctaatgagacaccagccaggtggacaagggagtgcttgcatcacccctcccccaacccaggcagtgcagctcagtaacctgggggagactccttccttccgctggcagtaactaggcagtggtcaccatgggtcttgagcaagacccagtgctgtgctatctttgggtgtgactcagcacagtctcagtgtggtagtcacagtggagcttgcatcacccctccacaagaggagtacaagcaagtgcagactgcaaatattacaataaatatctaactattcaatgcccagacactcacaaacatccaaaagcatcaggaccattcaggaaatcatgacctcactaaacaaactgaaaaagtcaccactgatcaatccaagagtgacagaaaattcaaaatagaaattttgaggaagctcaatgaaatttaagataacacagagaaggaattcagaatcctatcagataaatttaacgaagatactgaaataatttttgaaacatgtagaaattctgagctgaaaaattgaattgacatacagaagaatgcatcagagtctcccaacagcagaactgatcaagcagaagaaagaatcaggctatttgaaaatacacagtcaaaagaaacaaaagaatagaaaagaatgaagcttgcctataagttctagaaaatatctcaaaagggcaaattaagatttactggccttaaagaggaggtacagagatcaaggtataaattttattcaaagagataataacagataacttttcaaacctagagaaatatatcaaaattcaagtatagatgggttgtagaacatcaagtagatttcatccaaataaaactacctcaagacatttaataatcaaacttccaaaggtcaaggataaagaaaggattctaaaagcagcaagagaaaagacacaaataacataccttacaatctaggagagagtggcattacatatttaaagtgctgaaggaaaaaagacttttatcctagaagagtacacccagtgaaaatacccattaaacatgaagaagaaataggctttcccagacaaacaaaagctgagggatttcatcaacaccagaactgccctacaagaaatgctaaagggagctgttcaatctaaaatgaaaggacactaatgagcaataggaagtcatctgaaggtacaaaactcactggtaatagtaagtacacaaacaaacacacaatattataacactgtaattgtggtacgtgaactattgatatcttgaatacgaagactaaaagataaacctatcaaaaataataactacaacttttaagacatagtataataaaacgtagatggaagcaacaaaaagttagaaagcagggggattaagttaaagtgtagagcttttattagttttctctttcgttgttgtgagtttggattgttttgtatccagtgctaagttgtgatcagtttaaaataatgagttctaagatgttatttccaaacctcatggtcacctcaaatcataaaacctacaacagatacacaaaaaactgaaaatcagtaaattaaaacaacccaccaaaaaaaattaacttcccaaaaaggaatacagggaagaaggaaggaagaaagagaagagcacacataaaacacccagaaaacaaataacaaaatggcagtagtaagtccttacttactaataataacattgaatgtaaatggactaaactctccaatcacaagacatagagagcctgaacaataacaataataaaaaaacaagctctaacaatctggtaactataagaaacacgcttcacttataaagactaacttagacttaaaatataggaactgaaaaatattgcatgaaaatggaaacaaaaaaagcagaagtagctatatttacatcagacaaaatagatttcaaaacaaaaactataaacagagacaaagaaggtcattatataatgataaagaagtcaacttagcaagagggtgtaacacttgtaaatatatatacattcaacactggaacactcaaacatattaagtaaatattattagagctaaagagagagatagaccctaatacaatattagctggagacttcaacaccccactttcagcattggacagaaccactacacagaaaaccaccaccaacaacaacattggacttaatctacattatataccaaatggacctaatatatatttacacaatctttcatttaagagctgcagaatacacgttcttctcctcaaggcatggctcattcttaaggatagatcacatgttagaacaaaaaacaagtcttaaaaaattaaaaaattgaaaaaatatcaagtgtctcatctttccagttttattctcaatggaataaaactagaaataaataattagaaaaatatcagaaactatacaaacacatggaaaataaacaatatgctctagagtgaccagtgggtcaatgaagaaattaagaataaaatttaaaaattccttgaaacaaacaaaaatggaaacacaatatatcaaaacctatggaatgcagcaaaagcaatactaagaagaaagcttatagcaataagcactccacatcaaaaaagcagataatcctcaaattaacaacctaatgatgcatcttaaagaactagaaaacaaagagcaaaccaaagccaatattagtaggagaaaagaaataataaagatcaaagcagaaataaatgaaattgaaacaaaacaaacaatacaaaatatcaattaaacaaaaaggtggcttattttaaaaaaataaaattgataaacatttagccaaagacataaagatagaagacccaaataaataaaatgagagataaaaaggaggtattacaactgatactgcagttcagagaatcattagagactactatgagcaactacatgccagtaaattggaaaacctagaagaaatagattgaatcctagacacatacaacctaccaagaccgaatcatgaagatttccaaaatctaaatagaccaataacaagtaatgagttcaacaccatattaaaaagtatcccagtaaagaaaaatcagagacccaaagccttcaactgctaaatttcacccaaaatttaaagaactaatattaatctaatcctattcaaacaattccaaaaaaataaagaagcaaatacttccttactcattctgtgaggccagtattaccctgataccaaaatcagacagagacatcaaaataagaaaactacaggccaatgttccacatgaatactgatgcaaaaatcctcaacaaaatactcacaaaccaaattcaacaacacatttaaaagataattcatcatgaccaagagggatttatgccagggatgcaagaatgattcagcaaatgcaaataaatcaatgtgatatatcatttcaaaagaatgaaggacaaaaacatgcaatcatttcaaccgaaggtaaaaagcattagataaaattcaacctcctttcataataaaagccctaaaaatgtggtatagaagtatatatctcaacacaataaaaaccatatatgacagacacacagctagcatcacactgaatacagaaaaactgaaaactttttctctaagatctggaacaaaccgaaacatccactttcaccactattattcaacatagtactggaagttctagttagagcaatcagacaagaaaaagatataaagaacatccaaattgaaaagaagtaagtcatctttgtttgcagatgatatggtcttatatctgaaaaatacctaaagaccttaacaaaaatctattagaaccaataaacaaat

SEQ ID NO: 35904 - DNA, 4724 bp, Homo sapiens
tgaacatttgagttgtttccactttttggtacttgtgaataatgctgctacagaacactgaagtacaagtatttgtttgagtccctgctttcatctcttttgggtatatacctagaagtggaactgctagtacctatgctaagtcaatgtttaacttgttgaggagccaccaaattatttctattgccgcaacatcattttacattctgatcagctatgcacaaggtttctaatttctacacatctttactaatacttattttctgtttttttgataagagccattctaatgggtatataaagcagaatctcattaaattagatttgctttgtaaactatttattaaaaataagagacacgaagagaacttattattatatgcttcgcttaccctgtatatcaagagctgcaaacatcctgtgcgagtcccaaagtgaaaggtaaaatatggttctattaaattttaaacatagtaacacgaatatttctccaaataaggtaatcttgagttttgggattgcatttaaaattcctacagcaaatgctcaggatataaacatatccattagtcattacagaagtccacacgaggctgacacacgtagaataccattattagcaaaactaaactcagtacagttacaactgcctcaaacttgaccccaaagtattgaaagctcctcagagagcgggccagcagcgctgcgcatgcgcgctcccgggcgtgctcccgcgcgtgcctgcgtatttgcgtgcgcggccccgcgcggcaacgcaggggcggaaccgcatgactggcagtggcatcagcgatggcggctgcgtcggggtcggttctgcagcgctgtatcgtgtcgccggcagggaggcatagcgcctctctgatcttcctgcatggctcaggtggatttcaattttacgtcctggttttctacagctcgggaaacatcctcccctcggttaccccagtattgcccaagtggaggtgtcgccgggcccaaatagggcccagtgggtggctcccccgtcgccagccccggctgtagatgcacgggcagcgccacctgcccccagcctcccccgttagtcttcctctttctatcgggcggtcactggtccaccaccctcgctttggggccttgtgtcccgccgctcagccagccctccatccccacaacacacctccccattcctcgccccaagtttaaacagagcaagttagtaaggtaagtcttctgctagagggaaattatttagtgtttttcattatcagctactagtgatttttcagtcgtaattgcccattgctttttccaggctcccatactaatgtagacaattgagattcacagttaacttagatactgtttacagattatctcttttctgtaagccactgtgccatggctggagtgctttctctcactttcctttttgctgcttctctttccttcctttccctttcccgcctgtgtcattaaacttccaagatagactacaggggcaggacccccagggacaggcatcttccactacctgcccttagtaacgtgtgcttaatgctgtatcgttacttaacactcatctgtaatcacttttgtctgtcttccccactggattgtgaacttcccactggattatgagagtaagggcccttgtgtcaacctttgcacccccagtgcttggcccagggtaagctctcaggaaatgttttttaaagaaatgagatgcagccggtgtcctcagggggcctacctaaagttaaaaacaaaaacaatccaattagtttgagtcagcagtgcatggaagatcacaagacggtgcatggtttcctgccaagtgaattgtaagagaaaaaaatgtggttaggcattattaaggcatttggaagatgaaaagcttgtcagacttttcgaagaaagtggtctttgagccgagacgggtaggcttaaatgggacggtgattggaagggaattggaaaggtactgggcagagacctggaaaagggcaattgtgggaggtattctctttattttgaaaatgaggccagacaggttcagcagcttggccaaggtctcttagctgttactgtgagtagtggcggatttgggattagaacccaaagctctccgacctcaaactcagggctttggtggggtaaggtgaaaaagtttgaactaggatatattgttttggagatagggaagaagaggtccaatagtgtttaaagggaaagacggcatatatttagaaggtgacgtgtgtaagatgacagcggtacttaataactaggagactggtagtactatttagggctccaagagtgttcatttataagtacccagaaattccccaacactgtaccctttctcataatcaattctcattatctttaggaagaactcctagactatgttcttttttcccctggacctctttgcttaaaataattatcctttttttgaatttcagattacatttttataacctgtaagggtatgtctctaaaattcagagtcatgtatgtatgtattttttcctttgtactttgaaccaagaatttattcaaagaattctgccaagtatgcgagtataatgtgattcctatatatttaaatctccactgaagtaaataaaaccttattgggagtaggtctttatcatctttatcgttgggagtaggtctttatcatccagtaggtctttagcagctagtgattttacattcaactttaatgtatgtggttatgttataggagatgtttggtttctgcttaactagaatatgggcaaaccaattctgttttatcacactcagttttgccatactgttaaccagttttaacacttttactatggaataaagtactagctttttaaaaagtggacattgggaatggatagatgttgttttgcagctgcattcttactcttcgaggctgaaaaaatgttgttaaagacagattttgtgttttcaaataaaaaaccttaaaagcttgagattttcttctaggagatagcagccatagaagaacatatgggagtgtaaattatatgtagccaacttaatttgagccttttctattaataaagtactaaagacggaccttcttttaagatgataaaaataaatgataggttaatgagttttgttcagtctctcagatcagattaattcactcttatttgctcccataggacactggttcttctttcagtggtagtcatcatacttgtaattatgtaatgtaatgtctgtattccacactaagctagtaggtccacaaagcccaaaccatgtgtcttgtttatggctttcttcttgtgtggtaaggctcagcaagttgactgagtagcttcttggtaaagtcaccagtaagctcaggctctatgtcgctcaatgtaatggacattttcagtcgtcctcttacgtgaactgtcatctgcattcagctttcttctcaaaaaactctcctggttctttttctgtcttgatttgctccttctggtttcttttgcagactcatcctcctctacctggccattaatgatggggtttctctaaatttggtccaaggtcttttcactctacatttttctccctaggctaatcacagaagtctcctagagatacccatttgtgtcactggtgtataggtaaaaatagaacctttgaatttctgtggagattcatagattctatttttgagctctagacaagttcatctaactgcctgatagacattcattcatgaatccattcattcaagaaatatatcacagcctccatgtgtaaggcactgttctgtgctctgatcatacagcaatgaaaaaaacaaatcactgctctcatggagcttatgttctaatgaagtaaataaatactatagtagaaggtagtaagttttatggaaacaaggaaagcaggataaggggattcttccatggatgagaagttggaacagtgttacaattttaaataaagtagtcaggttatgcctcactgcaaagatgacagaagatgaaacttcacagctagacttagacttggctttaaagccaagtcggaggctccagggtagggtccttgacatgttcaaggaacagcagtaaggctagtgtgtctggagtgagaagaataggaagggatatccaagagggtactggcatccaggtagtgtagggcaggggttggcaaactttctgcaaaaagtcaggtaagcattttagcttttgtgggccatgtaaggtctcttccccatagttttcccttctctctctttttgagaaaggagtctttaataatgtaaaactcattcttagcttatcctccttaaggaccctaggctggattttgtcctcccctctagctgtccatagttgctcaatcaacccatggtataagaccttgtatgcattacaaagaggcacctcacactcaacctgtgtatgcctgttgcttatgtttcctgtctaggcaggtgtctagtattgttcacccagttactccggccaaaagcctgttagtcatccatgagaccttttactgttgaccctttataacaaatccgttgccaatctctattaattttaccacctaaatttctctagtatctgtttctatctacatcatcgctgtagtctaagcatgaacagtagtttcctaactgatctctgtacatctacttttgctctctttcaattctgtcttgacacagcttc

SEQ ID NO: 35905 - DNA, 669 bp, Homo sapiens
atcaggtgattctggacaaggattaagaatgtggatcaagcaggttttaaatcaagatttaacattccaacacataaaaattatttatccaacagctcctcccaggtatgcagtaatttatctcacttgtcaatataactctgtggcataaaatatatatagagagatgtgccagctaggtgttctttaagcttaattttgtatttaacatactttaaattagagtactttgtccccagaatgtattctttattgcagttacactgttggaccaagttttgccaggtgagtaatttattccctttctgtaaagcattccctaaagctctgaatttaaactgtgtcccaagcatggcttatgtaactctgcttcctcttgccctgcagattgctcaactttcatacttcttccctacattcaccccaaaaggaaacttaataactccaacaagtataatctttctaataatttagttaagccagaattcataatctctgggaaagggttttatggcattctttccacatttaaaaggattatcaagaaacaatgttatgcttttttaatcagtaaaccagaataggaagatagaattgactacttaataaatatttaggttatataacctgtaggtgtgtgcaaaaaattcacagtaataaaactgctat

SEQ ID NO: 35906 - DNA, 4253 bp, Homo sapiens
gtctactgcttttcattcctctgtttccctttcacactttctattgaattattcgttttttaatacaccattttactttattttttttctgattgccatagggattatgatatacatagcaaagcttttttacctacttagagttctttgttgttttttttttccttgtaactatataggtccctttatccccatcttgtgtatgttatagttttcatatgtattttgtctgcatacattgaaaactgtatcaaacaaggttataatttttgttttcaacagtcaaccatattttaaacagcttaagaggagaacaatagtttattgtatatactcagttgtggtctattacagcatataagtgtgttttgattaaattgtgaattaccattttgattataaggtatcccttttcctcaactgtatttaatagatgttttaaatcagctaaggtaggggcatagtcagtaaaagtcagcaattagtttgctgtgttgatttagatggaaaatactgcttttttttttcactgtggtaatttggactctttaaatgaagtgcccaataaagatttttatttctataacatgctttagctatatttacaattagagattttcttagtttgtgtttattattagaatttccatttaaaaataatttttaacaagccatttatgatttatatgataatatagtttcttttggtgttttaaaaaattctaaaagtaataagatttgcatagtgcctatacttttagattcactgtttttccacacaaagtccatgtttgtatttttcagtaaatatgtattctaaaataaactaggcactttttatttaggcatagtaaaccatgaattcctctttactccatcacttagaattcctatctgaagcatgatagtaggagagccctctcctgataacagtatatctgtactacaagtatgctagtaaggaaccctactaaaaacagctattttgaagaaataatgtacttctttggtaagtattaggtatgtttaaataggtactagtatggaaaagttttcttagatatgattttttaaaaaagaaacaaaaatggactgttttctacaaatcacagtgtagattttataagagttaaagtcaaaatatatttggagcaaaaataaaataattttagacattgttatttctggctggcacaaattattcccaagtggcacaaatgattactgaaatttattcagcaaatatttagcatctattctatgtcaggctttgttcttagcactgggtatgtatctgtggaaagaatgaagtccctgctctcaatgagctcatgtagagacagaaaataaaagggaaattaaatgtaataatttcaaatagtgataaatggtattaagactggggatagagagtatatgtgtgtgttgcagggtaaaagggaggtatactttcagttggagagtcaaagaagctcccctgagaaggtgacacttgagctgagacctaaatgaacagtcggagcccaccatgcagaaatgttgcaaagagccctctaagtagtggggatatcagatgcaaagccactcaactaataataagctcgtactatttgaagaaaaggaagtgacaaatgtgactggaacctagtgaagggtgggagagagaagtggtatgaaatgaggataaagaggaagactggtgccaatttgttaacttaaaggttatgaatgaactttcgattttatgactttaaggcaacacagatcaaaaacaacttggtatcaagctgaatgtcaacttttttttttttttaaccttggacattttattctagcttaatattttaccaatgtgtaatgggttggttgattgattaacttaggaaccacacagatgttctttgccaaacatatttatttattgtggtaatgtctgaggagttttataccagctaataaagtgatttatttgaggaagaaggtgaatgagtataacatatgtgatagtttttagctgtttaaaaaacaaacttttatattttatttaaatgttattctaacattttaggagatttatacattcttgtttatgctttcttagcaagaaagttctaaattatttttgtctcgttaaattttctcaattactccatttgaacagaattttaattttcttagctaccacattagtaacatacttacattgggattctacttctgctgagcatctatctctaattaaggcattgtcaaagaaaaaagttaagtgaatgccacttttttccattaatggctgagttcccagaatgattcacattttagcctatgatatcatccttatttaagtatttagacagacaaataaacacagaaatagcagagtaaaatgaaaagggaagtagaacaattcagaagggtaataggctcatttgaattttaaagtgagtgttgtatttttgatattttgatttagaacttcactgtgattttagtgacagtttgactacaatttgaggtttcattttgtctgacaatgactatttggaaagcacctactctcattttcagagtaatgaaaatgagtaactcaaaactagttaagaagctagttttgagaagggattctgggaggaggaaggtttgaatgctttctgccttctctccccttctgattctaatttatctacctttctagagccacacagcttctggggtcagaaggcatatggggttgtgagataatttatgcttattggagtcctagtatagaggtggtgcaagattttatcttttctgcagcagttgaaagcctggataaagagcaatgaaggaaaagctcagtctgcaaaaatctgccctcctcataggtttatgtcataaaatgtaattctcagacaataatgcaatattaattagaattccaaaaggattttttaaggataattatttgaaaatagtttcaagtttactaaattttttgataaatttattggataatcaagaacaatagatgcctgagaatagctaggacaagtatgaaaacacagactagagtaatgataggagaggggaacttaccttacacaacttcaaaatatgctctaaaaccactataatatgattaacgttatatactaacttaataattaacttaatagatactaaatagaaactaacttaatagataaagagattagtggaacaaaatagagcctttctcaactaaagctcttcagctgaatcacaagacatagaaaattatttgagtgactgttcccccgcccactgcatgtatgatatagaacgagcaccattctagatgtattagagggaagtcagttcattatatatagcatatgtcttacagaaatcagggttagagagactagataatgcagaactataaaatatatggcaaagataaaatttcactgtttgctgagaagggtgtcttcctcctttcctccctttctctctccttcttttaatagcacaagcacaattgactatcatatgggataaaatgaatttgaatccttaggttactccatgtatgaaattcccccaaaattcaaggcttaggtgtaaaaatgaaaacaaaagtcttaaaagaaaatctgggctactatatataaaaaatgtatggattggcaggagcttcttaagcaaatctagagacccagaaatttaaatttttttttaaaaagacattatatcaaatgtagagtcttttgtccagtaaaaaaaaaaaaaaaaaaaacccttaagtacataataacgtaatatcaatattcaaaatagacttggaagaaaatacctgaaatatatgcaacaaatatttgtcaataatagacaaagtactcttttaaacaagaaaaaaattgaaatgacaataggaaaaaataatagcaaatgacatcagtcagcaattccacttatgtggagttttagaacaggcaaaagaaatcaatgttgatagtctcactcagtagttgcttgggaaggttacgggagttgctcgtgaaggggcatgatggaattttccaaggaaaaggaatgttctgtatcattgtggagatggtggttgcattgtaaaaagtaattgaactatacacctaaaatgtgtgtagttcaatatagtttatatatgtaaattatacctcaataaagttggttttaaaacttcaattgatactcttaaatggtaacattttaatgtatgtcagcacctactgctattactgctgtgggca

SEQ ID NO: 35907 - DNA, 1462 bp, Homo sapiens
ccttaaaaaaattttaacttctggggtacatgtgcaggatgtgcaggtttgttacataggtaaacgtgtgccatggtggtttgctgtacctatcaacccaacacctcggtattaagcccaacatggattaactatttttcttgatgctctccctcccccacaccccttgacaggccccagtgtgtgttgttcccctccctgtgtccatgtgtaagagaaagcacttcagttgttgttttttttgttattgttgtagcacctaaaattgtattggtccataaaaatgctaaataaaaaataattctgttaactaaaatttcccactgagtattttgacaagaagaaattaatggttaagacaacataaaaagtcagctcagcacaaatgaatatgcacactcattggaaatttcctactacacatttgaggctgagaatattttagtgagctattgtgctaaataagtcgtcagcagaataaaatacatggattactatatgtttcaaatttcactgtttaaatattttatactttattttcagtgcaacggaaatgtatccctttctttttcaagtaacatcgatgtggattatatattaaccaagccatgactcttaacaaagactcagactctgtgtgtgggagaaaaaagcctggggaaaagttttcaacagttaccaaagattttgtcaacacattttattggataatgtgatacaaagtttcatcagataggtggtattagtaattacaacatatgacaccatctcagagcagtaatggtgactccgttttgtatagagttatatttgttatcttgttgctcggtctactttgataaagaactttctacttttcttcttttctccttttgtctagtttttgtctgtttgttgttgttgttttgttttgtttttttcaaatttcaacttagacttctcttcctccaggaagctttctgggaacaccaagactgagataggctcccctgggttttatcatagcaccttatgcttcctgttttatggcacctacattataattctttattaatattctcttcacctgtcccacagtcacctcagcaatttatgctccattagggcaggactgtctcactggtaactttatccccagcatctagcacaatccctggcctagacaagttgcctaatacatgcttattgaatgactgaagccatgaatgaaggaaaaataaatgaatgggacatctatgcacctggcttttagactttgcaattattgcatggcttttagcaaatcactgaatatgtctcagccttagtttcctcaagttccaactgagcagtgcaagcaagatgatttctgaaagcttggtggatctaaactttttttttttttttttttttgacagagtctcgctctgtcgcctaggctggatcgccccggctggagtgcagtggcgcaatctcggctctc

SEQ ID NO: 35908 - DNA, 685 bp, Homo sapiens
agatctgagactgagcctcagctttgctatttactgatggagtgaacactccaagtctgttacctcatctataaaccaaagtgagattataacactcctccctgtgttgttgagaagatcaaagtgacacacactgaaagggagggaatgtttttgactgttttcaaggtacaaaaacattgtacctatttatgggggtgatgaataataaatccaatagtttttactccctcattttctcacatgcagtcagccctgcctgctccctatctgaggtccccatggctttccaagaacctgggaaccttaactcacaagagcccagattggaatttgtgggtttgaatagctgatttgagttggaagacatgccataagcaagcactcaagtgtcctgaaagcaggaacaaacagatcaaaagatcaaggcctgtgagtaaaataaacaaaatgggaacgctttgaggatggttggagcctgcccttatctcactttgtctaagcttggacttcaaagcacattttgtgactcagatcaactaaaagcaaaggccatgctatgaattatagagtaggggggaaatgaaataatggcagtcttgagaaaaaagtgaagtgaaataaaatttgtcttcatgattttcattttttcatgagtgtatatcccttacccctatgggaaaaa

SEQ ID NO: 35909 - DNA, 1980 bp, Homo sapiens
cctgtctcccaggctggagtgcagtggcatatttatggctctctacagcctcaaactccagggctccagtgatcctcccacctcagcctactgagtagctgggaccacaggcacacactacaacctttacttttttatttatttataaaaaataatttttttatttttctaaaaatgaggcctcactatgttgcccaggctggtcttgaactcctggccttatgcaatccttccacttcagcctcccaaagtggtgagattacaggaatgagtcacaaaaagtagccctctatttttaaaaatatctgtttttaaatatattactttactaaaaacatatccagtatatatcacaaatttctttgtatatgtttatcttatttcctcaattgggaaatgatctagctcctgggaaggcaaaggcaatgctgtatgtctgctcttctgtctccttccctctcccaccacctgctctgcctgcagctctgggcagtgttgtgagagacacagtgacttgcatgcccgcattaactagaaagcagggtctagaatatgaatgatttgtgtttttagaataaggagaataaaataaagttcttggcagaaatggccttatttgaattaaaataaatctttgacatgaaagtaagtagcccaggaataggtattatccaagcattgcattcttttcttttttttctttccttttttttttttttttttttgagtcagagtctcactctgtcacccagcctggagtgcagtggtgcaatctcagctccctgcaacctccgcctcccgggttcaagcgattctcctgcctcagcctcccgagtagttgggattacaggcgcgtgctaccacgcctggctaatttttttgtatttttagtagagacagggtttcaccatgttggtcagtctggtcttgaacttctgacctcaggtgactcacccacctctgcctcccagagtgccaggattacaggcgtgagccaccatgcccagaccaagtattgcattcttaaaaatttgcagttgagtcagagaatcacggattgcaaaggacctttggtacttggagctgagtcatcttaataggctataaaacatatgatgacatctctaccacctggtgatttaaggtgtttcagaatacataactcaaacactgctcttaaataatgcttgtcctttggcctgaataacattaaattgagagtggttctggatcaaaattcagtctacttactcagctcttccatgttgactccttttgggaccatctgtagcagaatggcagcggtctccttgataagcgggaaggcagatgacaaaatgatgatgaccatgaggacagtcaggctggggtcaatgtaacactgccagttacacgggtcctcactcttcaggggaagcacatagaatatgatggccgtgatgaccacaaccacggaccccagggcatctcccatcacatgcaaaagtacacctgccaggaagaaagactactgcagcacagatgcaaatctggaagccacgtgacactcactgacttgggtgtccgggtatatgaatatctgttaccatttggagttttttggtttttgttttggttagaacagtaggatgaatcaaaataatggcaactacttcttaggaaacaaaaccccaggccaccatcgcaggactcagagtaccttggaagagcaacagcctaggaagattctgacctgcaggaagagcgactgtgccgtctcactgggccacatcgctaccactcaccacccatcaaagggcaccaagctggaaaacaggggctgtgcaaatgatttctttttctttcagacaatcatctgtgctttacgttgttttaaacatgtttaaggggagagagaacaagttgtattaagagtgtttaaaacaaattgtcttttttctaccttgatccactttcccctttccctgtaagcatttacct

SEQ ID NO: 35910 - DNA, 3890 bp, Homo sapiens
tcggctcactgcaacctccacctctggggttcaagcaattctcctgcctcagcctcccgagtagctgggattacaggcacccaccaccatgcctggctagtttttgtatttttactagagatggggtggggtttcaccatgttggccaggctggtctcaaactcccgacctcaggtgatctgcccacctcagcctcccaaagtgctgggattacaggcgtgagccaccgcgcccaccccaatgtatatatttttaaactggaccttaaaaaagagagataaaggatgatttttttttcattacagattctcttttaaaagctcactactaagctctttcagagagcaaattcccctgttgcctttaaatttgtttgattaatttagaaatttttaggagatcatatgttattgttgttatcttctggattttccctataggttcactctgagaattcctttgtaaaacagatgtgagacactcaaagtgaaggtatctcctgaattattaatttttcattgtattatttccatcaaagccccacttacaggctttccccaaaccacaggaaagtagagggttgcttaatccttgttggaattctcaaagtcaaaattggggattaaccccttctgggatcactctgaagcaaagtctatgcccaagaagttggaagggagagatgttggctacaatggtgtccagcgagaaacacatctcaaaaagccctgggctgaccttagtccagtgcttccgaccttgaccacatggtgagaggctagctaggtgcttgccttgggcctcaccagaacactccctttggtcctgggagtggaggttttagtgagccaacggtcccttcacaaaagcagatttctggcagaaatagctgatgcaatagggtcactcagcaatgcgagatagggcataaccttggatagcagctcacctactcttttcctacctttatcaaaatcaattcaattaaaatgggttgcatgatttattagcaatatccacggaccagtaaaaccaagtaaagtagtaacacaatattaatatgtgcagctctggagcaggcagtattagcatgggtctcagtggagctaagataaatcattagcaaccagtttctccctcaggatcaatgcagtgattacgaaagagagttgggtcatagtctatgcatgtaactggcctactttcaaacacacctttgccttattaaaagtcaaacagaaataaacaacacagtccatgtgtgtcatagaaagggatttcaaataggcccaaagtcaatcctacctctgatattcagagcttcagactttttctcttttttcatcatgtcttctggctcattctgggtgttgaaggaatcacctgcattcaaagaagaaaccttgtgttgtgtataagttctacaaacaaacaaaaaaaaaccaatggactcaaaataaagttttgttattttaaatttctactagcttaagggagacccttctgcacacccacagctcagaacagtacattttggccttgaaatagccttgtgatccacctttggacttcattcacacatcctttcaagttaaaacaaaaagagggtgaatgggagcccacctgcagcccctaaacccgtaacacccaagaagacaaacggatgggcaaagagggggggagaacaacaaaattcagacagcaagtaatgagagggaggaggggttggagagtcctgcctgttgcccaataatagtgaccgatttccaagaaaatcaatactcatatacagagaatagggtaagggaaaagaggccagggctacccgaggatccaggagaaaaaagaagggatggggaatatgttaaattggcagaagagaagtaaagcgggattgtaaagggaatggatttattaaaaaaaaaaaaaaaaaaaaaaaaaaaaaacaacaacaacaaaaaaaaaaaaacagaaaaaaagcatgcagaagaaaaagagggcgtggggtgagaagaaagggaccgggtgggaggaggaaggaagggccaagcggtccaaaggatgcaaccgaaaggcacctgctacgtttgcgaacacggtcgcccccttctcccgcttcctttccaccgaggtcccccggagggttacggccgagtccgagcctggggctgtcgggtccgccgcgcgccgcgggtcctccgcgccctgaggccccccgaaagcgccggggacacagccctccgccagctgctgccgctgctgcaggcggcgactgcgtccccggaggcagcacgcgaaccaggcggcgcagtcctggaagatgagcagccccaccacgttgaccaacagccccaggacgccgacgatgagcaccagctcggggtcatcgatgcgctcgggccgggccaggcgcagcacggcctccacgaagatggtgaagcagagcgcggtgaggaagaccgcgttgctcagcgcgcccaccacctcggcgcgggcgtagccgtaggtggcgctgaagccccgggtggggcgccgggcgatgtagccggcgctcaggcccacgcacagcgagatcaggtcggagagcatgttgaaggagtcggagagcagcgcgatggagttgcccaggtagccggagaccagctccgccacgaagaaggcgacggtgagcaccagcatgaagagcagccggcacgtcttgccagagtagcggcccatctcgccaccagccccgggcgcccggcgccgcccaggggagcgcagcccaccccgcgcgcagccacaggtggggggcgcggcgcggatccgtgaggcccggtacccgcctcccagattgtctcgccggccctgccccaccgctttttataacgcgaggccgagcgccaccagtccccgcacgtccagagtctaaaggagtggcgggggcagtatctgaacagcccgtgcaccgcctcccgcggcccttttcccctccctcgcggcctgggcctgacttggcaggtggccacgagccgatgtctctctttgtgggacaggactgtgcagagaggggcgctgcggaggagagggggcgtgtctggacgtcaatcttcacagactccctccccatgcagaggtgggattcacccagacaccccgcttctcctggccctcagggtcgccagtgtcctgttgactcagtcataagggccttggctgctgtggggtgtgttcgctgcggtggactgggacaccttcgcgtacgtgcccataggcaccttgcggtgcagattccatattaatcaggtgcaaggccccggagcacaggcttggggcaacttgcccttgagggtgcttcctgcttttcatttcgtgaaatgtgacctcatccgccactcagccctccaccctcattccactaaccccaggataaagctatttaatcctctcttgttcctcacagccattataaacggtgcaggatcgttcctattacccactcatggcacaagatcgtccccgttccccttcaggatcttcgctgtcaaggcttccttccctgggtgaatcgcaggcagccctcaggagagcagaccccacttctgtaagcatgcactcctgcctagcactcgaaggctggtctactttgtggtagacacaagtcccttggccgccaaagaaaccagggctgacctcctctgtgtacttgtctcattcttcattgaagagaatattctactcacccccacgtgtccctgacagcatgacctgatacgcagtacaatcgactgacctacatgaaggtttattccaaataaagactcttttttttttttgagacagagtttcgttgttgttgcccaggctggagtgcaatggcgccatctcggctcactgcaacctccgcctct

SEQ ID NO: 35911 - DNA, 2272 bp, Homo sapiens
cagtcacgtgtaggtggtccagccagcagtcctatacattgagaccttccagcccggatgccagacctataagtgaatgagccttcaagtgactgcagcctcaagccatcaagtcacccctagcctttgagtcttcccagctgaggcctcagacatcgtggaagcacacagcctgttcccactgtgtgctttccaaattctagcccactgaacccctgggttcataaaacaattgctattttatgccagtacatttgggatggtttgttatagagtaactggaagggagaaccaccatgtgaaagattgggaagccgtacaaagggtctataaagtttggaactataagagaggagaagacaatggatattggcatagaatatttagggtattattagatgagcttcaaaacaaaatagttattgtggggcagggttttcccatgtcctgagtgaacagattaaaaaacagacaaaggtaggattctcctgacaggcacaggaaggccgagacttactgaatgggatctaggcaggacaataatagtttgagtccaggcctgggtcgatttttggtttaattggaaaatgcctttcaagtgagactatctaactcagagaggtgagggttgatcagatttgtttggacaactgttgcctttggcagacccataaaaccctgacttcatttctctcactgagagtagaaaaaaatctgtttgaataataaatatctgacccagaaaaccatgacaaagtaaaaggaagaaagtccaatgaaaatgccagcctacaggaggtagagaaggaaaaagaccagcttacgaacttgattaaaccattaacaacctaactgagccttcctgagaggagaaggagaacacagaaggaaataaaacacgagaagcacgttccaaacttcagaatgagacattcagttgaatgatatgcttgcaaccttcaaaagctgtggaaagataatgtttggaggagcataaagcagaaacaacaagacaaatttgaagccttcaaaacagcttcagctcaggagtttgctaaggctgaacttcagatgaatgtgagcatgagggagcagcaggattagaagcaggattcacaggtctaagcagtgctagagctacaggcagtcacagcagtgagtatagatggtgcccaagtgtagacagagcccaaagcaggggcttcaagtggaaatggaattaaggaccttccttcccttccttccttcctccctcccttcctctctgccttcctctcttcttcccttccttccttccttctttccttccttccttccttcctccctcccttcctctctgccttcctctcttcttcccttccttccttccttctttctttcattccttccttccttccttctctccctccctcctttccttcctcccttcctttctccctttctctctctctctctctctctccccctctccccttctccctctctcatctctttcacatgctgactggaaatgtaccacaaataaaatctgcagcccaggatgtcactgctgcacatatctaaactctgcaagcaagcaagaatgttttcaatgtcactcgctgggaaaggataccatgtgtttaccagataggaaaacttggtgccataatcgatctcctgttgtgaaagctctgccagtggacctaagtacccaggtcttggccctggccaggtctggcagatactggctggtatctttgagaggcaaaaaccaagaagacttctttcctttctgagtctctgctgtggccataaaaagcaataaagatggcctggtttatagtaagtgctaaattctggtaatctaaattttcctataactgttctagctctgggataaggtttcagactttttgaaatcttcagaaagtgtggcagaaaataaaaaatgtactcaaaggccaaaaatgaagtaaaagtcaaaatccagaaaggtaagttgaagtcagaatctgacttaagagcatctgtccaataaagacaaatgctctagccttgagttttgacagccacatgatcatggatgttataagagacaaaactgagatcgatgcgagatggagagttggaccagagatccccttacaaagtttgactccttgatcaaaggttgaaccaaaatgaaatgaacaatcaaataaacaaacaaaaacccgctgccccaaaggcgacaacaaggaaacttgaatctgttagccttggttgtggacatagggaaaactacctccca

SEQ ID NO: 35912 - DNA, 1000 bp, Homo sapiens
tccatctcaaaaaaaaaaaaaaaaaaaaaaaacttaaattcaaaggaaaggcatttttttaagaaaaaaatactttaaaataattaacagatatttctgatataaatgtatcatttgtacatgatataaatggcaggccccgtctatcccagacagaaaaagacgcaaaatagagcagaagccatcctactagaaaagtgagctgtacaaggtcacctttaggttaaaataaaggccactgtacagcaaggttattcgtacagtacaaggcaagggcatggagggttttagtagcttgattctaaagaaacttcaggtctgaaaaaataactaaaaataagacttaaacatgaaagataacaagaaaatcaaggaaaatcaaataaagtaagcaaggaataggaaaacgtataaacgttaacaaaaggagtccctaagcctagagaaagaaactggctcgtgacaagtatctcctgcgatctggacctacatgttgtttccaccccttcaacctttcccctactcccttccccgaaacacatgcacacacaaagccatcgaccattgtggactttaaccctattttgtttgtttgtcttttacttaatgctcgtattttttacttttttcactttgcctctcactttagccaaaaatactggctctaccatcacctgaacttcctcacaccttttagagtcaggggtgacctcccaccggctagatctggatctaagacttccaagttttctcatctcagctaaatcttccagacattcttttctcgcaggttttaaaaattttctggttctgtatgtctgattctccagtataacttttttcatgaatcccagggatatttaaagtcttacctatatatagtttgttctattatatttaatttaaagttagtggtcttgattttttttactttccatgatctcaaacatcaaatattatgaattcaatttctacaccagatagataagcagaacaagta

SEQ ID NO: 35913 - DNA, 636 bp, Homo sapiens
tttcatagaagcatctatctgatcctgaagcaggaaagagaagattaaaaacaaaacaaaaaacagagcaagaaaagtctagttgaagctggtaacctaaaacttcagctggtcaccttccttaccatttaacatgacatagtaaaataaccacctttgtagaaaactgaatagttaagaagcttaggcaaattattaatgtaaaacaagcacagacttgctaaataatgataagctagtaaaactataactctctagcgctttcaatggagtaccccactgtcaccacctctcaaggtaaataacatgggaatcggtcaatattttaatctaggctttgcaaatttcaggaagttactttcatattcagtttctcctctgttgctataacaagcaaatagaaaaagtagcattctttgaatatttttgtacatggctcttgggaggactaaaaagtgtatagtacacagtgccagatgcaggctaaatgcgttccattcctagtaactgggttcgttctttagaagagaagaaacatttactactattagcattcggagaaaaaatatacggagtacagcaggtccttgaataacattgttttgtttgatgtcatttcatcataacgttttagag

SEQ ID NO: 35914 - DNA, 826 bp, Homo sapiens
ggaaaaaaatttaacttgtgtccagaatttgcagtagctatgtctgggcagatttactagtcagcaacatgtatgggtctgaatttggtaatgtttaataagtaaacacaaataaaatacttttctcctatgtttatttgaaaacaaacaaaaagttcttacttgtgtatttttgtaatgttgaggttgccccaatttataaatgtaaccatctcaccctccgaaaaagtctctgcatcagcaccttcaatgaaaactttgggactataccacacaggcttcaagccaacctcaggattctgattgataaagaaaagcagagtgtctgttgaaacaacaacttattgaacccagtatgcaaatttatacattcattctattctttaaccatacaaaagtcttctgtgttactaaactgttagcagttcattgctgtattaggaagaaaatgctttactctttctccatctatgtattttaacataaacatattcccaattctgttcttagcatttaaacaatacatactcggcctcaatagaaatcaatagtttgaattccagctctgtgacatcagatcagcaacctgaccactaatgttaatggaattagatgaggtagcttgcccctaagattacttccagcctacaagactcattgatttcacagctaagacagtatactttatcatttagtatctcttcaactagaatctgtttcctatccttagaatcccactgcttcgccgggcatggtggctcacacctgtaatcccagcactttgggtggccactgcttcgctgggcatggtggcttacgcctgtaa

SEQ ID NO: 35915 - DNA, 1623 bp, Homo sapiens
aagaccctgactctcaaaagaaaaaaaaaaatcggcaaactacttaaattcttctgtgtaatttcccaaagtaatgaaaaagcagaaattctaagcaatctaccaacaataatcttggtcatgtcgaaaaaataattccaaacagaacttaagatgtgtcagtaaggtgacagatccaatgtttactctgaaatttactacacatccacagggtgcagtaaaagcaaccgcatcagtctacagtgtacctgggtgttttccccaattaccctaccacatttaattaaaaataaatgcagcctcagttgaaatcctaaatgctaatatgctcgtctgggttatttcttctgaactcgataaaacgtaaggaaaatttgactcaagtgaactgaggatttctcctgagaggagggacaggacaggaaaggaggtaagaaaaggagttgggggaaaaatgctaaaagagaagcgacgactattggattttaagttttaaaatcttatttccacgagcaactctcgctctccgggggaaaaagggagaggtgagttgactgggagttcatccctctgagaaaaagatccgaagcggagtctcgtgttgtctagcccgggctcacactgcgcctccctccatgcccgggaaaaccatcttcaggagcagatgcacctgccggggacacggggcgaggggtgcggagcctcctccacgtacaattctggggcgaggggcaggtccaacatcccagatggtgaccaccactgcgcaaagccggggcgcagcgaccttccacgccctgcaccctccctggctgatgcaacccacacaggtcattggtctcggccccttacctagcggagggtctcctgaattcacggtcagagagagcgtcgccatctccaccagtccgctggtccacctgtcagtacgcctggctcgtgccagaactacggaggaccccgcgaaaggaagaagatgcaacgtgtgcgcgtacccgacgccgccgcagccttcgctccgcccctgcgccgcagctactgccgacaccgcgcacgccgcggtgcgacatcgtcgcgcgccgtcttcgtccccgcccgcaggttccagagcctgctacccctcctcttggccgccagggttagaacggcctgcgtggcctttcgtgctgcggtgggaaagacgctgaagtggacgggactttacgacacttcgtcaagtcagcaggtcgtaaaacagcaggttgtaaaaccatctttaagatgggataggcgtttatgtgaagcacgaaacaaaagcatgcactgtctttatgtaaaaagaaaagtcctggaagcatacacacgatagccatgattacgttgggaatgggagaagtttttctcgttgtttattttatacattcccccccgtttttttttttccaaaacaagaacgtattttcaagagttatttgcgtgttgaaaataatggttaaaggaaatataaaagactctttaaaaatcactgcaggccgggcgtggtggctcacgcctgtaatctcagcactttagaaggtgtaggcgggcggatcacctgaggtcaggagttcgagaccagtctggccagcatggtgaaaccccatc

SEQ ID NO: 35916 - DNA, 1275 bp, Homo sapiens
aggaggaaggaggaggaagaagaagaagaaaaaagaagaaagaagaagagtttgtcctttgtccagtttgcaagggtgtgagggaacatgttcctgagcattgttggcaaagcggtgaaccctcttaggagagttttgagaaccttaataaaagtataaagtacgtatcttttgaaccaacaattatatttacagagaaatccaaataaatcacgcaaacctataaatatgtagaaatggcagttggaagaatatttgctgtttaaagaaatttaattttaggtaccaagcagtttctaaatttgggtgcatcaacaaactcaatgtctaggtttgtcttgtttctacagtatatggctataaaaaccttccggatcacgaaaataaaagcacagataaacaattaaaatatcgacactcaagagtccaagtcggaagttagaatatctggagaagcaatctgattcacataaacctttttcgttttatttttttaacataaatcctatctacctggctcttgccctgaccggccggagagaaacggtgacaaacctggaacaacgttggaccaaagacacttcaggaggagcaaaagcgcgttatcgtagacccaggtccctcgttgtgtccagtaccgagctttggcactgtcaataagtcttttgagaaggatggcatccctacctcagctactgagcatgcgggaaactgcgcgcaagcgcacaacagcgatttcacactgcctctttagactcctgatccgcgggaaaattccacttgtccgtgttttctccaagctctccgtaggtgcaagtcacctgttgcattaaataaaagcgaaagatgtgtcaactttcaaagattggctaaaaaaagaaaaagaagaaggaaagaacacattaagccagcaacagtgtgttgaaacaaaaaaaagattggttttggtttcagctgtcttccagcccacttcgtagagttcactgttttaaaatgttctttgtattagtgataccactctgcggctatttaacttcgaacccctagcggtccgtggacaggcttcagcaggtccaccacacacacctccacctcccactccccacgcaataacacagcaactttatgcagaattgtgtcaaagatgcttgcttacctttttttttttttttttttttttttttttaagcgatagatagcttgctctgtcgcccagagtcgattacggctcactgctgccttcccacttctaggctcaagccatcctcccgcctc

SEQ ID NO: 35917 - DNA, 1577 bp, Homo sapiens
ttgctatatataccatactattctatgagtgggatataacagggatttcagagaatcttaaaaaaaggttagattgttttataatattgttaaaatctatgggaagtcattgatttggactgagctcctgcactaggctgtttacttgtaaggtctgcgttccaggaaatcaggagagatgatagccaaatccattaagccaaatggcgtctgcttttcgttccctgtttctgccttcttcaaccttttctgcctataaacctcaccctgcccccacagctcatcagagatcctttctattttgtagaaaggtttaggaatatttaataatagccaattagatctttaaaactcgatttgctgaaattttattattttacaatattttcactgaacttgtgctgcccacagtcgtagtcattacccaagtgtgcctgttgaggccttgccatgagtttagcccagattgagatgtgcagtatgtgcaaagtacatgtcaaatttcaaaggcttcgtatgaagagaatatgtaaaatatcttactttttattggctacatgttaaagtgatacaatcatagctatgttgtgttaaagtaaaaaaaaaaaaatatatatatatatatatttaaaaagcagggcacagcgattggactatgagccccacctttccccgcccccgtgaatctgagcccgccccccggcggctgcagggaggacccggaggtggctcagcctccgcggactccgggaaggcggtgcccaccgccccgcccccactacccgccgctccctccccgccccttccgctcccggagcgcgtgcgccctcttactcggctccccttggtttcctggggtcctgccccttcaagctggggcgggagcggaggaccccgctctcaggggttgccggaccatgcgttgggggctgcgccctcgcgggccgggcgcggccgccctggccactgcccgaagtttgtgggggacgccccgccttccctgcagcccgggatggcaaggggcgacgaagaggcttctggtgcggtcggtctccggggccagtaaccaccagccgaactcgaatagtggcagataccgggacacggtgctgctgccgcagacgagcttccccatgaagctgctgggccgccagcagccggacacggagctggagatccagcaggtacgggccccgcctcggcgcggggcctccagagaggcccgatccggccgcgggcaccgggcgctcgcaggcgccacacctctaggctccacgccggtgcgggtgggcgggggtgtgaccagattggtggaattcgtctgcttcgcacagattttgtgggctgaaaacctaagtgaagaaatctctagatgagcccctcctttgtaccaggttctggagcgggacattaaggggtcactagcgatgcccagttaccagcatgtatcgcacgtatgtcccatgtctaccgtaggcaaaacagatagactttgggcacttttccaatgccttgtaaaaagtaaattcacatgtccacatgtaaataaaaacccaggctgggcgcagtggctcacg

SEQ ID NO: 35918 - DNA, 1822 bp, Homo sapiens
aatgcaaaaataaaataaaataaaataaaataaaataaaacacaaggcacaccctttcaaaatgaaatgtacgaaattctgaaagcctatatagtatctaataaaccagccttggaactttatactacttggggaaaggcttattaaacactttgatgataaaaataggtggaaggcttcaataaagcaaattaacctttcttggctatgtcactgtaattttagttcctaatgtagattctcgttcacttcctgacaggttattttccttctttgagagagtcttacctcaagagtcactcatttgtcagccatttgttctcaaaatctgaatgggggaaatgcagatgaaagaagggagagtgtggggggatgatcaacactttcggaatgggaggtagcagaaggccacagtctccgggatggaagagagtgggagctggggcaataccagagtggagcgctgacatgtggcaaggaacggggaggatgcgatcacggagcaggcaacatgaaacagggaacgaccccaggctgaagatgggagacggagaagatactcagagagaaagctaggaatgtgtgggggtggggggagggagggagaaagcggtgataggcagaggcgagaggaaacaagacgcagtttttagccaggggtcagagggcctaaggagaaaagctgggtcgagaggaagacaacacaaatggggcttcaggacgaggtgggcagggtgtcatcccggagcggaggggaggcacggggagaactgggggtccagagggcagaggcaggaggcgcagagcgagtaggagactcgaacccgtgagcagaggccgcgggtgacgagggaaggaagggcgaggccagagaggcacttactggggtccctccgcaaggcgccgctgaggatctcctcccgcaggtgaggaaagaggaagtcccgggcggcctggaggtcctggaagtagcagaactggacaatggagcaggccatggctccagggaaccccactacggcactcaccttacctcaccacgccctgccccctccaccccactgcggccgccaccgagccccaatagctctagccaagcagaaggcggagaaaccaaaccggaagctgtcactgacacgggtccgctgtctccgagtactgcgcaggcgcaggctggcccaggcgcctagggcgcgggggcccgggtcacgtgactacggcgccgccgctgcaggtggagccaaagtcgacgtggaggcttggggcagatttttcagtcccagttgtgtgtctacgccgaggcatgaaccctttcattcattctggcttttagccagaggtgttctaattggacttgtccgcgcagccctttgacttattcagtcttattggtcccctactattggcacgatcctgatgtttcacagaaactaattcgttttaaactagtggcaggccagtgggggaccgtatcctgcaagagtcggattttgaaaagattaattgctcttccggagattagccccgtcaaggctggctttaaatgctcctactatagattcccatagtactacgcaagcccaatatagtacgtgttatagtgtattatacacttttgttttcattattcatttggtttttcattcatgcattcatccatccattcaacaaatatttgttagtcttttaaatgccagccacgcagggtgctgagcattagagaacaaaagagaagaagtaccttttcccagaaagctggaattctagtgactgatacaggcagtaagcaattaattacagtatttccctttaatccaagggg

SEQ ID NO: 35919 - DNA, 471 bp, Homo sapiens
gcatgatcctcaggtgagtctattgctgttctgtacaaagcagcctctgcttgaggttatggcttactgctcatagcagcagcaacaacagcagcaacagcagcagcacaataacagcaagctctgtgttaaaaggaatcacatcttagaatgatgtaatgtttccgggcgtgcgatggttgggtcacatgaggtctgacatcatctggagcaaggagcttccaggaatgctgccactagcaactttaccgggcagacactggagcacagctctttcaggagacagaaaagaaaacaaagcagaggaaaaccaaagctacgtgccagcttcaaaaatctgagcagtcaaatcacaaggggagagaaagagaactgtaatacttactccagagactctaaaccttcacttttcagcactcagacaaatttgtaattgaaaggaacttgggaggctttatctggttcaaactt

SEQ ID NO: 35920 - DNA, 1078 bp, Homo sapiens
tgagatctaccaattttcctagtcccaatttctctcagagaaagaaagcagggacccaaccatgagcactgtgggagaccacggcaagcggatcacctgccgtgatattagagacccaaccatgagcactgtgatgtgcttatctggcttcgtgctgctgggatgatagaacttatgggccgtttcaatggacggtcatgggaaaagtatacatacacacagacaaacatatgtctaagaagttcacagccattttcaagttagtcccaatattacttcacaaccataatacgtaaattcttaatcctatactcaaactataattgtgcttcattttctttttaatggatgactcatatttgccattctgaagctcttgattcataacaaagctaacgtaatcacttatttattttagatccaaagtaggtccaataaaataaataggtccaaaatagcgatactgtactaactataaagccactaagtagaattccagtgtttatttgtaaattgcctttgtccttagagtgcaggatacagagggtataggatacagagtacaattactttgatctagagtactctgaaataaatcctcactctgtgggttacagaagtctatccaaatgtttccgttcgttttccgtttgagttcttaggattttagctttcactttctgcttagagtctatatggggtcggaggcaaaagggtaagtcagttttatcacgaggacaaatagaaatatcctaacagttcaatgttcaaagtaccagaaaaaatttcatttattcactgtctgcctcacctccaatgacttattgcccagaagttacatgtacaagatttacatgtgcataaaaagctgtacaaatccattctgacttccaatattcctctgaatatatttaggagctacagttttgtgtattcaattaaattttaattatactacatccggtcctgagagctttatgatttatcttcttcctccctgcaccccagcttccagtttttcttttttctctgtcatatatgacagcattcccttccaattaacacagtatacatgtta

SEQ ID NO: 35921 - DNA, 1669 bp, Homo sapiens
acgtttcctaagactcacgataaagattttctgatcgtctctccaaaaccttgccaccaatttgcactcccacgaatcctgttaccgtgactatctcgccatgccctccctagcactgagcgtgatctctagtatcattttccatcgttgctaatttgaacatgagcagatggagtcctattatttggggtcattaatttcgtagcaagtgcagttgaaggtgttttgcatgttcattgtgcagtgcgcgccgtagtctgcacagtttggccggcaggtgggatgaagggcggggctggcggagcgcgcccgccgcctggtaggccagttcggagcggagccaacgctatcccgggccccacggccagggggcgctgcggcccccccaatcccccgccccgtccgggctggggcggaggagcgggcggggaccaaaggttggtgtctttgcgctcggaccttcgccagaggggccgggacatcatgacggtgggagccaggctccgaagcaaggcggagagcagcctcctgcgccgcgggccccgagggcgagggcgaaccgagggggacgaggaggcggccgccatcctggagcacctggagtacgcggacgaggcggaggcggcggccgagagcgggacgagcgcggcggacgagcggggcccggggacccggggcgcgcggagggtgcacttcgccctcctgcccgagcgctacgagccactggaggagccggcgccgagcgagcagcccaggaagaggtaccggaggaagctgaagaagtacggcaaggtaggggccctgcgccaccactgcccggggggcgcgggtgtggtgtcccgcgggggagcgggagccgggtccttaccatcgactcacccagtttctccgggctgcacctgcgacccctccgcccccgctcccattccctcgccggagggaagccgcgagttgcgagtcgtgatagaaacttaaatcgggggttgcgctgggtggtccctgctgtgcctgctattgcgctcctggcttcttaagaacattctcaaggggctcctaccgcggtggtttttatgtaagatcaggaatcagtttcctgattacagatgggaatactgaagcgttagcgcggcaggtgacttggagaaggtggcccagttggaaagaaagaaattgcaacccagtgtatttgttttccagtaacatcccctccaggatatcccactagttgagaaatgtttgggttactctcccaaatattcccaaggttatttcccgagcctgggagcgcaacaaatacataaataggcgctcgttgaatttttctcgtctagccaactatcagtgtactctggggccttcaaaacattctgccgtttgtctcggggagatggggttaggaagaatgaatatgggagaaaatgacagtttccttcgcggaaatcaaagcgcagatgcagttcccaggtgtctctgcatggaaacagtcgaagctgctgccggaagctctgctggcctggacaaggccacccagaataaagtcacagaagttactgtgtcctggccaaaggccacgggccccatctgatttattgtctatttatctgtgttgcccaatgccgtcttacacctgaagccattcagtctccatgcctgggagcttaggtttatc

SEQ ID NO: 35922 - DNA, 660 bp, Homo sapiens
tgagtgggaaagagagtgagagcctgtgcaggctgctgacgagccccaggcagcccacaagtttctcgtggggagatggaggcagagcccagggtaggggacagagctgctggggcctttccttgcctgggaatctgtcccaggaagagcttccccactcccatcccccaaattggaaaaaccgtacattcaagcctgtttggccctgaaattcttaagaatctggttaagaattaactcactaatgtcaaaagtcaaaacctcctaggggttgtcctgggagtcaggttcacgggtacagaagatgaatctcagatgtcactcaacctgagccgtcattctctgtggcagggctgccctgggtttctcttactcaatccctggagtgtaagcatttggattgtgtcacagattacctttttaccttttctttctttttttttctttttttcaatatcagtgcccacaccttactgagtattgagttttagagctttcgcttgatgtgcttgaccaagagacttcttttgtatccttttcttgtcctatgatgtaaataaaagcctcgatttatgtaatgtttctggtgtgaagggttcccagctcctcactttctagccttgcctgagggagattcctggagtccagccacactgagag

SEQ ID NO: 35923 - DNA, 452 bp, Homo sapiens
tgctgcaagcataaaataatctgttgttatcataataataatgataataacctgtttgctcttctgattggtcgggactggagccagccctcctagatagcctgggctttagagcgacggatgctagttggcagggaattatcaggagaccttgacctccaaggccagggagcggtggggcagtagcctcctcctcttaaggccctgctgaggcgctatgccatgaggtcatcccggacacctgggcaagttgtcctgcttagctgggaatttggagccatgctcagctgacacaggaggcagggagaaagaaagcatttagggctttcctttctgcctgttctcagccccaggaagcaacctgagcgctatactgggagtcagcaaggcaatcagccacatgtgacctcgaaccagtcacccacctagctgaatctgggcatcttctgcaa

SEQ ID NO: 35924 - DNA, 3499 bp, Homo sapiens
agaggtcttttgtgactaaacatgggtgaggagacacttcgtataatttttttcttgggcgagtagtagaacacagagaggttggagggaaacactagcaggacttgactttacagggaatttgttttggaaaggatgtccccaagcaaggagattctcttcccttcccaaaacactgtatcctgccatagccttcttccactctgagtggggcacgtgctgccaagatgaaaagcaaatctccctgtagcagccaaagaaaacaaacacagaaaaaaagcaaatgaaaactgggagaggaagcaggattctgcatcctggttgataacatcgtcaaaatcaaagccacaaagacacacagtcagggccactgatagagcttaggggccatccagggcagggttgaccagaggtgagaaggtccccggaccctcagtgtcatcagcccaagcccccataattttgtaactaatattgatggaataacagggcccttcccatatacaggttaagacccaacagatgcctcgggtaatttatttacttaacaaatacaaactgagattgactgtgcctgagatacacagggagaggcacaagtcccagccaaggaagggcatcttctaggtaggaagtttcctgggactgatctctcaacttatttcttctggcctgtcccttcctctcgccacatattcttggcaccctgtccttctccagggcctttccccctcctcctcctcccctaaaaaggaaagtgtgaggaagcagccatgggacctcccctttctggctgggtaggcgctcctaggtgagacgaggaactctgagtggctcggctattgcaggagcaagtgccttctcctacttcggacatgggattgctgtgaggaccgaatagccttctgcttccgacagagttttatagactgcaaagtattattcaaatggcagggaaaatagaaaagtgtggcattgtttctcccacacttttctatgacttctgacatttcaaatatagtattcctcctatttcaaaatactcttagtcccgactcttcactgagttgggtaacaggaggttgttccttaggacttactcaccagaaaggaaaggagggtttcctttcacttccggttagaaccagcttcaagcatttcctccccacccttccgtccaaaaccctgatcacagcgccccctcgtgtaaatccggagcaactgcccgggaaatcccccgtctaacccgggccaaagtcaaaagctgaaggagggggtccggttgaactctgggtgggcgggaactggggctcctacagggcggtgatgcctacaggggacaggctccagtcaggtccgtttgcttctcattatgctgaatatagacctcatattgccagatattttgattttaaaagacaagctagacacttcccgattaaaacaactgtgtaagccaaataaaacaagctatgggccaggctgtgggggggctgcaaaccgtcaggaagctttgatttcttgtggaaaagatgaaacattgatgatagttaatcccaacacattgacaaggagcgatcctggtaacagaagatatcttatatgatatataaaaatcacaactgtgaacatatttgacaaggagaaaaaaagaacaaacattcttaacatacttgcttctgagttttcccatctatatttgctggctatatactgattttcttaacttcctatattaaccagaataaaaccagaaagtttcagtaaaaattatggggaaaaaaactcaaaatagaaaaagaaattcccattaatttttttccccactatttggagataaaatccattttcctaaaggtacatattcaccaacttccagaatgccaatgcccatgaagggttttttgagctttctggggtagaaattcatagttcttaagacaacaggcaaagcctgcacaatttgttctcatcccgactgttagcctcacctcctgtcattccctttgctggtccgatcatcatacgaaactattttcctccaaaaacatttctttttttttttggaaaattgtatttctcgttgattaattgcttttactctcttttccatttttgaagctcctatgcatgcgttcttcgtatcccagtttacatgttacctcccactaaccttcaagcagaataagctgcccagcccacaacatgcactttcaaagctctaagcccatatctttaggaaaacaattactatttttcttataattatttgtttacacatgttttgatattgggaatctacctaaagctgtgttgtgtcaccgatgagccataaaactttaaaaatatctagtagattgtaggctgatagggaatatttgctgtttcgctctcccagagcctagtacaccaccagaatcattgcattggatttttaaataattttatttttgaattttttgaacaagtaatacttttcacagttcaaaattcaaaaagcttaagtatacaaatgaaaactttccattatattcatgtttccagccacccagtttctcttcttattggtacatgatgttactcacttatgtggaatgaagtccacattcctctgcgtgcagtataattttttctaccatctgtgcttgtttaccttcctagtacactcctctctcctggcctttgctctctactttccagccaggattgaagtggctatttcccgatatgctaccttagcgatttactggcttctcaagatcagacactctatcttcctctatcattattaaagactacatactagcatctagcgtatagcagggcgtgaatgaaagttgctcacgcttggacaacaactgacccttgtgcttgttctcctggagcccttttgagctcttagccgcctcagatgttgttctgggacacacgtttggccgttgaggcattacttccctgggtatcctgatgacaacccccaaacctaacctaatctgaatgtgtgtcttctccttgcaatctaaagaggtgcccgactaatacacaagtaactctccctgagctgagctggtttgttctcccaggtcaaatcctcacagggaggaagagaaacttgtgggcatgcagagatgttagtcactatgaatggataaaacggcacagggatacatattatacatgtgtataatatgtataaatgtttatatttatataatatgtaagatataatttatagtatgtattatatgtaaatatgtatatatgtaaatatatactataaattatgtatattctaaatatatatttataattaataattaattatactatataactatgtacttatataatatatttctattaaataaatgtaaatatataatatatatttatattaaataaatagaaatatattacatataaatctatatgtatataagtgtgtgtatatatattttttgttacaaggccctaaaggccctaaacaaggctacattga

SEQ ID NO: 35925 - DNA, 2177 bp, Homo sapiens
cttgcttgaatggaggtgttaaagatcaacaaagccagacattagttaaaccatgaaaacagattttactcagtaactacttacagtaggagaaaaagctgatcattctcatttgtgcatagcagaatgggcgttttaaagggtgaaggagagaatagggccgggaagctagcaggggatcaagtgaaaaatcatgaaggggcggtcagtattaatgacgggcagctgtgcctggagctggccgttatgaagctgggattctatcctcccacagagactgggggacagaggcctatcctccccatgactgcatttcagagcaatggctttcaggtccttgagaaagacacttctgaggtgtaggcgatacatatacatctcaaagcaacagagaaaggattcacagttgtaagcccttttaagaaaatatcctaaaaaagggaggtcaggggctttaccatcgggtgttggctagaataaacggggaattctcctggctgccttgagctttctcgggaagacattttactggggtcgaggttaggcggcagcggagggtgggggaccttgagtcatgctcctataagccacgctagagttcctcgtctttgagtgcagaggtttagactgtgtctttgtgtgcagaaagtcctgcagttctcacagcgacctgccagaaaaagtcgttcccaaatgtttgtaaatcctccgttgggcaacccgccttcacgttctgcggtgatcttgtcgagcgactaagcgtgcagtattagcagagaagggggtggcagagtgctggcgctgaaggtcatgttgcatgggtaactgtcgtgttgtaggggcggggaagagggaggagacactgaccaccccagaggccgccccattagctcgcttgctttgggcggcgtcgctcccacggcgcccagggtacccccgccgctgtctgcctgtcttcctccattaccgcgcaggcttggtcaccgcattaaggcattcccgctctccgcggaactgctctgccgtctcggcggtgaaagtgtgagagggtccgtagttgggtcaactttgactcctctcgcctgcccggatccttaagggcctcctcgtcctcccggtctccggtcgctgccgggtctgtgcgccggtccgcgcccgccctcgctctgccatgggcgcttccagctcctccgcgctggcccgcctcggcctcccagcccggccctggcccaggtggctcggggtcgccgcgctaggactggccgccgtggccctggggactgtcgcctggcgccgcgcatggcccaggcggcgccggcggctgcagcaggtgggcaccgtggcgaagctctggatctacccggtgaaatcctgcaaaggggtgccggtgagcgaggctgagtgcacggccatggggctgcgcagcggcaacctgcgggacaggtacagcacagcgcgggcgcggggcagcgcggagcctgcctgggatgaggagcgggggggcaggtggggcccgatctatctgggaaggactatagaggtttgccacctgagtttctgggctgactgttgggccgttggtcgtttatctgggaaggccaagttcatgccaggtttatttttggtaaagtaggtaggggcaatcccttgcccttccctagacgagagattcctcctctgtaacaggagggggtctgacctgtatctccaagtctccttagctctaaagtttgtgattctatcctagtataccaaagtagaaaaataaagctattggcactagaaagcagcaagaaagaaaccaagtgttgttcaaggacattggcttaggccttgctgggccttgttcctcacatttctccaatcctgggggtgccctggaggcctgatacactttgatgaaggatgagcaagtggcatggggactctggggcagaggtgatacttgccattaagggaatagtgtccccccttctcccataggcagagttgttcacagcctggaactttgggacttttgggcctgacacatagacatttcatacttaggattaagatgccttcttctttttttttttttttttttttgagacagaatctcacttcgtagctcaggctggagtgcagtggcactatctcagctcactgcaacctccatctcccaagttcaagcaatt

SEQ ID NO: 35926 - DNA, 1218 bp, Homo sapiens
tgtgaactcagatctgtgtgagtacagaacttatgctgtttgtatgaaaccagtgcatgatataaaactataaggattgcactgaggatcaggagactttgggcgaacttctacaaagttgtctcatttgcaaaagaatgaggttgaacttcatggtctctaaagccccattttaactacattttatttatcaaagcataattaacaatttgaaagcaggcttgctggagagaactctgtttgatagccgctgtcttctccacctgacaatttaataacactactacaaatgttcctagagttcagggaaaggcctcatttaatgaattccattctgaacctgtgtctttggaactaactgttccaaggagctgggattttcctctggaagtgctctgggtctcaaatttctaaaggtattttgttcaaagctcttagtatacttgtgaacacttggcttgagcaccctaagcattgagtgtttaaagtccacctggcagaatgctggcattcggtgcctggtgcagttgctgggagggcgtgcttgtcctccctgaccttggaaatctctgctctccttagcagccatatgtgagttgatcagttttatctctctaaacccttactgaagccagtcctttatttcttctgcacaaatgatgaactgttggagaaaggaatcccttaagtttattattgtccagggtgttattccctgcccaattcctgctgtttttctcctcccacactcagtagtagagttcctgctttccctcacttttcagtccttcctgctccccaggccagtttgtaattgagaaatgatatttttttctgttgttttgggctccacttacccgttgctgttggttgttcggggctctatagctcttttggggaatcggggctccaggcttctacactgatccctctaccacatactcatgttttacctgtgaattcaaggtgctggcttttagtgttgcagactaggttggggtaacttggttatgatgaaatctatgctccagacttatctcttctttcagatctggcagaatagaactagttattcattcactgggcatcattttgtgcacaagaggtgaaaaataatattgcccaggttgacagggaaatgagatggttggggtatgttacaaatggtaaccttttaacctgtgattgctgtatttgtcctgttccaaaattggactc

SEQ ID NO: 35927 - DNA, 753 bp, Homo sapiens
ttcaatttgagacaaacatgaagggaagaacatcaagaaaacttctccccactcttgatcagaatttccaggtgagcttacagagagtttaccttcactgctactagtcacccttctctttctggcttccttcccagttgataaagagcctctcttgggacctcagttaagaaaatatgataatggccctggtgagtgataatgagggcacagcctaggcagaggtaccaggggatggaaaagaaggtggatatgagaggtgtctcaaaagtgggatctctagggtgtatggaggattgaatatgggagatattgtggaggggggagccaggggtgactcccaggtagatggagatgcaagagaaaactggctggagaaacaaaagtgagaagtttgtttgggactaaatccaagtttcctggaattatagaagcggactttgttctgacccgcccctcacaatctgtgacatgtgcttatttcaggtgctggcgaggcgcctccccctaaggaaaactgtcccctgagcacctacagcacctggcagctatttttcaaattatcagataatacagagtgccgacatgtacgatggtttatactaggctcagtgcaaaagaccaaagcctctgattctgccatgagctaaggtttaaaatacaaggacctcagggaatttctctccatagcccctaaactacaagctccttgagggcaggggtttttatctgctttctttactgctgtttccc

SEQ ID NO: 35928 - DNA, 1756 bp, Homo sapiens
cccacctctacaaaaaaaaaaaaattaattaattaaaagtgaaaaaaaataaactgttaaatgaatttgtgctcccaagtccatttgtcattttattcctgtgctatgatgggcttacagaagtagcaaatcaggtagaacactgatttttctcgaacaatcctctggccacgcacattaaaaaaaaatccttcttattaaatgacgctaatgttgctgatttattcttccttaaattaggaagcccagtagttaaaggcctaatgcattaatctgtttacctggtaccatcacaaaactgtaactctttcaatgagtaggactctcttaaatattaatgtaaaatgaatattcaataggccaattaatcattaaaaattagcaaacctcagcatgaaattcaggccatcatttattgcaaaaacacagagtaataggagaatgtattgtgtaacatttactgtctgtggcctaaagtactttgtactttgtccgtgtagctcagaatattaaacgatttttaaaaggctgcttccttgggtcagtgtggtgtgcttgagttccgggaatgcagcaaaatgaagtttagaaataatgaaattgaccaatgcttcctatctctgtagttggccattgtggggtcagtgtttactgatctttgctcactgtcctgatgagataaacttgatatttttaatggaataacttgtttgtatcagtcctcactccacattatgaaagaattgtggagaagcttgcagaaaactcttggtatgttatctttcactcaggaagtgtttctccaggaaacttccagagagggagattttgaagctgaacagctgtggttggactctgagcctcactgcttactggctgtgtggattgggtcctcccagtcctatcctttccagctgttgagaaacacagtttttgtaaatcatgatcactagacttttcagtccccagaaactgagtttgggtgggttaggatttgagataacaagtccgttttctggtgtaagaacagcagtctctaccaggcttcagggatttcttgaagtagcggtaatgataacaatatacaaaaatagcagcaagaatcacgactcactgctattgaacacttactacgttacaggcaccgtgccaaaccctttacatgcattatctaattctagttccctttccagactgtgggtcacaacccattattgggttctaatatcagtgtagtgagtcctgactaacacttttaaaagaagtacaggaaagtatagggtggaataaaagatatcagagtaaactatatgtagaagggttaagaattgtcttgcaaaactctcttatgtgtacacatgggagagtattaggaaacagtgtaaaatgtggttttcactgtgggtcatggctgaaaatgtctgatagccattgaggcgggtagtgttttgatccttgtttttcagataaggaaactgagactcagagaagttgagtaacttgctctcgaggtcgcatagccagcgtgtggccaagtgaggacttgcactgtggctggccgtcaaaagtccctgaatatcagccaactacacaactctgccaccttgttaaagccattttcaggtcatttggcaaacctgtatagggccccagtcactgtggatgggctggggggtcatgggtgtcaggggctgccctctgaaagaagcaggacaattgtgctcagtaaaaaatggagaagaagaacaggtatcag

SEQ ID NO: 35929 - DNA, 1750 bp, Homo sapiens
tgatgcccctgttacagtagccttgaatagtcttccttacctttttaacaagcgtctgagggaatttttttcctttaatagcttggtacatcaagcaggagcctgactcctaaaccacgctgttcggggtatgctaacattgttgtctggaatataacctgatttggaagtgacaagtgactgaggtgagtgcctgcaggaccaagtgactttccctcccgccggaagcagcccggggaccttgtgcagcgttaaactgagccaaggcccttgccaatgcagctccagctcgaggctccccgccggtaggagtcgagcgtccccgagccgtgtagaaggcactctcagacgcccattgccgctcccaggggccgccgggagaactctggccttggctcgccggcgcggagggcctggtagcatcctccttcatcagacccccactctctggaagctcctagcccctgggcagactgaggggagggcggcggcagcagagagctggacactgcacaggccaggcagggcctaccagctctccactattcccaggagaggctgctgccagctgtctgatttctaatttcaaaatcacgctttgtcctgcaaatgttgtatattgtttattttaggtcaaataaccccataaatacgtaagtaaataaattggtcacttgcagcgatcgtggggtgggggagggcacagcgccctgcagcgcaggcgacggaaggttgcagaggcagtggggcgccgaccaagtggaagctgagccaccacctcccactccccgcgccgccccccagaaggacgcactgctctgattggcccggaagggttcaggagctgcccagcctttgggctcggggccaaaggccgcaccttcccccagcggccccgggcgaccagcgcgctccggccttgccgccgccacctcgcggagaagccagccatgggcgccgccggctcctccgcgctggcgcgctttgtcctcctcgcgcaatcccggcccgggtggctcggggttgccgcgctgggcctgaccgcggtggcgctgggggctgtcgcctggcgccgcgcatggcccacgcggcgccggcggctgctgcagcaggtgggcacagtggcgcagctctggatctaccctgtgaaatcctgcaagggggtgccggtgagcgaggcggagtgcacggccatggggctgcgcagcggcaacctgcgggacaggtacggccaagcgccggcgcggggcagcgctgatccggctcggggcaagggggtgagaagggaggagcgcaggggaggtctgcagagtctgctaacaggtccttcctcctattacaaagaaactgggagttgggtgagacaaggccaaagagaaaaaggaaccctcaccccccagcatcagaccccagggctctgggactctgagcgcgtggacccgttttcccggggtgggcggatctccacctcccactggctctttggcgtcatgtgctcctgctgaggtgtggtatcgctcccaggtgtctgccagtgagcaaacttcttaatctccatttagtggaggcggctagcttgaagaggttggttcccagtcgctattttgagtgactttcttgagatcttggagaaagctgaactgtagagtccagccctccaagagcgcaccaaggcggagctcataatagtaatgacagcagttcaacgaataccttcgggcgcggtggctcacgcttgtaatcccagcac

SEQ ID NO: 35930 - DNA, 725 bp, Homo sapiens
gcgcacctgtaatcccagctactcaggaggctgaggcaggagaatagcttgaacccgggaggtggaagttgcagtgagccaggattgcgccactgcactccagcctgggcaacagagcgagactccgaatcaaaaaaagaaagaaagaaagaaagagttgtgggggcattgcagatgctattttccccaattctctccaatgctctcaagcactcttgtggataaagaagttgaattcagagccacacagcagcagaaccaggactcttattttctttagcacactggggctttgtaaagagtgactttgttaatgtcctgtctgggttctgagagctgcgtggattcctggggttcagcgaaggctgcaaaacccgggagccggcagctttgtcctctttagggtctggcttcaggccagcctcgggtcttattgtgaggctgcacttgaaactcctttccagagcagccctcgcagttcagcaagtaacacaggactaatgggagctgtaacctttctcctaccagctccccagacagagggcaattcatgacatagttgaaaggtgagtgacgtatgcatctttgcttcaggaaggaagccaagaatcctaaatattccatgttttgggccaggcgcggtggctcacttctgtaatcccagcactttgggaggccgaggcgggtggatcacaaggtcaggagattgagaccatcctggctaa

SEQ ID NO: 35931 - DNA, 427 bp, Homo sapiens
tcagccatgaaaaggaatgaagttctgatatgtgctacaacatggatggccctggaaaacataatactaattgaaataagctagacacaaaaggacaaatattgcataattccaattatatgaaatgtctagtggataaatttatagagacaaagtggattagatgttactgggggctgggggaaggggaaaacgaggagttattgcttaattggtacagagtttctgtttggggtgatgaaaaggttttgcaaatagtggtgatggttgcacaacactgtgaatgtactttactgccactgaattgcacacttcaaaatggttaaaatcacatttaaaaaattccattctctgttgatggacactcgggctgttactactttttcagcattttgattaaagctgcaataaacattgatacacaaat

SEQ ID NO: 35932 - DNA, 2400 bp, Homo sapiens
tatagcacagttactgcatgggtactcaaaaaaaaaaacgttttgctggatgcacgaatactgtgacagtaatgacatttgccagcagccacttgtgtcaggctgtgctctgctgagctaaacacagaatatatagcagtggtaactccatgggaggaggcagactctccaccctagtctggctctgtcacctcctaattgtgtgacattggcaagtcgcttaggctcttcaagtcacagtttctttattggtataaactggacttgtaatacctcttctggtagactggaataaggcaagatataggatttttatagatgataaaatactgtacacagtgaccatgtaagctgcggtcattgagagtcactgtttataaacttgacaccttctgagaggaggagaagcctgaccacacttcttcccatactcagaggctgctttaaatgaaacctaacacgaacttgcccagcggccagcctctggaggttcagtgtggcacctctcccaggaacgttcacgatgccgtctaattcttcaatttaatttaatttaatttaatttatttatttattgagacagagtcttactctgtcacccaggctggagcacagtggagcaatctcagctctctgcaacctccgcctcctgggttcaagcaatcctcatgcctcagtctcccaagtagctgggattacaggcatgcgcctctacgcctggctaatttttgtatttttagtagagacagggtttcaccatgttgaccagtctggtctcaaagtcctgacctcaggtgacgtgtctgccttggcttcccaaagtattgggattaacaatgctgtttaattcttaacctggccatagagataggcagtcatgaggcctcaggaatggcttctgccgctggtgacttatggtcccatgaacgccagtggtgggatcgggcagtgaccagatactctgcctggagtcatggcctggacgttgaccagtgaatgcgtaaaccaggcagggtaaacaaggatcagccctctgtggtgcacagcactttaacggtaacaaactgtttccatttacattgcaccttgtaaataatagagacctcggttttaagctaaataaagtgtcttgggcttcctgctcattagaatagttatgtttcatgttcatttaaggagaaagtgcactaaggaagattttaaatgagttttaatttattaataccaacaggaatacatatatgaaaagtcacatatttaaaaaatcgtagaagacccatgtatgaaagaatactgtttcagagtgttgaacttagtgtgcgcacgaattcatagactgcttgcaatacctcttagtgccacaaggcgccgctagtgacctcgttgagtcttcccacagcctggaggcgggcttccgcagcagtagcaagaggaggtggtgcaggaggcggtgagagcccgcagcaaaaccaggcagctgtaggaaagccctggcaggccggcccaccgagaaccccttttccactcccatagctcttcccgcttctactcctagacagcggagtggaccgccacctgtgagccggtgaccacacctgcactttcacaaagcagctccctcaccccgacctgtgcagtttagggaggctgtgccgagaggggcagccgctctttacggtcctctgctcctcattacctggtgggggagtgagtgtgtctgtgcttggttggcaggaagggataggtgaaaaatgtaagtggctagaaattggtgtaggtgactaaattgtgagacccctcggttcttctcaggcctgtgggtgtactcaggaggatgtcgacgaccagggttacatcctgggtgggaagagtccactagactctgaagtcagccaggcctgggctctggccccagctggatcctttagatctgtgatctcaggcaagtctgttactccccctgagacttaactgtaaaatgaagaaaaggcaaattcccacataagcaggttgtaaggattaaaaaagagaacatgtgtaaagttccttataaactatccatgtgtgatgcgcagaactccaactctcaatttctccccaagataatgagagtctggactcttagactgcagagcttggcagcaacggaaacacccatacaagcagctgatgtgtcccctgttcctgaagaggtcaccctctgacagatagatctcagaatgtcatgaatgttgcatgctgaaagaggagagccaggctaggagagatgcctggtttgtcaggtccaagggcattgcagaaacctgattacagagagaggaaatactcttggcaaggcagggaagcctgcatcagcagcttgttattttcattcatccattcatttgttcattcattgtt

SEQ ID NO: 35933 - DNA, 699 bp, Homo sapiens
tttcactcctcttcccgcctgagtcctcaacaaaagggacatttccccttcttttaaagacttcctgataaaaggagtcttcatggacacccccataagcataaggcagcacaagggagggagctccggtggtggcggagttgggacactcaggcacatggttgcagaggcgcaaaggtgtgaccgttctaggtgtatcttccacagggccctcgtggaagggaccaactgcatcccctaaaactgccagggcagcttcccatgatgctgggctgagtccagatttctagatttggctggtgcaagctcctggtttgctagaaaattgctgatgaaataggagggttgtcaggccatgggacaaatctgccgctgtcctcaggggtcaccctgcctggctttgtgtgctgacagtcatgaccctttggacgtctgcatgtttgtctctgggtgagtggctgtgttggcatttagttttcatttgctatatgatgagcaaagaaccacaaagaagtcctaaacacacctggtgctaaaaagtgattacccttgcccttgttttaggacttacagctactttttctttctgtagcttccaaatattttattttttataattaagaaagtaaatttatattaaatttcttttctgagacagagtctcgctctgtcacccaggctggagtgctatggtgcaat

SEQ ID NO: 35934 - DNA, 1215 bp, Homo sapiens
gtgagagtgaagggctgctcatcaagaggcttgcttagttgttgagtgtaggtaagacacttaaagagagtcacattcttgggagaaactaagattcttcccttgctgtaagaggacaccataagaagccaagggttggctctgaacagagggtcaagccaaccaggccctgctgttatcacctacggaaatcctgtgtggcagtaaatacagtcctcagcaaagcctggagaagagattacagggggcacagaggggctggggatgctaatgtggaggttattggccagatagtggccaggaaaccagagactagggggggttcagttggaggagcataggcggaaatgggagagaaaaataaataaatgagataagcaacttcatttgcttcctcccttattactcttttgttttgtgtttaggactctggtctcccctgaggttgatctcttcttctggggacaacagcctgcagggtgattttgaaaagcaggctctgacttctacttccttgtcctgtactcaccccacctggtgtaattcaccgtaatgcagtgaacttccacatggctgctgggcatgcttcccaaagccagcccctgggcagggtttcccttaatttagacccctgtccctacctctccaagtgcaaagtgtacaaggctacacgcccagctgccccccacccccatacacacactggagagaccaaatgtttgagatcactgttgggtagctgggtcaagagagcttcataacaatgttgttggcatgtggagagcttttctttttcttggatcccaactggaaattatcagcttcgccccatgctgacatgcgaatgtccaggcctgcctttctgctgcagggcaatgctccaggttacaacatcgacaccaagcagtttgttgagaaaactttggacctcatgagctgggcaagagcggcctggcaggtggtaggagagcagcctgtccatgcctcagctgtggctccactggctctgtgactgtgcagattttctaacttttgaagacctctgtttggatatccataaaataggtaagatggtgctaatacctacctgtgatgttgtgaagatttaatagcataatacttaaaagcactttgcatacattagcaaagtgcctaaatattagttatttggcggaggctattaaccagtgtgctatgaggtgcaaagtaagttgt

SEQ ID NO: 35935 - DNA, 805 bp, Homo sapiens
ggttaactgggaagaactgaaaaggaaagcaaacagagtgagatctcagctgtcaggaaaggtaggtagtcatgtgcacagagcaggccattgccgcatgcagaaactgggatctcctgctaactatagagtttgctcaagcaattatggaggctgagaagtttcatgatctgctgtctacatgctggagacccaggagagctgatggtgtagttccagtttgagatggaaggcctgagaatcaggagaactgatggtgtaaattccagtcccagtgcaggagaataccaatatctcagcttgaaaacaggtagagagagtaaattctccttactcagctttttgttctatgtaggcctccaatggattggatgaggcctactacccacactggggagagaaatctgctttactcagtctgccaactcaaatgttaatgtcatccagaaacaccctcatagacacacccagaatcatgtttatctgggcatcccatggccaagtcaagttgacacaaaaattaaacattaacaatgagcaaggagcctagtggctaaaaatgcagcctcaaatccaatgtgccctacttactgtgaccttaggtaagttacttaaccattctaagcctcccttacccccaagtaaaatggaaataatgatagcaccttcctgagcttgtttttagaagcacatgagagagggtcaggtccagtggctcatgcctgtaatcccagcactttgggaggctaagatgggaggatcgcttgatgccaggagtttgagaccagcctgggcaacacagtga

SEQ ID NO: 35936 - DNA, 3607 bp, Homo sapiens
ttcgtggtttcattattcgtattattttattttcttcctgaaaatgtgcaagaacagctcatctgggtggcctgtggtttgtttgggagaggggtggggaaattcattctgactataatttaaagagaagaaattcttaaaatagatatgtcgatgttgcacaaaacctccaccaccactaccctgcgttctaaagacccaaggcacgaatggaagacgttgaccaccacgcagctcctcctgcaaccaggcccaaggggttcctggggaagctgtcacagaattgaaagcagtattgaaccccacggaaatctgctcttgtgggcacttgcaaaacaacgaaccccacgtgatccggagatgtggtggaggggtgaggctaacatttcctacaacctcctgcaaaggatggaagcgcgtgccgctctcccgggtttcgggaggcagcctgttttgtagcctctgaggctccggggaaaggtttggctgcgtctaagagagacgtttggagccatccgtcttattttgtttgaaaagtcactcgttcaatttgtcactgtgtgacagctcagaataaaaccaatttgcggccgcccctcctcctcgcttcccggaggatctcctgggaggcacgaggcggacgcggtgctgagttgggccgggactcagggcggcaacatttgggcaagggcccaggaaagatgaggggctttgccgaggacacggactcctggaataaaagcagaatgaggtcaagagaagggaagcaaaggggccaaagcgcgctccgctctccaccgggaggcgggctttgcagagccctaaagagtgagattaccgtcccttccccacgcccccaactcgccccgggtgacaagcgcttcaggaaagctcctgtgatcaaccctccttgccccgtggcggttcggagctgcagaagttagaagagagtcagagccctccggagcggctgcctggcccctacgcagagtagcaagaagcactgcgatgtgcgctactaagcccacgcggccgcagcaaaaactttggcgtggccggggcgtggctagggtccggccaggcccccttgttcctaattcccctccactccccgctcccattggtcacgaggatgaccaatgagcgctcggatcgaggtcctaccccgggcctgactcgaaagctcctgccaaaactttgggagtttttagagacgagtttttttttttttctattacttttccccccccctaactaacggactattattgttgttgttttaaatttagctcttagggcttagctatttgggttttcttgcggtgtccggctcccgtctccctggctcccccgcccgccctgcggccccagcgcccctcgctctcatccagcccgcgaggagtgcgggcgccgcgccgcctttaaagcgaggccagggagcgaggcggtgaccggccgagatccggccctcgcctcctccctcggtggcgctagggctcccggcctctcttcctcagtgcgggcggagaagcgaaagcggatcgtcctcggctgccgccgccttctccgggactcgcgcgcccctccccgcgcgcccacccacccagtccggctggactgcggcagccgcgcggctcaccccggcaggatgttcgcagccgggctggctcccttctacgcctccaacttcagcctctggtcggccgcttactgctcctcggccggcccaggcggctgctccttccccttggaccccgccgccgtcaaaaagccctccttctgcatcgcagacattctgcacgccggcgtgggggatctgggggcggccccggagggcctggcaggggcctcggccgccgccctcaccgcgcacttgggctcggttcacccgcacgcctctttccaagcggcggccagatccccgcttcgacccaccccagtggtggcgccctccgaagtcccggctggcttcccgcagcggctgtctccgctctcagccgcctaccaccaccatcacccgcaacaacaacagcagcagcaacagccgcagcagcaacagcctccgcctccgccccgggctggcgccctgcagcccccggcctcggggacgcgagtggttccgaacccccaccacagtggctctgccccggccccctccagcaaagacctcaaatttggaattgaccgcattttatctgcagaatttgacccaaaagtcaaagaaggcaacacgctgagaggtaggtcttgggcgggaggctgcaggcctctgaccactgacccactccccggaccccgggctggcttggggtgcctttgagtgtttttacaattaaggacaaatcggtaaaacgggagagaagaaaacgaattgtaagaaaactacaaaacattaggtctaaaactcacctgttctatgtaaaacaaacaaaaaatgactccagggattctttaaaaacacgtcttagaatcaatatttataaaagtggttggtgtaattatctgctaacatgactttgatctctttaataatgtatctagagacagaattatattttctgacagctaaagcatttttgggaaacactttcgcacttatctgatttctagtaaaaatttcacccaggaaatgtaaataataaacaaaaccgcctagatgagcgggcagagtggggccaccttggggcggaggttttgcgtctgtggcgttcttggaagacacgtgaaagtgaggccgtaagccgatttatgtaaagcctttacttactatatacatgcatatggacgtgagggacacacaggaacttttcgtgcgtcgctccttggcaactgttgggagagagaggtttcagcgcctagacgggttctctcttgacttcgctcaataaaagtgaatccagggcaaggggaaggggaggaacaaatcagcggagagtgtgagtgtgcccgagatgtaacctgctatccttttcccttgtccccagatctcacttccctgctaaccggtgggcggcccgccggggtgcacctctcaggcctgcagccctcggccggccagttcttcgcatctctagatcccattaacgaggcttctgcaatcctgagtcccttaaactcgaacccaagaaattcagttcagcatcagttccaagacacgtttccaggtacggaaaaactccagagtactgcctaacgggcgagccgactaacagtcagaaatctcaggactgacgcctccagggctgccacggtgtcgcaatctcacaattggggcgggaggctacggagtcaggagagagaaaccgaaagatttctcagcgagctagcgctcgcttcggatggttccccttgaaaaggggtagaggcgcctggagatcccagaaagtgtgtgcgtggacggtggggtggggggctttctcgaagtcttttcgccccagagggcttgaaaaatgcagcatcaatgttgcttattagcatatacacattttgggatgacctcaaacacttgtgcttggcgagtttatgtctgggtgcctggacacatgcgggaataaacacacacacacacacacacacacacacacacacacacacacacacacacgag

SEQ ID NO: 35937 - DNA, 1716 bp, Homo sapiens
gtaaaaggtagagggactgagtcccctcctccagtttcaaggaaagatcatgcacatgcatatttagctccaagcatggaaattggatggtgggcccctcaggctttctggcaaccacccctctactatcgaggaagaagcaacagctgccccagctatatcacagggaaagatgacagcctggattaggccatgcatggaggccagaaaccgttgagggagcaactccagagagacatgacagaaccacagacacatggagtgccccaaattgaagcagatggaattgctgataaatgagttgaaatggtagaggtccctacagtggatttacttgagagctactccatggaggggcaatttcaggggggccccggctgcctttagatgttaatcagaggtattcatatgttctgtcattcacctttcaaaggaaggtgtcaaatgtcttgatgaaatgcctcccatgcttacctagacacggggaatcagccactctgttgacaaatgactcagggcgaatcaatagaatgagggtcaggcttggctagactcatggtcagagggcaagagtaattatgtcataagaagtctatggggcagaacccagccaaggccatggtccacttttgaaggtaaaatctggaatcaagggattgttataagggatgggagtataggagtgaagaactcaaaaggaccagactctgttatagcagccagctcttgccaaatccacttattgcaacagtcccaccaccatgtatagatgcctgggtatagtaagtagcagaactgcctaataccatcagtgcctgcaaaatacaagtgatctagcagtgtgggaggttttctgggagaaatgggccacctaggtcatgcttagctgcagggaggggtaagccctgtggggaaacaaatgatgggtgagttcacattattaaataactgggctgaatttaaggaggagggaaaaatattactgcagaaaccaggttgattttgaagtctgctactggcagttgccacatgcctgtgacatctctcatgcacctcagaatagactctcccctctggaaggcaccatcgtgcatcctctagatttggggagatagatttctttatgttgctgataggaggaggaagaagaagctgctgtgagggaggaggtatttactttggcaggcggctgatgctagaaatgcctggggccatgtacaaatagttggctggtgctgccaggccctccactgtgggttactcatctctccctgctttaatcctttcctttcctccaaaaactgcccagttgacttctttcccactctagggctatcctggatgcctcttttaacctgatgtcacctggaacatgtggaagtgcccaatgtgactatctagggctctgggctctgagtcctgtgagggttaatccttcatgcctcattccttcatgattttctcttctttttgttggagttagagaatcagggtgagctctccctagaaaactattgtgcatggccttgtttatcttggtcagccttgtgtttgaggcaccatacccagttcagttacccaggctgttcaacatatggaagcatgctcagagtgtggtgtaaggtgtgggataacttggatccccataaacctatgacaggtggagatattgtggccaaagtcggccctgccaagatggtgctagactgaacgaca

SEQ ID NO: 35938 - DNA, 1281 bp, Homo sapiens
atcatttccctgattgactcctctactggcacataagctttgccttattcctgctccagaaaaccgacttgtaagtatggttccatggtcaacaatcttgagtgtagatggctcagtgaaaaactgccctagctagtagagaaaccctaaagtattctacgtggcattgatgggctggaggtggagaatgccatggtgctggatacaaggcagttgcacagttccaggatgggtaattgccatttggatgcactagtctggttctgtgcagcttccaagcacaacctcaagactcatagggtttggggtagagagaaggaaagaccttttagtgtggcaaatgatcaactccctaagccttcgctttgtcagtgcctagaatgatctttgacctgttgtagctgcttagaaaatattggctgagttgaacaggatatatgtggactttgagaggcagatgtaaccctagccttttcctctccatggctttggagcactatttttctttaaatgaaaaaaaatggagctgtacaaaataactctaagaataaaatcaccgatgaagagcaggttggccttgttttagtaatggaaggattcccaaaaagtagggtacaactcaaagttcatctttgtcctgctttactattttaattcctctttatgttcatttctaataactctctgatgggctgatatctcaaactcttctcactcaaatattcctacctctcttaatttgtaaaacatgttatcagagaaattctttgataaagtgacaattccttttaaataataaatctgaatactgataaagaactcttacaaaagcctgtgaccacagaggaggtgaaaacttgagttcaggacttctagtaagccacagaccccaggtcactatgtcttgtggtatgcaaaacatgctaaggatgactctacccagggcatggaaagcggcttcagatagagttagctctttaccagtgctgtggattgagttgtttctccccgaactcctagttgaagctttaaaccctattgtgactatatttggaaaaagagcctttaagaaagtgattaaggttgagagaggtcataagggccctaatctgataggattaatgtccttataaaaaagatactggagagctgtgctctctctctctctacccatttctttccctgccatgtgagtacactgcaagccaggaagagggccgtcaccaggaactgaatcagctggcacccggatcttggatgccccagccttcaggactgtga

SEQ ID NO: 35939 - DNA, 4784 bp, Homo sapiens
ttgaaagtccagtcttaatcagttccacctgcctgaaatatcttcatcttcttggtctatctagtgtcaccctatccaggtgacactatatgcgctttaataaaatatctcccaattattccagcctattggactttttttttggtaatactcttgctattttttaggtgtgtgttgtgggccagggctagggcaaggggcagggagaaagggagagaagttgttttctgaagaggactattatggtatattccaggctggcagctttttctggaccaaatatctaccttccttgctgaggaaagcagatctagacttctccttaagcaggggcactgcatgccaagtggccctctggttctggttgattggaatatcagtagccaggatggacagttcaaaagcagagacctcagagagagccagtgagaggaactctgcccacaaatgggtcctggcaatgacgaagaccagtctaattttccttcttgggagtttattgtgaggagcagagccagccagatgatcatatgatgagagacaagactgagcacaggtgtcagactgatcgcccctcactaagtaacaaagccaccaagctccagagctaaagaacatctgacaatcctgtctgtccggagagtcccttgcataagacagactttccagtttacttttggtaagaccaggttcctcagttccagtgggatttctccctcctcttattactagctctataatacccaacctctgccccattttttaaggtagggaagccattaaatgattcagatgtcaaattgctactgagcaggaatgtctgcctttctgcaccttggcagagctgagcatgtagtatattccagtaaggggtggttgattaattgattgagtttaacaagatatcagagtcttgattcttcttcctgtgtctcccatggaaaatgtaacctagacctgggcatataataggtgcagcacatgtacagaatgcttgtcgcctaaaggactggctctgattatccactttcatttcttagcacatgctactctagattggttgaaggaatataggaaattcaatgagctcttctggtcccaatttatgtctttaaaataatattgataacaccaaggccttgtcaaccttgacaggtgagattagaatcaagcttttaaaggctcccctctcccctgcaagtagggtcagtttagcagtaaaaaagaagtttcatgttattttactaatttgagcctcataggaaccctgaaaaatactctttgtaattattctcatttttgagatgaggaaactgaggctcagaaaaattaaggaatgtggtcaaagtatcaagcacacacacacacacacacacacacacacacacacacacacacacatatacacacagagtaaataaatggcaaaggtgagatttggaatctaatcttaataccagagctactcttttaggtttctggaaaactgaaaagtcagaaagagcaaaaatgtggttctcctcagagggaaggaaagataaatttgaggcttccattcttctgtggattgaatgcctcctgggctgaggagatagcagtagaatagtttggtaccccattgtggcaatagtctgaattgacgttcacaaattacttgaaggccagatactggacttcatcataaaatgcaaagcattataacttgagcctctttacttctcagcacatcaattaagggtaagaaatagggtaagtcagcaccctattagaaacttctcagaagttccaataaatagcaaatgaaaaaaccaaccaaccatccaaattactccccaaattgtccaactagaattgaagttctaaaagagttctaggggcatcactttcttggaacattacaggttttccagcattgcaaggtaattcaaagtagatcatagaggaaaattaacaagacccatttcaattttagagagaccagaccatgaggcaggaaagtattagcatcaggggcccttgaaaccaggttctttgttgaaggggttggggggaaggtcaccaaaacatggctgcacttttctccaccttgactatgttactaggggagctagaaaataatgagatggcttgggaatatccaaagaacggtagcagaacttgtgggttctagaagtgaatgggcctgtctgcctgaggtttgcttggctcttgctgtagctgcagcagcagctcattcaccggaacagaaggttgctgactgtttctccttttgtccagaattgggtgaactttgactcaatcaacagtggttggcaagtatgagcaatgctttcatgaagatgtctgacttaactaaaattagtgcaatgtaatcatgacttcatgttgcccaatataatctgtcttgtgaagagagggggtgatgtttttcaaatagtttttagcagcatcatcaaaaagaacttgtaatcatctctcaatcatccctcctgagagagaacagcagagtctggatgacacacaagccccaaatcccttacatttgtttttgattaatgtttgcatttcattggaatgcaggtgttcctaatgttctgggaattcagatcatttcaaactcaactggagtttgaaggcacaaacaagactggaatcatctctagtggccagggaaggttgaatagttccctccagagtgagtgggtgtggaatccttcccagctgttctgactgaggcaaagacagcacattacctgacatggccatatgaagcaccacccatacacagaatggtttgcacctcttcttttgaaaagaatggctaaatgtctgctttaatgaccctgtaccagactatagggagactaaagcataaagatgtggcgaatttttttatggtaatgtcgaggaagcctaacaaatttttagttagataactttggttttgaatgacatctcagacacttcttagctacgtaatctcggagagattttggaaggtctttgagtcagtttccacatgcgtaaaaaatgtataatggtgcttcctttggttattatgcacaataaaggagatattgtagtaggtactctatatgtggttatcatgctattactaagaagtgcttgaacctggcttactttattttgttaataggaagttggaactaagataggatataaactagcctatgaatatttgagcacaaacgtgaaaacttacatcattatcctggagaaacagattatcctctactaaggaggtctagaaaaaacagtatacaactcttaacgtttgagttaagctgacattcatatctgaaattgtcatccaccaaagtgcaaagcagcaagtgggagctgaaaatattttactcaattatatgttttaacgtattctttgaaggggtaatggaggatggtggacccacatgtagtgagcaatcattcttaaggtacagtgtattcagtggatgagtccctttggataggaagttcagttgataagctccgttggtccttgatagtcctcagcttttaagtctaatgagtctctacataaccaagtggatgtatcatatttttctatcacctggtagtcatttggtgaagactttggagggatgtaaatagaacagcttgatcttggaaacccaggaagagcccagcatcctggggatttgtcccagcatgcttcatgggagatattacacatgaagcccaaaccaccttccatcacaggctaaaatagagatctgcttagttttatgtctgagacctagattcaatgttatagtccatctatgtggtccaccttctccctgccaaaagggtagtttttgcctctttgtatgctctggtgtctttccaatcaaatcagcagtcttattattcatactctacttccttccatttctttctcattgcacttccaggaccaggagacaagcatagagatagatattggagacaaagatataaatgtccttgtttttgtcctcaaggagttcttggtcctgagtagggtcagcatgtgctaatagtgtgaaaaataaaactacagatatctggacatgatacagagacaggagcacacagaaagggtgttaatttctgataagccaaggtcaagaataatggaaatgagcaaagcctttagagcagaaggagcacctgaattgaatttattcattcaatattcaacagatgtttactgagcagttattatatatcaggtctgttctaggtactagggatacagcagtgaataaacaaataacacataggtaaagatttagtatgctatatggtattaaggacaatggagaaaaataaaggataaaagagaggtagaaagtccagcagtgggataaatgaaatattagaggatgaatattgatctttattgttagtccactcaggctgctacaacacagtactggacatttatttcttacaatcctggaggctggaaagtttaagatcaagatgccagctgatttggttcttggtgagagctctcctcttggcttgcagactgctgcatttttcgagtgctctgagagagagagagagagagagagaaagagagagagagagaaatagagtgagatagggcacgagagagctccctggtttttctttttataagggcactaattccattatgaaggccccacccttataaccttatctaaagctaattacctcccaaagaccccatctgttaataccataaaattctgagttaggacttcaacataggaattttggagtggggacac

SEQ ID NO: 35940 - DNA, 2088 bp, Homo sapiens
gataaggtgaggtgtgtgttgaatggggctcagggatctgggaatgataatttcccaaggagaatacgggcgctggtacagaagaagggagaatggttcggttgttgggtggtcaaaacacagctgatcatcagagtgtctttttctcctatacttgtatgttgagatttttttccactttaaggcctaataaatgctgccttttcaatgcaatcttccctgatactttctattcactcctcaaaacagaattcatctgtctcctttatttatttatttatttttgcttctaaagcagtttattgatatgtttgtcacagaatattgttttctcccttggattagtgttcttattcaaaaacattcttatctctggtattaagagcagctggaaaaccacggcactgtgttatttctcactcctcccccagtaaggcctaaaaacgattacattaaaatgcatctgacccccttttccccacaagcagcatatggagctgctctcaggcttagaccaggcggaggtctgaatcttcctgagtatttacagttgtaagactggtggagagaaatatacatttcttccctctgcatctccaaactagtttggcttagtagtgaagcttctaccccttaaatttataccaaaaaaaagaagatggctcttgaaaacgctttctataaagcatatttctttatcagaattacttggggatttagtcaaaagtggagacttcagggtctcacctcatgccctcaatcagaatctttgttgatgctttcttttaatggctatacatattgatgtctagcttatcagttctaagatctacagtgtcagataccaagaggagttattcaatgacacattcattgatttttgtgttatgtgactatctctgagtaagggaggaaaagtgccactaaatagaagagacttttgtacaggaattccaagggattgtctaaaagctgaataatacctgtaattagactcttagcaaagatgcccatttctatccacattgccagatctctagaagttttgtatggcacttcaggagagggctccaacacccagacacttcatgtgtctggtaagtttttggttcttgtcagttgctcatttctctcccagtcacctctgggagtgtcaatggcttatctcactctgcagtggcggccccaaatgcaggctgcaggtcaccccggcttatcaccactttacatggcttctccaagcaaatggtgagccctacttgacttgggccaagagctgtattgattattaactacagaaaaacatctggttttcattattcgtggtagcagaccagagcggggtgctgtgctggctggtgtggtcacttaacaaccatcaagactagctataaagaaaatttaacatatcctgtaattacagtctgccaagcacagaggggaggaggaatctgcagatctgatttcaggacaagagaaaatgtttattgtatctgttccacacatttatttactcagaggtcaggaggcttgttgaaatatggccgctgggtactgacgctcctgcagcagcagagcgccttcttgtttaggtcaggaagcttcagtgtggctccaggcggatggtcccttaatgcttttacaggctttggaatttgggctgatggaaaaggatgggtggatcttgtctggaataaacaatccttctcccacacagtgctgggtgccctcccctggggctcttctcaaccttctggaggctgccttcaggggcttttccaactgctcccttcccactccctggcaaagggtgactgggacagtgaattagcacttattgctcatcaaatatgtgccacgcaagtgctgggtgatttgaacacattttcgtttctactcctcacagttccctgtgagttagacattattattctcatctataaaatgaaactgaggtggggcattgtggctcatacctgttatcccagaactttgggaggcagaggtggacagatcacttgaggccaggggttcaagaccagcctggccaacatgctgaaaccccgtctctactaaaaatacaaaaat

SEQ ID NO: 35941 - DNA, 723 bp, Homo sapiens
aagggatgttggggagctacatgctggagaaagttttttctgaggaaaaatgaaatcaccacctaaatcccctgagtggagtgattctggaaagagggagtgaaaggaatgaggtggaggttgagacagttcagggatggccagaggcagttttggatgggaattctggcgcaactcacatcttctggacttgaaaggtcatatccggaagtcacagtgctcctaggagaggtttttcaacaaggttggagtacactggaggctacacacacaatctgagccaagaaacaaagttcacccaagaatgccagtggtgatgtttcctctacactcttggctaggtgtggaccttgctcaaattccaggggagtgttgggtgaatgtgatcatcaggatgtggactctcatgctgtgacagctagagtcttgtgcctcttatttgtcagggtgaatgggactggttaaatcttagccaatgggaatttttcttcctgacaaacaggtccataatagggctgacttttcccaatagagggaaactacagcatggaactaggttaaaagattttgctgtgaatgagaaaacctatttgttttctttgcaactaattttgctatctttccctatactaatttttaaaattaataaatgttttttacttatttaatgggttaaataactcaaagaggtaaaaagttttaatattttcctcagctacttcc

SEQ ID NO: 35942 - DNA, 2130 bp, Homo sapiens
gaagaaagaatgggatgctatgattaaaaatataatggggaacatgtaaattggattagggggtcaggaaaagcttctctgaggaagtaagatttgacatgagccctaaagccttggagaccagaaaaaatagatccaatggaaacagtctggatttgtggtggacataagaaaaagacattaaaatgctaggagataaagttctggcatggatttcaaatggtttggttaagaagcttccagccctgcaagtaattgcaaacagtgagaagacttatctgaaatcaagcagctagaaaagatgacttctccatgtcgcctgtagagatgggattccacagccctgactgatctccattcaggacaaatggaatggaaggacaggtaacaaaccattgattatgagaggctgccagggtcatcctctcacctcctcaaggtggctttatacaatactatgttttattcaactctagtggcagtatttatattttctgtaaaacaagtcttaattcccaaacatttaaaaatctgtcctccaggaaacattttaagaaccaccaaagagaactaggcaggctgcactgaccagcccaatagaccacaaaccgggctgattctgcagtgagtcagtaacctctagcgctcaatgttccccttggaggaaagagaacagccattgcaaactgttgtctgagaacttaataattaacagttttgcaaaaagtgtcactctgtttctggcagagctctgctctctttggcactggagtggaagatcagccggagggcaggtcagtggcagtctggagtgattctcagtgggaactggccaagcatataattatatcatgagtcaagctctctccagggatgtaaaatgaccagaggaaaatgaaataacattatatcccacatgaatagaggcactggtggagtaagctgactcctgagaaagaaaaccaggctaagaggtttcccagcacttaaatgtcttatgacttgtccctgtgtcccttctcttaaaattaagagattctatgggcacaatttatgcctttgccttcaacccagaggaacaagtgaccagagacaacaatccacatggataaataatcttgataaacaaaaggccatttagctgaaaaactccttgtgtcatttagctccaaaaaagaactgtttattcaagaagaaattagactgacaaatgttgtggtgggagttaaaaaatattttttcctcactaaaccacttccaaaggtatatttttatgtgtccaggaatagcagtctgtttgtcttgcttgtgcttgttccccctctcgtttctttttggtcaacatccaaaggagaattagtcctttgaacagtggcaatgtagtagctgaagccaaattagtatgaatggtgctggctgcccctcccaatccctactgcctctgcttcccagatgatataattagccagggaacttttgatcagttcatcaaagaaaaacagttatagggcagtcccatcatgggttatgggctaagaaacatcaaaataggagtgacaagcttttatgatgatttccaaaaagggttattttagacagaaagtgcagaaacagaaaagtgctctgagaggggaagaataaatagaacttgatatttacctctcgtttgtcattagtaatatttttgaagaaagcaagcagtaagcttgtgacaaagctcgggagatgagggacagtgtctcaaggagaaagcacagtacagggtggagtctgtcagatactctttgggaagtcactcaagataaatatctaaagttcagtttctatttgttcaatgttcaatatgaacattaaggttatgtacttggggatgaggagtaaagtgttgaagcagaaagaggaggagtatttgaaagagactggggattttgattttatatccacccctgggaagtggctgtccatgcagggaaattttcctttcagaaagaagtaagcggtgggtggatgaaaggataaaaatgaacacatctacaccttctcaccctcaaaataaaaatgaaggccacttggaattactagtgctctcatgtgaatatctctgaagtgatgatagtactaaatcagtca

SEQ ID NO: 35943 - DNA, 680 bp, Homo sapiens
tagtaatttgaagaggatgccatctatatctttttataaccgggagcttttgatacctttttcctaaactacaaaactcatagaaccttcgttagcttctctgtgccccagcccttcaataaattgacatcacaatagaggttaaaataaggcaaactcacagtggcctagagatacgtgtttgtgtgtgtctgtgtgtgtgcatttaagaagatgcacgtgtacctttgacctagcacctacctgtgttcatacaattaaaaaagaaataatgactcattaagcaaacaagttctagaaaaaaatactcatttaatacaatcacagtgacttcctcactgtttccacttcattgctccttatgtgagtaaaaacaacatgctaaatggagactttcaggaccccgtgggaccaattaatgccacgtgacttcctccctgccttccatgaaaataactatattataatggtctgtgatattaatatcagctttggaaaagtcaggcagtgactccatagggaaggaagtggcctgtgcaagaactgtggaatgtgcagtatttgacagactggaggccacatctttttataagctacatcacagagttaaacaaggtgggggcaccaactgggctagtgggttaattcaggttaaaaggccaccagggtagtctatctct

SEQ ID NO: 35944 - DNA, 934 bp, Homo sapiens
agggaggaaatatgtctaatttatccttatgtctatcagagttttctagcacaaagttttgctcatagtaagtattcaaacagttgttgctacaaaagttatagctcacatttgagtgcatactaatgtcagacactgtgttgttttacattattatcttgcaaatcctacagtaacaatcctctgaaattggtatttttagtagtcttattttatgatggagaaaccaatattggagatttgcctaggttcgctcaaatagtaagttgttacaaaactcagtccagccttgcttgactcaaaatgtcatgccttttgtccttggaaataaagttgagatgaataagctttactaagttatcttaataggtaggctaatggaatcccaaagtagttaaacaagctactgaaattggcatacctccttactcctctctgaccttttttgctgaactctttatactcacccaaagaataaaatttcctacatgggctagggcattgacctcagggtttccttgtttccctggcatctatgtttggtagtaaatttatgctctcttgtgttctgttggcaaggaagcagctatctaaatactgggctgttgccacagccctgggaaatagaaacattggtcattctacttgccacacagcctaaaacatgcagcctatttttggcatatgcagagtaaggtatgcagagtaaggcaataattaaacagtagtttgcttagtgaatacgttacaggcctaggttctgtgaaggcaatatggagtttaaaatatttattttatttgtttatcaattgatgtatatggtcctacctaagtatacaggacttgttttagtgtcttcagttcaccagaaagatgagtaatcttaatttctacatctaaattttatggtgttctttcaaaacaaatcaacctc

SEQ ID NO: 35945 - DNA, 2362 bp, Homo sapiens
tgtgtttcttcacttcactaaaagcaagtatattttccaatgccatagcattaaagaaaacattagttgattaaaagaatctagtccttttactagctactgtcttgggtgcatgcagtacaaactaatcttggttaaattaaggaagaaaaagcaaggcattagcagggtacagaatctcttagagaatcaatgagaatgttaaacacttaggcttcagaaaggtcaggaacactgtatttagaccgaagaaactaatggaatgtttatttgggcaaccaccaataagatgaatcagctccaaccctttgctcactggtctctagatttaaattccccggagagagagatggctagcctggcttagattgcttgtgctgtgtccatagctgggggaagggaaggacactgggatggaccatatgacaaggaatgacgggaagatttgctcctggaggaaagactgggcaccagtaccagaaaaagggggagtggatggtgggtggtgaaaaacaacagatgtctttttaaacatcagtgcattgtccccacccctccatgctaagagtttgctcacacttggtcaagaacaaatgtttcctggtaataaagggaattttggaacttctaataaataatggagcatgtgcttttcctggcacatattttactgtagctgcaaataatgaattaacttatctttactcatcaaagttgcccacaaaataaaaatacttttaaacacaagcaatgatccacatttctaccccgttcaaagaaaacagatactcaaggtaaggtaggatggtgtcacaatagcttattgccatgtgcatttgtgttctgtcacttacaggtgcatgaggcccatgattaagaggacagggttatcagtgagttccatgtaggggttcaaaggccagtacccctgcatcccaactgggacaattctccagggccatttcagcttcagcagagcttcctgcaggattggctgtggcctttggtgaggttacatgacagcaaaatttctccctgtacctaatgctaaatttccttagcttaaaaactttatgattttataaaaacaataatgctcatgcatatgtaactcacctgaatttccgtttttcttttctgtaaaatgggtcagtgttcggctctaagggctgattgtttaataataaatgtaaattgtgctttattacctgtgagatactatataaatatattattactatatttaaatagtctctcctttttcttcaggcaaaacagaaatatgatgcctctcaagattctatagtagtcattgcctcacttattcacccacagactaaaaatatttccatgaaagtggatacaaaacttggctgaatatttgcttgcctttcaaaatactggttgtgcaacctaaaagcaatgttttaggtgtagctggtacataaaaatcagttcttgtttgtttaaaagtatttccatgtaacagttacttgcaaacaactcaccccccaaaaccaacaaacccagtatcattcatggaaagattttttgtaacactgtcatgctattgcatcagcctagtatgccgtcagcactcctagaattttggagataaacaatatcaccctttggggtccttcccaactcaacatttgttttaaatgaacactaaaaatgtgacaagagaccctcagttcatttcacttcagctgcttccaccttccctatgtcccatgcctgccttctcatccacataaagtcacaatctccaagcctgttgcagagtgccttttaactaaccatccattttgctcttgtccttgtaagttactgtgatggtaaattttaggtgtcagcttgactggcttaaggattacctagagaactggtgaagtattatttctgggtgttacctgaccccccaagccataaagttgaacatggacagcagcactccatcttcaagtggaaatggtatatatatgatcagatctgagcaggtcttgaaggcacaagtaagtcgcatgaagaagtggcccaaatacccttggttcctactcctgccaccctgccttccctctcccagcctgcacctatggcctcgtgaggaagaggaaaagaagactgtggactgatttatagatggctctgcacaatatgaaggcaccagctgaaaatggagagctgcaggaccatagtcccttcctagaacatccctgaaggacagtggtcaagggaaattttcccaatgggcagagctttggcaatgtactttgttatgcactttgcttggaaagagaaatggccagatgtgtgattatatactgatccatgggctgtagccaatggtttggccaga

SEQ ID NO: 35946 - DNA, 1570 bp, Homo sapiens
tgccagatacaaatattttcttttgtgcttctctgtttttgaagcagctcatgccctgggaagatgaggatgtcttacaattgtttccatttagtgatgcagaaactgtcacaacaatgagtcactgttctgtacaaaagagacctttggtggtggaaaactggtgtgtgtgtgtgtgtgtgtctgtgtgtgtgtgtgtgagagagagagagagagattgctcaaattgccattgcctaatcagccagtagtgattgaatggagaaagcctttgaaccagatctcagattcagggtgctttcatggagcaaagagaaaaagactgagaaattcactatggtgagtattgaggttgtactgcagctcagtctggagaattgaaggctccttcctgaaagggtatggggacatagagaaagatagcatcagtggatcaaagctaccacatttttgcggttagatggagattacagtagggagtgacagagataaaatgttaaaaacctccaacattccagtttagacacagcccctcccctttctggccatagtgaccgctctctggcaagcactgcccagggaagataaatcagttagccagtggcctaagggttaggactttaaaaaacaacaacaataaaaaaaccaagaagttataaaccgtgagtccacaagtggccccaggagacttgccttctgcattctctctgtctgcgcaggactgtgaggcatctctgggaagccatcagctctcaggggcaggcacaggaaacagctcttcttgttggcaaaatccagttcggtggtttggaacagggtagacagagaaacaaacaagtgtttgttcataggctgagacctagggggtgtataaggagtaatgatcctatcacctaaggaggatgaattctgggtcattttatgaactgtcttccttagaaaagcctccgaagcaactggcagatgaaaactggaaactattttgagctgggatcagggagtccagggagctcagcagaccaggttactgccactgccactcactaattaagcacatggacaaattgctgccttttcttggcctcttttcctcctcataaacagatgaatccaaaacttttctaaatccaaaactcaccagttacttttcctcttgtctgctgatctttactttttttttttttctatgacactgcatttttcccccctgatgtcaggatccaagagaaagtgaaaacctttctcctgatacggtcaatactggagaactgggaacaatgtcagaatgaccggccaccctgagccagccccttcaatggcactgcccctgggggctgttcaacatataaactggggccatttaacatataaactgaattcaaaagttacttcatgttctacaaaaagaatatgttttatttttaatttaccttcattttcaaaaaaatcaagattctctctttaaggtgccccgggccctatgtgtcatgcagtacccatttgcagaaacatcttctgtcaccaagagtttcggagacagtttttgtagagttccaggcctcagtttctc

SEQ ID NO: 35947 - DNA, 476 bp, Homo sapiens
ccatttccctaatttttaagtattttagcattgctgggcttagtctgtgaacctttctttatctatactcatctagactcatgtttttaaaaagtgctaaaaactgtcaattcccatgaatttggctggatacagcaacagttagtcatgtgatggacatttcacatgtaggatgaggcctgagcaggtccagaaggcactcacgagttctcttgtgtgcttttctttcaagtcaacacctatgacctcatgggagtttcctgactgaagaggaaaaaatgtacctaggtcgtatggaatagatcaagttagacaggttgttgtgaatgaaatatggacacctgctgtgttgtagcccctttcaaggatgagcctgaaagagtggcaacagagagtcctcccagtggagagtattttaggtggtatacctggccacctattttgtgtaaaaagagaaatagccctatattttcccc

SEQ ID NO: 35948 - DNA, 664 bp, Homo sapiens
ccttacccaagtttacttagaaataaaagttttaccaaagttacagttgcttagaagctcagcatggtcagtcaagcccatgatttagaaaagacatccaatctgacaaacttttcaggacctaagcaggctttagaaatccccttgcaaaacttctgtgttaccaaatacggctcagtctagccttacaatctgttagaccttaagatcccgtagtgagggacgtgaatccctgggacagatccatcccagtgatgagggacaaaattagacttgctaattaatctgctttctggagaaagatctttgtcaatagagggaaatgtaaaagaaaatgaaataactaaggtcaaggctttctaaagtggaatcaggagattgtgaaaggattgcactcacacctgctaaacatcaaaccacagaatttccaacagacttggtaaacagctgaggtcagtattcccaggccttcaatatctctcagctggaaatatgctaattcattaacccatcagaataggtttgtgatttagtatttctgaccatcagatgaactgcctccaagaccaatttttatgtgtgtggaaattctctattaaaaaatgctccagtgcttgcctatgggacattacttagggctgccctgattcagtgcacccagata

SEQ ID NO: 35949 - DNA, 2605 bp, Homo sapiens
ggagaattgcttgaacgcgggaggcagaggttgcagtgagccaagatcgcaccactgcactccagcctgggcaacagagagactccgtcaaaaaaaaagaatgtccaaaataaatactgacaacacagagtgttgacaaggatgctgagtaagtagaattcacatacatgatggctggaattggaaaatgctacagcaactctggataatagcttggcagtttccttataaagtgaaacatacatctacgctataactccacaaggccgatcctgagtatttaccccaggaaaatgaaaatgtatgttcacatgaaactgataaacaaaacttcagagtagctttttttttttttttttttttttttttacacagtagcttcaaactgaaaataacttgaatgtccctcaatgagtgaaagggtaaataaactgtgataccacatatgatggaacactattcagtcataaaaaagaacaacttagataactctgtgctgagtaagagatgccagtttcaaaagacaaaagcacaatggtggagaagagattagtgattgccagggattatggtggagggaggggtgaatataaagggacagcatggggaagctttggggggttatggcactgtttcgtatcctctttgtggtggttacacaaatctatacatatgtggaaatccatagagctgtacatcaaagaaaaaagtcaactttactataggataatttggaaaataatttttttaaaggccaatgcattcctatttgacttttctattcacagtttgttgtcaatctcttctttactgaactgatgacatcctgttttcactaacactgcttgcctggcggggagatatgaggcatgtgtgaggcattgcagatacaaagatgagtcaggcagaggctcatgcacagggctcaccacctgggcaaggaaatgagacagggaagtgaagagacgtcaacaatttatgctacagaaattcaaggggtgagaaatccctgatcactatgggaagtgtaagcacaaagcgtgttttcttaactcaaccaagaaggaataattggttctgtttactgtttccttaccaaatatattttttggtaattttgaagactcccttgctttgaccaaaaaatattaaatttaaaaatctcattagttgataggaacagtgcctgctgggttgtaaatttattgaaacatggcctgtcctaaccagcactctgacacatagaagtcccgtcactcattatataaatccatttattaaataaatggatgaaagataacatcatgagcacaatatttgaatcattgctagtcattgcggtattattttgtatttagttgtcatattcatcagtatagcttctgtcatagtcatttggagatgaaacatattttaattaatatgtgcccacttcattctgaggctctgtaggtggcactccccaggggaaagtccctaaaagtgagtcaccgtgattattcatgtcctgtggcatcagtctttgaaaccaatatctacaggaaataaataccaggaatgtgaatgcagatgccttgagaagaccactaatcctgctatgataagtaactgggcagttattcaagtggggtgtttttagtgccatggaaacagacagagtcggtgttttccaagggaaagtgttttaaatccagagtcctgcctaatctggatataaatatgctgactgttatgaatctagcttcctaaaccaagccctaccttaatttcctcatatgtgaggtaaaggtcacccaccacagtctggtgtgaattcatggcaattaaggttcttacttagaagaagtcattatttttattcccatctgggcagaagtcaagttcaaagtcagagttgtatcagggttcagcttctgtgatcagtcagaccatttatgtttagaagtgagttttctaaagtaagtgctaagtattttaggcaaagaaacccagctgtgaaaatactgctaacatttgtacagttgttttatatgtggatttatttttacttgcacttactttagtgcgattctttgcagagaagttcctcttcccctcctctccttccccgtcactgcctctggctgcctctcgtgggtcatttgagaaatgacagtctctctctaatccttatgggtcacaagtgttctgcatcatggcacacccttgactaattagcattaataagtgatgctgggagaaagaaccctggagaaaaagcagaaggcttgtttttgccaaattggaattgacccagctagcaaaattttccagcgtactttcttactctcttgcctcttgtgtgttcttgctgcctaaacatacgtttctgacatgaggtcttggacagcccatgaaatacactgccctgcataccttttgttccagggggcatggggactttatttatttaataaacttttcctaaactgtttactgtgtgcaggccataagggataataagacatcatttctgcctcctacctttttatgttgttttagcacagatatggcaaagatatatctaactatatattagttattgagcacctactgtgtgaaaggc

SEQ ID NO: 35950 - DNA, 522 bp, Homo sapiens
gagaactaatctgctgtatctgcattgaaaattaatctccagagatatattttaggctttggacattggctatgtaaccattctccctgttcctttcaccctgaatgattttcagcatctctatgcaatttccgaatgcaatgtcccggtaaacccgttcacacacttgacatagaaaaaaacgttgtgtttgtttatacaactggctcagtgaacaaggatgagaaattgagttatttattcgatgactcaggccttggttactaaactggaatttgcctctgtaccttgagggagtggagaaaagaaatcaaatagattaaatgagactgtttgtctttctgtacttctgccggaaacgctatgcatgggataattaggtcccaggaataggaaatctggccatgaaataaaaaatacagacttatcatccataagaagtggccaggttctggtctcaccaaaatgtttgatgttaacaaatgtatttattttctaatctagaaagttcttggcacaaat

SEQ ID NO: 35951 - DNA, 1628 bp, Homo sapiens
acattattccaaaataaaaagtttgggaaaattatggttggttaaacaggtatgagatgagagttgaggttttctgagagcttcccaagggcttggggatgatggagaaagatattgctgcatgagaatatggtcatggaatgagattggaatcacttaattttagtgacagaaataataataagagcaatcaatatttttattcagttcttattaagaaccagacactgacttgaggagcttatttataatatttcatgtaatcctcacaatagcccaaagaggctaatatttatttttgtccttgtggatgtggatgctcagttgtgagaaaggaaaaataactttgcctggattgttcatgtagggagtagatctgggataggaacccaggtccatctgaatccaaaactcatactctcaatatcatatttgattttagtctccagtccaaccaaaaaccaaggaccatgaaacagaaaggattgagtcactctagcatttagctttgctacatggacaacaggctagcgtggccttaattgcaaggtcatcttagggtttcaattagcatcaagagggcaaaccccaaactgcaggtgtttctcaagcctctgcttgtataatgtttgctaacatcccaggtgccaaggcaagtcccacggatcatggaggttcagtgagtggagaaactgactcccgttcctggtcagaggacccgcagcatcacattgcagaggactggagctgggtggaacacaattgatgacctcatgggcacttggacgaggaaaagagaggcagcgcaaatgcaggtctttgcagttctgttcggaaggttgttaatgatctaccctgcctctaggctgaatcctgagatgtggagatttggactatgtggatggagaagggtcagggaaagcctagtggaagatgtgtgatcaggctgtactgtgaggctgccaaagctcaaaacaaactaaaataggacaagctgtgggaagaacagatgagcaggccttaaatgctaagctcagacactgggcttgctaggccaggaaacccccagccaaggatgggttctaactgatttctgtgtcccgaatagagcctgacaccaggtaagaataagactgtgtgttagtaagtaaatatatgaatgtaatgtagtacaggggtggctataatttatacaatcatatttgaaaagaagcatgaacaattttagttttaaaggattaagttacaaaaagtatgctaaaaatgaagatttcattttagaataaaatatcttttctattacatcttgcaaactaccattcaataaattgtacatgcaatttttttacttctttgaaagtaattggcttatttaacgatttgtatcttcttgaggtgactttcttttcatcataaaaacccagttgagtactttgtagcaatttacattttcttccttcctgtttatagagtacagaatgaatataagctcttattcttacaccaaataactacataaaatgccaagactctggttaattaacagtggatctttaaataacacatgtcctccaaataaagcaagtcagaacttgaagtgcccaaacatgtcataggtgactgatgaa

SEQ ID NO: 35952 - DNA, 2855 bp, Homo sapiens
cttaaagaataactttttaatcactgattgctgaaaaaaaagtgaaagaaaatgttttccgagtatgacagattttctattactagaggcatcccagtagataatcagatggataactcaaaggccacctggtaatgtcttcaagagacattgtccagctagaatttagttggacaaaatgcactcaaagtatatgagggtagaaagaactctgagtagaggcagaggtcagaaaacctggtcctcaacctccttcatggaaaagtatctcttgggctctttctaattaaaaacttctaatactattatggtgtataacttttaaattcatttgtatgatcctgcattagtcaaaataggttatgcctcagcaactaacaacttcaaaattctcagtggcttttaaaaaaaacagaggtttgttttttgctctcaggttgatggggagccttaagaatctgaagtaacttgcttgggtagctagcagagcgaactcagtaaattctgcagttgctcttgatggcctctggcctatctagaactactctcaaagctcactcaaccttgagagtaagcctggagatggggatggaaggaacaggcaatgtaatcttccatgtactcagaggagaggaaagccagtttttatgagcagtaactgacaactgtctgaaattaaaatgggtttaagacctcaaaaaacaaaagaacccaaagagaaagcactgctgtctcttcccggatcaggtcctgctcttatcatgaatcttttctgggtaggtcgcttcacctttctatgcctcagtttctataaaacaaggagaggaatatatttttctaactctcaggattgttgtttcagtataattaatcgataaatagaaatgtaattcaagatattttaataatcattgttaaaagaaatactttaataaattaattaatttgaacattattaaataaattcatatagagtttatttgagcaaagaatggtttatgaattaggcatcactcagaaccaaaagaggttcaagggctctacccagacagtgtgagcagcgagcttgtataggctgaacacagaggaaaagaacagaaatcactggattggctatattagaaatcacaaatatttgccttatttgggcttggtgcaatgcactggctgcctgtgattggctgaagctcagctgtttgcattggctgaaacccagctatttgttacaaaaaaatatacttccagttaggttttgatttgtttgacatgctgttaggctgtgatttgttacctaggatctcaaagttcagacaaagcctcagataacagcttcctgctaatttaatttaacactacacaaatgaagtggataattcataaatactctatgccaaaacctaagataaagaaccatgcagctgaaagtctcctgtatatcgaatacatttttagcaattttgtacccgaaggaagcacttctacttgtgcaatttaatattcttttaacggtcttcccactttccagtgagttaggtacaaaaaaacaaaaaacaaacaaacaaaaaagttgttccaatccatgttacagaagccaactaaggcataggacccagcaagggctcctctgaaaacatccagagccggtgccaggatcaggaatagggcgccctggctccccacgcctaccaggccagtttgcgtactcttcctcctctcctttggccttgctcctcccttactcccatttcaatagctccacaaactcttggcctagagaacagagaatgtggggtacttgggcagtggatgaggcgacctctgccagtggccttctcaaaaatagttccagttccctgccgacctggcctgcccccttgggaaggtcacaaaagggaggctgggcacatgacccagacgttttggtccaaaggcagcccagatgttccaggcacccacgttccctgtacagatgccgagtaataatcgcggcatccaggaatgtgggcccaagtccctgtgcttccggccgggggaaactcccgcgtcagggaactaattgtgacttggacggtgaattggaatgtttggaggcataggtcatggactagataggatgtaggcagatccacaggcaataaatgctctctgctcaaggagtcactgacctaccatggggtaggaagcagccgtggaagagacggactagcgtcacggtgtcacagtgagggcgagaatgcgtgcgcgtgctcagacatcgcgtgccacgcacgcatggccgattactgtctttctcagcaattgcttgccaagcccaatctaaaaggatttactaaagacccaagaagagatcatcaaaatttagacagatatagtgtcctcccttaagaaactcataaactgaggaggccaggcataaacacatgtaacaagtagaaaaaacaaaatcacaaggcagtgcagaataccaccaatatggtagaattcggatgaggtagagcagaagtgggtctcgattattgggaaagttttcataggtaatttatattgtggctcatgtctaaaatctatctcttccacgctgctccagactgttccagcttcttccaatctaatatcaacttgcttctcagttagctagatcactttctcctccaaacaaaccagtataaagaagcagccttggccgggcacggtggctcacctctgtaatcccagcactttgggaggcttagacgggcggatcacgaagtcaagggattgagaccatcctggcgaacgtggtgaaaccccgtgtctactaaaaatacaaaaattagccaggagtggtgatgcgcacctgtagtcccagctactag

SEQ ID NO: 35953 - DNA, 1285 bp, Homo sapiens
tatacaggggactactgttagccctacctacaattctggggcatctcttggcagcattattagcaagcagggaagactgcagactggggacaggtttcattttttaagagcactcctcaaaccgataatgcatagatctatctgataacagaaaaatagccacaacaacatgtgaaagcagtaatgatcacagctatcctttattgaggaataactatactcctggaatactttatgtgcattattgtgtttaactttcaaatcaactctatgacagttacagtactcttctccattttataaaggaggaaacaaagcacagagaggtgaaataagttactcaaggtcattccatttagattgatgcagagccagcattttcagctaaagtctggctccatagctaaagctcttatcatttgttaacacacaggcagataggtgaacctaggttaccatttgtgatcgccatcactaggaagtcatgctaggctattttaaagatcgttcgggtattttgtgagttcttctgaagggtaagaagacagtaacggtagaaatctgacctctctcccagagatgtttaacaagcaattgcccaaccctactcacactccttccagaggtgatgccctgggcagcctggcattggagaaatgtgttcactctgcttgaagtggtgatgctgtcactacctgtcactaggaaagttcatttaaggttctatgaacaaagagtctgatgttaggatttggtgtgtgtgggggtggggggatttatagtcattccattctctcctgcagtgcccatttctctgctggatccatatttctgagtcatctctcaattagaatcaaccatccataacatgctcaaaaatgcgtcctttgatgctagcctctacacattttttttgttttgctatattgcttataatgtttgtgcagctgctttgagagctaaatatgcaatcaatgtgatgcaatcatgttccttccttatcagagaagggagaaaatgtcaacttgaattttaggcaattttcaagaactccacgatacaaaatcataagtgtatttaattgatgtgatcttaattggaatcacaagggaaattggaatgtacttgcagttcagttgtttgtgtttttaatagcactgtttggctgagattggaccattatctgtctctgattcaccaaatgttggagagtttgtatttctaaagtttgatgaaaactgaatgctatgttacagtatttttttctggccttttttgttatgct

SEQ ID NO: 35954 - DNA, 583 bp, Homo sapiens
tttattattataattattattttgagacaagctcttgctctgtaactcaggctgaagtgcagtggccgatctcagctcactgcaacctccatctcctggattcaagtgattctcccacctcagcctgccagtagctggaactacagatgcgtgccaccatgcatggctaagttttgtattttttgatagagacaaggttttagcatgttggccaggctggtcttgaactcctgacctcaagtgatccacccactttggcctcccaaaatgctggaattacaggtatgagtcactgttcctagcctattttaagctaacattactaagacagtgcacctcttgcacaacaatatacaaataaaacatatttgtatatttgtggatcataaaagatcaccaagaaatacagacacttgatttatgatagagatagtgtagcagatcactaacaacagactttttagcaaatggtattgggacaattggatatctaattagaaatctcacaccacactgaaacatctggatggaataaagacaattgtaaaaaacaaaagtataaagttttcacaatgtaacatag

SEQ ID NO: 35955 - DNA, 2580 bp, Homo sapiens
tagaattatgtgatcctagtagataatgtcattagacatataaacctaaagtagttttttattttaaaaatatcttgatttatttccaggaatgaagctttctttcatattaattattgctatattttgctcataatttttccaagagttgggcaccattttagaaaagtattctccatgaaaatgctactcatagacctaaagttgtgataccatgcatttgtattagctgcagccatagctgtcactcatggtgagtccacagataagagtaagcggctgattcttatgccttccagtgccttcataatttttgtagttatatacttgttaatttattataatttactcttacttctcgtttatgttttagttggggcaatgacattctttaaattatgcaacttatactatgaattttatttcagaataataaaggggacattataaaattttgaaaaaagggagttgtttctgatgggtttatgtactactggggtaaccctcccaggggtcccggatttatataagtaatttaggctgaacttcctacttggaaaaccaaaagcttaaaactataacgctaagtcactagaaataagagaatcattggaatcctgttcctgttttatttgtcttccctcaggattttccttaaagtcttgccaagtcagccatgcattttagattttattttaaaatatttaatttaggatttacatctgtaaatgggatggcaatacttaacttcctgacccacaggatttttctgagtcaaagcagaatgcacatataagcactttataaaatattaattactaagtaaatgcaagtaattattagccacagtgtgcccattgcttaattatttacacaaggaactctaacagaaaaactcaaaataaataaacgcaaacatcctaagttggaagaatcaccattccatggtgtcatggcttggagcctgtttcctcttcctcgtcaccctccaatcctacgaaaagtattggatctaagcaagggaaacaactcattgctacactgttttgagaaaaaacagattatattatattagctaaagtctttaaatgggcaacatgatcattgaataggtttaaggaaaagcagatttttttcagatgagcaaaggctctcctgccatgaggatcagagccatccacctggccctcttccagattaggtaattattgtctgcctctggcctggctcctcattccctgtctttcctgctgcccaaattaccaattgcttatgttaatctcagcagaaagatcttgaacaattgccatcttctgggcttggggagtggaaggaggtgaaatgcctttgggggcaggatagagtgaatcataatctgttctttaaaggcagaaagcatctttggagagcagaaggacaaaccttttgtagtctatctgttcagcatgtaatatgagatataatggatgattacaaaagagtctctagatgtactgtactttcaatgtttaaaagcaggcgctgaaaaaccctgtgcctgagtggggaggagagtgttacaaaataacattgtcagccaagggtgaagctgcatcaagcttggatgccagctctgcatttgagagtgcgcagtatggagtaatgataactgttaaaggtttggtggaagagacagactttgcagagagcttgttggatgggggttaatggtcaggaagctcaattcataccaggaagtgtgcagaaatggggattcgcaaccacacaaggaatgacacgagcttcattcacagactgtagagtgttacattcttactttttttttcaggatgaaactaagattcaagtgataaagtagcttctccaaattttcagtgagttagggacaaaactgagagagaattccagattccactgtagttataccatctcctccaaatttaccaagtacacagcttgtgggaacttggtattctgagatagaaaatcctgcccaccttttaactcatcaaatatcacaatatcaactcctttcaactgatggcatttctattccaagctagactaggtaggcaagactcctggcactctctttcaggagtatgagtgggccaggaactctcacggtggctggaaagaagttgcaagttcaagaatacctttaatttattcattgtacctgctgctgagaagcctcacagtattggctcctctcctggaaaatttgctaactagtcctgtgagcctgacttcactgattgcatatctaactattagtcaataaactagaccacccttcttgaagcttctcagttttccatattagtagtacagaaagcctgaaaagcagatttaagaaggtttcgctgctttttatttcagggttcttaagagcacaaaagtaaatttaagaaggtgcatcaccctggttcaaagtcaacacatgagggtctaaagatgagagaacaagaatctagatcttgccaagtggacaaaatgggaagcgttctaagctacaatactcagagcaccagtgaatatcacatatgcaatgtggagtaaaagaagtcagatacaaaa

SEQ ID NO: 35956 - DNA, 828 bp, Homo sapiens
ctctgcaacccagcccttccaacttgagctgcctcggtctccctgaatttggttttacgtctcctcactcagtgagagtgttatgctctgcttgttcccccactgtgcatgctagttcagaaaaggttcccatgcagaaacctcaggtaattatgggacttgccttgttagtttcccttatcttatgagtcacagtcctgcagttcctattgctcaagatctgaacatgatgtgtcatgtgctttgtcccatattctagttgtttacagcaaaagagcaaatctaatatcagttattccatagtggctataagtggaagattttggaaacagtgcttcttgaattgtttcatgtctccgcactgtcagacatacaaattactgatagccttgttggaaggattgaatggtaagcatgctttataaattagaaatagtaaattgctctggagagatctgaagttccatctccatcagaactatttgcttacactctaagagtgataaaaacctagagacaccttcctttcctctccccagagaggatctgtttacatttcagagcagcaagatctctttcattctcccctcccttcagggcaggtaagacacatgtgccagccatcttatagaagcttcaagcatcataaataatcaatcaagtatcaataatcaatatcaaatttacctacttgtgcagcggttgcttcataggagagaaaactaacattagttttctctcctatgaagcaaccgctgcacaagtaggtaaatttggctcccactatgttacccgcgaaacaagaattgggacatggggaactagtgc

SEQ ID NO: 35957 - DNA, 1104 bp, Homo sapiens
tgggaatgttgttcttcggaattcaactctctttcagtatatattcacctgaatggcttgctaatttaaaaattctaactagtattttttagagaaaaatgccaaatcaccttcccttttatttccacaacacaaataatcaattgcaatctgtacttactgacattttcaactcctgggtggggcaatttccacaaagcaggttaagtaaaacattcaatttcccaggtcactgggcagggttcgaggctctgacctcacctgccctcgctatcccactccaaaacttcaggttagcctgaaaagagccaggaaaatgctggtagattgcatgataaacagtgttttcctgggtcattgggaagcccagccaccctctctgagaacccagcccaaatgctaatgcagcagcagataggagcagggtaacaggtggtaggaagggagagccaggcaggtcagagtaaggctcaaccttgaacctttaaactcagcatcatcagcaaacagccctctcttctacttgaaccaactgcacagctctattcaggcagctgggtttccccggatattttccagaggtgtttctggggatgggccctgcactttgccctttatcatggggagggatgactgtgggtcagtttcactcagcgggagacgccagtcctcctacaaagtaggatagccctccactcaaatattcatttattttgctcttcctcattccatctgtcaatgtctgaggcctaaaggcctctgatgtagttcacatggtggatggatggtggcatatttgtaagttgtttgataagttgagcttggttcattccaaaagaattttatcttctccagatcatactgatgttgggaggtgacccaataacagaggcaatgccaactcttccctttctagacagctgtctctacccttatagtgcatggttgatggatgttatcagcctgtgtcacacttctttgcttttggtcccaaaggatatgttcatttctccttcccaccaatcctacacataagcttaactccttcacatacgtaaatatacagattctaaatgttattcaatttctttgtgttgcagaagg

SEQ ID NO: 35958 - DNA, 2516 bp, Homo sapiens
tcagtatattcaaatgacatgacatcgaagggaaagtggatcttagctaaaaaaagactgaatatcatcccaaaatggacaaagtaacctatgaggctatgtatcttttttttttttttttctgtggcatcatctcactctatcacccaggctggtgcagtggtgcaatctcggctcgctgcaacctctgcctcttgggttcaagtgattagagtagctgggattacaggcatgcaccactatgcctgtctaatttttgtatttttcgtagagacaggtttcaccatgttggccaggctggtctcgaactcctgacctcaagtgatccacccacctcagcctcctaaagtgctgggattactggtgtgagtcactgcacccagtcgtcttttaaatgtgttttcatctgtagaactgatagttgcatcatactacatagaagcatcgttttgctaatgtcttcatttggaagttatatttagttaagagaagtggacatggatgccaagttggcaagggatggactttggtagctttctacagtatcaaattggctaaatcaggagctatattttccagaatttcctctcctgattcacactgagttaaggttagccttaggggaaatttgcatgaggttggaaaagcagaattgaagcagcaaccatttgaagggggcaccaaactctatgatggcaagcacacatttaccctgatgtggtgactcacctggacttagcgcagcagctgtagttgaagctcccaaagctctgtcttcagctttgccaagtcctatgctaggtacatgttcagctccatggcagagggcactagatccttctggaagtcacccccattgaggttggtaaaaggctgatgtgggttccagtttttcctcctaattccaattctttgttcttctctacttcatgcccagcttttgttactggtggctgtgctgacccggagagttcagcccattatcagacagatgcaacacactcccattgacttcttcaccagatcccacacttgcctgaggtctaatccctggaataaacccctcattctatgtcactgtttctgcttcttattaaacaccgatacatgcaccttgtatcaaacactgacaaaggttgtcacgaaggaagaaatcaggaaccacagaaagcactggtgttcatattccaccacctcaaaaaggcaggaagtcttctacagataggtgtgatttggggcacttctgaattatgacccatccttctgggtgccagtgctaaaatagtcattttctaccacccttcatctgacctccattcatatgcaacaactgtctccaatcagagcttgaaaccaaacagcaactatatttcctgatatttcatgtttggggaaaaaagcataaaataaaatgtgttgtgacctatttacaagagcctgtccccaaataatgtgaaggccatcattgattgatctctatttaacttggctcattggacttcttaccatcagaatatctagttgagcaatttattagcattctatcttagtcagcttctggagtgtaattcaggtcctagttccttactctgacataggtttttttcttttcattttagcctcccattttctcctgtttcccgtattacgaaaggccatgtttcccctttactgccagcatgtgattgtgtggttgtgtacattttttcttgaatatttccccttgtacatgttttttgtcagcttccttgccctacctcccatgatgcctttccttatccagaagacactggcacaaactctttcaagaaatgaaaactccctatcatggttcacatgcattgattggaaaagtattaactattgaaataaatgtaatatatatagaaacctaaagctactgttttgttcaacctaagataacaatgcttgctgtatttctttaaattagttacaggttcactctactaagtaattagattcatttaatataaaacaaccgttgctggattctgagaatggttcatgcgttggtcagggacttggctttcttggggagacacaattatttcctagggcagccttatagctcccagacagctagtgaggcccagcaacatgtggagtctggtttctagagctatggcttggttaatctgtattattttcatgaagtggttaacattccttatgaagaaatggaggctaagtgactcacagcagattagtagaaaagacctgagtccctctcagaatctttggtattctggttggcaggattactgtttgccccaggataggcttttctctcaaaatcataaacttccaaaaacataaatcatttccatgtggataaagatgagaaactgtattgacttttctctgttttgttagaaagaaagaaaaaagagagagggaaagagggaaagaggcaaagagagaaagagggaaagagggaaagaggcaaagagggaaagagggaaagaggcaaagagggaatgaggcaaagtgggaaa

SEQ ID NO: 35959 - DNA, 1576 bp, Homo sapiens
agatacactctggctttccctttgaaaagagggggaagtggaaaagtcctattagctgaaagccaccagaacacaacatctaccctcaaagacagatggcttgtggctgtcttgatagttccaggagataaggcagaaaacccaaagcatgaacaagagacggttatgttgcaataaggacaggaagtctatctgtccactagcctctgagcctggcatatgttcttctccatttcaagtctcatctttgacaaaccacagcgggaaactccagaccataacctagaccgagtctcatgacttttcacaaccaatggacccggagctggctgtgtaaaagagagaaatcatattttccttaaggtatggttatgatccaaagaaaactcaaagggcaatattatgttcactttactcattgaaagtaagaagtcaaaacctaccctagctttttgaaaagaaaaacaagagctatatacgaatttcagttgatttctagaattaacctctgcccttacatatgatagtttattctgctaggcaattatgacaataaagtttgaacctgaagagataattctgaagtagaagaaagaaaatatggaaaataacttcaccagtgaagacttaaaaaataaataagataaaaactacccattgtcatcatcacagcctccacaaaagggattctgaagagttaaaatctgctcagcttcgcctccacaaaaacccaaattccacacagattctgtgatgggaacctaattcacttttttcttcaaaaaaggcagttgttacatttttccatataagatgagagggaagaacaataaaacaaattcaaaagaaggctctaaaagcaggggaaaaacctctctgttcttatttagggtactcaagctgtaatttgtcttaaaagcagctagtttaaaaaaaaaaaaaaaaaccaacacatgctagaaaaccccacacacagaaaaaagcagcgtccagctttttaaaattctgcctctacacctcctttctcaatgacatcagctggaggctccccacctgcccagttgccatagcagttacacaaagacatacaatgacatcagttggcatgatatcagctctttgagtgcaaacaatacaagaagaactactttgtttaaggcctttggtgcaactgtgttctggggagccaatgatgtaatgctaacaggtggcatgggccttccatttgcctaatggggggaaaaaaacccgtggcggagtggggggaggagggaatttgagacagacacacagaatgctccaaatcacagagcatgcttatgtgcaaaagtatgggtgcattgtatgtttaagccatgtaggaactctgttcttataatatttggaggtgggaggggtgggggtggagagaaaaggagatattacaatttaaacatataaggtaaacaaggaaattctccttgaggggtctgaagaaatagtctcctgttcaactgccactctgctaatcaacttgggcatcagttttccataaggcttatgcacagctctgtactgcagttaaaaactctctctg

SEQ ID NO: 35960 - DNA, 4187 bp, Homo sapiens
tttgttccatatacttctacattttccagtcattaacttgtttattggaggggtctcttgtcatttttcttatattttcgaatatactgtttccttccttgtttgataaaacctttgccatgccctcaataggaagaattttaaaaaattattgcccacatatttacctcaaaaaagtaaactgagtcagaaacatccaatgatttaggaattgtgatttatgaaaattgaaaataaagtttaattggaggccttccaagaaatgctgaccctggaaagtttttgtcagagctttaaagattcccctctgctctcaccaccctcccctcctggctcagaagttgcctcagggcagaattggtatagaaaagagctggggattggatttccgccggctggagtagctcagtccacacagaaaagtcagcctctggttcctaccccctgaagggaggtgcagttctcttgcccccctcctaccatttcaactttaaggctttaatgaataactaatgtttgagctaccacaagtttaatttgtgtgtatttgaataacacaggcagattgttttgagaggatacctcagaagtatgtaaatacagcctgtttctttaaatctgttacctcatttatttacattagaacagaaagcactgccagaagcaacagctgatgacagtcatgtaattttccacaaagacaacaattaaacagctttgtgttattttaatgagcagatgacttttatgtgagcaggatttgaactgttaagatctcaagagttcccagagccaggaagcccctcaggttttgcagaagtcagtgagactctatgactctctctggtttcttccccaccagggccttgggtttggtctctatctctatcccctttgcccccttctccactcttctctccctcacctctcctccccaactcttgctcctctaccctgatccctcctccctcccctcccctcccctctccctcttctctccctgtccctgccatctcccctcttctacccttctctccctctccctacaccttctctgtctctcataaatccatcagcagtagatgggaagaaaacatgaaagagagacttctacctggaatacattttgatgcttgaatttcaaacgaatccacagaatatttgttagacctatttttaaaaagtcaaaggtgggctgggaagagtgattgagcactcatccctgccagccaaacacacagtaaggctctgctagtgcagagaataccatctttaactcaccctccccattctgtctcacaaaggtttcagtaagaaccacctgaagacaggttgtgggcatagttgacttcaagtcagtccctctgccagaggggcagggaagtgccttctgctctcccttaatcctagtctggaatagaagggtcagaacagatgtttctggtggttccagttgtcccctccatccacagaccttcctcccagcctgtgtagtctcatttttttttccaccagaattttgtctacttctattgaactccattctcactaacaaaaatgccaactaaagaaaataagagtaagtatttttgctttccaagaaaggattttgggcttcaatcaagtgaatggctaagaagggtgcctaccaagatccagtctgggggtgaggggtcaggggccgacagaaagacagccaagttccagcccccatgttcctgaaaacttgcaagttcagttttctttctggtacgtgtctaaactttacctatgttagcacagaccaactggttcccagggagaaatgcacaccataaacactcagatcaagtctgggatttgttaacagacatgccagttacattaacacatttttcactgttataatctcttgtatttaagatcaaaccctccccaaacattctgggagttgaggaggtgagtgacacgctgcagaggccccttccctgcccctccccactccatcaggaggaaacatatgacaaccataaacacagattccagaaggcagtcacaaattaagataagtcataacggaagacgctgtccagttcctgggtgctatgagaggggactaattagattggggttcatggacagcctctctgaggtatgagaggggacggaatccaggagaacatagggagggaacaccacactgggaaaggcagggaactcagggaacctctgagtgactcaagggagccaaatgtggggaggcacaatgactgggcaagaggcgggtgaggagaagggctagaggggaaggaagggaggcagggaccctcctcacagggcctcttaggcaggttttattctgagttcagtgggaagctcctgagtgttccaaagtccacaacaggtgatcaatatgtgtttgaaaagaaaagaggggggaggggaaaagaaacagagagagagagagagagagaacgcactgatttaccaaatggtgtaatttacatacactccaaatcctgggcaaaattcataccctttccttttctgaatgcattttttgtggctgctgtggactgattgtatctctcctccccatattcaaacacacacacaaattcgtatgctgaagccctaatccccagcgtgaggtcatgagggtagggctcctgtgatgggagtagtacctttataagaagagacaacacagagcttgctgtctctttttctctgccttgtgagggcacagcaagaagacagctgtctgcaagccaagaagaaaggcttcaccagaacccaaccatgctggcaccccaatcttgaacttacagcctccagaactataagaaaataactttctgttgtttaagctatccagtctacggcatttggttaaagcagcccaaatgaatatagtgccacttgtaattcccagtgtagcttacttttagaaatacaacgtataatacttacttttgaagagccacactaaaacttgtgggcttcctgagaacaaagcccctgagagccaacccaacttggtgtcataccttaaagccaagccaaaaatggtccaaggtcagaatgggggtggcagggtggtgggggtgggggcgggggctgcagggggtgggggtgtgctgaaaggaccagcatgcctataaaaggcaagcgcagtaagccttgtagaaccttagttccatgaaccagctacatgcacgcacagaagcccactcctctcccaaagacacttccctcctcattagatatatgccctttcagatcagcactggcacatgacctccatgtggcatccttctgggcggaagaatattttagctggagacattctgcgtactggggaggctactctataccatgttagggctccaccttttttgctcactggtctcaaacttaatactggttaatccatcaagacggattaaaggagggggaaaaatccatgagatcatcctgggaagctgcagagagaggaatgttaacaggaggagagtgctataaaacacaaagccatatttctcccgagagctcaaccagatattctgcattaagtctctaaagaatgtctaaaaacattcttgcctttcagtgcagaagtttaaataatgaagcattgctaaacaaacaaacagaggaaagcccagtaaagctattcattacacaaacccactgtacaaaaggaaaactattgctcaaccatccaccccgaggaccaacatttatcttagaccccaaattaaacacatcacagcttcacagcaaaagtatgtttcccaatgggatttaagtaaagtccaattaaataaatcttcagaaatgtcacatgcgagcctcacaggagagcatatttctactgtgaaacattcccattggaagttacattcacaaaaggtcctctagaaacatccatgacaggaggggtgggggaaagcagtaagcaagacaaagttacacaggtgaagcctggatagggttccattgctaaaatcatgtatggaagtgcccagccaaaaatgctgcatctgagtttgctttgaataaaacccccatgtccaacaaacagtatgtataactgtgtatttcagtaggatctggaggtcaaagagctctggcttagggaattcaggaagtggtaggggaaaggatcaaatgtcagcatcaaaatttgaattgttttcctgaac

SEQ ID NO: 35961 - DNA, 5503 bp, Homo sapiens
cccaaagtgaacccggctaatcaggaccgtgcttgggaagggagcaggggcattacctttcaacaccagaggttctttgccttctctcttcagggactcgaggactatgtgaagtggctgggagggcatcactcggcttggttcattggtattctcatcataaactataatttctttggaaaagatcctcttgaaagagtccttgccttccctacaggaaatcaagtctaggacagtgatcttgccctgctgcagtctccgccggctgatcttatcggcacagttaatgtggacagctccttggatgtgactcttgttgtactccatgaagggcctgcagtcaatgatgacagggccctgactcggcaggtgactcttgctgcatttggtcatcttctttgccaagtcattggggtagattattttgatgctggctagctgcttgggggtccctgacacagggctgcccaccccacttgatggacttagagagcctgtattctcattattgttgaccatctggttagcagggcaggtggtagaggttccgatggcagtggtggtggtgccagcggcaatggcttgggtttgggcctgattgtccttgtcgtaggttgccacagtgcagcagctggcactgctgcatccacaattcagcgagcgggcagagccgctggatgagggcatatacgtcagattcgcagccttgagggacacaacggtggtggcgatgacaggagggtggctgttactgcctgggttggcagagccaaggtaactagagtctaaacaaaggttgagatcctgaggtcggacgggcctagatagtgccactactaccctgtcgtctaaaggagacggaggcatgaggaggctgaaaactggcaattcaagaagaactcaagacagtctgtaaagaaggggaagggggaaagaaagaataaagtcacgtgacacaaaaggcagtctcatccaatccctgggaaagacctttgcatccctctgagcaaagtcgtcctaattgccctttatcataccattatcaaaacttgaaattcatttttatgtattcaaagaggatgcaaacctgagggctccaatcaatttggttgctaagtctaaggttaaatttggatgtaatgttgtaaatgttaatgaacaacctttcctggacctacataaaagttcagctgtagagaaggtataagcacaaataattagaaaagctgaagacagaagggaggctcttaagaggcatctattctgaacctcagctctcgggcagaagtacactgcaaacatctgagaaagacccatttgtccacccttgcatgcttgccatttaattccctcactcgctgcaaaggcaaaggggtaaccaagagcactggcatggttcacagaaaggtacagcagctaaatatacatcagggtggatgtcaactttctgcaaatccccttaagtgaatctctttaacttggagctattcttgccttccattctctattggggtcctttgaaaagcacaacatagtcatactaaaacctcacatgttgtcttttggcctcttataaattaatctgcatttccccttttcactactaactggtgtcctaaaacgaaatctcaagccatggagccagatctggaaacctggaaaccccagccccggcaaatccctcaccctttgctctctcacctgcccccgccctcattcctgcctggaaaggacaacttgggctctcctcccctcttcatctccctggctggcacagactgtgcatcctagagcttctctcaatgggaggcagccacgttgtataaggtttcaatcccatacagatatccccccttcaagagtactgattccgtaaagaggacctcccaattagcctgtactcgttgaaagggacagtgaattgttgcccaccggatctatctctgatttcagagtgtctgcaaaaagacagctccttcctcctgtaggcacaggggcactctacaactcaggcttgctaactcttcttcttctattagacatgcacatagcaaagacgccaaaccccacgccaagagacgctcacctaaacgaactttaagagctatcaggaaaaatgccatctatcatccgtctacacacgaccgtcaccattctcatccgtctacacacgaccgtcaccattctctgacacagaaccaaagtgtcacaggcggaatccacactcacgcgcgcacacggggcacgcacccatcacgtcggcagatctccaacgactcgggtttctctcacccacctttggatgggagcgaaggagtcaaccccccttcccttgcgtagtattttttctgaagagcgagttctattccagaagctataactgtttcccggttggaccaagcggtgaaagtctttgctattgtgttacctggtaggacacgtccaggatcaacataccatttcttctgagagggacgcataagcgtgttcacagagacacgcgctgggacccccacctccacacagagttcaaggctcacacacacacacacggagtgtatagagagacctgcatccctgcagcagagggtcgggcgtacatactgcccgtgaaaccatccagtctggcccagaaaatctcccagagaaatactgagctatcccctctcccttccaccactaggcaagagctggagagaaaattaagtggttagagaatgcttcttccccattcctggagcacttaacatccccccgccccccgcttcactcctcggcacacagcgcactaatgagccccgagcatttaaaactgccgcaaagcatcccaacaaacctcattttttcttcgccccaaatccaagtagactgcagggagtaaacgcacagggtagcaggagccaacggccggaaccttataaccctacctgctgtagctcctccgtcagcatcgcatctctatctttctgtctctgtctctctctcacacacacacagatacacacacacaaacacacacactcacactcacacaagcaccgccttacaatcctccacctccagtcccgggctctcaggagtagtcgcggtgacttccacttacttcataaataagtgtattcctccaccatctggcgctcctcttcagctatggactcgcacattcagcccccattcactcggcttcattgatctccagcagcaacatagttactttctcttttgctacactgtaaatgtaaggttctgagggggcggactcgccgccgaccgacggcgggttgggccaataagaatccggagaaagccgaccgctacctcacagagccccgcgaccaatgggcagcctagggggcgggtaagaaggcgtggcctcatctctttaaggagggtttatccgaagctgctctgggtcctcggtgttaaaacacgggcggtgatgtcattggcaaccaatcaaaaacttaaaagagccagccggggccgcgcggagcagctgctctctatttacatgtaaaccgaaccggcaggatgcagttaaccctttaccaggctgaagtgtcagcgggctggacgcgctgctccgctaaaactggctcttcccactggacgggatcctccaacactccctcacccggggacaaaccacgctatttttcctccttactatggacagatgatcaaaagtatcggagtaactttctaaaggaaagagactgcgatcaccgtccctagtgggaaagccgggttctctccgagtcgctcgaggtgacttgacaaacgctaagccaaaattcgcggacctcgccgggtcttctgcgctaggaccagcatgagcgcgcagccaggggcgacgcttccgctccgagccgcggcccggggccacgcgctaagggcccgaacttggcagctgaccgtcccggacagggaggcccttcagcctcgacgcggcctgcgtcctccggagggccctgctccgcccgggaagcgtccgcctcccgcccgcccgcccgcagatgtcgctgcccctctggctgtcccggcctgaccgccgcgcgccgccctgctgctcacctacttccgcgccacggtcacgcccctgccgtccccaggctaaccctcccggggctcgacccagagcactaaggcggcgccactgagggctgctcggaggaggaggcttgagtcgacgccagaggcggcaagggacgcgccctgagcagcggtgcagaggccaatcccctggccgggcgtcctggggcccgctacgcgcccgctgcccctccgggtctgggtccccgcccgccgccgcccccctttcccgcctggcgcgctgggtccccgcgccgtgccagcagcgcgcaacccacccgccccacatgcctcggccgccacccctcggtcccgcacggcccctgccgaggccaggaccggcagcccggcgcttctggaacagccgcagctggcggaaaagagccagagccgagtgcaaatagctagattgaatggggccggaggagcgtggaggaggtgacgccgcctctccccgctcccctgactttggccggcgccaggtagctggccgcagctcctgatcagggagaagagtagggggcggggcaagccgccccttgcctagtccggaaaatattctcattagggaaactgcaggaaagttgccctgggatacaaaaagaagtggagatgaacaaccccagatgaactgtggagagtctacgtccaagaaccctaaagaagtagagctttttcttttcttatctgtgagagaagggataaaaagtgaaataatggaataatacattatgagcactagggaatgttgggctatcgtttttctcccttacctgattggatggggtttggaggtctacttcagactccaagcctagtagtatactgagtagcaggggcatattcatgtaattgttttcagggcagatctgaaatcaggaggtgtcagaccatagctagcaagtcagctatgctcaatgagctgtgaagagaaatccccttgggcacctccacttacatgcaggcacataccccccagtccagcttttcacaccagtgttacgacgggcatcacgtacacatccgatagtcttacataggagaggattttgtgtaacgtctgttgtcgaaaatagtcaaactctgtaaaatatttgaagagatttattctgagccaaatatgagtgaccatggcctgtgacacagccctcaggaggtcctgagcacgtgcccaaggtggttggggtccagcttggttttatacattttagggaggcatgagacatcaatcaaatacatttaagaaatacattggtttggtccaaaaaggctggacaactctaaggagcgggtgggctttcaggctataggtaaatttaaacattttctggttgacaattggttgagtttgtctaaagacctgagatcaaagaaaggaacgtatgggttaagataagagcttgtggggacc

SEQ ID NO: 35962 - DNA, 1231 bp, Homo sapiens
aaatcctgtgtaaatagaagttttatttgaacaaaggagagtgtccaggattcttcagctttgccttcagctttgcagctggagaaagtaaaatctatggagataaaatttaagccaatcaaacagcaagaacaagcaaaaagctctctccttctcccttttatttcttgcttttcttggtgagcttgtttctctccctgactaggaataaaggcctctctttgggcacagacagcatcttattcatctttacatatctcttcctgagatacaggcatagtgttctttatgttacagatacacaccacatgcttattaaacaaaaattaagttgtgtacataactcttatcacaatccactgatgctataaaactaagttaagttcaccatccaggctgggcgtggtggctcacacctgtaatctcagaactttgggaggccaaggtgggaggattgcttgaggtcaggagttcaagaccagcctgggcaacatagtgagacccccatctctaccataaaataaaataaaataaaataaaataaaataaaataaaacgaaataaaaataaaaacttcatcatctcttggcttttatctccttctaaggaggtcctctgaacctgcccactcctcaaaatgacaacatgtttggtgtttggaacacagaaattaatcttgtgcttttaaaatgtatagttaatgattaaggaagctcagacttagcacaactcagggttttccctatgatgcaaaccaaaaacggccaattcagtcagttcaaagaaaaaatactccaccaagttgttaggtgctttccataaacattactgtgtaccaaaggatttcaccaagttggtaatcgtgtttaacaatcttccattataaatgcacctaataattggatagagagtgggaaaaagacattcgattgactatgttttgaaaatcttgatatttgattgaattgtattggtggcattgaggagtcaaaggctgcatcttctgggtctgtggtcgacaccttggcttcccaaaatgaggacggcagctacactgacattgcttgggagcttcttagaatgcagaatctcagtctgtgtcccagacccaaaggttaagaatctgcattttagcaagatctccaggggatcagaatgtacactgacatttgagaagcacacaacttaacctctagcgctttgtatttggaaatatagaggcaccagattt

SEQ ID NO: 35963 - DNA, 2719 bp, Homo sapiens
cagagcagcctccaaaaataacttaaatattaattgtttattgattaaatatttaacagaattggatcatcatttggtctctggcccagcatatcagtggtaggagttaatcaaaaggatcatttgccccagaagagtggctttcaaatttagcatgcattggaatccccctggagggcttgttaacacagattattgaactctaccccgagagtttctgattcagtaggtcttgggttggcttgagaatttgcatttctagcaaactttcaggtgatgctgatgctgctggtccagggaccacgctttgagtgagaaccacgggacgagagaaaccactgaagagcagagattcattttgaagactacaccataggaaggaggcagaaagtagaaagaagcactccactgcataaagctgaaactggcatccaggaatgagagataccaggcaagctttggatgattacaggaaataacttctcaaaggtaaaaaatgaagtcagatctccttacacctatagtagcttttttaaagttcccatttcatcaagaatcaagacaaggatcataaaggaaattgtctttgaggctgcatgccctacctgattgctcttgaactggaactcagccagcctagttgcttatttccaaggttagccataaactgtgcagatgtgtgagaaattgcccactactgaagatgactcttgtgaatagtctctggtgtgtggctgcaagggaagggttttcttttcccaagatgtttgtcttttcccaagttctccaccacttatccacagatgctacttgtgacacatacagttagcctctgaactgagatacagagcatcgatgtcaccttctcctcaaaaactttggcacatcttagttatctctgtggtctcaggatggagcattaggtgccacctgaatgctggagaaagcttcctcactgaaaaggatttgagagcagagaaaagcgctcatttgtcaggcttctgtggaacttgattttctgtgcctgattgtcactacgtcactctgctctgagtcagtcatcaggagtcccctgactgcccagtgcccagtgatgggcagctttgacttgcactgagtagaggatggaagggaggtgacccacagaggttgactgtttacccagtctccatcatggggattttcttggccacactctgctaaaactgactcatgaagaagacagcaagccaacagttcatgggaggtagaactgtttctattgttcacatgtcatttggctcagctgaatcatctcctccacaactcagaaaggaaggtgcttccatcaacaccttcttcatttgggggaagggatggagtgggaattttcaggacctacctcattcctatacctttcccactccaaagagagaagaatgactttggttatcagacacactggctattcctctactgggcagggtaaaaactcaaggtcactcacttctcctacatgctcccccatttcctgattcttcttgaactagcctttatttcagagcaatgggtcagtctctgtgggtcaaccccttggtgggaccacctcagagcagggaggactgatctccagcttctcagcctgggactgggtggataagtccaccttgtagggaagacttggctctctataattctgagtgggaggtcagaaacccagctatattctctagtcttctaattgttacagaaagtcaaacagaactaatgttgcaatcctcatttaacaatatgtgtatcttttatcaaccagaatcctcaaggagaagcaaggtgggcattaggatctgggaccagccctcctccccagcaactccctcactctcaattcccaagaagttctgaggctgacactttcccatacattcttctcttgtgccaggatttatcaggaggtgtggaggtttgttgggagcaggacagtgtaggcaggaaagggactgagacttggcactagacatgcccttcagagtgggacaggccaagctaacaggagaggttggagaaggcacaggtgcaaggagttcagccttccacatagcgattcagctaagtagctggcaccaggtgctccaagtggaattgcaaattatgccaaaacatgagcagggcccactgaaaattgggggcaggtaatttttggaattcagggcagggtgccagcctctggcagatttgttccccagaaatccagaccccaacactaaactaagatacagagctaaagactcccctgatcttaacctcagataaggagagaggtactgatatggacaagagacagggaaatactgggtagaagaaggcagttccctggcaaaggccccaccctcaagcctggaaacccatggccctaaatagaaacaggcatttctctttttgcacccaaatgttgccttctggcccaccatgccccactatctcatacccatataaaccccaaatcccatgctccacaagtagatgagcagaggcagaaaagtgggcctggcagagaaggagagaaaagaaggaatatctgaacatcaagaggagttcatctggggatggttggagaggagactggctgcaggacagccaaactccaggtgaagatcattcttcctacttcatcccctcttcagctccccatccctccagctgagagccatctccatctgacaacaaagtcccctgcatt

SEQ ID NO: 35964 - DNA, 2917 bp, Homo sapiens
ctggcctctgtgtctttgaggataaggatgttcctttcctctaggtatagagatggcacctttttttttttttgagactgagtctctttctgtcacccaggctggagtgcagtggtgtgatctcagctcacttcaacctctgcctcccgggttcaagtgattctcctgcctcagcctcccaagtagctgggactacaggtgtgtgccaccacgcctggctaattttttgtgtttttagtagagacaggggtttcaccttgttagccaggatggtctcgatctcctgacctcatgatctgcccacctcggcctcccaaagcgctgggattacaggcatgagccactgcacccggcctgaaggcacctcttgaatgaggatcttgtggtctctttcaggtggtcagaaaattctgtctaggtttgatagtctgctttaggggagaagggcaagaggaggtcagagagtgtccttactgcttctgctgttttctaaaatgccaaggggccatattttggagcagcctgtcctgaactccaacagcaaaggtagaacagggcagagtgatagcctggtcaggaagtgaatgaatgggactcacagccacactgattgtctctagtgacaccaagagctcaggtgaggctaaatcagccaggaacccccaggggcccaaagaggatggtcaggagtaggaggaagacatcacaagtcatagaaaagagataggagggccgttttctctgcatatgccagttataacagttgaatttgcactccccagtactcctagagactctaacattgtgagaaagccaattctttcagaatgtggaagactcgtcagttggacctgccaaatccacctgtatactttgctatagtatcagaaatgattcttttttattttctctctccccaaggaccaagatggatttccagcctggatgttttggcggggattctacccagcggtggggggaagaaccacgtgcccttccaaccttgcgtcagcaatcccatgaggcccgccatgagtcactgccagtggcccagactcagttgtgtggagtctcacaccctggggcgaaactagctaagttcatgggtctttcctgtctgtgttctcagtgactcacccgaaacagataataacagtgaggttgggcacaccatgtgactggtgccagccagaacaggtcatgctgttaacccttggatcccaggccaccaactgctgactcccaggccctgggacaggcccatgacacacttgagtggtatctccttcctatctctctgggatacttggtcaaggtttcagttttggaaatatgaccttcccttgtaaaggatctcaaacttggggtggttactgatagagactgcatcaataactattacccaggaggggcccattgtcctaaaacaccaccagagcacaagtgaggagttttcattcatcaaattgggtgttcttcaaagtttgccaaggtgcagatcctgacccctttcctggttctttccatcagttgggtgattcccaaagtctggggaaagaaagagaaaggaggaatttaagaatggaacagatgatttctcccacctcagacaagcagactgtgagctcaccgtgtatcttaagtatttgtgggcagggtcccaggcaggactgtaacatgtcagcatatgacttaaaggcttggtgacagaacaaggatccacccagctcagctgccctgccagggtgttctcattgcctcgccagcttcagatcactccccagggatgctgcattcattatgaaaacctctggtcaaggttgaaagcctgcaggatatgtactatgacctcataattcacatgggatagtccagaggtctctaagactctccaaaatattattatgatgcaacctttaccccataatatgtgacagagcataactcaaaatttaagtgatcctttgctgacccttaatgaggttaaagtgaaaaaacaaaacaaacaaacaaacaaaagacaagatgagctgagatgctgaggctgggcagtgatctgagtgctgagggttgctgattcttcaagatacacattgctccaggtcatggggcagggtgtatatgtacatatgtgtgtgagtgtgagagagtgggggactgggtaggagactggagtagggagagggatgggacatgttgctatggagagagagcagtgaaacaggcagtacgaaagaatacgatcatgtcagacagtcgaggatctgggtctcagccctgacattcactacccaggtggctttgacaattcatgagtcttctctctttcacctgtaaagtggggtaacaaaggtagatttgttaagtgaggagataatatgtgtaattgcctaggagagttctagtcacatagcagatcatcagtggaggtccactccaatgatgactgacaactagctgagaagtgaatgagcaagccaggccagaaaattttatgaacagtgaaaactgcagcccaaagttctgtgtatttctcaacaggaaaacagctgtatcctattttatggtgtacaaatactttcacttatgtcacctcattcttcctctcagaaaccctctaaggaatttattgtagtgatgaggaaactgaggcccaagaccacacagtcggcaaggctggaactggaccctaagtcctatgcatctttatgctaccccatgagggagcagctgcaagtcatgaacacacgtccatcatgcagcatcatgggtgtggcacccaaaggatgagctggaaaatgaaacattataaagattttgtgttaactgcagaaactctagaaaccaggcattgattcctccactccagaaatatttattgaggatctacaatgtgctgggcactgatcccaatgct

SEQ ID NO: 35965 - DNA, 2348 bp, Homo sapiens
gaagaaagtatttctgctttcaaaactttgattggagaactttatttgaaaaacagagcttttaaattatactttgtttatgacatttggtttattatactttcttccacttatgctagattgtagccggtcagagccagtgtccccagcaatcctaagtagctaaccatgttcacactgaaagcattacacaccatgcatacacagacagacacacacgtacacacatgtacatatgtacacacacatacatccagccattctttgaaatccagctcttatccctccacatcctttttgaacacttcctgggttttcagcctgtgtgataatgagaaccgtaccatgttacttggttgtttatgagctagttacttctctggaactattatagattctgagcaccttgaaggcaaaaatccctttgtactccctgtctcgcctttctgtctactgccctctactcatcataacacaggttgagcacctagtgtgtaatgtaatcgctttgtaattgtacagacaataatagagacatcaccactaagctttatcttcctctggtagtaggcaaactccatgacaagatcttttactacctctttatttatttatttatttagttttaccacatgcatctttttaaaggcagtcctttaggatacttcaaagaaatccctgagtacattttacaaaagtttgctccctgcccaccctcacccaccaatgcaacacaacttagcaaatgcaatttctctccaagtataaacactcagaggggacaaggaggggattcagttctccctgcagtcatcctgcctggggtggagatctggcccttgtggctttcatgatgaccaccacctgcagcctaaccatttggggcacacaggagagggtggctctttcttggggagatcattgttcaaaagcccctctataccgtttgtctctgccgtgttgcctgccagaagcaatgtctgatgcctccacttggcagccacaggctgtgaggtcatcttttcaccactcgctgttccttcagcatttaagctctctggcagtgactcaatgtttacaatcgcattaacctgtgaggaacgccgtggctgtgtcgaagaacaaggcccctgctggcaccaaggtaactgtggacatgttcttgggaagaggtgaggggagggggcagggagccaggcacagtgtggtgggatacctgtgtgtggggagctctcttccgctcttggcaggacatccagttcccaaagaaggagaatgacccgtcatgctcagtctagtttgtgctgttgcttggaggagaatgacccattgctgtcttgttcacaggccagagtgagcaaatcccccatgcagccaatacacatgcgtaagggaggcacaacgacatccatgcaaaaggagcctctcgggtaatgttaccctttaggggcccaaataaaacatacatgctgaaaatcaatctcactcctagagtgggaaaaagcaagagaaagtgctttctgctatggaggtgaagacacacaggaagcataggcctgaacaactcaaaggagtccttcaaactccagagaatagatggtcgtcagcaaaatgctctaacagtttctaaatacagtgagctcacaaatttaattctcaacatgactcaaatgtgcacacacaggagacacactctttgttttgtctgtaaaaatgatgggttctttcctgagggttcactgactgattggagtgggggaataatttagagccccaccaatttcaagcctagttgcatctaatcatttatacagcctctttaatgaatgtttagccgtgggcaaatgctgggctttcagatagctctgccttcttcctcccttccagggagggaggtggtatcgttagaactggtatctaagtaaatgatgctaccttctgggagaggggagggctatgggtcctccagcttctttggttcctagacaactcagtggttgcccactctgctgccatttgtgcacatgcattaggctgaagttactcagcccctgaggactgtttttaggtcctgaccatgatatataggaaccaagggtagcaaccagaaagctaagcttcaaggcttccagcgaccagaccatccagtatgcccaagctgaccttgatggagctgcacccagggaaggatgaatctgccttctctcagggtgcatatagggagcaaaccaagagtctcacaatcttaaacattctagagtgaaagtttagttctgaagaaggtgagaactcagagtgacaatgtgatcatctagtccagtggtacttcaatacaacttagcagatac

SEQ ID NO: 35966 - DNA, 2479 bp, Homo sapiens
aaacttttgtatatcttacctgttctagaagagtctctggtggtgatggaccaaaagatcaaatctgtaaattatattccattaccaagaatctaggtaattaactgcctagagctcagtctgcccaactgtaaaatgagcagagtattccctgcattggtctatgttgctaggctgttacaagaatagataggagtgtcttgcacacaaaaaatgctgaaaaaaattggctaaagaaaggagagagttcagaaagtcaaagttcacacatacacaagttattagaattgatcaccattctcagattcagaagctactggtagtgttctccctacccccaagattgggagagcattagcctttatagctaacattaggcaacagaatggcttactattggagctggcaacctgcatgcttctacacacagaccactgagacaggcaacctccacaccttctaccaactgctgatgggctgttgcttagacaaccccacatcctggacccaagctcctaaacagaccaagaagaatagcagtgcactgaaggtggagtagacagagggagaaagaacaagcagaccacctaaaatgatgaccctaaagaaatggagtgcctgaacgaatgggactgatgtcaatttggaaaaggggtagggaaagagagggggagagaaaaagggggagaagggggtgtgaaagagagggaaggagggaggaataaaaagaatatgagaatttaggagattcacatacatatttgagactcaaagtagtgacatggaagatcaagttgaaggaatattctaaagcctacgacaaatatccatatctcaccattgttagtacaaggggcctgaaataaaattcccttggggtaagattgcacacaggaggctacatctgctgtgcagctccccaaaactttagccactctgactcatcccaaggggaagaattttggccacctgagttcctgacttggattctgactgtggcttttagcctttgcatcatcctgcatcttaaggattgctctgtctgtctctccttctctgtcctgggtgagcaagctgctggcatctcctgtcggccacaggaggtgtgttgacaagggccaggaaatatgtgggaaggggtgggttggggggagtttcctaggcagcgttcctctaggaactttcttctctaggaattctcttagatcagcatccattgcctgtccactgggtcataagctttccttatgcacgttcagttgttaaatctacaacacctctcgcccccacacagactttcactcccgctcaagagaggggtcagggtgtgtgtgtgtgttgtgagcaaactccttcattgccatggacctggcagaggcacaagccagccccattccaggaccatgtgacactggctgggttactcacttgtttgccctccagcaggggcagccggggacacctccctagagtgactacagcgtttatccctgggatgactcagcccaagcctccctctgcccaaaaagggaatctgaggctggggctggagatggggcctgttgattagccgcatctatggttgggagagcatagaaactacctctcacctgggaaacatgagggacagagtgagtaatgctcagatcagtggctcaggaactcagcgtgaaacataagtttatttgagaagctcaagtgacaggtggagctttgcttccagaaccccaaggaagatcctactcagccacctaatgataacattttcatttcagatttccattcatttcatctcactgacttcactctcacctttattttgttttcgtcatttctggagtgggtcaattacttaaccctgaatagagatgtgatatagcagagtcttagggtgggttctggctgattcctcatcaagaataagattctatttcctttgtcctgaacaggataatctcttcagattacaaagctgtacctacctagtattgtttgttgatgtttctgttgtttataaacactggtctcatctctccaagagcataatacattcctcaaaagcactcgcttcccttatagttctaattcctcatggcactctctgagaagcacatgtggatacttaacacttgttacttgattgttctcaatcttaaatacctggaagaaaaggcatttccacaacctcaccagtcaccaaatccaagaactaaattcagcaagatcgagtttttgatagcaaaattaaagttaccatattttacaccatttcaccaacaacatctgtagtttaattggttaatttccatctgctggccttctagctaactctgaggcattcccctgatgttactattataattgttcctagaggtctacgataaaaacaacggttatttgtagaggcttaatcacacacaaagtgatttcacaggtatttctacttagagcatcaccctctgtggcggctataattgca

SEQ ID NO: 35967 - DNA, 391 bp, Homo sapiens
acacagggagcccatctacttcactcagtctactgattccagtgctaatctcatccagaaacaccctcacagacacacttagaataatgtttgaccaaatatctgtgcacttgttacccaaccaaattggcacataacattaactatcacgtgtatattgtatctcaggcatccagcacattcctacgcacaaaattgtgcaagggacattctatgagccaaggagggatagagtcaacgattcttagttgtgatccctcagagagaacacacatgcaaacgcagacacacaaacacaccccaaaagtatgcatctaccaaaacaagccatataaagaacatttttagcttattcctttcattttaaaggcaaggaaacaggcccagagag

SEQ ID NO: 35968 - DNA, 1588 bp, Homo sapiens
cctcccgagttcaagtgattctcctgcctcagcctcctgagtagcagggactacaggcgcatgtcactatgcccagctaatttttgtatttttagtagagacagggtttcaccatattggccaggcttgtctcaaactcctgacctcgtgatccgcccacctcggcctcccaaagtgctgggattacaggcatgagccactgcacccagcctttttagctttttattagttcttcacaattaatttaaaaaaagttagaattctgtctctttgaggcttctgaatgctattaataattagaatgacattctctctgctaaatttgagagacttgagatttaagtatgcttgtcaaatgaacagccttattcatctggaatgttccatataatggccctgtaattctgaattatctttagtaagattttgccacttttgtaaatatttgcagcttccaaggtcatagctcctagacatgaaaaaggcaagtacaccagaaggcgaagtactcagatatttataaattaaggatcccatttttatgtatgatcttgggtctcttagagctgacatggctttagctataagacctcagcatataagaagagaaaaaaataaagagccccccttcagtaataactacttattgtaactgccatcagttaccttaaaaactgcagcttttttgccagtgactcatcagtcaccacaaaccgaaaggtcatgtgccctgccacagcacaaagcaacccttggtaacacacagtcaagtgctctttcactatataaactaaccctttgtaccccaaaggccaaagatattagggagctcaaatgcaaaagacaacagagctccaacctgagaggaacttacttatgactcctggagctccatgagaaagacagaggaaccccttcacccccgcccctccaaaagggactacagcatttttcctatgtttctcagaaggtctcagggttttcagcagtctccttcagtttcctttgtggtcaccagatttgccaaaggacaaaattacacgtttagtttgaagatctcgactagctttattgcaattctaggattgggcaatgtctcattccataaaatagaataagtgtcccaaagagttgagcagaggggattcattttatagacagagggggttgaagaaaccagaagcaaagaacaaaatgtggactcgtcctttgaaagttacctcccttacaaggtgagaacaaggaaacagaacaatagagaaataacagatttgttagcatcaggttacgtcgggttacttttgttgtaaggattaaaacagagggaacttcgttatcctgctcattaaagacggaaactggtctgcttggaacattggctgttactgctctgtcctgattttggggaagatgaaataacaacttattttcagtttggtgatatggaactttggcatgggtgactccattttgatttttagtctggtctgttggggcctaatacaaaacaatagcctttcataatttttacttaacattaggaaataagacacaaagctcatatctttatcaaatctaagggtctttg

SEQ ID NO: 35969 - DNA, 1319 bp, Homo sapiens
ccctgtggaattcaggcacatctgaccagtatttacattcaaacagcaactttaagattgacaaaacagactctttgtagcagtaagatatcaacatgacagatggcaggccctgaaataaatagaagtattttaccccaaaatatatttctttgacatattttgaaatgaccctgcaaagttgtttcttgtgggaaaaatccacattctatagagaatccccttccctttccaggtctttttcctgatccaggagagaattaagagtctggcacctttttaagtcttataagaaacatttactattatctctgaagcctgctacctagaggtttcatctgcataataaaaaccttggtctcctcaaccccttatcttaactcagtcactcccttctattgattccaggccttttgataaactcaaccaattgccaatcagaaaatctttgaatccacctaagacctggaagtccccccacacctttgatttgtccacctttccagacacaacccatgtcatcttaaaagtagtgatcgacatctaatgtatattaattaataaattagatcgacatctaatgtattgtgtctccctaaaatgtataaaaccaagctgtagcctgactacctttggcacaggttctcaagatctcttacggctctttcatgggccatggaaactcatatttggctcagaataaaactcttgaaatattttacagagtttgactcattttgtcaacaccatgatttgagcaggcagctcaaagggtaaatccaatgaggaaataaggataaaataatgtgttctgagcacctattctttgtcaggctctttgcctgtgttatcttttaaaatctgcacaacactgagaaataggcaatattcctattggggcacagaaaacaaaaccccaacagttcaggaacacagaggaaacgtcttcatattttacacaagtgaaggagatatcacaagcatgaatgccctgaaaatgttcccccagttttctgtttagttctgttactttcagggtaacaatattattaatcatctctaccactaattgagtgttagccacatgcacctagcactgtgctaagcgctttatatgcaccatttcattgaatgcttgtaattacaatgtgaattattattattatttattattaaccttattttacaatgagacaacttattgtcaggcctctgagcccaagccaagccatcgcatcccctgtgacttgtgcccagatggcctgaagtaactgaagaatcacaaaagaagtgaaagaccctgcccgaccttaactgat

SEQ ID NO: 35970 - DNA, 716 bp, Homo sapiens
gacttccccctttcctataaattgaatccattatgagtctggccagcttgaccttctgattctatttttaatctgtttcttctttctacccatactaacttgtccctgtttgggtctttttaaatcttgctgggacagaaaaatagcttccttatttgtctctctcttttagttttgcctagtctgcacccacaaatcaatgcacgttaccatcagaatgttttctctaaaatacaaatccatccatgttactgatctacctgcaatgaactccctactggtcctgggagccaaatgctcccagaatcaccgtctcctctcccactgtgcttcttccactcaccttgaactttacactctgaaaacagtttgtattccatctcccatgcggcactatttcacacctcagtagctttgctaatactgtgttctctgccagaaacactcttagcgactctattgcttagccagctcctactaatgtctttcgaaattcagtccgatcattctctcttccatcctctcctgacctaaaccccaagctgggttacgtgtctctcctttgtgtccctgtagcttccagaatatttctttctcacaatatttactgtgcaacatcaaaataacacacgtgacctttccttaaatgaaactatcagcctcttgagggtaacggtattgctcatttatgctatatctcaggtactgaggacagc

SEQ ID NO: 35971 - DNA, 474 bp, Homo sapiens
atgacttctctaattaggtagggaagggaagacagtctattttagcctaggaatgaaagatgaagcaaatagtcacacatttccaaatatgtggtcggtcacttcagttccaagaaggactacccaattctcttagcacagcaaaataataatgataacaataattttttacatttactcaagttacaacaaaaatttaaaatggctcttgcctgcctctgaacaaggcactgtaagtgtggtcacgtgccctgtgcatgacaaaggtcacagagtctgtcctcagtattgtcctttggcctgagactgcatacacagaattaggattagttcagtctctgctgctaacctccccaaaataaccctgctagcatcaacgacaaagacttgggtctgggcacttctccctgtagtggactagcttgtactggaccatgtttacacttaaagaaagatgatatttgtggccaggca

SEQ ID NO: 35972 - DNA, 879 bp, Homo sapiens
cagaatttattgtcattcaggaacacatcagggctgtggcctccaagagggactctttaattgccttagtaaacccacttcttttttatgtgcagatgccacagggaacaccttccactaagtctctctatgcccagtgcatgaagcccaggggagaccttctgtaggagccaagtaataggaagagcttggcttcctctaaataattggtgtattttctccctagaggcaaaaggaatggggtaatcatttacccaggtctgtattttctgtcctcaaatctgtcggctcaatcatagtactctggtttaattaccttataatctgaatttctgcaataagatccccagcctgtaccccaggacctgacctactttttcaatatttaatttttttgccttaatttgttttaattgataacttattattgtcttgtatattttttctgatatcctccagaaatcttttttgtttgattttttactctcgttgtttttatgttagtgtggttcttacgcagtaggggaaaaggactgtggagtcactgacctttgccatctgctcctgccagctcctcttgccagggcccctccagcaggccaagtcccatatccacctgctggctgcccagagctgcacacagaggacaagagccctctggctcattcattgttcactctactcttccatcttgaagattcttaggcttaggtcctcaggacaccaactccaaatgagttaattaaaaagacaaagaatataattgtcaacagagttcatgagttatccagcttcaggtagtgtgtatttcaacctaaaaaacaaacaaacaaaaaagaaaactgctagtttcaacaaaggctccagattcctctgaaa

SEQ ID NO: 35973 - DNA, 1905 bp, Homo sapiens
ccaaagataataagcttgtagcacagatggaatttgaatggaaatccagagccccttgtccccaccaccctactgctatccaatacaaataacatgaagttctgggttagaatttcactcagatgtggttcttgttggaagtgggttttctaatcaggagaacagataaacacagatatattacaaattgccaagatatataaacttcaggcatcagctacaggagaatttatttggtgacaagtctgcatttaaaagccattgttaattgaacatttactatgtgtctaataaaaccactgtgataggtatttttaattcataaaactaactccagttctttacttctaggatgataatgtcttcatatttcagatacagacactgaagcacagaaaagttaagttaactagcaagcagggcctgaacttggattgcttctcatacttttcatactctctatctgcctcctgtacaacaatgagttctattgttttactaatgtgaaatgagcaattctaactgcccgtaactctccactagtggagcacaagttggggatgtgttcacacagagctatccacacttatctaatccccttcacaggcagcatacatgtatggagccagggaggctgggtgcgaaagggcagtgtacactaaggtgtttttcttttgggtcctggtctttgtaccaaagtcagttacgtggcctaccctggaacaagtccctaatctcacaaataacacatgcaatccaaatgtgctaagtggtagaaacccaactctttcaataccagtgttgttaatcatataaacaaccacaaaacagtgaaaataatatggactttggagtcacatagacccagtggtgtgctggtaaatatttgttttgttttgtttttctgataaatgtttaacaaccagctctccagtggggaggaagagagctctgatttatagcattttcccatttccacagtgtagatactccaatcatggctcatctcaagaaatcaatatgacatcactgcacatggagttgtaagaaatgatgataataagttctcagaagctgatgccagccagctctagcccaccacttccagtagaccctattctaatcccagttcataatctaagacttgaggcaagccacatagcctttctaagtatccatttatacttctataaaatctcaaagacaatgccactagaaacgatgtcatgattaaagggctattaacagcagaacaagataatttctccccacttcccaagacagttgcacatacaaagcatcaaagggaagcaaatgaacactttactgtaaacacaacctatgcctctgaattcaaccagaagaatctgataaggcgagttttatcatgtagtcaaggttggcatcctaaggggggaactatcccatcctgttctgctattccaagtccaaagccacatcccaggatctgttcaccctctaccaaccagatgaagaaaagagactgaacagaagaggatgtctgcaggtcaggtttgactaggcctgccctgaggtagcaagacagaaactggtttagcagtatgagtgcaagagagagacaagagaaaagcaaggcagccaagcttccaactcagcaaaaaagtgccaggccctcttacccttcctgtcacctatagggagaagcagagcagcaccactatgtttaataaccatttccatatgcagggactcatctgctggcaccatggcccaatcagcattcagcttgcttaggttagcacctgggagagtggattctctgcctttaaaactgacccagttgtccttgtattagtccactttcacactgctgataaagacatacatgagacttggtaatttaaaaggaaaaagcgtttaatg

SEQ ID NO: 35974 - DNA, 761 bp, Homo sapiens
ctagcttttcaactttgaccattacaattggtgcatttcctatgtgtctgtgacttgaagaaaggatatgcaatttactttgagtctgtttttttaaccaagggatgtttttcaaccagcagttactttattaaaaggaaaaaaaaaaggtaatgagtgtaaaatcccattggttttttaaagcaactggaaataatcgatgtgcatttgcaacctgtttctaaatgttcttggagaactgttttgaagtgtcctgctgtgacccatgtgatcccaatagaagtggttttggagagatgcctaatatgagcttatcacagaccgaataagcaaatgaataggcagttgtttgcggctgctttgaaacagtcagctgtgatccttaaggaataagtgagcagaagtagaaaccaaaaatttctaagctgctgtgatctttagatttaagtggaagccgatttgcaagcacagctctgcatgctgtgatggtgtgcttggcaaggccactcatgctaattcggcattgatctgcacactaaagcagaggccacacatttctgtttccttttctcctcgggattgtagaaacttctatacaatacctcgtctcctcttccaagttcttaacagaattagttgattaagcaccatgttactcccctgacggaggagtatttaagctgcccttgcaagatggcagatgcaccagctcaatacagaggtgtgggaagggggcctgactaaaaaaaagctgctgttgc

SEQ ID NO: 35975 - DNA, 615 bp, Homo sapiens
cgtgttattctcagcctgtgtgaagactgcattgtgggattcatgccagaaacccagtcttgtcccattttgtcccccctaccaatacttgctttgttcatctgaaggacctaatgatacccagcaaatgctaaacagaagattaggggaaggagagagctgctcctgctatattacaggtgccttcagtgacagtgccagctctgagtcattgatgacattaccgccacccagggagcaaaggagagcacagctacctcctccacctcaggacatgacaaagtcccattgtcctctggttctggttattgttcccttgaaagaggcagggctgtggcttgttgtgacccagagctggttagagccactacccatcccttcccttccactctcccaaacccacacctccaagcagaaggtgtgcagtccagagaggaactggcacatggggtttcctacagagccacacttcttcattgcatgaagtgtgacatatgagagtgcactccaggcaccctgtgttcaatgtgctactctctgtaggcaactcccaaattctatgactttataccaaagacaccattccactgatctcccacctcaaatccaagcctt

SEQ ID NO: 35976 - DNA, 1051 bp, Homo sapiens
ggatcccagacatagggctgagcccagctggttctcattctcttctggggccaggcctgctgctggtttcatttaattgaatattttgattgtttgatttctgtagccagaagcctgtaggcagtaaatgcccttttccatcagttcaagaaagaaaatgtacctgccgaggtagtatctgcttcgctgagctgctgacttattttaagaactaaatctttcctgttactatatttttcactctggggtgtgcgcgctccaagactgacagtaactcaggtctaggacaggagcgtcctctcggcgatgacttagcgccacctactgaccacttgctcaacagcggccacgttcagcaaccacggtgatctcgacagacacgaaaatgttctgtgctctcaacgagaagttctgcatgtattcttcccttctcacatagcagagcttgcctagcagaattgtgctccttttattttttaatataagtaagttaagacacagggctccagcaagaaagctgagcaagttctccatttggcaactgtttcatacttcccgactttggcggctgtcatttataaatgatgagctcatgagtgaggaggctgatgcaacccccaggggcccaaaacacaagcatggagaaagacagccctcctgtgggatctgatgcaatcgtcttgtcttctttaggctttgataccagtgtttctaaactttaggtgcaagattatcctcacagcacctctaaggagtataaaccccagggttattacttaccggttaccacagcaactcatatgtaaagagttggaaagtccttcctctgtggtgattgagagtagacatggagctgtttgcaaccccctaaacacattgcccccttgccacacaatagcaaaaattgagaattatcatcctgtcaccacccagtggctctgggccctcaagctcccaattacttacagatatctacagcagagtctcttgaccttcgcaccatcgggtcagataggtctttgttgttgggaggctgcctgcgcattatgag

SEQ ID NO: 35977 - DNA, 1920 bp, Homo sapiens
cactttccctcccagcccttgtctgtatgcataagttaggtatgatttagtgtattgtaatcacaaacatatgatttgaggcttcagtgttttccacttatcatcatgttgtaagcatttttctttggcatttcatagccttttataagtaccattgataatacacacatggggtcaaattctcacggaccgccatataaaccaatgttgttggtaagatctgtgaattcctgaaaacaacgcctcacgtgggctccatagctcagtggttagagcactggtcttgtaaaccaggggtcgcgagttcgatcctcgctggggcctcctgttggcttacttttattttaatccatagcatttaaatacagaatagagtccaaaatggaaaacgtgatttccgaaaatgttactcctagcagagctaaacattagttctcctgaaatacaaatgatgaccatccttaacgtgctttagaagtgacccagaagacaaaatcctagtcccccaacaaaaagcaggcaagggcaggaggagggggaaactggcccggcagccccagtattacctggacctgcaggccggagtactggaattggaggctccatgggctcgtattcaacgtcctgcacacaggcaccatcccctcaattaaaaccagctggaggcggcggccttggccgtcaactcggctgctggctaacaggacaggccgaagcggcgctgcgcctgcagttacggcgcgtggccggcgggcggcgctgtggcaccgctccccatcgcctcaccggaggctagcggctgcgcttctccacgccccgccggggccgagagcgccgccagcgtggcccgaatgctagccgtttctgtggctgacacgtggcagcccaggccccatagcccggcctggctccaatgtcctgccccttccgaggctactccccaaaatagtcccgggttgcttgggaagccagtgtttgcagcctttctgactctccgtgttttctctgaattcctcaatggcgcgtgactacagagtcaccagaggaaagtgccaagagccttttttctgaacacatgaatttttccaacccaggatttcttttcccagatctgagggccagagcttgataaaggactgtgtgtgaggtcgccacaagccgcgtgtggccgctgggtgcttgaaatgtggctagaccaaatggccatgtcctgaaagagtaaaatacacatgagatttaaaagacttgaaaccgaaacaggatgtaagccatctcactagtaatttttgaattgattccatgttgaaataatattttggatatattggattatataaaatatagtataattaaaataattataaaaataattgtataattacaattaactatttttttaatgtgcctattagaaaattttaggttacatttgtggcccccatctgcagctttcatttatctttctgttagatggtgcaggttagggacccagagtcctctgaccttgtgtttaagttaattcttaatctggctcccactaagtaaactgtaatagccagagaaagtctctttcatctctgggtctccccggagtcagtactgtgcctgacaagcagtaagcacaaccttcgttgaaatgaaattaaatatctccccaacaagctctacaaagcaagggaatgtatttcctttttttttctttttctttgttgttgttattgttttttgtttgtttttttgtttttttttgaaagggagtctccctctgtcgcccagggttgagtgcagtggcgtgatttcagctcactgcaacctccacctcccaggttcaagcaattctcttgcctcagcctcccaaatagctgggattacaggtgcctgccaccatgcccagctaattttttgcatttttagtagaca

SEQ ID NO: 35978 - DNA, 2563 bp, Homo sapiens
tgtctacactcttctggatgttttgcataatatgaagaacttgatgaaaatagggaccatttcctcccttagttcttcattcctcaaatacatagttcaaaagtcacaatccttcattgagggcctccatgaaggcaggtgcacagcagattgcaagagggaattgattctagtccagctgaactgttccctgttccctcacaccactgtgatccagtaacttaacctcacaaagtttcacttttctcatcttcagtggaggttatatggcaatagagaagagcagggttttgaggtttcaagatagggtataagcttggcacacagtaggtattcaaataaaatgtagttaagtttattatgctatgtgcataataaggccaaatagtgaaacttcctttgcaaagattataacagtgggagaagcctggcatggctgactccctcttgcctctagcctcacgggctggctgtcctcgctcattcatgaccgaggccaagctaaccatgggaggaattcagtttatagtttaactttgaagcaagaattataatagtccctccctaaaacaaactccctccttgctcagggactgaagctgcctttgtaaaactgacgaaaggccactagataatgggaagggcctgaattctgctaaaatgcaagcatagtttctataatcccttactgctcaggagtcatgtggtcagagttcacaagatttatgacttctccagttgctcctatagataacatcactattgtagcacctaagattggtcttttgagatgtttttcagatggttgcattctggaaaccaactaaccctaaccggatttgtgattcatcactcaacaggtcctgtggccccgatccagaggcagactcagtgcacaaggacagttcctcacacccctatgatttcatcctcaaccaatcagcagctcatattccctagcccctcccccaccaaactatccataaaaactccagcctctgagttctctgtgagactgatttgagtaataactgcaatccttctacttggcaggctctgtgttaattaaactctttctctactgcaatactgtggtctcagtgaattggttttgtctgtgcactacacaggaagaacctgtcaggcaattacgatagtaagtgctggaggtacagaactgaacctgctcttgttcacttcatgagctttgggctggggaaaggagataccacatttaaagggtctttccttgtaagcttgtcacaggcttcctcttagacctggggtgaggcaggaaggtgaagcatggttcttatgcaagagtggtacagcatgctagatttcctaatgtcaaacaaacatccaggatatcaaaggatatgtgccagtttgagcaaatgttgatttattacctcaggttgtaggcatttacaagacaaaacggagacatccagtgtgattccaagcaggctcatggactagtgcttaccataacccaggtgcaccagcaatctgggatatggtctcccacagaagcactgcatacagagaaggtgcatttatttattcagtagacagcaagatttcccagggagaggaaaaccgccctgccccacctctaccctggcttcccagacttctaaggtctttattcagcagtgactttcatttgatgaggtggctctcctctctcacgtcaccctgtcggccaccttgaccaataggtcaagggagacttctgccagctcgcttctgctctgctgatggcctcatcctgccactgtggcttttcaggctcttcctcctcttgccctggcggacgtggggccccactctggctttcttctttgtaccaggccctcgcaatgtattcttgctgcttgtaggagaagccagcttcttggaggagcctttctcagacaaaccctgggctgggccagaagctaaggttgcactggaagattttctagcagctttctctgattgttcctttagcaagtccaagactgtctctgagaaatcagtatttatttagtgaaaaatataagtcccagaaagtagctataagagaaaactataactgcattatagttctttaatataaattattcttattaatacttttaattctctaactggccttggtctaaatatatgacttttttagaagggtcactccagtgatacatggttctgtaatagtttccttaagatagtatccttcctctgtaagtctttcctgactccccaccctgccccaaggaaacattcctcattctaggggccctctaagtgccctgagcatccttctataccagaacattagtgctacatttatttctttatttgcctgcacttcccatccccactcctatttaactctgaactcctacatgtcataggctttaagtgttcattgctgtatccctagggattagcatagttcctgccacaaagtaagtatgaaatgaatgatgccaaatgaatgaatacatgaacgattaaatgaatgaatcaacaaacgaatgaatgaacgaataactagaggaaaccggtcacagta

SEQ ID NO: 35979 - DNA, 927 bp, Homo sapiens
actgcttatatacaggtggtagggttcagtacagtgcaaaatcacatcaaacttgctcaaaagttacattcaagcagaatctcatcaaggtttaggtgtaagagtacatctggttatggattacagaagcataatcactaatcccatcagacatctcatgtgtaagaaaaggcaaggactggggtcatttaaggaatgtagtgactcaggcaagcgatgtgggggtgccctgtgccctgttttgtcttcaaggcatctttccagagagttgcatgtcgtcacagggtcaggggctttgtgaaatgatgctggcaggcagaaatgagcagacctgggttctttttgctgctttgtctcactccaccacctggctcagctctctgcatgtagtcaacactgactgcactgggaggccatacagatactacatgagagtgtgatctttggaaccacattgattgggttgggatcctggtgccaacacctatgagctgtgaccttggcaagttacttcatctccaatgacctcattttctttattggtaaaataggaataattcataggactgtggtggttttacaatgaaaggtaaagcccaattttagctattactgttattcatggaagcagcttaaacatcagtggacctaaaaaaagtttcacaggtgacttgcactactcttactgaacatttgataagaacatttgatgtaaaaatgttgagacagctttgtatggaaaccaagaatcaaaactactcatttcttttattctcacctccattttcttagagatcaagagaaatcatagtcctgttttatagcttttgactaaaagtttcaggaagtagatcttggcctatgctttcagattttttccacatcgtctgggaatttcattgctagagtattggtcttatacagaac

SEQ ID NO: 35980 - DNA, 1238 bp, Homo sapiens
tttaaccctgccctgtgaaatttacattctatgtagagagacaaacaataaccaagaaatataattaaattgtcaactgttagaggaaaagaatgcagcaggacaaggagatcaggagtgccattcagaaagtgcaggttgcagttggagtaaggcaattgcaattttaaatagtcaaagtaggcctcaatgaaaaggggccttgaaggagggtagctgcagtgatagctgaagaaagagctttccaagaactggttaaggcaaaggcaatcagtcaggaatatgcctggcccattcaagtaagaacaaggagaccagtgaggatggaaaagaaaaaacaagcaggataatacaggttgagtatcccttatctgaaatcgttgggaccagaaatgtttcagacttgaaattgtttccgctttttaaatatttgtatatacataatgagactggggataggaccaaaggctaaacatgaaattcacttatgtttcatatacacctatacatatagcctgaaggtaattttatataatattcttaaaattttgtgcatgaaacaaaatttgtatacattgaaccattagaaagcaaaggtgtcactatctcatgtcagtaatgaaaaagctttgaagcattctggttttcacatttttgaattcggaatgctccacctgtttcaggagatgaagtcagagaggtcaaacaaggaaaggaagtgagcacatcacataggaatttataggcaattatgactttggcttttactgaatgaaatggaaagctattacagtgttttcagcagaggagtgacatgatctgatatgttttaaaaagctcactctgaatcattagtcattagagaaatgcaaatcataaccaggatgatgccacttcacaaccacaaggatgactattatcagtaagacaggacaataacaaaatattggcaaggattagagaaattagaagcctcagatattgctggtgagaatataaatggtatggccactttggaaaacagtctggcagttcctcaagaggctaaacatagtgttaccatatgaccagcaattccactcccaggtgtagacccaggagaaattaaaacaaacgtccacacaaaaacctgtacacaaatgttcgcagaagcattatttccaataaccgaaaagcaaaaacaacctaagtgtctaacaactgataaatggacaaataaaacatggtatttccatatg

SEQ ID NO: 35981 - DNA, 1927 bp, Homo sapiens
ggtgggtactattactttcttccatgtgaaggttgaaaaaactgaggggcttagtgaaatgatggaacctgcctaacatcacaaaaaatggtgaggacgatagtctaggaaatagaacaccaaactacttggcatgactagaattcgaggtgcgtgtggaggaggggtgcggaaggtgagaaacgaacctagaaaaatcatcataagccaaggtgagtttagacttactcctaaagatgctcagggccccttcctcattacccatatgaaatcgagtattagtgcccctgatactacctccaaatttcccctatttcccctcttcaatcctacagcactactctagttcaagaccccttcaaacagtgcctagattaccgcatcagctttctaaacaattaccctggctcagattttgcatctctgcattatacccagagtaaaccttctaaattcaaagcatgtggctaggagtatgaattataagtaacaactgaatttgaatccgacccatcacgtgttttcaggagtagttacacaaatcctccctttccaaatcctcaaaaacccaaattggtgacccgcagttgccacggcaaccaaagcttctctatccccttctttcgttttcagaccccaagggtttcaggtattaggaggaaatatcaggagaacatggatgaatcctgacacaccccttcccgttccatttaaacgcaggaaccacgggcgatatctgcggcacttacccgcctaaatttagagctcctcagtaaagctaaactcagtctccgactccggcccacgtgaagaaattcccaccggaagacgagttaggagagctttatatgagcaggcgctaaacctggtttaggtatttaggcagcgcgcggcccggctcgtaactcctcctgctgcagcaggcgtatcgttggcctcgcctcgaccccggaagtgacttctggaagtgacccaggaagtgacagtgagctgcctctctgcgattggttttgcccgagttttatttttgtctgtctcagctagaaagtgggagactttcatttaaaatggaaattggggcgaggggttggcggctgggcgaagggagcattcaaaagcggagaatgtcactttacccgagaaattcactacgatgggccattggtttctgctcggctcgcaggcgcactgcacgagtggaggtgtggctagtggctgtgatgagataaatccatgcatagccttttcattgcgagcttgaaagttcttttctattacagttttagctttaggtttaattggttcgactgccttctccacaatttgggcgagaatttcctttgccttctcagcaaaagttgttctgcggacccgtctgggtcaactttcatgagggacattgagacaaacaaatgaaatatgggttaaaggtaagatggttaaaccgtgtgaaatgagagacagttgaggggttctagggaagatgatcccggaaaaggactgcaggcccatggaaacgcagtgtgcttctccaatatttggagggctgatcagtgaaagaaggatcagaccctttttcttagcagcagagaacagaactaggactaataagtgaaaggtaaagggaggctgctttcaagtcacagcaagaaagaattttgtccacaaatgaggatgcacaaatatagcataggctcccccaggaatcactgagtttcctctgtgtaggtgaacagtttgagtagaatcggagtatcggagaggaaattaaagggtctggtaagagtttgaggccgggcgcggtggctcatgcctgtaatcccagccctttgggaggccgaggcaggcggaaagtttgagctcaggagttcgaaaccagcctagtcaacatgatgaaaccccgtccctacaaaataaaaataaaaaa

SEQ ID NO: 35982 - DNA, 2057 bp, Homo sapiens
tccctgctcagaaagaaagtacaaaaattgcttgttgcttgatggaggctttacagagctgtgattaaaaaggagcatactacctgggtttgaatcttagctccatcactcactaggtgtttgaatgccttaaggtagtcatctctgaaatggggatcataataggacctactactctaaggtgcgattgttgtgaagattaatcttaattctggcatgaaataagtataaaatggaagctcatcacactgttattaaattaatttacttttttcctatggatatagatctaggaatctcaagatctcagcccaaggaccattacccatttctatcaacgaccaagcaggccacgggctctgatttatatcctcagccccctattccactcacctccccctttcttaatcaaagagcaccacgggatggtgcccccaaggaagccctgggaggctgaaaaggagggagcctgaaaccagagactaacagtggcaaatcgcgggtgggatttggcagttcagaaaaggaggtaccatgccaagagtgggggtagcggggtgaagtagcggggtgaagtggggggctggttcgggacaggccacaaaccagaaactgcgagaaggcgccagaagggacctgttgagatggcgcagggttgggggacccaagcgcgcggggaggggtgaactaagaatggagtcacgcggaggtgctgcgagggactggggcaaaggcaggtgattgggcgagggagtcctggttgccacggcagcgaccagaggagaaggcttcgaggagaggaggaggctgctgtcagtcctcctcctggaggtctcccgcatccctcctagagcctctgctgacgtgtcagtcggaaactgctcagaccttcgcgggcgccgcccctctgcgcttgtcttcccacatgcccccggcgctccgcctggtccctgcccgcgtccctgcccccgtccctgcccccgtccctgcccccgtccccgccccgtccccgcccccgcccccgcccccgtccccgcccccgtccccgccccgtccccgccccagcccccgccccagcccccccgtccccgccccgtccccgcccccgtcccgcccctctgcgcccgccccggcctcctcctccgcgtcaccggctccccgaggtgaccacaacatggctgcggcgcctgggctgctcgtctggctgctcgtgctccggctgccctggcgggtgccgggccagctggaccccagcactggccggcggttctcggagcacaaactctgcgcggacgacgaatgcagcagtgagtgcgctggaggggcggctggcctcggggcggctggccttggggtctccgccggccccgggggtctccgcggcggcgccgcctgggctgtgcggggacgggagttccgcagcccctggccggcccgggggtcgcaggcgggatgggctgaacgcgggggtgggcgcgctccgggtccctgtgtctgccttctcccgctctgcctgcgcccggcccctcgggcctgaccatgggggctgcacctcccacttgttgccagcgttttatttttcctctgctgaggcggggggttgcttgcggtggtccccggcttccccaatagtggctcacagcgtccccttcccacccccccaatccgcctgggctcggagggtagatgtggttgcgcgccgcgcgtctgggctccccacgccgcaaccaaagctttcctgcccgcgctgcggggacctcggtgggtgcatcaccccggcagatgcgctaagggctcggtgggcgttttcccagtggcaggttgatggtggggtttgtttggaaaggctccctggcgctgctcctttgcccttctgctttattgggatttgggcttgtaccgccttttgaacaggaattgggagtttaggtttgggacgagtctggagtccaagcactcattgtattccgaggtctctgccccgactttgatcaatcctgtcgtttctgtgcttggaagccgccttgcagactgctaggcaggactgcaggaagacc

SEQ ID NO: 35983 - DNA, 1958 bp, Homo sapiens
tgtttgttttcattttttacattcaggtttctgattaacttggaatttatgaacaatgagaaaaagatccagttttatcattttccatattgttatctagatatgtaataccacttattaaaaagtctgttaaccagctgccttgctgtatcgcaaatttccagtgcagttgggtctatttctggattttttattctgccccgtggtcggtctgcatccttgggccagtaccatactgttattacagatcctgccctcctcttgtaccacacccttcactgctcttctttctcagggttttcctgcttgttcttgcttgattgttcctctgagttgactttatattcaactcgaagagagacctttaaaggtctaaaaatggtattttttatctacagataccattttttccccacagattaaatgtccccggtttcttcaacttttggaacgtgatttccatactattcattatccttgtccttttccacaagtcatataaccttaagatgtggccggacacttgtagtcccagcttcttagatggcttgagccccggagttcgagtccagcctgggcaacatagggagactccctccccttccccgcagccaccatctaaaaaaaaaagtgggacccataactcaacccatgtgcatgggggtgacacgatgacatgactcctgggtaagactttttaatagagtgtcggcaagaatgtgagacagcgagcgcaatggaggtctggaggcggaacagtaagcagaggactgagtgggcaaggaagaaaggccgcgcactgcagtggcgccccatctgagcggtggtccttccacgctgtgacaggaagggccagctccgggccggcacgagagacctgcttttctccttttccccagctgccgcccacaatcctcctccaggtaaatccctggcctcattactctggggctctttaagtcgccggttcctggcgaaagcgccagtcacttccgcctctttttactgggattcttccgctctagccctattcgctcttctctcccgtcccctcgatagttggttccgtccgctctggccccgccctcgccggccggctcctttggtgccttgaggtgcgccaggggcagtggctgatgacgtgttttataggcggcataaagcgaaagtgcaggcagctgtggaaggcgaagttcaatcccagagtccgccccctgaattggggcctttccggaggaggaagctctgaaaaacagggggcccagtgccattccgcagggaattgtcgcttgcgttcagctgttctacacaatggactcagtacctgccactgtgccttctatcgccgctaccccgggggacccggaacttgtgggacccttgtctgtgctctacgcagccttcatagccaagctgctggaggtgacagtcccgattcccggggagggacccaagctgtcacaggcgggtggatgagttctaagcagagtgggtgcactgattgtctgtgcaaaggagaaatggagtgtgtcagatccgaggaaagcaagacgtttctatgctgtttagggaggcaggtgggagtgtgtttgagaaggtttcgtcactcttttttttttttttattgagtacttacgaagtgacagcactttatgttctggtgtgaagtcatgatcaaaacacagagaacctacaggtcttttctgcataacccccggctctgttgtgggatgggaccagtgtgatagtgtacttgtaaagggctgtggaaacagcatagagcagacaggtgtttaatgcactgttttcaaggaaacatttagaattaaggcactaaattcaaagcggtttatctagatcagttatcaggagctatccgaacttagtcagcatttgttctttgtttatgtaagtcgatttaagattttaaatcttagaggaataaaacgttatttgtg

SEQ ID NO: 35984 - DNA, 3017 bp, Homo sapiens
ttcatactcagtgaaatctcaaacaataacttgctttaaacagagaataattaatggcgagtttgcaaacaatagcattttggcagacagttcttaagttcagtaaaatgtgcaaaaacctaagcaaggttttatgtgtatataaatcttgtcttttattttttaagacaaccctgaagttttctgtggaaaccagaaagggcaagaaattggtcttaggttgctcaaggaaactggtactcacttgtaccctgcggctatacattatatacaggaaaaggaggagggatccaaggagggcgtggagctcctgtgcgtggtccattaattcacattttgctctcttcggttcacatcctgcgcggactccacccaaggcaaccgagcgagggggtgggtgggactcacagcctaccaaataacagtcccagaaaccgaaacgaaatcgaggtggaattctgaaaacacggctcaccagaaagaggggtggagaaggagcgcgagaggagacccttcttttggcagaagaggtatccctggccctcgttgcttcctgggctcccccccatcccctcaatcgcaaacagttccctcctttcctacgcatggaagaaggaagacacacacagagcaaggccactcatccttggaacgtgggcggagaacacacaagtattcctcagagaatttcaaaaggaaatcgaggaaaagcaacctgggagaggaggaggaaaggaaactgactgccaagtgggggacccgcgagacggtggaaaggaactaagcagatagcctgctggggcctgcgccccaggaaagaagggctacctgttgaatggaactgtccctgcggaggcggagagggaagaaggcgagtcaccccagagagcggagccgttgtccctagagcagcctcgctggggctggtggcgagggatctcagccccagtgcctgcggagccccaccctgagaagccttggctgcagatacggtgatgagagacaccgacagaaacaagggagaggcgcacgactggagccggtctggcctgctcccgcggttagtcactcacatctgatactcgtctatcgcctccaccagctggccccaagagtcgaagtcggcgcctctcctaaaactggcgccccagcgctgcagcagactccgggtcacctccgacatggccggtccccaccccgtcccctcccgcccctaccccagcaaggccgggttctagggcgccatcctcccccggcctggccccgacattaacagggccaggaggaaccgctacggccaccaccgccacccgccgaggagccgcccaagcccatttgccgccacagccaaactttgcggctccaaagcgaccgccccgccgagaccccgcccccgaggccccgccccgggttaggttgaggccgccccactgcgccgagggccgccatcgctattgcggcattctccctcggctccggaggtaggggcaactcttctcttcctgtctgggaaaaagaccatagctcaaaaggaaggccgagggagaagttagaaagggatgatgaacgaagcgttttgaggggactgcaacgccgcggcaatacccgcccctgagctgcgcgcactaccgcctcggtagctatcatggccgccgggtcacgtgactccggcttggcgccgtcctggttttccgtcaccctggttctgtagtctcggttctccgactccctctttttctcgcttgtggactccgatatattgcccttcttcccttagaagaactgctgaaccgactctgagaaatttggtaagtatgtcagaggatgggtgtttctcagtaatatcccccgctacttccccggagtctcaagcaataggatcacccccttttacattagtctccatagacccctggacagtggaccaaaagtctccttctagtgccttgaaacaaacgacagaaagaaaatccatattggtcaccacaaatcagtggcattaacagctagatccgctgaatccccttgccccgcatctccattggtcattggagagcttataatacaagctaaactggggttcgttcggccgttgtctggccacctctcccgggttgacagtatcggctttccacaaaaatgcctgtttggaaagaggggaactcaagtgttggcgcgtgcgcacggtcgccgcccgctgcctcgaacgggactgggcacgggaggaagaggctgggtggtaaacaggaagtgggcgctcagagctcgggggcggcgctcaggtaggttcctctggggactcggggcttccggggtgggggtcccttgttaggagcgggagtcctcttgtggaagtgtgttagcttacagcttcgatccgaatgttgtattggtggctctaaaggcacccttgtccctgcgggtgggtgtgtcgttcttctatcccaccctaggaactcccgaaaactgaagaccgccgggtcgcagaaggggagaagatggggcaggggcagaaaccctcttctttcctgaagtaaagattcgcaaaacttcagacattttcatccaggaagtaggaggccgcattaaaagaagtatttgtggaagatttcgcagcctcaagtgctgagtgtgatattatttgtaggcacatagatgctgtattaggctatcggaatttatatggaagatgtgtagaagatgatattttctgaaataactcgttaaatgttttgagtcctaaataaacctgctcagtttttcgttgggtacacactgtattctctattcattaagtatgtggtgctcctcaaaaccagctttgtcatgaataaatagcataaaggaagcacttaatgtaggcatttcatacactgtacagccaccattattttctaatactaggaaaagtcgattgtcagaattttttagtgccttcaaattaaatgaaccttatcagaattttttctcagttacttcctggaatctaattgccatgtttaggtcttcgcctgggc

SEQ ID NO: 35985 - DNA, 962 bp, Homo sapiens
tttacatacagattttaagtttttttggaaattgatttttgtatatggtgtgaaacaggggtctaactttattttcctccaggccagttgtgtcctaaccaatataaaataaaccattgttttcccattgacttcaaatagcacttttggcatacagtcagatgttgcttaacagtgaggatatgttctgagaaatgcatcattaggtggttttgtcattgtgcaaacatcacagagtgtacttacacaaacctaaattgtatagcctaccacacacctagggcatggacaatagaaaaagtattcttccattgtctccttcttggcctttgtattaaccttatgatattggtatcgtaataggcaaaaagaaaagtagaagagaaaaaaatgtccagaaatagatgtcagtatatatatatgataactgaatatatagtcaggcactatataactacattttggtcaacaatggactgcatatatgacagtggtcccataagattataatactatatttttgccatacctttcctatgtttatatacacaaatacttaccacagtgttacaattgcctacaatatcagtacagtaacatgctgtacaggtttgtagcctaggagcaatgggctataccatatagcctagatgtgcggtaggctctatcatccatgtttatgtaagggcactctatgatgtttactcaaaggcagaatcacctaatgatgcatttctcagaacgtattcccattgttaagcaatgcatggctgtatgccaaaagtgctatttcaagttaatgggaaaactatggtttattttaaattggttatgacacaactggcctagagaagaataaaattgggatccctgcttcacaccatatacaaaaataaatttccagaaaaacttaaactctatatgtaaacaaaaactatagaacaattttaaaagaatatatg

SEQ ID NO: 35986 - DNA, 1994 bp, Homo sapiens
gttttgtctattcccttagatgaccccacggattccgttgcacggagtctctgaagtccaaaatttttaagcatagggcacaacgttcttcatgatttggccttgtctcttctcattatgcttgctcttgcatctgccatctgacactttgcttaactcctggccagctaccggtacaagccaagctctcactccataacgtccttcttctctgcatgcccttctccactgtgcctgtcctttaactcttattcatcatttatttcagtctcaattgaagagtcattatttctagaaagccttctccgcccagctctctacattgcaccgttccctacagcaccaccagagtgcctctaacacttgatggtttcattgcttatatatttttgtttctgtgcataagcctcccgagggagccgccgctgttcgatttattctatagctagttcctcgccctgagtgtaagcctcacgagagtggggctgtcctctgttcgctctatccccagcccctacagcagtgcctggttgttcacaggcctatatagcaggtgataataatctgaataatgaaagaagaaacactgtcttgtggcgtgatttacttctgtttttacttatgtcaacttttaactagattgtgaggacagaggtcagtgtctgagtcatcttgtgcctcactgggcttgggcagaatagacgcttggtcaagcatttgcacactggtcgatggatacactagaaagagcaggagcgcgagagggaatttttttggcgcctgcctcgccctttcaagccaagcccctctgccctctgccccttgccagccgcccgtcgcccgccgccggcgatccctctcccggggagcggtagtcaagcgaggccagcgggccgggagcgggccgggagcgggcgaggggcgggacttccggtcccgctcgcgacgcggaccgcgccaggcggaagcccggctccgggccagcatccgagagcccggactggaggtgagttcgcagccggaacgttgcaggcacttgtttcctcagtggatgcctttcggcgcgccgccgcccggcgccgcgggactgggagaccgggtagggacgggagagtcggcatctcccgcgcgtgtggagggaaatccgggaccccaggcttgagagaagggccaggactgagaacggggaaccaggagagccctaagggcagcctttagggactgaggagggaggcaccggggaccctgaggccaaagaggccctgagactggaggttgcggatgacacggggcagagttgcatctcggaggaaagtagtcattcgtgggggcgtgtcccgggtcctggcggattgactgagaggatggcaggagatggcaaaggttggcttccagggagaggttacagaggagggagtcagtccttctctgagggtcgtaggtgagaaggacgtcttgacctaacgaaccagaaagatgaccagccacctattggatgctgaactcctattgcttcatttgcaattcatgcagtttgttttttgtttttagaaatatatcccgctccgcgcgtgtggatttcgggaaaatattgtatattcctagggaccgctcgaattcttgcttcacccagattctgcgtgtctttgtcaaactgatagtagttgagagttctcttcacccaaggaagacaaccaaagttttccttttggactcttctctaccctgcagagtttagcttgtcttatttcccttgtcatgggatgaactaaatgcgttcagaattatggtgataatcacatggaaagccagtgctgtcaatgtttgcagtttcaactcattgtttttctgtccaactttctaacacattttttctaaaagctattttgttgggtttagtcttttagtttaaccaataaaggcaattttacatcagggtgcagcaaattactagcagttcttaagattttactgttcctttttatttctgctgt

SEQ ID NO: 35987 - DNA, 692 bp, Homo sapiens
tgtgttattttaaatgtagtagcactgtgtgttagaaaactcaatctgtaacacttaagtcaggctaagcaagcaaataatatcagctaacatggctttaatctactaagtaacttaaaatccaaaagatcaaaggaagttataactaaaaacagtccttcatgcagtttccctgtggaagcaggaaaaggctagaaattacatgtcaccttcatatcctggcttgctgaccttgtgctcagatcaagcccctctgtatgccagctgttaccattattaagaccttgccccaaggggttaagtaggagaaaaactctcctgtcctattggagagcaaacactgaaagttccagcccctaacatgcctaattcaaagcaatctgcatgtgcttgtcattcagtctgtcctgccgctctgtggagctgcgcctgccaactcattgctttctgctgtgctgtgatcctgcagtcagttgccgctgttgctactgcaatcatttgcaccaaactgagccagagaagttccctcttttaacataaaggtaatacattttctcttgctgtgtgaatatgtgtgtgagaaatgtgtgtgaatttgttattttaggagaatgtatttaaaaactgaactttgtttctaggattgtatttaaaattccagctcactgttttgtttttttttcagtgtaaac

SEQ ID NO: 35988 - DNA, 988 bp, Homo sapiens
ctggaaacagtcaagtatgaattatcctagtttatggaatgtttacgattgctcctcaaaaatgagctttaaaatgaaggctttgttaaagtaaatattattttagtacatttgaacaaaaaccttttgggttcatttttctttaccctcaatctgtagaaaaacaaacaactttttattatggaaattctccagcatatacaaaagtagagaaatagtataatggactgtcgaaataggacacccaattccacagtctcaacacatggccagtcctgtttcatctataccccacccccacaggattagtcccaggaaagtatcctgataaacagagttcagggatcataggtaacttggttcttgggtaagtcccagttctgaagcagtgattcatgccagcttctgctctactttgagaagacatttcaatacatgattgataaagccagtttaatcaaggtaaagagtgtttttaatcctactagaaaaaaaaaatattcacttcctctttgaactttggagtttcttccctggaacagcctttggtaaatagagatgagggaaactgataggaccaggtcatctttagttctggttctcctaaagagaagtctctggtcaggctcaggagaagaggaatatttcttattctcacctcagagaagaggggctactcatctaatttacaggatggaatggttcagactttaatctagcaaaccagtgatggaacaatttttcaattttttataacaatagccataagatggaaagccttctccaggaatagtgttttaaatgaaatactgtccacaccaaatccagaattaccatacttgctaatgtgcagcaggtcctcatttaccaaaagagaaagttttcaaaaaaaggatttttgccaatttgaataaactttatggaagaaataattaaattcttacttaggcatttattttattgtatataccaatttaaaaatcagata

SEQ ID NO: 35989 - DNA, 827 bp, Homo sapiens
catgctctctggataatgcttcagatgacagtcctcatcatagggtgtcatctgatcctttgtgcattccagccccatcctggaagtgttcttctgcattctgcttccctctggagttctacctccaatttggtcctccaaagaaaagagtggaaatatttgtaaatacaatgttccctccaaacgttatattggttattttctaagaatagttttccaaattagatctgcatgtttttccagggcctgagaaaaatgctgtcagaagcaggaagggatcttatgggtcattgactccaacccacatccactagaccacatatttgttaagtaactttccagcttttgcttgaacacttcggtgaccagtaggtcactacacgtctaccttggttgaaccggaatttgttgtcctgtagtttttctaccagtttgtcctcattctgttctctgaagtgaaagcaaacatccctcttgctaacattggcagttcactgagttcatcccgtgaacacggattgagcatctacgcactgtgcagctgaagtacacaagcagactctgattacactgcaaggaggaggaccagcccccaggagtctggatggcactcccgctagttcacatagagacggaaataactttcgctcaagtattatagccaactctcaggcagcgcacagggaactaaaccctctaggtctctcacatattctgttgctaagctgcctctccaaaccagttagtttcttttaacactgacattcaggagcttatgtccattcccatcgcacttaattctgttagataaataaggggacatatgg

SEQ ID NO: 35990 - DNA, 601 bp, Homo sapiens
ctgaggaaaggctttgtgaaacaagcaaatctctgacaatatcctcactcagattgaagttcaccggtgtttgttcttttttagagcttgatctcttctctttacttttagtttcctgaatagtgtatgtgttattcgtcatatatgtgggatgggactagatctataccgaataatcttgaattgctgaataattctgtcacagatcccatttggaatttctttgccttgccctgccctggaaaggaccctgggctctggcagataaaggggaattcccttcagtgagtggcttccctgccaatcatggcaaattacacagctctctagtaaatatctgcacgatgccaaccgagaagaagcggaggtcagaaaagccaattttgagacaacacttcaatccttcctctaagtcactgtgattcagaaaacatttaggtgcatctcctatcctggaaataaaaactgatttttgcaaaggttaaatgagatgcgacacattaaagaggctattgtgtaactcttactatccaatagcttttatgctcatcatcatgtcattcgattctgctcattaacgctcatcctgcaaacattcgag

SEQ ID NO: 35991 - DNA, 590 bp, Homo sapiens
ttccatgcgctcttttccccactttgagagtatgtctgtgtctgacaaaagcaagacctcttgctcccgaaactgctctgcatggaggaaactcaggcacaccccctgatgagcctcctggctgggccagctaactttgtacaacaggtgcaaagctcactccagcagggacgctgatcctggcccagcagcaagaggatgtggatggctttgatcatgccgtttccacttctggaaaaagaactcattctttggcagcatttccattgtgttaccagacagcatcccagatgctgaggacacgaagtggacaagacaggtgaacagtgagggtcctgctcttttggagcctacctcctcgggggacccagacttatttacacaagtaaataaaatattgtgttaattgcagatggcgctgactgctttgatgaaaatagaactgagcaatgcatatggaggggtgacaggagaccagaggggtgtcaagggcctctcctgagctgagagtgggatgaggataagaagccagccaggtgaggagggagaagaagaccccagggctgagacatatttggcatgcttgaggg

SEQ ID NO: 35992 - DNA, 1120 bp, Homo sapiens
tgccagccaaggacccctctgccttactcatgtccttttaaattcttgtgctaaattcaataacagcagcaacaataaggataccttattttcatttagcattttatgttgtttgaagtcttttatagtctataaatatgtcaaaggtaagacctttgacagatgaggagatgcatgtcaaagattaggagacctagttcaaggccagttcacttggcagcagatgaaagcatcagtgcttggtctgctaactgggatccttcccgctttgtgctcccacgaaaaagtttctgagttccttggaagccgcttccaatgacagagacagttgcacattaggggctattaagtagggtctgggaaagagacaacttcctgatatggggagggtccctggctacaaggcagattatatcagaacttgccctcagttccaggaaactagagatgcctcctgtcttggatagaaagagctgcctgttgggttgaggaaggacactgaggctgtgggagaacctctttagcttgaggaagaattcagccagtgaatcagttttatagctctttcgctcttactttcctgtctctgagagatgttggtgcgactgtggtttctgtcattggctgtggtgtgttatgaaagaacattgggcaaaaacagaagttatgggtcaggttctggttttgtcctttggactcatactgggctttgtttacttaagagggagtttgcttctaacaggagcagagtgtgtgtcattgaagggggcagtgattatagtttacaaaagtgatctaggagaagaattccaacttactattgaggttgtcactgaatctcttaacatttctctaaaaaaatgacaggaaggtgtgagcttttctgattgtcaaaatgggacatggatgagaaaagtttaaaaaacacagaacaggaagtttttgttggtgggtgtgttagttcgttctcactctgctaataaagacatacccgaggctgggtaatttataaagaaaaagaggtttaacggagtcacagctccacatgactggggaggcctcacaatcatggcagaaggcaaaggaggagcaaaggcatgtcctacacggaggcaggcaa

SEQ ID NO: 35993 - DNA, 690 bp, Homo sapiens
gtccactgactcaaatgtcagtaccctctggcaacaccctcacagacacacccagaaacaatactttaccagctatctaggcatccttcaatccaatcaagttgacccctaataggaaccatcacaggactagatattcttttctcaactccaggcagcttgactgtgaggatgtcccctaaacacagccaattggacattcctgccactgtttctgaatttggaagaagtaaaccaagcctccaggttagttacagactttttaaaatggtgactgtggccaagtggacggtctgatgcctcagcagctggtgcccggcagtgtcaccaggacagttagcatggtcctgctggctgctgtagcaacattccagctgacaccattcccctgctcccaactatttcctgcctgggcatgttttctgggctttccatgattctgtgagctactgacctttctctactatgttaaccagagccaatttctgttctttggaacatagaataatgactagtgctttacaatctgtaaaggatgaataccctccatgctttttattttttttttatttttttttaatttttattttatttattaatttgagacagagtctcgctctgtcaccaggctggagtgcagtggctcaatcttggcttaccacaacctctgtcttccaggttcaagcaatt

SEQ ID NO: 35994 - DNA, 1148 bp, Homo sapiens
taaccttgtctttccattacctcataaagtagcatggaactcttgacaaaagtagcaaagctctgaggagatgtgcgcttactggctttctagcatattccaaagttctctctgcctccaggtgtgttgctgctgcagggctgcaggtaggcatgggccgggctgcaacttggggctcttctgaggacctgggactctccccgggaagggcggccgtgcagctgtttctagatcagcgaggatttcaccacaggactcccattctgtgatcgtgcttccaggctgacctgtggcacgtgtgtgcagggtgtcgtgcatgtgtattgtgcgtgtggtgggtgtccactgtgtagtgtgtgtacacatagtatgtgtggtgtgtgtatactgtggtttctcccctgaggccggcgcctccgggtgtggtgttggcgctgtgtctagggtttctagaaggggaggaatgagggaaagaggcccctccgggcactgggacaggctcaaggggaacagccccgagctgggtgttggctgagtgtgaattccagcagccaggctcacagacccgtgtcacctctgacgtcaagtggcagggacacgctaaaagcctttgagtctattgattgagaaggctccagaaggttttggagcgctggaagaaggccaggcctggaatttacgcgtcggcctcttggtgtctcctcccgctgaagggagtaaatccaggcaggtctggggctgccgggcgggcacctggggcggaggagcctcgaggctgtggtcctgcagcaccacctgggggcggcgagaagagtagccgcagaggctcgggaggacgcgccctcgggtccagccgcagccagcacaccgggaggtggtcaggggtcatctcttctgcgccggccccaaagtagactgtccagttccctgggagatactgcgaaatctgcttcatgtttccattcgtagacaggaaaaaaaaaagcccgccccaaaagcctgagcttccattaggattaccttgcctggggtcccagagtgaccataaaacaccatttcccaccctccctgccccattggtttgtcagaatactgcttccactaagaggtaccatcgtttaagattcttagaatattctacctaaaag

SEQ ID NO: 35995 - DNA, 1182 bp, Homo sapiens
aaaggccaggctcaggatatttaggggtgagttttagtacaggtgtccttgtggtgctctcactctgggtcctggtggccccacaacattctaaatcttttatatgtgaaggtcttactctggcattggaagcttgctttccaaaattataataatgacaatcactaacatttagggagcaccccagatccccactgaggctttatacatgcattgcctcaaccccttgaggcaggtactgtcatcatgcccgcagtgcaagaggtgagagaactcacccaaggtcacagtgaacaaacagcccagctggaacttgagcttggcttgtccctaaacccgccagtgctgtcaaccactgtattctgggaatttgaggaacaaggaatgaggaagtggcagacagaaaacggtgctcgagtctggggacattctgaacactttcagggaggcccaataagaaaagagaaatgcagacaaatgaaataaagcagaggctgggaagccaacgcccacaacacgaccaagaccccaagttcccaaagaaagtgctttattattttcaaaatagcaatgtgtaaaaacggcttttgcagaaaagaagacaaaaaggctaacctttactgcacccccaataatgccaattccccagccctagcccagcagaaccgtgggaaagcagcctttgctgtatgtatgtaggctttcactcaggacaggtagatttttcataatgactttgcttttaatctagggaagagtgtaaaattgcacagcaagtcttggggactctgacagcccagtggaccaggaaggaatctccatccatctctgggagtctctggggtcacagggagcctgtaagccaaggggaggctggggaggagggagagcggctggagagatttatacatagtgctgtcctccccctgccttggaattacagcaccatgagaagctgtgagattaaatgaagagcagggccctggagaagctaaagcatcagtgggaacagggggtgcagcaggtgataagcgggagatgcaggttaattatgatgctggcacacaggtagccccgggaggaaagcagaagccctggggcgggtgcatgtgtgtgtgagtgtgtgtgtgagtgtgtgcatggtgggggaggggagggggagagagagagatccatgatatc

SEQ ID NO: 35996 - DNA, 1920 bp, Homo sapiens
agaatccagcctctttctttgtatgattttgaaggtagagttggttttgtcttcttgcttactgcctcctttcgcttgtttaaatatttaccttacattttccctactctgactaggggagacattttgctaacttaaaatagttgagcgacattgtcctccacagtcccttctggagatgtgaatttccttcaaacctctgagattggggtttaagccatctcttctggaattctctcatggggagataattgagttcaaccgttccttcataccaggaccaggtaccagttgttaaagaattatggaaagctattccagagaacatgttgcccacttttagatatctgcctgagctccacagattcagccagagtccatttatacaatgctaaatgagagtttcccacatacagggaactctaacatctccagataaatagctctgcaaggagaaaatgcaaattatgacttaaagtcagcctctacttttgtgcagtgcataccaatgtggctttaccctttagctagagcaatggagctactacttcttttatgcagatagatgccctgcatgagtttgtttcctgagactgttggaaaaataaatagactattagctacttggtttcctctttagaaacccagcaggcacaacagggagagacattagtctttaagcaccagttctacgaaacaaccacaccatagagcacttggagcggaactgaaaaaggttaaaacaagtccagagaaagggtgtgggcagtcagatagtttagcagacgctaagcttgtgccagggacttttataatcaaggcttttgcaatagtgattttgtaacaagtaaagaatccacacacatgaggaggaagtgtaagaaatcaattaaaacttcagagaatgaaacgtggaaggcataaagcaccacacactaagagacaaggggaagaattagtcacagaaataatcatgaggaaagtgcaattgtgggatcatacaagctgaggatgcctagagggatccctggatgtctgtgagctgtaaggctcaagtggattcctgcagtgctcagcaagcctcgccaggccccatgtgcacaggtgtggggtgagaccatgtgggaggtgagactgaatgaggtggaatgaaaggattgatgggttttaaatagttgccaaattattctgctacatccaatagactcttcctcagtcttagaagaaaacaagggggaaggccagaaaagggagcacagcaaatctaacagtgtggggcagagggagggagagaaaaatggcacataatggggagtgcaaaggagaaggcaaagggagaatgaacattaggacctgataactgatactaacataaatgcagtgtgtgtatgggtgtgtgtgtatatacatgtttccagaatgatgggatagatgtactgttcccctttccccatgctaaagacaactagaaactctgggttggtttatataaataaaagttagaagattctgaaaggcagagagaaggaggtgaaccagccgggaatcgtgggacctgaggaatgacacagtgatgagcttgctgtttctttttgtttttgtttttgctttttgttttttttttttggctcatatgtcctgggcctgaagctgaagaagccagaaacaggtgcagagaaggagaaaaaaaatcaacaaaaagctattctctctagctaaaggataaggaaagaggcagcctagcaaggcagaagacttttagacgataaccattatgctccaaacactacagtaaaaactgtggccccatcccgatccatgctagcaaagacctggtggggatcagagacttccaccctcatgaggatatgatggggtacttcaacaacccctgccagagtggtgtctgaaaagaccaag

SEQ ID NO: 35997 - DNA, 1392 bp, Homo sapiens
gtagtaaagctgactcttaatgctacggtctcaagtctcaagttggccttgaggagcgtggagaagtggcaggaaagccagtgagcctgtatactgagtgcaaaggcatcgcatcaagacagcccagcatgttgtctatgtggctctgagagggaacaggaagacagggactctgctcccatattgtacagaaccacccaacctctgcctgcaggagttctgctgaattctaatcatcaaaactgccattgcaccagccatccccagtctgatctaaatttgggtaatgattccaggaagttgcacggaaccctctgtaccaaagtcctggccatctccatgactacgtctgaaactttgcttttagctcagggaaaatcaataaacattatacagcacattacattttccacttgtgttttgttgtaacaacacagaaggccaacacatgtgtctactgaaggaagccaatgatcatgaggctggggctttgcttgtttgtgagcaggatggagcatggtgtttacctactcagagatgtgctgacagatcaaatttaagatcaatagtacccagcagcgctgagggaggggctctcacctgctttccatctctgagtcactacgttaggatgtccctgaaggaatacaaaatgcatgtgatgacaactgtgaaacttcactgaaaaaaaaaaatggcttcacataagaaatctgaagtgtgcctagtttcgaagccacaaggaagccacagaggagcacacaggtgagggagcaggtgcaaacccgtgatttcctctgacagcagcggggaatggctggtgctgaaatcaaaagctgacacgtgtttctgtgttctgatgaggttgcttgctttctttgcattgataggagccacagtggctacactgaggtcagtcttcaccaccacaaggtgaaaataaatcacaagacatctgtggcgtcagagtgttttgacgtctgtgaacattttccaatacatgatccccctacagtcaggactcctaaaggtaattggggcatctgaattttttgtaagggaaggaaatcaggggcacaagattaaaatggagcgtgtgtcccaccatgtaacccaggaagcccacaggtaagggagcatttagagtggatcatttctgaccctctctgcaatcagcaaacccgtctattatcagagatgacactgaagttaaatgttgctagtgtatccacatactggaccaaagtgccacacagacacacatacattcatgtatacaattttctgagcctccagtcttcctcccataaatttttaggaaaatccttagtgccttctcattcttgtctattagcaagtcctaatagatgaggaaatacataattgagtagt

SEQ ID NO: 35998 - DNA, 897 bp, Homo sapiens
acatctgaacaaatttaagaaacactggcttagaagacatggacagtgaaaagagaggaagaaagggaaaagtcagctaggagaacagaataggagaaagtgtgagggtgagaatgtgagaaaggacaggctaagaagacataagaaaatcagtggattaatgagagactctagagaggcagctttgcactgcctctagtgcaaaggtgcaagagtgcaaaggtgcactttcctgggttcacatcctggctcaaacacttagtggccatgaccttgggcattttactttctcatcttattttcattttcattcattttactttcatttctttctgagctttggtttccatcatctgtcaacagaaatagtaatacctacattgcaggaaatttataagaattagaaataatatccgtaaatcaccaagcacaaagtgcctggcacaaaaggaaatgctcaataaaaagagacagtgactattactagctacattacaggccagtgagatgaaatgagagcagtaatgacatttcacaagaacgtactatgaggcaacatatgcacattatgtcactcaatcctaacaacaattttgcagagcaggtgttgctattgcctcatttgcaaagataagggaattgaggctgagaaagatgaagttatttgcccaaggtcatctagcaaactaacagcgagctgggacaggaccttatgtgctgctgactccaaagctgccatatcttactgagtcatgccatggggttttaagtgaacacaggagaaagggagcatagtgcctcccaacagccaagtggaagagcaacgatttcattatctgctaagacatgtattatgcacaatggggttagagttcggaaaagccttgaggcctccag

SEQ ID NO: 35999 - DNA, 805 bp, Homo sapiens
cggttcatgaatggttctcaaaatattttacaccagccaatctgaaaaaacatatgattctggttaaatttaaggactcttggatcctgcaggcccagatattcataccttgagcagccatgcaaatgagagtgtcatcatttcaaagttcaataggaagaaaatgaagcagctgctatttaattttttatggagcctacaatttgtctcattagtgggcaaataggacaggctgggaactaaaagctatctaggcctcaactctgcaggacagaaaaaaagtgatctgtatcaaatcactcactcgggctcctggggatagggttagactggctggtgctggggaaagggcacctggctccaaatcctggctgctaggcaggctccatcacctcactgatacatgacctttggcaaagtacagaaggttccagagcctcatgaccgtatctaaaaacagaggaatttggaattaccctgtccatctctcagagctgtggagcacctgggaggcaagaatccctggtgctttgaaaactccaaaaggctgttcaaatgcaatttgagaatgacctggatacctggattgttaaactgaggcccaagggtagcagatttgactgcaatcacagaggtacagccctgaggctgggctccctcattcaggattcaaggaaaatccctacattctctctctctactcacagtgtcacccatcagccagtgaggcagatgaggaaaggaaggctgaagccagcatgtttcctaggtcatttccagcgtaggaacacagtgatgttacctg

SEQ ID NO: 36000 - DNA, 957 bp, Homo sapiens
gaggacaggagggagggcaggggttagcgcacattggctccgcgccggtccccgggattcagcagctgtgcccaccacaggaaagtctagagcctccccgcgtctcggggccgcgaagacacttttccctgggcctatacatttcactctgggaatctcacaatgtggcaccgtctcccccagctacttctctggttttcctcgggattgggatcgatcctactgccccagtccccagtgagatttctctgcgctgtcaaaaaaaaaaaaaaaattctcccttggggagctgcaccaggcaccaactccccctccccggcctgcgcgcgcctcctcggaatggaagacccttccgggactgtcggtcttacctgtgggtctcatgcatgcagcttccttccctcctccgcctcctccccccgccagtctaacccgcatctgtgcgcgacctctgctgccgccgctgcgcgagcgagcgagacggaagcttcggcggcggcgctcggctccagctcccccgcccgcgcgctccctccccaggcgcccccgagcgggcgggtgttgggggaggacgggagcccggccgcgcgcccccgcggaggcgcccgcgcgcccgctacctgaactcgcgagcgcgcggcggcggcggcgcggagagagggagtgggtggggacggggtgagtgggggggcggggacggggcgaggggtgcgcgggcgcgcgagcacgcgcctctgccaacccagccggcgccgcggcgtggccggagactggcgagggcggggacggggaaaggggcccgccgccgcgaccaatgggaagcccgcgcgcctgcacctgtcggggcgcgaggcgccggcggccggtcttgcacacgcacgcagctcggtcgccccttccccggcgctggactgcagcccctgccccggctgcgcgccagctcaggtgcccgccccg

SEQ ID NO: 36001 - DNA, 1675 bp, Homo sapiens
ttaagtcttttcctgtcccagaacttatgaaagggtgaagtataaagtaccggtcataagaaatctccaagacaaaaagaaattttaaaaagggcgaagtgggaggattcctgtgaacgagtagatttgggaaccctgcatattatatcctctcttgggagttcataatgcactttaaaattttaaagactctgaaaaggcatgcagtaaagacagttatttgtttaatgcccctcccccctttttttctcagataatttcatggaattgatgttctgtgaaacatttttggaaacagcactctgtagttcctatatgattgtgaacttctttggccttccctccctgtgttgataggaagtgtttataattccatcagcactatgtcttgactgttccaccacagccaggccatctgatatagtttggctgtgtcctcacccaaatctcatcttgagctgtagctcccgtaattcccaggtgttgtaggagaggccttgggagataattgaatcatgggggtggggtttcccccatactattctcatagtagtgaataagtctaaagagatctgactgttttataaggggaaacccctttcacttgatctcattctctcttgtctttcaccttccaccatgattgtaaggcctccccagccacatggaatgagtccattaaacctctttctctgtataaattacccactcttgggtaagtgtttatcagcaacgtgaaaacagactaatacatcatctaagagctcattagaatctatttggtctgcttctttttttggtcagtcctatccagtcttatgaaataaaattctattggaatccttctcttcccctctatttctcctctgtctcttttggaggaggtatgtgatgtcattctgtctacccacattgtgtctaattaacctaaccaggccctgagtcaatgactaagcatgactcagtaatatgacattttaaaaataaggagccaaaagttaaatagaaattaacccatcatatctcagagtcttcattgaaatctctaaatgctttctttaaaaagcccctagtgtcacgtttgtattagagagagagaaatagaataagccccattgggagatttatatcttattagtaattctaaaacattaaaggtaacctgacaaaggattttgtgcagaggtcagtttgaggtccactttcttggctcttatcatggaaaccacgccctcttccccattccattttcttcccctgccccagatcccttctgcctggtatgcccaaagaggcctactgtaggacccttactcttttcctcagaaatgttcagggacagcccccttgctcaaaatggaagggctcacatatcttgcctcaatttccaaccttattctcttctccttgcccaagttaatcctctgttccggccaaatgccatgtgcaacccaaatattcaagagtaatgcttaagacatttcagacagactttgttatgaatcctagctcttcctcttagtacagttgtgtgagactggagaagttacctttttgagcctgttttcttgtttgtaaaatggaaaataattcgtacttcaaaggcacgttgcaaaggatgataaaaactaatccatgtaaggtgtttggcacagtgcccagaacctgatacata

SEQ ID NO: 36002 - DNA, 717 bp, Homo sapiens
gtccatcaatggtagaatggataaataaattgagacatagtcacacattgaaattctatacagcaaagcgcatggtctacaaccatattcattcatgtgggtgaatctcacaaatttcatgttgagtgaaagatgccagccacaaaacatcacccactatatgagttcatttacataaaacacaaacaggcataactaatctctgcatggaaatcaggttagtggttacccttcgatgagggactaatggacagaagtggcacaggaatgtggtgtgcagtattgaggtaagtatggaatttggagtcaagcagtgtttggtttaaatattagctctgctgtttaccaattgactggcctttcacaaaggacatcaccactgggagactcagtttttcagctagaaaatgaacatactaatgctgctcagctcaccagattggtgtgaagtgaagaagaaaacatatgtgaaacatctggctcagaaagttctgaaaaatggcagctattgttgttatcagttttattattcctcgtggtcctctccgttaagaatctagtgacttgtagccatgaacggtggctcacacctataatcccagagttttgggaagccaaggtgggtggatcacttgagctcaggaatttgagaccagcttggacaacacagtgaaacctcatctctacaaaaaatacaaaaatcagctgggcgtgttg

SEQ ID NO: 36003 - DNA, 2538 bp, Homo sapiens
ctgaaatatgtatgtgacatctaagtaacagagcagtatcaagatccatctttaaaaaaaaaaaaatccctgcctgaataccttcagcaaaacctaagcaccttctctccccagcataagagctggggcacactccagcgcagcctcttcctccaagccaggctttaagaccccgggggtcagcacgacaattcccagagcctcttcaattcattgaaacattaatttgattaaaaccaaatctcagaatgtgcttgttataaacaaagattagggcaggagttggaaaattccagatctgacctactgctccaatttcttttttttactttttttttttttttttaagtaaaatctcactaatccctgggctgagcttagggatgttgccttagagattcggcaccctcctcctccaatagctgatatatataattatcccaggttgcatctccagctggtagggcctccaggacttgacagtcaccacctcccgcctgccagggagcgggtgctcagggaaaggagagaaagtcaaacaagccctttggacagctcggtagtgacttttggtaagaatggcccacattcagggtttcaatttcacgtggccctgtcatccttttagggaagttggcggaactgaggttttgggttttgctcaatcttacacagtagaatgaaaaatccttcctacaggaggctcatgtgtggccctagagacacgtgtttcttcgtgacacaacctgaagggagttactgcccctctgcgtggtcatgacatgagcagtcatgatgctgtgattaaacttggcgatgtccccttcgaaagccctggtggcatcacagagtaccgacagcacttgaggattaaggacgtattgggagggggcattattgtgaccattttcatttctggtggttctttgtccatgagactggctaattattttttttttttaaatggagtcttgctctgttgcccaagctggaatgcagtggcccaatctcggctcactgcaacctccaactcctgggttcaagcgatttccagctaatttttgtacttttagtagagacggggtttcaccatgttggtcaggctggtctcgaactcctgagctcaagtgatccacccgcctaggcctcccaaagtgttaggattacaggcctgagccactgtacccagctgagactggctaattctaattcctcccccacactaacctgcctctgccaggccagctgtgctcactggacagaaaccaccccatgctttccaccctcctgcatgatggggacatggattccagggcccagctgtcctgggacatcaccacctctgactgactttccctcatcagcagagaggcctgcccaagaggagtctctccagtcagtgatcaaacgtgcctagggtaggagcgagtgccgctgcctcattcatcactgctgccagggcccggggctcctagggtcaaatttcattttctcagcatccttgtttcttcttggtgctgaggggtttggcctttgtcagtgtccagtgtttgtggagtggaaagaaacagactgtgagtgatcgatttgacctttggaccagcacggtgcgtcaggtaaaaaacacaaaaacctttcagcgcaaagcaaaattccacagagccgccaaactttcaaatgccaaagcagaaagccagaatcgaagactacagcccagtggtttttattttgcttttcccagcctggatccatttaatactcttttctgaacacactgtgtgatctgcagacaggacgtgctgctgaactcactgtgacatcgatctcattgttgtgtgttttacacgacacccttccgcagagggagagatgactggagaagcgggggaaaaaaacctactcatcgctccaggctcccgaccactccacttcaccccatggattcctgagtctgatcagcttctctggatggccctggaaattcacctgcaaattccatacacagaaaagcgactgaattactatgctcctgttgccttgcaggcatgtctgcacctgacaggatctgcattaaatttttcaaatgtccctaaaggaccacacttttattttcctttaatgcatcttttcaggcttgggccaagtgttttcataatttgtttgaataaatgaggtatttttcataatttgtttgaataaatgaagagtgagtctagcccaaaaacaagcttatgtctgctttaactcagatttagattttatagttgactaagattgactgagcttttaatacatgagacctaatgataataaacgccctccaaacaaacaccaaagcacggcagttaacatttatcgagcaggtactacagatgaggtgtagtgctaagcattttaggtgctttattgcctcatttaacactcacgacaatcctgagaagataaagaattatcttcatttcatagctcaaaaatctgagacttaaagaagttacattatccgagattatctagttagtaagtggtgaacgcaggcca

SEQ ID NO: 36004 - DNA, 563 bp, Homo sapiens
cctgctaatatatgcttgttttttaaaaatctgtcttcaatattttatcacagctgaggcatccttagcctactcttccacagaaggctgctctaaatgtttttatacacagggagctatttcagctctgtacattaccacgaagcagtcacagagcctcccttcccccacttggtgaacacgccttttgaagcccttggcgtttgattcatgccattttgactaccttaaaacacacacacacaaacacacacatacacacactgattttttttttaaccactccttgcagagcagggctaattcatagtcagtgtgcccagaatcgacccacacattgacttttgactctatttgctttgttgacaattcccatctctctggctagacttggaagctgcctggaggcagacagtgggcctggtggttctcacagaccccagcataaaattcttactgactgaattcacctcagtgtaattgtatcaaaggttatttgaaaattcagaccttgagtagtctatcactagtaaagctaaaattcttactgactgaattcacct

SEQ ID NO: 36005 - DNA, 4001 bp, Homo sapiens
ataaaataaaataaagtagattaacaagatggcttttggacagggtaagttcctagaaaatgcagatgagaaaaaaatgtactataggctcagcccttcaccctccaagagttgaaatcacataagccacaccctcatcagtgtattgcacaaggagagtgccttctgttacaatcattttaatcgggaagccatcaggctggggaagctacaccactgtaagtttttacctaagcaagccaaagcccaatgcaaacagtaaaatgaaactagaaactttactgatcagaaaccacaaactaacctctaaaaccagtctttccactgtaatcaatcaaatgtgttgtatttgtcttacttccatattcagcctctaaaagcccacgctgctgcagtggagctctctgaacctcttctggttttgagggctgcccaaatcatgaatccttctttgctcaaataaactttgtcacatttattttgtctaaagtttttcctttaacatttcctgtatttgaatctgcctgtgctttgcacaagacaaagtggctatttaatgcccatttgccagacaagtaaagctgaggccctgagttcaagtgaccccccaaggccaggcagtgtcagagccaggactagttctagcaagatgatgagttttctgccttcctaaatcttgcagtgccatgtggaagctgaagtaaatacattcacatcatttgaaatacatgccttagatctctgtacaaaggtagcaagaaatttcgggaagagtccctcctcctgtcaacctacacatagcttctcatcagccccttttcatcctcactttccaattgccacaaaccaccctctctccccaccccttgctagcattttttcaccctctgacctacctcataagatagcatctccttacattgcaataacataaaacagcctgacttcttaagagttcttataaagataaaaatgagataagatacgcaaggtgcctagcttagggcctgccacatagaaagccctcaataaacctccttattattcactgttatcccccaacatacaattaacccaaacaccagggaacccaaacaagtgaatcaacaaatgtttattgagcgtctactgcctataggaaaacaaaaactgaaatgataccaggaagttgctggtgtccttccctatccacccctctgtttggtataggactcaggactgctatctcactcccaccacctgccttcttgtccaggtttcccatctcaggcatcagagccactagtttgtcagttgctgaagcccagaagccattctgattccttttcctcactccattcatatcgaattgcttcccaagtgcttttgattttattcctaaatagctctcaaatcccatcctcctccctaacattgctgccatcgcctccactcccagtaagactataaaggaccctctttctccaaatagtcatcatccaggagcagtaattaggaggttgcaaaaagaagcaaaattgtcatgatgtggaaatattcatgagttttcacccaaccatccctccccacctaacactagaaacattaaaactaccaaccatgccaacctcacatgcagatacaatgcaaggtggttgcaaagtaacactgaacattttgctcaattcgatggatttcatgaagttgatgaaagtaatactggagatctgcttcagtaccactgaccaagaagaagttggcagagctaaagcatttgcagctgaggaaggaaaactgctgaggttcaaggcaggactggtccttgaaaagggaatggtttgagcgtcaaagtattgaaggacggccttggagaaactaatgaactctttgaaagttttcatgattcttcctcaaaactcaagcaggaagcaaaaagtgttgcttcctgctgtcttgtcatcttttcagcatgagttctccctcaaaaagtcaacaactgattcattccttgttcaaagagctagcgcaaaactgcaactattacataagtatcatgaaatacaaagtcacatgaaaactttttcataattttttgtattatctttcaaagtaagatactgatcaagcctttttttaaaaaaaaaaaaactgtttactaagaaatgtggacctccattttactttcagtggtccctttccaataccagttatctgcaaataatgagggtttcctatcttgcaattgtctcttcctggtgtctgcactctccacactgcagcaaatctggctataagcagccctgctttaaaatcttacatgattccccattgcccttaggaataaagtccagaattcttcacacagtgccagagccctgcgtgatctggccactgcctccctctccactctcagcctttgcactaactgttccctgtttgcaccagtcctaccactactttgcaagtccccgccccagtgctatgcacttcctagccaaaggacctttattcatctccttcctgcagcctggaaccctcttccccgccttctttcccacaagaggaaggagtgcctatttgttctccgctgtttcctggcatgaagaagacatttgataaatatttaaatgagtaaataggctgtgaaagttcttcctgattctgacaaatgagtatgtcagataagccacgtgttccctcactcctgtaagcatccacaaccaacggtacttcaatccaccaccattcaacaccgtgggcccacctcctactgtacttgtaaattaagaacctggcacaccttactagaacatcgtcctccttttagagtggatgatggcaagctaccagtgttctagaagcaagattatagagaacatcaatccagggcatgacagatacccagaaaactcaaaaggccccaggtactgtgttctcagcagacggtggggtattggggtcacccaagaaagaaagtcactaagagtttcaaagattagccccaagtctggtatttttctgaaacaaagagtttcgaagattagccccaagcactggtgtttttctgaacaatggtaacgtgactcatttatggcaactataatttttatagcctcaaaataacactttggagtcatgctacatataataaggcacactaatccacttctgctgccccccataggtttcccggcacctccactcctggttcccatgacgacccagaaggggcctctcagacctgatagcagcgtagaggcagctcctcagggaggggcagctatcacacatcactacatttggcatttggccgaggactattctgggccaggggggtcttcggcttccaggagctacagagcaccccagagagttaatgtacttcaaaacagaggaaagaacaggaaaggctgacgggtcatctttgaatcagaagccatttttgccttaccttctaagttttcagtggagaggaaaaggaaaaagaaaaagaaaaaaaagcaagcaaactcttcacagctgaagaaacttgttcagattatttcagagttcctcctagttgcttctgaagcccaccaggccaattctcatccatctcgtttctgtgattgtggaaggaataagactcaatggcatgaaacagcttcaggactttctgcctcacctccagctttaaatcagacctttaatgctacttagagggaaacatttttcttagtaaattataaaagtggaattgattcaccagagggagaaaaacccactgagtaaatatatttgaggcttatgtaaacacatctcagagcgtgtttcaagggaaagcggcttgcttactgagtttaattataatgctctttggtttcaaaaataagacaaaaatgctagaagccaggtgtaatggggaaagaaatgaaaagatgagcactgagatgcaattgttagctccagccatggctgaaatacacgggatgagatacaaaaatggcacatcaccgttattgctagggacagccctgacacac

SEQ ID NO: 36006 - DNA, 3110 bp, Homo sapiens
tgagctctttctaaggtacatttgctatattcattaaaggagagaacattggaagcgtttaaaataaaatgccttgtgattttcaaaatcatgaacatttccagcaggctgaagagaaagggctttcttggctgcaataagaaagaatgagaaaaagagaaaacctcctgaaaaaaaagtggcggggggtggtgatggggtccatgtgatgctgaggtttctgtttgttttgctgattttcagtaagcaggatttgtttctttttcaccttcacttccggttctgtattttgcagctgtcactggatggtggtttggaagcccctcaaattcaattcagagccatgttgcccataaaatgtaaggattgtccaattcaacgcagaaactcccatctgtgaagccttggtatcgggagggcttatgaaatcaataaagctcatctgccaccaaggagagcctcagtttctgacaatggaggctagaacttacaaaactaaatgaaattatttcttaaaaactcaactgcccctaatttaaaaggaatatgataagttcagaaatgaaggtttttgattacaggatcccaggcctatgaaagaatgtctggctacaaaaataagattcctgttttcttactaattataaaagcacttattatgacagcccataattacttagatatggccattccaaaggacaaattatgtctacttaaaggtaactacaacaaaaacacagtatagcacagatatctactctacgcctgtaatcctggctccttgctctagcattaaagtggttaaatgaactggcaaaatctctcattagggggagccaagaggtagttccagcatttggacctacagtgaagttccagcatttggactcacagtgaagaatgcagtctcagaaacacaaacccagacggacacatcaggtacctaattcactcggtgaagtctcacagcttcatctgatgtttactcatgacacatacacacccgccctctcccaaaacaaataagactctccccagttactcacctagaccaccctgacaaatgtctgtgcgcgtggctccaccaacgataaactgagggctgggacacaactcctgaaagtaatttggaacaaaacacaagtcacaaggtgctcagtgatggcagcagcctggggaaaggaacatcagagtcccaggttgcagagctggaagaaacccaggattgtctactgcccatcacatggttttattgctgaggactctgaagcccagagaggggatgagccctggtcacagtcacacagccaggggtgaacagagcagaagctggagtccagagcccctgccaggactagtgttttcattttttatttattttttatttattttattttattttaagtttttgagacagcgtctcgctttgttgcccagcctggagtgcagtggcatgatctcggctcactgcaacctccgcctcccggattcaagtgattctcctgcctcagcctaccacatagctgggattacaggcacgtgccaccacacccggctaatttttttttttttttttttttgtatttttagtagggatggggtttcaccatgttggccaggctgatgttgaactgacctcaagtgatccatctgccttggcctcccaaagtgctgggattacaggcatgagccacagcacctggacaggactagtgttttaatactatatgtgtggtgtgggtgtgtgggtgtgtgggtgtggaaaggtggtgaggagcagggaggtaggagaaaggcaaaggctgagataatatgtgatgaaaaatgatctcacctattcagacaacacccctatttacataaagagattagaagaatatttagcaaaatgctgtgcaccctgtgggcactcgttaaagtcttgactaaatgataatgaccccatgtgctgatggacacactgaagtgtcagaagtaccatgtatcctgagatgagaattcatctctgatacattcacatatctgacctgcacttcctccactcacctatctcaactggcatctgcctacagcaatctcatggccctggtgctctgttggggcacaatgacacatgctttagtcatgctttctttgtttacccagcaaggattttttgagtgcccgttctgtatccagtaccctttgaaccatggcaggcaggggaaagagggaaacatggtgaaatgaagaaagaaaagaaataaaccacgtagttcttggcctcaaggtgcttttgctgtatatagcaaaccaagattgacattatgaaaaaagtcagagaaaaaaggctagtgcataataatagaatgtaggctatatccacaaagggagaaaaaacacaaagagagaaaaatgagaagggcccaacagggatgatggctgcaagacttagtgggtgggagatgatgcctgtccattagaaaggtaggatgcaggagcagtctacgtactggttcctaaagaagagatgggtctacctgttcaccaggcaaactgctaggggaaaagggcaggacctcgagggacaaaacggaagtcagcctacatttaatcggtggcatcctgggctgcactacatcaaagactgtctggccacagagagagagaatcatttcattcttacttcatagaggtgaagaaagggcagatcagaaaggaccaggaagcaggagggtgggctgagggcagatgcatggggtctggatgaagctggcagtggggattctgggattctgctgtgtgaggtggaaccttccaggtggcagccccatagcctctataaggtgctggctcctgctgaaatggcagaaacagctcctctgggctgactttttttttttcccaagtattaaaaaaaattttgctgggtgcggtggctcacgcctgtaatcccagcactttgggaggctgaggtgggcggatcacctgaggtcaggagtttgaaaccatcctagctaacatggtgaaactccctctctactaaaaatacaaaaattagcccggcatggtggtgcgcccccgtaatcccagctactcaggaggctgaggcaggagaacccaggaggcgg

SEQ ID NO: 36007 - DNA, 1690 bp, Homo sapiens
gaggctgaggcaggagaattgcttgaacccgggaggcggaggttgcagtgagccgagatcacgccactgcactccagcctgggtgacagagtgagactccacctcaaaaaaaaaaaaaaaaaaatccagaacctgcagattgtgcctctgatgcatctcaaacatccagggccagggagaaaataatctaaagaaaaatactactgaaaaagattccattgccatggccctctgagacacacacattcttattctcttattttctctctctctctctcttcttctctctctctctctttctatctctctctctcactccctctctcatttactcacaaggtcagtggcccagacccaggcagttctggataatcccagctgtttctgactcaccaccatcctcagggctggctgactcactccaggaaggttttccaccatgaagtgtttgtctatgtccttgtgttcccgtgaaaaggattgtgtggtcagagaaagagaagactttgctgggtcagtgagatagcatagtgtgagaggctttgggaagtagaaaaagcaacattaactcaggtttaaaaactagactttgtccaaatggttggggaaagtagtcattgtatgtgtttgcaattaaatttgggtggcataggacagcctaaagccctttgtaagcagagctctatgtgcgcagcgatccctagaaggctggcaaggggagtggccagggctgcaccaaagagggtgttgcctagctggggaagaggaacttcaggtgagccaggaggctcttctgctcccaggctgtgcaaagcttctgagttgactggaatgataggtctgatctgcccatttgttgctaaaatgacttaggagggaaatgacctccacctgcctgggaggagtcacttcctccagagatgagctgtccttgaggagatcagtgggaggagaagcctgcgctctgccccactgggcagaaggacaagctttctcccaagagcctcgagcccagaagaagtcggggtggggccaatggaaatcagacagtggaacaaatgaacagcttccaggacagggctgtcgctttcctctgttttcaattgtgatggcttcatgaaacccttgcaccagaaacccatgagctagaaatgaatgcctgtatccccatctctggactcagagtccagagtgccaaccattacacaatggaacctgtgtccccgccttattcaagagtaaagaaagcaaagcctggtggtggacggtggtacctgcccatcaggcagcatgcccagacttgcaaaccagagatggaggatgtcaaataaaaacaaaaccatgggagactgaggcaggagaatcacttgaaccgggaggcggaggttgcaatgagccaagatcgcgccattgcactccagcccgggcaacaagagtgaaactctgtttaaaaaaaaaaaaaaatccagacttttataaagggacacttcaatagaaagaaagactattgcaggccaggcgcagtggctcacacctgtaatcctagcactttgggaggccaaagcaggtggatcacctgaggtcaggagttcaagaccagcctggccaacatgaggaaaccccgtctctactaaaaatacaaaaaaattagctgcacatggcggctggtacctgtaatcccagctactca

SEQ ID NO: 36008 - DNA, 2554 bp, Homo sapiens
ggtctcgaactcctgaccccaggtgatccgcctgcctccggcctcccaaagtgttgggattacaggtgtgaactaccgcacccagccttattggccaaatctgacaaccctatctataatcaaataaacagctgagcagtagtaattgcagcattgtgattgcaataggcctccggtggcttagagtccctgttctgcctgtgactgttgtgccacattggggacgtcatttagcgtctccgaggctcagttttctcatctgtaaaatggggacaatatcagcgccttcttcagagtcgctgggaggattaaatgagatgatgtatgcagagccgttaagacgctgtttggcacaaagttcagggcagctggtttagtttcctcgacttcactacctgaccctctgctaactccccgggtgttttccggacggccacaactatcctagccttcttccctatgggctgcaaaggtggcctcgggttccggtgggagccccaactctggaccgcgattcgcgagcctccccggcgccgggccgcgccatcccgggagctgtccgcagatggcagcaccggccccgggtcgcggcgttcccggcgctcggcaggccgcaggatggcctggtcccgggccgggagcccagcaggccgggagcggctgaggccacaccccgcgggccgggccgcttccctccggtgaatcatcgctcgcagcggcggcgcccgcagtggccgcagcagcgcgccgggccctggccgcgccccagccgagcgcagcgcggagtcgccccgacctttctctgcgcagtacggccgccgggaccgcagcatggcgggcatcgcggccaagctggcgaaggaccgggaggcggccgaggggctgggctcccacgacagggccatcaagtacctcaaccaggactacgaggcgctgcggaacgagtgcctggaggccgggacgctcttccaggacccgtccttcccggccatcccctcggccctgggcttcaaggagttggggccctactccagcaaaacccggggcatcgagtggaagcgccccacggtaggaagcgcgcggcaggacgcgggcagggcggggtgccgggcagggcggggtgcaggccggcccgcggcgcgctggggcggggggcagcccgggtgctgcagtggggaagccgcaagccaggacctcgcagtcctgcgacacctccgcgccgccagagcccgggactctgttcgagcgtggggggactcccggggccttccctctcttccacccaccacgctttcctgggcgggtcgaggcgaatcactgccctcagatcccactagcaggccactttaggacttcacaaaaactcagggtgatgcaggaggccggggtgaaactttgattggactctagcggggagctggaagggaaggggaatcgggtctgcagggaagggacggtgagaggcagcatctaccagacaaagtccgtctccaactggggttctgtctgttcatggagggggacaggccatagcctggtcattttgtgactaaggatagtctcctgcagccctggggttagatttatttttccaaaggggagccagcgatacctcctcataacattgacactggtaattaacccaggacacggaggtgtctcatggtttccctggcgggaatcacccgggaaacctccgggagccctccagacccccttatcccgtcccccagggtctctgacctcccggccctgggacaacttgtgctccccaatctacttgtccattctgtttcttggggaacccctgaggctcctcctcctttgggacacttccccaggcttcccctaccacgcctaggaaagcctgccctgaagtccaacttctagattcctgttgtgagaacaaggcttccagctctgcttccacacccagcagcctcccaggtcaccttctgttaccctaaatccagcccataggtagcaagggctgcaggaagcgccctagcccagactcagagcacttgggttcttcttcttgctaacctgctggtgaccttgaacgagccatttaacctctctgtgcctccatgtcttcatctaaaagaaaacatgctgcctaaatattttctctcttttgtggcccactaggccctgccgtcatggcctcctttcagtctctcaaagagccggttctttcctgcatgaggccttctcaccagcaaggcacgctgttacctggagtgtggctcactctcattcttcccaacttagtcacatgttcccttcctaaagaggtcttttctgacccttcttagcagccacctccccaccttgtttttctctgtcaccccactcatttccttcatagcattgtcacagtttagaatataatcacatgtatttgttcttcctactgaactgcaggaatcatgtgtatattatttaccagtatatccccagtgcctgacacataaccatgcctttcacagtattcattcattcattcattcattcatttactcactcatttgacaacactgattgagcacct

SEQ ID NO: 36009 - DNA, 1282 bp, Homo sapiens
tagtaattgccaaaggattgaaccctggtctgattttgaatcctacactcttcctaacccatgctccctccaatttgccatagtgctgtgctgaggaaccattctcagcaaaattcatcttctctacctgcgctttctaccctgagccttactcagttcccccagggaacttgggcaggtgacattcttagacttgtgcactttgcaacgccctgccctgtttactgtgctgcccagcaatgtttaatccacaaacacccacgctccttcccagaaggctcagcttccaagcttcaccaaagtcatttaaaccatgtttacagagctgctctcaccaagagccatctccattgcagaatatagttgtgtaagaattgattcagcagagaaaaatctgcccttctggaggaagggctggagacccagctggagcctccactggctgaccctgcagctaaatatggctctgaaatcgtggggtaataaccacattcttacaggtgcttgccacttgaaatggctcccaaggacccaggaaactccaaggctgagctgctcctacctctgatgctttactttgcactgggtcaccactgagctttccccacagcctcacagctcacggatgaaggcagctaccccagccaggaaggcataggtcaccttgcaggcctctgatttcctggggtagagcccaaggctgccaaggctgttgaaacagcacacccccatttcattgtaacccagcaaatgttccctgggcccctcagaggtgggtcaacctgcctccttctcaagatgtcacatggacccccagagcacccactgggaggtgtttagctacagggtgccccaccccacagcctagctcagcagagagtggggaagggacaagaccaatgggaaaggcaagccagatggggaattttccagtcctgttccttctaccactcattagccacttatttggacccaacccctctgagcctcagtttcttcttctgtgaaatgggaataatgataaggatcccttcccagggctgtggagaaaagtgagatttatacaggcaaacacacttggcacactatagaatcccagacaaattcaagggaccaggattatcattactgattccagttatgtgaaaagtccttttgccaaattgccgaagaaaaagaggatggtggaggaagagaaaaggaggagaagaaaataagttgggttggaaaccagatccttgtccttgaaaatttcataatctaagggtggaaatgccaaaac

SEQ ID NO: 36010 - DNA, 2595 bp, Homo sapiens
cagtctaaatccagtgggctccacgctggccacaggtgcaccatttaacttctgtggttccaaaagtttctgtaaaatctatattagatcacatagtcccttctaacactaatattcatgattctccgaatatacaaagaaaatattaaaaagcaactttctaaatagcctagtcttttttttttaattgtagttttcaatacaggctatttttaaattataattttacaaacaatatttaaaaaaatcagacccatccatttccaaataaaagtctatttactgctgtaaaatgtatctatatttgcccctcttccagtgagaataccagtgtcagaatttttctggaaacaaaaagaagggcacacctaaatacctagtaaaaatagaagcttcaggagaaacaatatatctcaagctgtcctaaaaaaatcttccaatctcaagggatctggatataaaaacgagacacactgtttgaggaggcaattgcttaaaatcaatgaaactccagtaatgtcaacatgatttttaaatataagaatgttgaaataccctaagaaaactcaacacatttatcagtaatcaaggacactatcttaacaccttaaataaacatgggcagagaacagagcaggcaagcattcaccagccaatttggtgaaccaaccctgaacttaatctgcttggctgcaacaaaatgcagttctggttctacttccagtaacataacatactgagttgacatagataatccccttttataaaccacacatattctaagacctcccccaaaaaggatacaccacagttagagagaaacacctccaaaagaaattctgagtagcccttccacccacccctacaaaatacacacacacatgctgtactcaaaacaagtaaaatctccaggttccaggagcaaagagagaactcaaaggaagtaaagtagcttgctgtccacgctggactgccccagaaagatatggacttctcacaagctctaggctaacatcccgatggccctgtgatggcaaaagatcaggcataggcctgcataagctgaaacagacacttaaaggctctcaaagctccctactaacactcatgtgccagccacacctacggtcatgcactgcatgttgacagtggtcccataagattttaaggccatatttttactgtaccttttcctatgtttagatacacaaatatgtaccactgtgttacaactgcctacagtattcaatacagtaacatgctgtacaggtttgtagcctaggagcaaaaggctgtataccatatagcctaggtgtgtagtaggctataccatctagatttgtgtaagtacgctctatgatgttcacacaacaaaatcacctaatgacaaatttctcggcacgtatcaccattattgacacatgactgtatctccttgacagggcattcctgcctatgtgactctgaacatgccattcctatcattcatcatctcccccagcacccttttctcctgcagatgaaatacatctattactgcaactatcacattgtattataaatgtctgtggatacttgtttctctttgtgccctgtaagatacctgaaggcaactttcatctctgtatccctctcaatcaagtgcagtccctagcacataacaggcatccgagaaatattcactaagcaaatacacgagtgggtagtgaggaaatgcaaaaggaaacaagacaggagaggagaagaaaggctaaacacttagagaattaaataataggggaacacatttacacctctggaataagaattttttttttaataacacactaataggcctaagatcctgaatggtttttaaatgcctacaaatcaagagggaagggaaaaagccagagtaaacatgagcaaagaatataaagaaacaatttcaaaaaccaaaaagccaaatggccaatgaacaaatgaaaaaacaggcaaccacatttgaaatcagaaatatgcaaatttaaacaaaagtcaggttttcagctatcagtttagtaaaagttaaaatattataacttgatgaggaatacatctagaaataactggaaagggtatgaactgatataacctttgcagaaggaaatctgacaatatatattacattttcaaatgtgtgaacctttatgttaatgtggttcatgatagtaacctttttactacctatgggtatcccataacatcatgttgtataccttaaatatacacattaaaaaaaaaaaaaaatgtgtggcctggccaggcacagtggctcacacctgtaatcccaacactttggaaggctgaggctggaggatcacttaagcccaggagttcaagaccagcctaggcaacatagcaaaaccccatctttacaaaaaatacaaaaattagctgggtgtggtggcacattcctatagtcccaactactcaggaggctgaggtgggaggatcacttgagcctagaaggtcaaggctgcagcaagccaagactgaatcacactgcactccagcctgggcgacacagcaagaccttgtctcaataaaaaaataaaatatttcacatcaattact

SEQ ID NO: 36011 - DNA, 3488 bp, Homo sapiens
aaccaacattggaaattcagaggcgtttatctaccgcctattgcaagctagacactgtactaatcacacttccttcataaacataactctaatcctcaaaccaccctaagagctgagtactattatccccattttacagatgatgaaactgagggacaagttttttttaagtggctacgtcactaaaggtagtagctgagcaatactgaagtgttagtctgacttcaaagctggtgtaagtgccatcataccacactgagtctgtgttaggattgtattctgacatcagaaaggcaatcagaagaaccatactgctaaattgaatatagtctcaagagccacataacgttttatgaattcggctacacaacggataccttggtagggtatctccaaaggataccttgacaaaaaacaaggaagaaaccatatagcaacaactgatacgtgtttctcttgctcctactgttaggaaaaattcacagacaatccgtacaagttacttcaacacaaagaaatgtaaatccaggaaataaaaatcttaacagcaaaatccatcacccttatctatggtccattatttcaatattgggtattcacactacaaacctgatttcataaccaggcattaaactaaaataagatgcataatgctattaatactttcaaattccttgaatcctggcaggacaaaatatcccaaaccctctaaacccaattactaattctagtgaattgttaagtcgacccagtgagagtttgggacgccctccatgacacaagcagggggccagggaacagcatattatactctgtatgtatgactgcaaactttgtcatcactccattccacagacttcataaaagtaaaagctttttgtttctttgtctgaacaaatggagccacaagcataggatgcctgcaagatgtccccacttcagtgggagaggtgcaaatacaacttccacgaagaaactcgctactgaagtctgcagaagccaccgcaacacaccgcaaacctccattccgcgatcgctgaatgacagagacatttctgaaatgtctcaaacctgctgttcatctgtggcctggtggccgtgtcaaaagcctgcggagctcctaaagaaggcactaatcctctccggaggtcttgctaaaagctgtgggaaacgaagggagccaggcacgtacgctttcctgcaatctaaaacttccgagattgcatttaccaaaacccctttccacaaagaggtaagggtgacttagctgctactgtggatatcaagatcgaaattcaattaaaaacaaagcaaaggtacccgttccagtaacgtatgtttcactccagtaaaaagtaaaaagacacagcaaagaacaaggtccccggttcccgtattcttgaccttcaagaactgcaaaaaagtcaagacccagtgaaagacgaaaagtttgagtggctgctgggctcgcgggcggctcgcctgactccggagcagctggaggaacccgcctcgaggttagggtctcgccgcgcccccacgacggctgtgggcgcagagcccagaggatggagcctccccttcctgaaacccgctcgaagctcggaaagccccggcccctccgcgcgggctgcggcccccaggctccttccccgacgcgcccgagggcgcggaccagcccccggcacgcgaccccgcacacttccgggcccgacgccctggccgctcgcccacttaccggcatcatcttggacccgaaccgcatggaagcgggtggccagactgcggccccggccgagctgaggtgccccggagggtcgcggatgcgggggaggggagcggagagcgaggccgcccggacctgttgcgaggcggcggcggcggcagcggcggcgcgcgggtccgaagggccctccgcgcgggctggggcaccaacaagccccgggctcccccgccccggccgggccccctgacgcggctttgtctcttcgacgctcgtgacggtcggggctccctcctccgctccgaaaccaactaatcccgggtcgggccccagccgagcccgtgccggctccgccccccgcgccgaccccgcccgcggcgcgcccggcggcctgggggaggggcggccgcgggaacgggagctgcgcgcgcctgcgcgggcccggctgggtagacggggagcggcgggagccggccgccttttctttcttcgccccggactgaagtgcggtcggggccgcgcggcggagcggctggagcgcgcgcctcctagcggagccggggcaattggaaggccgcgcctcaggaaaacaggatggtagtgaatggcaccgagccgccccagggctgccgccgtcacctcctcggcggctccgagtcgtgcgaggcaggggaccctttgccttcagaacagggcgcccgacgttgggcgcgtggacagagtcctccggcggccgcgccgctgggccaggcggagagaggcggacggacttcaggggaggcccgggccacgccgcggaaactacccgactccctggaggcggccaggaccgaccctgtcccgacaaaatggagttccccgtgtggcttcagctcgcggcgcgttcccagagctcctcagtgatccggctttcggattgttcgcctttcatctcatttgccgttgtccaaattctaatttaaaactcatgtgttacttgctgtaaggttaacaaacgtacaccgcaaactggataaagggataacttttatgttgtgtatgttttaccacaataaaaataaattttgtaaaaatgtgtcaggcagcattctgaggagcttccctggggggtgctgggaacaccctgcaaacagcctccgatacggggagccggtggataccatccttttccagggagggaggccaaggcctagggaaatggcagggctgccttccaaagagtagcagagcgggttcaggcttttattccaccttccagagagacacatactgcgggaaccctaactccaggaagctttgttctagtaagttgtcagtgcaagttcactcagaatcacttttctctgcctttatacatgattctagaacctgaagtggggtaaatcccctgggtttatctagtatcaagaacagacaattctttcttagcccaccatatcccttaccagaatctccatcgaactccctattgcaccatcccagatactgtatctggaaatactaaattacggttaattcaactagaatttaacgttctcgcccgggcgcagtggctcacgcctgtaatcccagcactttgggaggccgaggcgggcagatcacctgaggtcaggagttcgagaccagcctggccacgtggtgaaacccttgtctctactaaaaatataaaaattagccgggcatggtggcgcatgcctgtaatgccagctactcgggaggctgaggcaggagaatctcttgaacctgggaagcggaggttgcaatg

SEQ ID NO: 36012 - DNA, 4052 bp, Homo sapiens
gagcttgcactgagtggagatggtgccactgcactctagcctgggcgacagagcgagactgtctcaaaaagaaaagaaggggtcagaaaagggctttctggaagaagtggtatggtaggcagaattctaagaatgacctccccgctccctccgccccgccaatgtcccctcaccctcgtataatctcttcccgtttgagtacggacagactctgtggatatgaagagatatcactcccaggataatgtcttacatggcaaagtgagggcttgtccaggtgggcccaatctaatcacatgactcattttaaaagcagagttttcttcagctggtggtagaagaagtcaaggaaattcagtgtgaggggggatttgacttgaggaaggtcctctgttgctgagatggaaaaggtccctggaaagacctggagcaactcctgcccaacagcgggcaaggagacagggacctcatttctactgaatctggccaacaacctggaggagcttggaagcagattcttgcccagagtctccaggtaatagcacaacccaactgacaccttgatttctacctcgtgagaccctgagcagagaacccagttgagcctactatgacttctgacctctggaactaaaaggtaataaatggctgttggtttaagccactgtcctagtccacttgtgctgcaataaacagaatacctgatactgggcattttataatgaacagaagctttttggcttacagtcctggaggctggggagcctaaggtcaaggcgccagcaggcttggcatctggtgaggccattctcttcttccaagatggtgtttttcctgctgtgttctctggaggggaggaaggctggatcacatggcggaaagtggaaaggccaggagagcgagcccactcctgaaaacccttttattaagacattaaacccacccatatgtgtgaaaccctcgtggcctaatcaccttttaaggccttacctcccaataccattacaatggccgttaaatttcaacaggcattttggaggggacaaagattcaaaccaccgcagctgctacatttatggtaatttgttacacagcaatagaaatgagtacaggttacatttgaactgtcccttgagggatggattgcatttcaaagtatagagaagaagaggaagaagctctttagacagagctccaattgggcatttttcagtctcctagataatgaagccttcatttattgagtgcttgcaatttatagagcatatctatgatatcattttactaacttctcacaactctgtgaaatatttattatatctccactttacagagaaataaacaacagtcaaaaaggtaaagtaacctgagccaagttagtggaggaggctgtaattaaaacccaggtcagtttcattccaaatcccaccctttttactacataagcctgacctacctgggggcttggtggctgaagagtgatatgccaccgaggagacaggtcagcactgtttcctttgggtcaacggcccttaatctcttacctcagcctcgtgattacatggggttttccatgtttgttttctagaacagagtcaaatggtttgcttaaatcattgcagatcaataaacacgttaactctaaaacaagtgcacacagtgtgacattacctcccatctccacctgtttactctgtttcctgagatgactcatcctagctggtcctcatccatgtatcagcctgccagcaaccctgagggcattcattcaccctcagttgtacctacttccatcctctgggatttccacttgaaagaccttctgcctcagtgtccacacattgcaggctcactctgtgagggggttgcagtgggactaaaaggggatctccaccatgtgattgtctttttttttttttgaggcggagcctcgctctctcatctgggctggagggcagtggcaccatttcggctctctgtaacctccccctgccctggttcaagcaattctccggcctcagccttctgagtagctgggactacaggtgcgcaccaccatgcccaggtaatttttgtatttttagtagagacggtttcaccatgttgccaaggctggtctcaaactcctgagctcaaattatcctcccaccttggcctcccaaagtactgggattacaagtgtgagccaccgtgcccggcctaccatgtgattttctaagatgttcttagggaaacatattcacacacacacacacacacacacacacacacactcctgcaacgtggtgtatataatgctggaagtagcgtcagagattaggcattagtgaagagtccctgagtgagaccagagaaatgtgagctaaagattcataatggaagcaatggtcaagggtaatgacctggcccactctttgtagcaaagctacctactacttttgtgaatgaagcaactggaaatcagacaacgccgggcatgatggctcacacctgtaatcccagcactttgggaggcccaggcgggagaatcatttgagctcaggaatttaaatgaggggaatacaaggtgtgttgcaggagtttgtgtattctctagaatgtttctgtagaatgacttgcccttcttcactgtggctgcagaaaagacagtaatcagggcttctagaaaaggggatcatgttgctttcccaacataaataacagactagtcaacttggaaaaaaattcagggaagctgaaatccttcccaagctcctgatttaatcaacagtattagctgagacagtaatccacccctcaaattctgcaacatttgactctgtatcatctgccaggccaacagaaatagcccttgactgtagcattaatcaacggcactaaagccatctaaaaaaagaatgtgtctgagaggaactgagctaggaagaaaaaatagatacaaggagacaaaagttgtcgaaagcatctagccccgtccgagactctgcatctggggtcactgaacacacagccccgtcactggagaagtattctctgctgagaagagattttccatcaggctttacgggaacgcaggtgacgtataccctacagccatggtgctttcctttccggtttcatgcttagcaaagagccctctgattaatgatgcgtcacccgagagcccgtccactagaaatgatggcaatgttcctcctaagggcacagattggtgacccaggcaatctgtcactgtaaggggaaatccctgttgcaaatcattctgctggaattctgatgaacatgtctacagtcagctcagcacacagcagggtggatgaagtttccttcatgaaatccaggctcagaacctaaaaaaatccaagggttgagccaagcccttcagaggtatttggggccctgtgtgtgacccattagattgccattagtaacaagcccacccctccaaagaacccctttccacatcagaatgcttagaagtcacacctgtgtcgtaatgataccatttgcaaagaccttgcttggaagtaatttttcagtatttggttgcccatgaaaatatctgattttttttccttccacccacaatgaatgtagtccataacacatacaaatacacacacacattttcactcttcctcctgctttaccagttttacacatctctgcatcaggacccaaacttgagcactcaggatctcaaccacagttgagatctcttcttcactgtcatcccggcacatcagttacttaaaacaacccaatttcaagaactgatagaccttcatttctggacacaccaaaaacaagcaaattccagaggatcagcttcagggtggcagaatggaaggagtaaaagccaaccacggggccaggtgcagtggctcacacctgtaatcccagcactttgggcggctgaggtgagcaggtcacctgaggtcaggagttcaagaccagcctggtcaacatggtgaaaccccgtctctattaaaaacacaaaatattagccaggcatggtggcgggcgctggtagtcccagctactcgggaggc

SEQ ID NO: 36013 - DNA, 437 bp, Homo sapiens
aagaaaaagaaagtagacaaactaagatagaaaggaaagaagagacttttcagaaaatctattttttaagctcttgattcataaagtacaaaatgatactggtcaaataattgcttcagaagtctaaccctaaagaaaatcgtatcaccttctgtaagaaatctgtaagattgccaaagtaaacagtatgttctcactgcccagaaaggccccacctgtcacctttctggcagaagagtgaagggaagtaaaaggtgaaagtgcacaaggaagttgcaacctcagtgaaccacaaaaccatccccacaggcaggcagttgatatatgaaaattccattgctatttggtcatttttaagaataattttcttaactgtttttacttaaattttttcaaaatcagttataaactttccttatgggccgggcaccatggct

SEQ ID NO: 36014 - DNA, 1118 bp, Homo sapiens
acttaataactgtagcagggaattggaacaatgagggattggctagtaagaagtaaagaaaactctaaagaataaaagaataacaaataaagtagcagccatgttctttgagctgggatagagtatccagggaaaaggctccccaggcccaggacccagatcttggagggcacaggtatggctcactaggcagcagagaaattcttgtgattctgtgctggcagaactggctggaaatctgccctttggaatttaccagaaatctgtcctctaggatgtcagggaaagcaggtcatggagaggtgtcgcaccagacactttactacaaagccattcaagggagaaggtgatgccaagggaagctgctggtcaatgggtgctactgactaccctgccaggcaggacatggtgctggagaatctgcccgtgtgctgcaggagctgccaagcaagcacaccgtaaccaggaagcaaaactctttgctcttgcaatgtctgcccagagccctctactgacatagcttcacactgcgccagctgataaagaaaaaaacatttaatgggcccgttagtattttcacaaagcaagcaaaaaagggtgaatatagagctcagaggcaattaaatgataattgacacaaacattttttaaataattaaaagcaaaaacaatcaccactggtctacagaattaaagtccaaaatcctgtgcacacatgcacttctctcatcttttggatgtttacctaattcatgctatttgcttttactgttacctttgtttgaaatgtcctcacaccctttttcaacttttaattaacaaaaccactgcaagtatcccaacatcatcatccttctaagtcaagctgaaaaagaaccttctccatgaaactttccctggtgttcccataagttttgtttacacacctttctaatggcagaacagaggcagctgaatcacatgtccagaatagtccaggaaattaagcttttcttcctgaatatacaactttaggaaaactgcacatgagaaaataaggaaacaccagtccagtctgccaggtcaatggaataaattcaggccatcaatgtggtgactggtactgcagccagattcat

SEQ ID NO: 36015 - DNA, 1710 bp, Homo sapiens
tttttatttgcctaaatcaatcatttctatgattcctaaaaaatggtgctagtctaactacattatttccatctacacttactaggcaacatctttatcatccattgtcaggaagccctttaagaaaactgcacagtgaagttcattttaataaatagggtttccttgctctcaagtagttactaatcttagacaaaagggtctaggatgaccacctttcttgaggtttacatgatcttccctgacttccacttgaaaggcaccctgtgagtctctctccgcctgttatcccacaggctcctccccactcctccaggtaccccttccccggcggctgcaggaggaggaagtgacgcaccggaagtgtccctgttccccttgctgtgggggtaaggaatcaagcccccaagatggcggcagcggcggaggagcggatggcagaggaaggaggcggcggccaaggcgacggcggttcctctttggcctccggctctacccagcgacagcctccaccgcccgcgccacagcacccgcagccggggtcccaggcgctcccagcccccgcgctggctccggaccagctgcctcaaaacaacacgcttgtggcgctgcccatcgtagccatcgagaacatcctcagctttatgtcctacgacgaaattagccagctccgcctggtgaggcccccgcagaactcctgcctccctctccccccggccgaggtctgggagatgagaagggagcgcgttccccgggaagggagccccccgcgagccccagccggctacagatctgggagggagccgctcccgtcccgaactctcccttggcgtcagtcagcaggagtgggctggttcccgattgcgtcctagctgcggagctggggttacttcctgaggggacttcgccttgggggctccttgccccccgcccggaagcgggccctctacgggaggggtagcggagttggtcttcccaccttccgcctggcccgagagtagacccggagaggtcatgtcgcctgccttttgtatgccgcttccagcccccggcctgggtttggggagaaaactcagaagtaggcagatgatcccagccaggtttggtttatcttgcaagaataacgaattgttccccaccccaaccacccaagttttcttgttcgagaagattgagtagactaaggtggctcagtgaccccaaacccaggtagaggttccgaagaattcgaacgtgtttacttagcgttagccccagcgccctaattgaccactaaagtagagccttgggaaatgaccattcctgctttgcctcatcctaacgcttcccaccgtagagaagcaacttaccccttgacgggttttttctcttttgcaatttatttttaactagtgatttacgcccacccacctgctttaggagaggtttctttataccttaaaatcacaataggtcagtccatgatttttaaaaataatgaatttgccattggggttttacttcactccagaggtttgaagatgtggtgattgttagttcagttagatattttgctgcctttcaatgaaattatctttaagtggtaaagaaattgaaggaggtggacattttgaagtgattgcaaaccgattccatggagaagctaaatctgtgctgggaattgtttttaagaggacaaagatatttctgaatgtgctgtgtataacatct

SEQ ID NO: 36016 - DNA, 773 bp, Homo sapiens
agctactgtgcctggccagactgttttcttaaaaaccaaaagcctgggaagaaaaacaaaatatcttgcaaatgtattctcaatcccagtcaatcccctgcaaaactcagactctggaagaatgaaagctatgcgctcttttctccactcattcatattgttggcttcacacagatagaaaaagctacttcatcctgcagaactgctctatcagttcatggtgttttcctggatcctggacccctgccttccccaccatgagtcacctctggatcgagtccatcttctatttgggatttggaaccagacaacctttgtccctttttagcctctgctgcactctaagctgtgtgatctaagacacgtcactcacattctggaagtattcgcttcctcatacatgaaatgggggaaatttctctaaccataagcctgcggttttgatttcagtgctcactagttcaagacttttcttcttgcctatgccccttcaccctcttcctttgtcaatttcctttttcataagctgtggctgctggtgagtaaaatagtcatctgagtacaactgcttttgcatgagctagacttggaagggtgcaaatggaagcagattcatttcttctcagtaactgctcttttagactgtcctgttgcattgttctgccctgatcccagaaggaatctcaggcagatcccagagccttgtagactctcctggtcactaacaaattaatcacctttatccagttattaaaaaatccagcccgatccga

SEQ ID NO: 36017 - DNA, 2004 bp, Homo sapiens
aatctttaagttgctctttgatgtagacgtggtaactaatgttgaaacaaaattagtttcgtttcaaaacctttctttcaggaagaggttgtggttgattacttctgcgacaggtagatgcaaggttgagcaatcatctcttaacagaagtggtcacactagaataattcaagcacaacaacaaatcccacatcatcaccccctcttaataatggtgttttctttttacttgattagcttttaattgtcacgcactctgcattttttccctgaggtattatttccagaaggcagcgaaatatgactcaatggctaatttgctttttaaaaattaaacaaaacttaggccagctgccatttaagaagggctccggggcctccagactcggtgtgaccgtagccgtgcccggtgctcccctcgcggaggcgttagggcggcaggtttatctcacttgagaccattccttcctttttcatcttctccgggctccggcgcagcaggccgcaggggcgggcactcgcaagaacgcggcatcctggatggtggccgagtcaccgaagctcagaaccccgcgtcccagaatcgctgagagccggccccgcacgggggcctgggagcgccacgcgccctccacccagagaggcaggcgggcgggccggggggggcggggcctcgggactccgcccacgcctccgtctcctccgcgctccgccacagccggccgacaccacaccagccggggagccgccgccgccgccgccacctctgagcagccggctgggagcgagagccgacagctagtctgcaagccaccgctgtcgccatggggagccgcgtctcgcgggaagacttcgagtgggtctacaccgaccagccgcacgccgaccggcgccgggagatcctgggtgagggccagcgggcgccccgttatgtgcgtgcgtggcctcccggcgccggggcgcgctctcccctcgcgggccctgcgcggtcgtgggcgccggaggcccgttagcagcctgctccccgtcgcgtcccgtcgccgctcgggccgccagcccgcgggtcagcgcgggagaggctgggcgaggagcggggggagggacgggtcctcggagccgcgcagctccgacccttccgcgaagaggcgcaggcgcgtccccgagcgcgggagtccccgccaggcccacgccggccggttggggcgaagggtgtccccggctgtgccagccttgagtagatcttttcgctagaagattcctgtgccctcaggtgggcgccctttcctctcaccactccctctcctccggagcgggccgaggtgagcgggtgccggccttggggctgcctgagtgctaggcagggtgtggtcctgggcatccttgggcctaccagcgagccctgctcagggtgtcgggcgccggcgggcagtactggcgggggcggccgcagtcccggccttgggcccgttaagggggccggcgtccctccatatgccccccggggcttctcggacttgatgggccctggtcggttcacgccgcttgtcccattgatcctcacgacaagcctgggacgtaagaacggcggattcgtaggcatttttcatccatctcggttttgtggatgaaaagactgaaaatggaagacttgccaaataaggaaaatatgtggcgtggcctgctggtcccctgacagctaattgagaggccttaactctccagaggattcgggccttctgtgttacatagagaatgctcatctctcccaggctactcctaatatgctagggattgtgtggaatgctttacaaacattacccaatttcatcctcttggtaattctacttggttggtattatcgctgttttaaaaaatgaaataagaacgcgtgactaaatgctagggggattctaatgcgcattcggttgcctcttccagagcacgtgtttgttttttgtttgtttgttttttgagactgcacgtgtttgttttttgtttgtttgt

SEQ ID NO: 36018 - DNA, 539 bp, Homo sapiens
caccccctggcatttattcctaattgcttttatctctctgtgaatctctcaaaaacattgtttagtttggaaaaaaactgagcagtaagcacagacctagctttgaaaggggagggcaatgatgctcccacggctccctgaagatgacctgagtggagcttccgggcagagcctggcttccacgtccccttgagttctccagagtctgtctggggttgtgtcacagggcgtagtgtgagtgaggtgcaggctgaccagcagaaacatggtcaaagggcatgggctgctatgaattttctgcctctagactcaccacagctgcagtgggtggaaacagacctggaagagatcaccagtgtccccgggcgctctgggaggcagggcctttcatcttcttcaacctgggcacacctgagcatttttatcttcatgtacaaggaccatcgttgctctgtgatcataaccctccgcatgtctatcttctgagtcacggcggcagtctggaccagctgctcgctattgctaggccggagcacagc

SEQ ID NO: 36019 - DNA, 2004 bp, Homo sapiens
taagaaaggtgtatgaggaaagaggaggaaggggaggtaagagaacagtggcacagagcacttccaacatttacaagttggtaggaaaagatgggtccgaaaaggagattgtttaggggctggtgaagtgaaagaaaaacaaggagaatgtgtagctcacaaattcctaagtgaagaaaattctctcccaccttttaactcagactgcttgcttacattctgaggtatttgccacacactgctttttactgatggtcatgaaaatgagaaaaccgtaggcaaagtgcctgttactgttgccagacccatgttatctcgttttagtgtgtaagttccttgagaacggaaattaacatattatttatgccaccccttctcaaggacctcttacaatgcgagcgtttgaagaccattcctgtgctaacttcacaagccaaagaggttaaaattcaaaggctacctccactctactgaatgatctgcgctgaagacgaccagacaacttgggcagccctaccaagctgcaccctcccaccatccccggcttctccctgagactccgcaccaacgtgggtagggaaggccccggcagcaccaactaaggagaaacagacgcacgcccagacccagactggggaaagaagactagttgagttccacctggatgccacccgacaaaaggggagtggcaccctggggcagcgatcggggcccttggcgaggccaagcggtgcagaatacacacctggatgactcgctgcttgagtttattatccacgaaccctgcaggtctgggcttcatcgcgtcggtcttccaagccacagctcggaccgccagctcctagtcaaccgggggcctcgtaggggttgcccgccgcgatcgccgggccagttgcacctgaaatgcgcccctcctggggcctagcccgcgccgtttccgtcagaataaaagtaatgcgaatgaaggggaaaaaattccgaggagagggagaagacttgaaaacctcagggagtttctaggggccttattttgcaggcctgcccagtggaccctggaagattaggacccctttgaacgcgctcaactttattggttccccgccgggcgaaccaggtgggaggaagttcctaccccggcgcggtgtgcggagacgctgtcaacggcgtcctctggaaaacttggtttgctttcctcaggcgttccagccacacctcattctgatacaaagctagtcttcgcaaaaccagccacggtagatacttggagtgataaaatcagggtaaaaacacaccaccagccgctgcttgctttcccacgtagttatcttacattttagaggcccgacaaaagggctaggtgaaaaagaaaaggaaggacggatttatccagataactaagtcatttgttacttttagaactcgtttgacttacgctgttatcatcggcaggtaatttgttgaatatatccagtgcaggactccttggcccagaattttatcaaacgtttgtatttgccccaagaagtttatcctgcacttagggagacacaaagggacagttaccaagcattaaaaaaaaaatgctggctttagtttctgtcttcttgtttatttcaaccgtgttttgagtattcttatttcaggtcctccttggcttatgacaaggttaagtgcagtgtattaaggggcagaggggagagaaaatggaattaagagaagggcgtgaggccgggcacggtggctcacacctgtaatcccagcactttgggaggccgaggcgggcagatcacttgaggtcaggagttcacgaccagcctggccaacatggtgaaaccttgtctctactaaaaatataaaaattagcactgaattaagtattagatttcccactcaaaatattgatccgtttggttgcaacttcatttcctacttcttcactatgtgtagttttattttttatttttttagttgtaaaatataagaacattcaccatcttaaacatt

SEQ ID NO: 36020 - DNA, 1363 bp, Homo sapiens
atttatgaaagaggccctgcccacctctttgatatggacttgtactaatgaactacaattcccagcatgcgtcagaattagggccgtagagttttttaaaatatggactacaactcccggcatgccacaccaggattcgaggaccacacgcctcagccagccccggcaagggcctatcaggggtgggtcggggcatccgagcgggtttgacggaaggagcggcggcgacggaggaggaggatggaggcggtggtgttcgtcttctctctcctcgattgttgcgcgctcatcttcctctcggtctacttcgtatccttgcctgaggcaggcgaacgccttgccgggggacacggctgagggtgggccagttgggcacccgggcaggtgtgtgggactagggaggcgcccggcggcgggcgtgggctccctgggagctggcctggccggggcggtggcgcgggccccggagcgggtaggagaggctggctgccctacccgacgggccctgctgccctgcacgcacttgccctgcctgggttgccggccgcccctcactcgggtccgagtgggcctctccgggcgcgccccgtctcggcctgcccgcctgctctccgctcgtccccgcggcgcccggaccagccctgcctgagccacggccgccctcgggagagaagcgtcgctgtttttctgggagaggccctgcgccgtgctcttcgtcggatattgggggtcccaagggcggtcgcttgcgacagtcgggtgccgggataagtgcgggccatttgcctcctcctgttccccacgcaacacccccggcacccgcccctttgttctggcgggtgttagtacttgcagggacctttcacatccaggagttgactcattcgccaaaggagcgaagttgcttccttcactgtgccgttttgtagtgagtgttggaaaggagttgttttaacaactgtctacaaagtgattattttggttgtccccggtggttgcagatctgtaaattcaataactacatctgctgtagttcccaatcgtttctcagcttttaaatttttctatcgatccatgttaaaacttaagttgcagtattcaaactgttttccagagcaataaatggtggttgaatttagcactgcagtagccatgtcggctacaactcttcccatctcttgacaaagcatctaggcttagttgttgcccaatgttgtattgcaccatccaggtttaagtaattaaatataagaaaaaacgtatgaggaactccgcatttcagcttcctttcttggaaatcacatgtacctgtttctgatcggattaaaccatttgtttgctagagcatgcgggctttaggata

SEQ ID NO: 36021 - DNA, 1365 bp, Homo sapiens
tcttttgtaataagatttcaaaagaaaaaaacacaaggccttatttttatagaaaaaggcagaaaagattaatgtttgactcaattttaaaaaaatcaaaatgtaatagtcatttactaatatttaacaaacagctggtttctctacttcacttcctatttgccttctttctctccccacccccagacaggaaactgcttttgacaacaaatgaatcagctagaagttaaaaagccagcagctagcagctgattcttcatggtttccaaactccagcatttagaaaaaacttatttcctctctccctcaccaccatctactgaagaattaaagcccataagtctaaaagattcattaagaattatgaaagcggctaacaggttaaactactaaattgatcttgtcagggaaataaggccagtaagcagggccaaatggtcaaatctgcacacaaaccctccaccagagtgatacgttattatacaaactttgacactgtcaattcacacaactggaatgcaagaatggaaaatggccagcacacaaatggagttggcttgaattaactgtaattcccaaagattaaaaaaaaagataatgtatcagcttcttaaggctgtatggatatacacacacccaaacacattttctctttaaccagcacattcagtattttaagtaacataataaaagtataatttatctttaactctataaatataaaacctctattagtagcactgaaagcatgaagagctttcaatatattttttgtagagcttaatttataaggttcaaatgacacatttactaagtatgattttaaagaaataaaactcatactttaaaacattatactcatcctagtttacaaattatatgaaatttaactacttttaggccttatttttttataagaggcagaagcctagagttatcaataacctactaaaataagcataaatgtgaaactaagaacaaaagtgtatttaccacaattattcccaacaacgtttgagagatttcaagtgcgcctcttaccacaatagcatgaggagaatgcactaaaggctttagttcattcaggtcattttctgcctgtaaaaattggtataaaagaaaaacagaaatgtcacaaaatgcacatcaaatctgtaattttagcagcagtcacacagctctatatgccctactttaccttatcccagtctccttccatgacatgatttcggaatttggtagcagaaggatgttctaaacgacatcctgactcttgcatgaggagatcaacagtctggctgcaggaaagatacagtgtaaaacagacctgaccaattttagggttttaatccttcaaataaacta

SEQ ID NO: 36022 - DNA, 2855 bp, Homo sapiens
taggcctcttgtacacacacacaagggcctttaaacgacatcaacactgtatcttcattattcgcatcagatttattcaacaacctctttccaaatgatcccagcccctccgttcccataaacacttgtaggtgattgtctttcctgattggtagtttgcttgggttgttgtctgccacggttgggggtggggaggtgtcccacaaagatgcctccaagatacacttgaaaaacaaatcctccaaggttcattatttccaccagctctaatccacccctcccccaacacatacagaaacacactcccgcatctgtctttattgacagacaattaagctctgaaggtgcgtggggagaagtcattctttgggtttctcctaacccttcctaacccctcaacgcctgtctcgtctcacaatttgtcagactgattgattttcccctatttcctttcaggtccgctcctcctccccggtcgccctgagccgcgtcctcctgtgtactgggtcctgcgtgcccagcactcattctctttgaccgagctctttcaagcccccctcccccctccgccccttcccctacccccctggagcctccgtccctcggtctgtccatcaccagctggcggtaagggatacttacttgagccctaagccattcaagtgctgtcctattagcctaatgacatcctcatctgactgggagagccgcttcttcttcttgaggctgctgcccagttctggggtggccaaggaagaggaggcggcggtggtggcggaggcagctgcgacggtggctgaggatgcggcggccgccccgccgggaaccccgttattgacattcaggctgttgctattgttgctggcggcggagggggcggaaggcaggagcccattggcgtgggccaggtcccccgcggacgacgacgacgagggggacgactccccgttctgggccgacaagcaggcgagttccggggtctgtccctggcccccgccgccccctcctcctccaccgccgccgccgccacctcctcctcctcctcctgccccattggcctgcatgatgctgccgctgaccaggctgtggccgctacttcggtgggggacagcagcggcggcgggaggggcagcagccgggggaagtcccaccactaccaccacggaggaggaggaggaggaggaggacgaggacgacgaggacggaggggagaggcctgctctgcctgccgaagccccgggctctcctactccctccgccgccgaggctcggggtttcttccgcgggggcggggaggctccgccggtgtccgagtcggaggaggaggaagcggaggccagagtttcctcgccgagagaggccgtggtgggaagccggtggggcgaggcgggggaggggaggcgggggccggggagagggtcggggtgaggggggccggggaggcggggagggggtcagggtaggagggtgagggtgagggtgagaggagggggaggaggaggagggggagaaggaggatccgggccctttcccccccccctcccggaggcagctcggggtgcgcggcccgggggtcgcgccggggggcgccgcggggcggctgcgggggcgcggggcccgccgctgggctgagccccggcagtggctgcggcggcggcggcggcgggcggcagcggaggcagctgccgcctctgtcctcggatccgctccgctctgctccctggtgtgttgattcttcccccagctgctgcctaatggagtccaggcgctcgcgtcacaggaaatgcctatactgccctcctcactcacttccggtggcaggtatggaacctatagggggcctgtcacccagcacgtgcatcgggggctgtcccgggggtcaggggagggaggccagcgggccggcggggtccgccccgaccccatccacgaccccgactcctatccgatcctatccccggccccgctcgggcctttccccttgcgccctggctcggctggctcgacgagcagtaagttcgtagccgccctccgaagccgggcgtgcatgggatggcagagttggcgtgcgtgcgtgagtccaccagtgtggcatgggcatgtaaggtgcgcggagggactgcaccttctccatcaggtgcagaaggtgaggatggggcagggggctaggagcttcgacaggcaggaacttccaggcacagggctgtggtaggcccctctcaatggtaaccaggaccgaaatcgggtttcacaacctacttgttttagggtggaaaaacttgaatttccacagccaagtgccacacagttgctgtacccggggccatcccgggagctgtgagataatgagccggtgagactctgctccaccctgggaaggggagttagtctagaggagcatatcttatggggacaagaagtcacaaaaaggctgtgtggtgtgtagagaaggggagggactctgctgttgaggcttcactcttttttagcacttgcccagcacctccttctctcttccagctgcctcttgagtcactgcccagtttagggagcagtaacataaaccaaacagttgcctccaaaatatgcattctgagaaggattcaggcacccattcagatccaggcttgaaatttttacgtggcatgtgagccttctgtgtcatcatgacttaccaatttatgtgaatgtagaaatgcagcaacaaagactgggctgaatcttaatcattggcaaatggtgtgcattatccccaaacaattattttcatgtatgtggttgatagcatctatactcaatatgtataaagattttctcagaaatttaaagtctttctctgaagtagttttcctgtg

SEQ ID NO: 36023 - DNA, 695 bp, Homo sapiens
gttggtcagctgattgactctaggcaagtcatttaactttcgcagcccctcaggcatgtcatgtttaagtggggataatgacattggcatacctgcttgctagagttaatgtgtgggtcatgagataacgaatataacaaatatttggaaaagtactatgttgaaatattttaaaataaaatttaaatccctcttcatttagaaaggatttgaggcagctaaatgcagaggtgtaagatggttttttggttaggattgtttctgagctgtgactctgtagtcactttcttactcagccctgccactcagctgtattcctctgtagctctgggcagacgactctgaacacggcttcatattggccttccatgagtgggtgaagggcatagtcatctggcagttttacctgctgttctatgcatgtctctccagcgcttgcttattttccccttctgcaaacattccattcatgccatgggcattcagtacagtcctgtaagcaagggtaggggcggcacaccaggtggatttaagcgcaaagacaggacgactgctttgccacaggcgcctttacagccagcagtgaacagttagacatattcaccttcctctaggtggaaaacagtcctcttctcagtagccctctcatgttcttgagacccatttgatataaataacaatgttgcaggaaattt

SEQ ID NO: 36024 - DNA, 1529 bp, Homo sapiens
ttgcctgggctggagtgcggtggtgcagtcacggctcacagtagcctggacctcccgggctcgagccatcctcccacctcagcttcccaagcagttgggacaataagtgcgtgccaccacacccagctaatttttgtattttttgtagagataggattgtaccgtgttgctcaggctggtctcaaacccctggcctcatgagatcctcccacctcggcctccgaaagtgccgggattacaggcatgagccactgtgcccggccaaagattccccctgtctttttgacactcttcagctgtgccctcccagggaagacattagctcactctgcagccacttgtgccattctcgtgccctccttgcacaaggccttgtcgtaactgcttcactctcctggtctgccagtgcaggtatcagtgatccaagaagatacaggaagaggcttgtgtgggagtcgcctggagccctccatggtatgttggctctacaagagctaggcatgtggtgccagggcgtgggagcagcaaggccaccccgctcaggcctctgccctggaggaagggtggtgtaactgcccctggacgacagcctggatgtggcgaggggagacggtccacaccctgctctcaagcatggaggtcgaatgtttctaggtcagcagctcaggacagcaggcaggtcaggcctggtagaggaagtgcatgtgaggagtcagtgggaagtgagtaagagatggtggtggtaaactaggaggtgctcctacaaacagaattggattttcccttttaaaacaaggatggccgtagctgagccctcctctctctctctgtgtgtgtgtgtgtgtgtgtgtgtgtgtgtgtgtgtgtgtgtccgtgtcctcttctgttctccgcccctactgaaggaaggagatagctctggcttccaaaagtagccttgcagctgtaggaggactgactctgcctagcctttacatttcccatgtaaaatttaacagtgctttcacagagcttctctaaagatcaaagggtacccaactgaatgggaatctgtggtctggggattttttttttttttttttttttgtctgtagcttcccttcctccctccctgcaacactaagtagacgaaatattgggccaaagggccaaggaatcctgttaagggaggaatctcgcggtctcatttccagccaggcacttttctgttcttgtaactttccagtcgtaatttggggattactgttgataactctgacacctggtggtcatttcaaaaactgcactctggaagaattaaacgttcacttttatcatttttagttgtttttccacctccaatgtcagtgtcaataatatgcattttataaattagtgattattgttagttgaatgatctataagtaaaatccttgcacatgcattcaacagaatacactaggatagaaaatttctgaaaggtataccagaagctatacatggtggtccctagagagtgcagctaggtgtggggaggaagcagacttatt

SEQ ID NO: 36025 - DNA, 1389 bp, Homo sapiens
gaggaggagggaagaaacagctgggtgccaaccccagaagggcagaaggaaggcaaacagctctcccggggagggagggagggagggaggtgggggcaggggcggaggaaacctgggagacttctgcacggatgaagtcaccacctttttgggaggaggatgagaaagaagatggcctttagtttgtattcaaatccaatacactatttagaacacaatgtactaaatgtcatatacaatttaattgtgtgtaattaaaattcctatcagctagggagagcctgaggcacgggtgctgcacttgctgaaagccaggaccgcagagtgttccacatctccttcccttgtcggtcttttggccctaattcctctctgtcttttcctcccttgcttctgtctttgttcctcttgtctctgtcaccctcccccctcttatttccttcttcctcctgttttgaccccacaggcagcctggactctcactctgaaacagccaggtggctcccctgcaggaggagggctgtcgctgctgtctgcaaccccaccgggcctcccagagccgaggtgacagcctgggcctcggggaagcccgtgtctcatgggcggttgtccagctgctcaggcctgcacaggggcgggtcccctcctaatcttatcctcacacaaccctggcaaccgcacagggctgcctggtgtttagcaaggggaggtggagtgtggtcctcccccaggagaggcagcaggcgacttccctattgaaaacacagctgtggcaagggagatagacaggaaacccgacccagccctctggcagggattgccgtgggagtgccaactactgtggaataacaggcccagccctgcaggctcgggcacgctgtgctgtaggccacagcaaccacaggctctgaggcctctggccgctccaggagggaggggtgccgggacagagacgccctcaggcctgggaaggcaaacttggaggtggggtggaggggacttgaggactgggtgataaaacctggtttagttattagtggagttaaattattcatttccttgctccctttaagtctcagtttcttcatctgaaaaatggatacagtacttgccctacttacttaaacaggctgttttgaggactgtatggatgatgccttcccgagttagacctaggttcaaacctgaaaccctactgttgccacatgttagctgaccttggtctctgttttctcacctgggagggacaagactacaacctacttcctagcaccctgttaaggctggaatgagctagtgtagtgcctggtttattataaatttctcagtaaatgttacccattgtcatcatcaaatgggacagttttgtgcaagcattttgtaaactat

SEQ ID NO: 36026 - DNA, 1376 bp, Homo sapiens
tcatgaattgtggtatacacgtagtgggtactcaggtaccttgaatacactttccccttcattttggttaggttgtctgtaaatctgcagagtgacgttacttcacaatgatgacatattacttttctttattttcacaggggagagaactaatattttagtaaacacttatttttgcatcatgctgaaaacttttacatattatctcctttaactttcacaggaaaatcaaacccctagggtaggtgtaattatccccattttacccacaagaaaactagggctcaaaaagattgagtaacttgactaggattacgtagctgccagagctggaattcagactcaggtctgtttgactctaagatcttgtttcattttatttagattgtttgtgcctttcagtaacactgtctttgtagagcagattctaaactttaattttatttactgtttataccaacagcatatgaaccattggcgttcaataaaattggtaaactgccaattgattaccaaaaaaatctggaggtgcaaagtcctttgaacaagccaaagctttaaccgaaaatagtacattgatccctgtgacctattgcactaaaagtttggttatttctcttgaaatgattggcttaaaggcttcatcttgtttgccactttggaagtatactccctcccctgctcccagttggaaagattgctcccaagacccaagcctttttattttaaggaatcttggtttatacaatactgaacaattacgatctttcgagaatgaatcttttgaaaatagtgaatctctgaggaatgaaattcctttgtaacaaaggcagctgagtattaaataaaccaaaaaatcagcagtgaagtgctgttggtgtgtcaccaggcctggggccacattcccattccttacactcatatgcacgcacacgcgcgcgcgcgcgcgcgcacacacacacacacacggtcactcctctttgtcccagaaccgtgggatgtaaaagacttcaggcacagtgatgaagctagcacattccgtttttactgtcttccctccttcctccttcagccttggcttctgctctgccaggccccagggccctgctcgatgccaccctcctggccccagtgcagaggatctgctggcagtccccgctgctcagtggagttttagtctgcatgttactctgtagggcgtgtgcaaggaggggaggatgagtgagagctgagattgcatcgtccctgttctaagggcttccctgaagttaaacctgatacagcccttttagggtaacaatgtgagatcagaagggcagccaacaagccacgtgtctagcagccacccttgggaaatggagttgcttgcttttcca

SEQ ID NO: 36027 - DNA, 591 bp, Homo sapiens
acattttttacatttaacaatttttatttgcatttaaaagtatttttatctaacaacataccatgaggtatatgtgggctttaaaccttgtttgtttttaaaataaaagaaagaacacatttgtatttccttcatcccacccaccctgccacccctccagcccatttaccttcctccagcccctgaggtggctattgtcatgggtacgtgccctccctgttcatgtgtgggcccatgtgtgggtgggtgtagtttatcttcccacgtgtataggggaactaagctaaaaatgatgtgagtgaacacagaatggagttcagagtcaagctgaccagggttggagacctggctctcccgcttttggcctctgtcctttggcctctttgaacctgtttacccatctgcaacgtggcaattattagcttacagcattgctgttaacactggagataatggtaaagtggctggcttaataaatggtaactgacattattaaccatttctgtttttatctctttttctagatggaaagccctttgagagcagagaccctgcccgcagcctgtgtccctttgtataatttacaatttg

SEQ ID NO: 36028 - DNA, 1204 bp, Homo sapiens
gcatcacctgggagcttgttataaaggcagaatctcatgccccacccagatctgtgggatcataatctgcattttaacaagatccttgtatgcacattattttgagcaacatggccgagaaccccggctgtcaagttcagacctggcaggctgtacccgcttttcagcacttactgggcatccaccttgtgtggcctttttagatggcaccaaataaatgaacatcctgccctcattgttatcttgttgttattgacatacctttcccacctcatcagtttcattcctctgggtgtgtccctggtgctgctgagaccctctctgtccactagaattcccaccatctcactgttgcagggtcctcctgccatgcaactatcctctgactcaccccatcctgctccctgtctctggtcacgctgcctccatgggcagctctggttttccctaccttccttaagttccccagcaatcctgccatccctcaaccccttctctctcagccatggatgctcttgagtaagtggaggttgttgatgctgagttccctatttccccctccacttcctgtcctcacctctccaatcctcctctcccatctcagggcctctctcctctcagggccccattttaatgctgcctcatgattcagtccccctctgactcactctggagcatatccagatcagctccctcttttgagtaccttctctctctcattgttatccagctccttttttcccctgtcttaaaacacatttcgtcttccttgttctaaaaagttgcattggccttagtaacccttcatgctaccaacccacacatttcttttttcatatgttgcccaattctggaaagagtcccttgcactccccgcctgcgcttcctgactcctacgcatctcagaatcccttgcagtccggcagatgtgcctctccttctattgaaactgctgattgaaggtcaccaatgacgtcccagttgccaaatctaatagactgacttgtttgtcctgttcccctttgacctctctgtagtatgacatgactagtctcctgctcctctttggcttcctggcatgagaccatcttagttttcctcctgtcttgtgcacacgcatgtctctcctttttctctcctcctttctcacaccccaaatacaggtgttcatgcgccttctgcccttgttttcctcttgctctgt

SEQ ID NO: 36029 - DNA, 4227 bp, Homo sapiens
ggtgacccctaggagcaagcgtggtattctgttaatagtaagcagtgcactgagggcttgtgtcatttgggtttgggtataataaaaagaggagtgccataaaaagaagaacttaccagaaatggatctgtgttggggcagtggctctacgttgctgcagggagggcctttgtgtcaaccgtctgtgagaggcagtgtccaggcagaagtcagctgccatagaagcaggagtggcgttttcctcctctaactcagggccgtgtctctgctccctcttcagctggtgctgccagaatactccatccatagcctcttctgcattatgttcctgtgtgcgcaagagtggctcacgctggggctgaatgtccctctacttttctatcacttctggaggtaagtcagactgggactggtatatccttcgtcttttctgccagggcagcctgctctccagtgatgatgtcacccaaatagacagcttctattgccttccaatcatcccttcctttctgggtctctctctttaaagcctgttcccaaactgctcttaggcaacaagtccaataaggaaaggccctttttgttggtttcattaaccacaaccccatcccttgtaggtcagtgttaaaagcatctatagttgcattcacaacagccaaagagtggaaccaacccaaatgcccatcagctgataaatggagaaacaaaatatggtatatccatacaatggaatactatttgtcaataaaaagaaatgaagtactgatacatgctacaacatgaagccctaaagaaagtatcagtgaaaaaagccagacacaaaaggccacatatttcatgattctatttataggaaatgtccaggaaaggcaaatctatagacagaaagtaaattcatggctgccaggggctgggagggaatgagaatagggaatgactgctaatgggtcaaaggttttctttttagggtgatgaaaatgttctgaaattagatagtcatgatggttgcacaactctatgaatatactaaaaaccactgaattgtacagttgtacactttaaaagggtgacttttatggtatgtaaattatatcttaataaaaaaaaaagcacctaccagatgggctggattttctgggacagttataatttcatagattctattccctgctaagaccatgtgtcagatcatgtgatttttggctttttgtaaaatagagtcaccatatggacacaggaggcagaggtgggggaatatctaaatagtagagaaggtatttgcgcagataagttgcctgcccttgaccctttgctgccagagcattggaccccaaagtgttttatcatttttattgtaccataaaatctggcttgaatttagccacacctaagacatgcactccttcatttagaaaacatacgggatacatagtacacgccaggcattgtgagggatttcacgttaagtgtaaagcaaaacctttacccttaaggaacgtacatcctagtggtggagggaaatatgttcttaacagacatatgaggaatactggtaggagcatagagaaagaagcacttaaattagactcaagagtgacattggaaaagcacattccagggcgagggcccagcatgtgcaaaggcccagagttaagagaacacttgttgtgtttgggaaacagtagttgctcagtgaggttggatgtagggttcttggagggaaataagaagagacagggttggcaggcagctgagagtatggtatggagggcctgaaatgatttgatggggaaggtggaattaatttattctctaggtaatgaaaaatgatcagaagctttagaagaagacagtggcattacctgatctgatttttaggaaggtggcctgggaagcagtgtaaaggatgggttagagggtgaaatattgaggatgaaatccaatgagggggttatggtgggaactccaggtggagaggtgagagagccttgacccaggtggtgggagtcagaatggtgagagaacaagagaagctgtggaggtgaactggataagccttggcccataattgggtgcaggtgagggagagaaagcctctaggctgcgtggccgggaggtcgatggtgccattgaccagggccagcagggtagaagaaatctcagatttagggaggaaggaaaaagattcggttacatcgagaagcctcactttaagtaaaggcaatctgctctcatctgaattagagagaagtcaaatagaagatccaggattcacaacaaccaagtgagctgggtttcattttctgtgtttgatacatggggacacagagactcacaaaggttaagtcaacttaacctgtgttgctcagctcggacgtggcagggctgaggttacaccccacctctgtacgaattccagtctgagtccctgccacctgacacactgccccaggggctggctcttctcctccaggaaaggagttcgtcccaaggtccttcaagtagggggctgtcaaggcagggtatcagaaatgtgattaatggacaaaacatcgatcagggcactgcttcgtggggctagcgcttgtccaaaagggaggaaaaggagaggcagccagtgtccgtagactaggaaagttgatctctatggaggaagggaggggctgcaatctccttgccaatagggactttgtcttaccttttttttgaatccctgacaggatctagtctagttcctggcaattagtaagttctcagaacatgaaagaaaaaaaagaatgaggaggggaggagtcctttaaaaaccagagcccttgtacaccctttatccccctttttactccccctccttcccaacaggtccagaccagtgacatttcacatacagagaaagtcccctcctgctctggctcttagtttgcttaaaggaaatagaactgtctgctgttgactcagtacctgttcttcccaggttatttgcatacatcgcctcacataatggtcacaacagccctttgcagtgggcaattccatccccatttcaccgatgagaaagttgaggctcagatgggttaatgactgacccaaggaaagtcaatgtggtgactggtgactggcagggcctttgctgtttccacggagccacatggccaccctgcccttctgcctccacttaatgaggtcacctgggaataaaaccacagtgacagcaaatagcttttgagattggctcccaggaagaggagagatgagtggcctggagggctgtgagctggcagttgtcatcgaatctggcttgtgatttcttttcagcacagtgtcagtgacagataacgtcagtgcaattctctgaaggggaaggaggagggagctgagattccggatctgcgagttgctacattgcaggatgttcttcaaagccagtgtgattaatctcccggtcggagccctctccctgggccctttaccaccattgagaaccactgtctgtcccagagcccagggaagccatttatttgcactcctggcctctgggtggctttaccagaatgactgaaaaaggaactcactgagagattccagctgtactttgttcttgggctccggcaggaggctgtggccaggtccctgggggcagtgtcctgggggcagcgaccacttcccaagggactcaggaggctcagactcctgccccaggtctcaccaagcctgacggctcccctcctcaggggctgtggccaggtgagccttgggaacgtagtattttgaagtacacacagttcgcgttagctgctccccctcctcctctttcccacctacgttctttcactcacccagctgccgtccagggcacgctgtctcccgacagatggctgatgttctttttgagttctaggtcccactatcaagaaggaaagcacctgtaaactgctctgcgctcaagtgagaataggatgtcccgaagtattcaggattttcaataagggtctgtgtaaagtagttttagggtagaatggaggtatggtggcatcccagcagtggtggtatagccctttacctctgcctgcacttgtcctgagaggcggctcttcctcagactcctaggcaacgccaggtgacacatttccccttctgttggagcagctttgtatatgggtgaaattgccatgatgccagtggattggagtatttggggatttactacctgctggaagatagtggctgagc

SEQ ID NO: 36030 - DNA, 759 bp, Homo sapiens
tattgtacaaataggaatcttatttatcttattttcccagagggaagagaaaggggaatatttgttaagcagcaattttccagccactttacatgcattatgttacttaaaactttcaggaatattctttgttattattttgcaaatgaagaaacagaggctcagacatatcaagtaaaacttgtataagatcacatagtagtgaaaccaaaacttgaaccttgagtctattgactttaaaacatgaactctctctttcacaagtacccaactgcagaaagtgtttactctgagtttctcatcctctgcccctaattccctgcccgcttccatacctcttgctgcaatcattaatgaattagcactgagttccctgtgtcctcaaaatggcagcatttcctggtataactaaaactggaactttgagccgtttagtatggtgaattctacctcccttcaagtactgaattgcacaacttcatatgcaaaaagaagcttagtatttatttgtttgcttttttttgctaaaagagaagagaggatccagcgaaagagctggggggagagtgataagggatgggccacatggcatcctggtggacatttgccattgctttttttttgaccacccaactcctgaatcttctttgtatatttgggacttccactgtgtgagctgagatcacttttgtgacctcaagagaagtccagacaacagctctcccagccctcctgaagcctgagtgtggcaagtgacca

SEQ ID NO: 36031 - DNA, 1434 bp, Homo sapiens
gggtattttaatatatatgtaattatttttaccttagaattgtatacctcttagacctgttttattacatatatacgatccttcactagtaagtgaggctttttaatgaaaattcacgcccacgagttgtgaaaatcttaagtgtaagtcacctctttcagaggtctcagagccacctgttctgcaaaggcacacatttctcccgcctttaggccatacctaggtaggcatgcaggtggtagaaaggtcagactagagtctttaacttgggcaccatatctgatctgcctttagggcacacttttgggccacactctgcacccccaacaccccccttacccccagcaccgtcggtgtcacatcgggggccgccgcgtacccgcggtggaatctcgcaagagccagggcccctcctcacctgcccggcacccaggatcccttgcgccgcgttcgggaccccacccccattgtggcctcttcgccagggcgcaggcgtggctcttggtcaggcggttacggccaggaggcgtcggagcctggcgtggtagggctgtgctgcgcggtccttcccattcaccctagtctggcgctcgccggcgtgggcgggccggaccttcgccgcttccaggaagggccacaacggccgtcggaccacggcgcggcgggtaaggtcgtcagcgtcttcctgtcagcggtcggcagagcctcggcgggcgggcggcgcgtggggcagccggtgtcgcactgggagggctgcgtgggcgcggagggcctgggcgctccccacccagctgctgtgggagcgcctccgagtccccgcgcggaaccctcaccaggcagatgctggcgcatccaccaggcgccggcgccgccacgccggtagccccgaccgcaggagctctcaacgcgaggttcttcttagttgctctccctcaggcaggccgcgttcccttctagtcctatatttctgaagttttttaaaattttccatttataaacgaataatgagctatttgaaaaaccttgccatcacttattgtataatatatacatatacactctcaacacaaatatatatggattattataagtgattttgtatgtagagatataacttttctaagaagttgatgaattacattagggacactaatggatattttacttgcgtttgtgggatagactacgctaggaaatatatgtacatatacagtcatgtgcctcataacagcggtagtcccataagattataatggagctgaaaaattcctgtcgcctagtgatgtcatagtcaaggcattatgtgtttgtggtgatgctattgtaaactgtgctgccagtcataaaagagtagcacatacaattatgtacagtacatagtacttgataataacagatgagtatgttacttgcttatgtatttactataccata

SEQ ID NO: 36032 - DNA, 934 bp, Homo sapiens
tgactgcagatgtcaggataaaagcatagaatcctttaaaaaaaaaaaaaaaaggaagtggaaaattaatattaacccaaggctcacatgaaacttacgccactatgaaacaatgcaatgttcatttttaaagtcttaatttcattattcagactaaatacacacaaatatgcaaataagcaatgtctgaggtataattttcaatatacataccattatctcttgtagaactttccaaatagtttaacatattgattctttttcagttcaaatggtcattatttgcttttaattaagggaaaacagacaagaagtgcaacctgaaaattcccacaatccaaactctcaggcacaaagtcaaatggctaattattaacagagctgggccaaacacatattttaaagtctaatgccattacctaaggggagggtattatgcacctaccaggggtcaggcaccgagccaggttggtagttacaaaattataaatatttatacttaaccaagttgccaataatggtttcaaaagattctagtaaaactctatcatccagaacagagatcttaacatgccacccgcagaaaagatgccacaacacaaatgcccgaggctaggcaggggactgcgagtacctggggggtagggacagcaggcggggacattcacgtgcaatgccaagttaaaaagcacccgccctgtgacgctccacagaactctcgttccgggctagtcctgcagccacacagaaaggctcactggaagatccaatttttttcttttggctaaagaaatagttttgctttcaaaggagctgagtgcctcaaagagctgtgatcctaaaaagtcatcaaatccatttggataaacggtcaaaagcaaaaaagaggtagctgttatttatatgagaattctaaaaccaaaccttttgtaaa

SEQ ID NO: 36033 - DNA, 2425 bp, Homo sapiens
actacagatctacacgtgtttacgtgcaaggtccccgggggcctgttcaccctggcactgcccaggcgccgcgcctcgcgctgcaggtgtccacgcgcggaccacggtatctaccgcgccctcgtgtgaacacccgaccgggccccgtaatcactctgggaaagcgccttcaacaaagccctccgaaagcaagtgctttactaagtgccccttgaggctactggcagtgcgaggctggctgtcattagaacatttttctgaaccctcaaaaaggtgaaaaagcaggaccgtgctttagcaggaacacgcacacccgcctaaatacccgatttttgagactgtccgggcgaaggaattcaacgcataggagcgagcagccatgcagtgtgcctggagaatcaccaaaccgcgacgaccacgaccctcaaagccagtgacaagcagcgcgaatctaagcccacctcggccgcagacccttccccgtcccgccaggccgccgcgccctgtcagcctcctactgcaggaccgcggggccgcctgctcatctgtcagacgggcgctcggaggggccgggagccaggctgcggtggggcaggacaaaggcgcccacgaaccctccctgccgccgccgctccacagccgcgccgcgccgccaacatggagggaaacgtccgcagtttaaaacccccagctccatttccgcagcgggcccggctcgggcgagctccagcctcgcccgccgccgccccgaccacccgactgggccagaaaaggcgaggaggggaggagacgaggaggcgaggagaggaggggaaggccgccgcgccaggccccgcgcccagggtccccggcccggccgctgcgccggcctcgggcttcctcccccagcggcccctcgaagaacgcgccgcggggagctgggagcagggcgggggtggaagcactcacctgcgccaggttccggcggtgacacggacggctcccggagaatagtcgcacagcaacccggcggcagatccacgcgcgcgacgctacccggccgcgctctcgcgccccgcagtcccgcaagccgggcgcgcgcctccccggccccgcctcgcggcgcttctcccctcccctcgcctcccctccccaccggcgaggccgcccggggctcccattggctcctcgaccttttgaatcatccccggcgctgtcgattggtcgcgcgccgtggcgcgtccgccccgccccaccctgcctgggggcggggaggccggtgagcgggggaaaccgagtctggcggggcggcccggagcgcgacgtttgccaccgccttatctcagccgcccaggcgccctcgcagcacacggagcccgcgcgctcccgccctttccctcccagcgctcgcagcagtgtttggggtgccaggtggcttggcgaacgagatttttttttaagctacaaagaaaactaatacattcttgaagtgatcaccaaagatccgagctcgaaagcgtttctcggtaaaacactatgagtgccctccttagcgtgttaaaatcccacagaagcccctggaccaagcagcggcatcgaaggcgagcaggggcgcttttgtgtccgcggccgctgaacctgcgtagaagcgaacccggaccgatgctgggaccggcggcgggagggagggggaagaatggccgagggctcctacgacttacgctgcgaggaggggctcggttgttacccgagatgctgtcgagatgcagtagaaaatccccaacaccgcggagcgtggaacaagaagttttatgcgttacacaccgaaacacaacttgacctgcaacctacaagcctggttttaattgaaccccaaaatgctgagtcatgtcattgttgactccgaatctgttacggatcctaagcttttttttttctgctagttttcattatcggttagttgatttccttcctttgaggtcgagagtttaaagcagtccattgaagttccctattttgcagtgtggttttaatcaaagtatttcttaacaccctaactaggtatatttaagtgaattgctattttggaagcattattaaattgtaataatgaatagaacttttcatctatagcctagcttcagctttcattttctcatagaactacaaaacacccaggtttacttcttaaaaaaaaaaaagtgaaaatacatcgagttttctcagtcattcacatgcagtgtgaatgagttcatcagagcctttcctgagaagttctgacatcaaattgtcattgccatcgaatttgcccttggtggagatctgtgcaacagaaatgcacatcgcactccaaagtcagaaaatcttttatttttgacaaacccccaagtctcaattgtcttaacccttgacataagataatattagtcctacctcatagagtttt

SEQ ID NO: 36034 - DNA, 2301 bp, Homo sapiens
tggacacataagacacataagcttttttttttttttttttaggggtcttgctgtgttactcaggctggagtgcagtggcaatcatagctcactgcagccttgaactcctgggctcaggggatgctcctgcctcagcctccggagtagctgggactgcatttttaaaaagtataatgctacatctaccaggaaaataactcaggtggaggatggcttttttccaatgagagtccatgattgaaagagttagaggaatcctaactagcagaactgagtaacagaaagcacatggactttggagtcagaaacacctgcctttgaatcctggcttctgcgcctgcacttgagatcttaggcaaggtacttacattttattttcagactgtttccttatctgtaaaatgagaaaactaataatacctgcctttcacagagctattgtggggcttaaatttaacaataagcaatcaataaatagttctgattcattgctttaaccattcattcattcagcaaatatgtgtcaaactctgacagtggaagaaatttaaaacaaattccaggactgcctgggatttttatgtctatcaaatgggattcaggttagtgagggagagtgaagaaatgaagtgcactgttcttgaggaattatttaaaaggcttttccaagaggatctacgtggctgtaggacatttagatgcctggaaaggccagtaagccagctgggtgttgctcagaacacggcctcccacagcaggagacaatttcccagttctctgaattagtactttggctggaaaatcagcacactatgcctgatccctggagcaatggactgagtatatagttatagctagatgagttctttgacatccctaaattggaaaaatgtctttcctagagtttggaaatagctcaaaaccaaaaccaccattttccctaaatctatttgtagtgcttgagccacacgttattgtaaaatacaagggaccagttggcaggaagtctcttagactacttgaacatgctctttgcccctccatgtacacaccctggcctcctctccgtcccagcttttaaatacagttagcagtaagaactccctgaattcacaccagggcctttaagacctcacccacaggtcagtaacaactaaggatggatctgaggctatgggaacaaagtgctcacctcagatggcgagggggtgggagatgggtgcatctacgttcagcaattggacttatggctcctgaggatcacattgccacccacgcccatgttgaaatcaacttgctttgtcaggccattggctcaggcatgtttcatgacaatttcattccctcttggtaagacctgggtcatttttgaatgtttgcaaacgttagaaactctgaataccatggattaataattgatgacgcccctgagctccctctactggctctgcctcagccagctacagcagggggtatttctgtttatatttctttcaagaaaagagtaatttataatccacaagcagggatgataaggcaaagacataaaaaatggaggatttttttaagtagttggaagttggtggacactcccgggcaggctttacacttccaaggcagaagtctgagttgcgtgtcctgctcttggcctgggcagatggtgcacagctcaggaacccttctagaatgtcattactgtgtgcagataaaactgaaagcaaaggggctggaaccctttccgtttgttctgcacctgaaggagttcagagagaataaaacaatatctgggccattttttttttctgtttcaagtctctaaacagaaagaacaacaacaacaaaaaaaaaaactgatttgtacgggaatcactccaggcatgacaggatcaggaggtactttatcctgaggttcctctgagccattaattgccatgctgaaggtgaagaaactgaaagaatggttgaatgacctgctccggttgacacagggaatgagtgccttctcctctgcagaaggaggaacaccctccaccatgatgctctccaaaacacctgcacagagcaccctgctggatgccagagccctgtgagggcttcctggtgcaggtgaggcccggcacagccagcagaaggacttatcctggctaacaaagacttgtgttacatgtcccccttcaaaactggtgccacatgtctgtgtgacctacctgctggcctctcactgctaactgaagacaggcactatttccccaccatagtggtctttttgtccttctcatgatttattggatgcataaaaca

SEQ ID NO: 36035 - DNA, 865 bp, Homo sapiens
cgacattgtcgtgcataaatgtagagctgatccgtatttcatgtcaaaggcctggactgtgtgaaattggctggtatttgttccagaagcacttgttcatgttgaagatggggcagttctgagtgggttagcaggctgacgagcttggctcagaagccgctcactattgtttgggctttgcttttgacttcacatcctgaaataaatggtcgttgcagaccaggcacgtgagcaggaagtgggcagggcttaaaacacagagaagtcataacctctgcggtttggttcatgttgtaatatgaaaaccaggaagcttatcttgcaggaggctgatgtgtaaaagttcagaatggagtggagccctccctcttggcaccctatgcgcggagtcaccctttgtctgccacaggaagcacccaggtcctggcagctagaaaactgtaacaacttggaaacatttcccaaaatgtcatcatggcatcaaaatgagacaatcaatttcttgcaaaattgtttgcaagaatacaatttgatcaaaagtagagttagacttttttttttttaagacagtttcgatcttgttacctaggctagagtgcaatggtgatctctgcttactgcaacctctgcctgccaggttcaagcgattctctgcctcagcctcctgaatagctgggactacaggtgtgcgccaccatgcccagctaatttttgtatttttagtagagacggggtttcaccatgttggccaggctggtctgaaactcctgacctcagatgacctgcctgcctcggcctcccaaagtgctggattgtaagcgtgagccactacgcccagccgagttagactttctctaagaacagc

SEQ ID NO: 36036 - DNA, 1373 bp, Homo sapiens
tgacatgtagcaaatctcacaacaaatgttaatgctcactaactattacatattatgcacaaaagaacacagcactctacaggaagagcagttactaaaacctgcactcttgaaaatgtgcctcacagtctaacatttggattaaacagaacacccatcagaagttggcaatgctccatcacacacagtcgtgtttatttgttataacaggtgccaggatcagtagctaaatttggtagcagttgatgctgcatcattagttgattcaacatatatttactgagaacctgtgctgggtatgagaacacagatgcaacaagacagagcacccctgccctccgggaatgtgtgtcctcgtgggagaaaacagagatcaaacaaaaagtgaacaactcctcacctctctccactagtgagtaataagcaaacaaggttgcatcacaaaaatatccacaaacgggagagaatgtgacaagaacacagctaaaacataaagatggtcattcctggaagagaatgtggctcaagtcagcttagcacagatacccttagcagccatcctgaggttggctgggcagggcactctcatagccacaaaagccttctcagtggaggctcactctggtcattcagatctgagctgaaatgtcatctcctaagagatcttccctcggcacctgatctgaagtagacctcctggtactctctggacattatcgttgttttctgcaattaacattggtatctgatgtttgcttgtttattactggccttttctccactagagtgaaaactctacagagagaggacttagcatctcttaggagctcaggatgcctgaatcatgagctccaggaatctgcatttaataaatgcccgcagagattcagaaaggcacttgcgttcaggctccactgccttcaaagaccagtctgtcaactgcctgacatttctccacttgtgattcacacactggtgactcagccacccattcgaccagggtgatagagaagtcagagaaacgccagaactgttgttcaacacaggctggctgctcctgtcacctctcccacgccacccaccccttatgtctagtctcagaaaaccagaaccagggtgacaattgcccccagagtccacagtgaatcagaagagctctttaaacaaaagaatcactcagaacgattgttaattttgagtgttgttctaaaacacaagaaaggggagacgtgtgtttccccattaaagctaatcaatccatttgtagatggatgatgacagggaaagggaggaggagttaaagtatgttaaaagggtcaggagcagtggctcacacctgtaatcccagcaatttgggaggctgagatgggaga

SEQ ID NO: 36037 - DNA, 2485 bp, Homo sapiens
atgaggcttggtggttgtccaatactaggaggatcacgagagttttatgggctcctctgtataatttcttaccattcaatttttttctacactaagaatgcattaatttttttttatacaaataaaatataaaacttagagaaaaaaattgatacctggagataacaggtgacttgctgccattcattgtatttgttctttcccaaggttttcttgttggttctttaaaaataaaaaacaaaagctattaaataaataaatgcttccagagttattataaaacaaataacaaaatactaaatctcattatacctgtttacatagtagtaatataaataaaaatttaaattctaaactttaattgaaatctgtaaggactctaatttgcacaatgccagaccttaaaatgagaagaaattataagctagtacagtaagtttccaaggaaaacttacattgttaagtctaaaatattatgattctataaccttaggatagtaaggagtttctctaacaaagaaaggacagtaagaataaagtaggataattttaaaattaggatagttcaattaattaaaatggaatagtattaccgacactgttttaaattattttttagtgccaatgataaaaacagtaagtataacttataatatgttcatgtatttcaacatttaatctaaatccaaatagtccctcttggggaaaaaaataggaacaactcaaaataaatatcagaatcctgaaattctattgtacttccttgattcttaaacaattaattcttgggccttagccgattattccagttaaatataaacaagctcgctctaagctcttattacaaaagacactatgtagtcagtgactcactagttggctgtctattgtgcttgaattgtttttctaatctgggctgactcactgatgctgtcactggcctcactacatgactgggtaaaatcagaagtggaatcttctcatggaggaaagaatttgggccacaggagaatgaagtctattcatgaattgtgatctcattgtatagttttaactaaaactgctctgagttccaatgcagctcctcagctggcttttgcacattctcaggtagcttaccgtctcttcaaagtacacttaacgcaaaaataaactcacactcttccatgaagccctgcttttggttctggatttcttgttgcatgaaggcattagatgtgaaaccttaaagtcattattgatcttgctttactcctcatcaactaaattccttcttttttatattccttcttttgtattctaacagctaacacagcctctcaatgaccgccacagtggtgtcaagttccacacttgaccaggaagatcaaataatcggatggggtttgggacaggccgaatcagaaacatatccaagtgacaccagcccaagcaggtgaaaaaagggaagtcctgaatgaaactgagggacaccgggacagggaagggaacggtcatcggacactgtcactaaagaggcggcgggtggaaggatgagggagtaattccaaagtggttaagatgtagcaagtgctaccttttaacagctggctgaggtcctttctcaatcagccaaaccagaactatcttttagtcttaaaagggctcatctggttcagctggccctgtggaagctgagaagcaagggcctcttctctctaaggagctcgggtgtgtttcaggaggggcaaggctgggttcccttcagaggatctttactggcatgcgtatagagcttcctaattggtctgcctatcttaatcctccctagtttcaatgggaaaatcacaagtgccattttaatgtgcctcaaacagtttcagtggattaaatgtccactgaactcagtacttgcaggataaagtctaaactcttgataattttataaaaggctctcaacatttttgtttctaactcatattttcaaccttttccctacaatattcctcaaaaagaattccccgttctagtctatttcctatttcctaatctcttcttgctcatctccaactccataccttgctcatgctatacttacatcctgaaatatcacaccttcccctcactttcagccaaactaaatactcttcaaggaatactaagatgtcacttttccctacaaagttgactcaggtgactcgtatgtgtcatttcctccctctgtgacacactacttagtattcaacaagtggttgtaaaaaggttaacttcacacctgtgtgtctcatcttcccagctgtaccatgagtttttttgggcttaggacctgtacctttcacttcaggtgcctgacacaatgtcagtttaaaaacggaatgaaacaagtgagaaaacaggccctgccctttttgattttatatatatgacacacacacaaaacctgtgccttagtttttcatattttatataagggattatatattagataaggaatttttaacttgga

SEQ ID NO: 36038 - DNA, 2961 bp, Homo sapiens
atggacacagaacaggtttaggaaaggctggaaaaaaaatctccaatgaatgacacaccacatcacggtttattctcctacacaatttgagaaacaataaagaaaaatatcataccatatgtttcatcgtatcaattaaaaaaatattttacgacagtacattcaattcttcggggccgcaaaaataatttagctcctgttttattgagtacagagcaaagggaaaaagcagctgctgcaatgcaacacaggctgctacagagaaaggggagaaaaggcttttccaaacagatcccttccccgcccccgcttacacacccctaccaacttacttatcccagtcttttactgcccccaccacgtgaacctaatcaattctttcccttcccccaccatcgtgaaatttcacctttcacagctccttcacctacccctaccagaggcactttattacccgcagagatttcagacctttcaaacttttcttccttttttaattaaacacgagagttcggaggcaaaagtgcatgaaatttttacatatatacgaaaaaatacctgtttcccagcaacacgcacgcttcgattctcgaacccctccccatctcccgggtttcgcttgcaaaggcttgggggagggagccaggcgcaaattaaatttaggaagggaaatcctgggtgaaagaagagcatttgaggaaaaatgagagaacgatgaagcgagacccccaaaccacacgggttggggaggtttccaagaaagaaagagaaattggaagggacaaaaggcggaggggggaggaacagaccggagaccaggggagacgcgccgggccgggagagggaaggcggggtccgaggagaacgggggtcgcggctcccgcggcacaatggcccgcccggcccccgccccgcgcgcccctcacctcatggtgccggcggcgcagaggcttccccaccagccgggagacgcagaaggcgccgagccgaggggggggtctctcctccaggggtggggagcagctcggagacgggagacaagtgtccggctcctccttcggcggccagggggctacaccatctcctcgcacaaagccgaggcgccggccgggagtgtgggagaagagggcgagagaaaggctggggagggggcggagaggccgaggcgcggagctggtccccaggcggccgccgcctcccacctcctcgtggtcctgctcctcctcccggagcttcctcggccgccctctgaggggtgcccgccggggccgcgcgcccggccgccgctccacaggcccgcgctcgccgcgccgccgccgaggccgtgtgcaaccggcagctgctgcagccgcgggaggagagtcgggatcgccgcgaggaacccgggaggaggcggggcgcgcggcggaggaacacgcaggcgccgccctcctcccctccttcccccgggggcgagggggcggtgcggggggaggggaggaaaggggaggcggggggccgggcgcactcccccgcgccggcggccgggcccccgccggactgcggagagcgaggctgggagagagcgagcgcgacggcggcggcggcggagagaggctctttgttgcctccctaccccgccccctgcacccctctgggattcgggcgggccaccacccccccctcccgcccaacacctccggccagttgtcggccggggttcctcgcccgtggttgtccttgaccgtcggccccctccccgtcgcctcccgctccccagaggcttggggagctccgaggcctcccccacggccacggtgcggagaccgaggcgccgagacctcctgggcgccagacccgtaggcaccggcgtggggagcttggacgcgtgactgggcacagggccgggccaggagactccgggtcggctcgcggccgggtgccctcgcgcggggcgagtgctcagcccgccctgttgcggtctcaggacggggatgagggaatcggggggcatcccggtcagcccaactgcccgccctcgccgcggctgcgcccagcgattcctgcggagttgaggaggggcatataaatggaaaatatggtcatcattgttcccttcgctccttttcttcccgaggaatcccagcgtgctgcgccgatggaacgagttgatgtgcacactaggtatagggatgacttcatccccaaacgaacgcagccgactctcggggaaacgcagtcgccgggagacgcgcgcggaacagtgtgttgccgcaagagtggaagaagagaaacgcagccagtggagccgctttccagcgtcattagcaaagagggaatcccgggcagggggcggggagagagaggaactaatgataattttaaatttttcgtcattcccaatggtcttgaagtcacctcccttaaaaagtagatataaaatactggcgaggcaatttcatttcaagtcaagtcggggaggagggcatccaggaagccagaattgatcgttgttgaaggttttgttttcggttttttttaaatctaaaaacaaatccaataataaaatttttaactgtacgaattacggcccccttttagtccggaagacagggatgtactttctgtataaaaggtgaggaggatagaaaagggttgttgctacagggatcctattgctgaaggatctcatccaaaatggaggacctaccatgactccaggaatccattcaaaagttttggtgttttgttttaagatgcaggtaccattcaaaagatagttaggaaggttgggataatgtacacttccaaatgaaaagacaggttatagtgatccgtggtcaatgcctgatttgtctataattgaactgtgtagcccatttttaaccataaaaaaagcttcctggtttcagccgggtgcggtggctcacgcctgtcatctcagcacttcgggaggctgaggcaggcgaatcatctgaggtc

SEQ ID NO: 36039 - DNA, 1289 bp, Homo sapiens
attttctttttggaaccggcagccttagaccaacagccctatagaagcagtgacccggagctatggcagaggatcaaggtggcctcaggtagtagaaagcatgatgcctctgccttaaacatggtgtacttgaagaacgctaatttccacccacatatctaattacagcttaccattacagagggcattttattcaaggatctccaaccactggagagaaaacaaacttgccagtcaaatgttctagttgccatattgcaagtagagacagggaaacatagagctcaagtaactggatcaattagtgcaacaggcatgattaaaaatcatagctaccaactatgagggtcattgtcttacgtaagtttctccctgtagtttgaaacacatacctcaagtatttgaacatgtgctgtggagagttttttcttggaaaaattaagacatattgaaccatcttggaaaagtattaataaaacatattcgaccacagagaagtcacaccaatttgccttagtccattcatagcaatacagtaaatccgacagagcttatgtttcagggaaaactcttacaaagggccaaaaggggtggagagagtgctgtaatgactcaagctatctcctgccagacacaagaaacaaggataaaaattccttacagatgactccataacctacttctcatttgtgaaagttaatccatcctgcgctaaataagtgatatatcacatcatctttattctaacagcaaatgttccaatggtatgggcaccaaattaagcaatccaagtggaaaatgctgttcttattttctatgtttattaaaaatgtaccagccaagaattttggctgcctacaaccatttccatccttttggatggcagcctgccagctcacaagttggtcatagcattcattgccttttggatttagatattgcaatgggtggcctgacccccaaaggtcattctgtggaagggcaatttgttggctgtgacaaaatgttattgcttcttgttcatatttggtttaacattcaaagagtgcaaagcgatacttgaggtaggaagtcacagactaattctggtcacaaaggaaatgctgtggaatgtgttaccatatagaataaaagaattttagagatggaaggaatcttcggtccagcccactcatttttcagaaaagaaatgtgagacccagagaggttaagtaacttgcccacaacttaaactcaggatttccaaatcttggtccattgttccttcgactatatcaaactaccttctt

SEQ ID NO: 36040 - DNA, 1096 bp, Homo sapiens
ggctcctcagcttgcagacggcctattgtgggacttcaccttgtgatcctgtgagtcaattctcctaataaactccccattcatacgttcatctatcctattagttctgtccctttagagaaccctgactaatacaaggctctcattatctcctgtctaaaatgtaaaattctaattcatctccagcataaaccaaggtctgattgtgtcctagccctacttataagccttccctggagccctattttctcagaataaagtccacacttcttagaatgacattcaaggcttttaccaaattagccacaaaagactaaaagaccaaaagaccaatttcctttaagtggggtaatctgggcagggtaatttttcttcctcaccttttctgcttgaccccacatcctccacacatgcacattggactgttgactcttccctaattttctcacacatgctcatggggttgtggctttgctcatgctgtttatcctacctggttgccctttgatcttttctacatgacggcatgttcattctttaaggctcagctcataggtctgctcttctgtgaagccgtctcaacctcatgaagtagaatcaacaactatttgtgctctttggtagctcttagtctgtaatgctcacaagctcctcaccacagactacttactgtattagctggttgaggggctcctgtctctctttgctggagcttaactccttaagaacaacggtggtatcttactctttttacatcctgagggcctcacattaactcctgcttagtaacatggttgactgaatgtgtggaagaataactgaggaaataaatgaaaagaaatctgccttggccgggcatggtggctcacgcctgtaatcacaacactttgggaggctgaggtgggtgggtcacctgaggtcagtagttcgagaccagcctggccaacatggtaaaaccccgtctctactaaaaatacaaaattagctgggtgtggtggcgcaagcttgtgatcctagctacctggtatgttgaggcaggagaatcgcttgaacccaggaggcggaggttgcagcgagctgagatttcgccactgca

SEQ ID NO: 36041 - DNA, 1231 bp, Homo sapiens
ggcgccactgcactctaacctgggctacagagagagattttatctcaaaaaataaataaaataaaaaagaagcccagggacaaatgagcccacctccactgtagacactgggagccacattctcaaaatgagtaactgcagggaagagacagaattctcacaagagggcatatcctccgcccttcatacatttctcctgtaacacccttctggttgaaaagaaataagaaagctgtgcttgacttttgctctagtgctttttaagatcaagcaggaatcttacattctttcattgcctttcacatttcttttccttcttccgtgtcctctttctttttaaattcagatcatttaacagacaagggtcatagctaaaaataaatcttcattgacctgagctacctatgatgtcatttactgtattcataggtctccagagtcaacactccaggcatgtagacacacacaggagaataaaacctcagttcccaggcagcttccagaagctgtggcattgctgtggcctgaggcctggactttcccaggggataggtatccagatcgtttgtgcccttccatatcacctttcattcagaggccttacctggattggtagccaagcattgatactcatgcctccccaaagaggtaagttttagtaggaaactgaaagaaaccaaggcccaacaaaatgaggcaactagacggagtgactggggaagtttccagccaagtcagatataaaatttgtactgtgaaaaactgttatctgtattttggtatttaccaaaaaacagtgagccatgatcactccatgcagtgggttaaacttgtgggagaagtaaattctgtggtgtcagctcagaacagaacatattgggaatgcataatagaaaagcagtactctcactcagcttcataactccagcaaatttgtggattggggttaaccacgtctggaattccagaactcaagttacccaagtgtggcaggccaggggaatttctgcgggctggatgggaaatcttcaaagtcagcatttattttcatctgcactcaatattttggcccaatatgtaagtaacttgatgtccattcttgtgttgataaggagcctaaaagcctggaacagagaaaggaaaagttggtctccacttggatctcaatgtggtcatcagtcatggaaaatgctgactatgaccattcccaatcagctcctcatgcctggca

SEQ ID NO: 36042 - DNA, 587 bp, Homo sapiens
aaactgaacaagctggaacccaccagcacccctgcacctgccagtcagagcatcaaaccacaatgaccttcagagagtagtggctgttgctttacttccaccttcctaatcttggacaaatttctcttttgtccagctctcacccagaggcataccaagaaaggaacttgagaaaaccattccagttaaagcaagttgacccggcacagtccaaaatccgtgctatgcagcacagtccaaaatccgtgctatgcagcacagtccaaaatccgtgctacccagcacagtccaaaatccgtgcaggtatgtactagttgctcagaacacaagcagtcagtttctagcattgtgagaaaagccctgatctaaagtcaggatatctaggacttctggtcatagttctacctctaaaaatgtgtcctgggctaaattgttaacctctctgcccctcaggtccttagggaaagaaaatgacgactcatcacctcttagatggtgcatacagaagtgaaggagttaaaatgttagcagtgaaactgtcaaacagtacacagggggaaaaaaaagaaacttccatccaaagactc

SEQ ID NO: 36043 - DNA, 759 bp, Homo sapiens
gtaactataatcttggtgtgctatgaaatttggagcaagtcattaaaccattttctgtcaacatttacttatatacagaatgggattaataatattctaacaatagtaattgaccattagctaagtcctttaaagaaatgaagtctccagcatttgttgcatcaaggccctgcagagctgtatgagcttcagccccgctgtgttctactagactccagggcttgcctgtgttatctccaacagataagatcatgccagaacacatgaagtcagcactcaccccatttaaccttaagtcaacactacagggtttgcttccttttaccaagtaccagcaaacatagaaaaacaatcagtttcctggttccagtctgatctgctgcaaagaacaaagaagggaccaccttactttatccactggataaagggaacagggagccaaaaaatgatgtaggagatggtgccaggccggggttgaggaagcaggacagaacccaggaatttgctttctccttggacctactgctttctacagagggtcaaagagttcggccagaaacctcctccaagaccaaggttatgtgtgtgcctccttaattagaaaaacaggccagacacagcagctcacacctataagtccagtactttgggaggtcaaggtaggaggatcacttgaggccagaaattcaagacctgcttgggcaacatagtgagaccttataattacaaaaaaaaaaaaaaagccagtctgttagttca

SEQ ID NO: 36044 - DNA, 2746 bp, Homo sapiens
caaagtgcttggattacaggcatgagccaccacgcctggccctggaggatctcttaagcccaggagtttgaggctgcagtgagctatgatcatgccactgcacttcagcctgagcaacagagcaagaccccatctaaaaaaaaaaaaagtagggggctgggtgcagtggctcacacctatagttccagcactttaggaggccaaggtgggcagttcacttgaggccaggagttcaagaccagccttgccaacatggtaaaaccccatctctactaaaattacaaaaatcagccgggcattgtggcacacacctgtaatcctagccactccggaagctgaggcaaaagaatcgcttgaacctggaaggtgaaggttgcagaagccaagattgcaccactgcactccagcatggttgacagagcaagactgtctgagaaaaaaaaagaaagaaagaaaagaaaagaaaaaaagtagtggttctttggttaagctgggatggggacctggagtcttgacctcctcgcttctggcccctgggaagcaaatctcacataaattccagaatgctgccatcatcccaatcagaatttctcaatctccaagggaaattttatcatctggcacttcaatggctgttttaaaatgttacaaaagatttggcaaggtcccaatgggaggggcaggcacctacatctgggcttggaagccaacgatgtgatatgagggagtctaagtggccactgccagctccgctctggggactgccagcctccaatcctgcttgctgtctacatcacataatgtgcctggttgagaaaaggccttaggaagagccagagagtgccagagaatggaaagagtatgacacatgcctcgctgaggtcggacagcgcgtcagccttactttcccagctgactaaggacgcctcccaccaagctgcttgcctgctgaagcctgtcttgaaaactgacagtagatggctgtgactacccagagttttttccccagcagttaatgaacacacagcagacgcatgcatgcaataccttggaatcatcccagaggctccaggtcaggtctccttgtctgaacgcccctacctagctgggccacacaagcagtttccatgctgagtccactaagtaatccaaaacaattgttccttgggatttttctgaaaaagagatagaaagtgctctgcctcggtgagcagagggagctgcttcagtattggaaacaaagataactgaaatgcagtctttagaatctgataaaccctcttcccaggacaagaaaggcatgaagtcaggcctgagctttggggctcatttcaggtacatgctggctttagcaacagaggaaaagccattatccctgtcttcttaatttccctcagcaatcagccctagcaggttcaccatgttctctgtgcagtttgagacaaactcactaaacgtcctgttctctgaaaaatgatccatccaagagggcacaggccaagagtgtttctccttttggtatcagggacaggttgtaatgctgccgtgatcaaaggcatgagttcctcaggtgagggggcagcccggctacagccctggtggggagggctgcacttagcgtaggagctggctatttcactgcccccaccccatcttcattgcttctaggcatccagagctctatggtgtaacgtatatcctggaatagttccaacatctctgttccaggacttgctggacacagaaccacttgtgatacggttagaaaagtcacttttcatctcctgtcctaagctgctaagaaaaacgaatcatgtagcctagatttacatgtttgcctttttctggtgatcatgagtgactgatctgagcaataagtatatgactgagaggccctcgccaggcatttgtggagcggattgccgaagcttggttagttaagcaatatgccagaaatttggagatcatgaactctgacttttgccaccttgccacatgctcttcagccagttatttctcctatgttctgcctttataaaatggggataagctatctctgaggttgttttaagaagagacactaatgaaaatgattgtcaagtgcctctctaaagagaaagtacagtaggcataagtgctttatgtgatgaaattccatctttcttcctccctttgcaacctgaaccatggaatcaataatgtttttccaagtgcagtgtccccaggacaaaatatgaatcagtttcctgagctcggcagccctcggatggggagtagcccctgccctctggggcctggtgtccagggtgtggctggctttactgctgtaagtgcccatcttatcctgggattccagccaagatgccagtgttgcaaatttctctgatttcagaggaagatttgtttaggggttgagtcttcacagtggcttttgccatctatctccattttattttctcttttatcgagtacctattgtaccccaggcactgtgctaaatgcattcacctacattatcttgtttaatcctctgagcagctcggcgaggggggtgtcattaccattcttattttacctcacgaaataggcacttggagggagtgaaacgagttagcaaggtaacacagaaaacaacgggcaaggccaggattccaacccaagctcatcattactctcccatgcttcctttcccacagttgccctacattcagacacttcccatttaagagaaaatcaaactgcagtt

SEQ ID NO: 36045 - DNA, 1335 bp, Homo sapiens
atggagaaagcaggagaaatttttaaaagaaagaaaaaaaaggccaggtgcagtggctcacacctgtaatctcggcactttgggatgccaaagtgggtggattgcttgaggtcaggagtttgagaccagcctggccaacatggcgaaacccgtctctactaaaatacaaaaattagccaggcatggtggcaggcgcctgtaatcccagctactccagaagctgaggcaggagaatcgcttgaacctaggaggcggaggttgcagtgagccctgggatgaagccactgcactccagcctgggtaacagagcaagactctatctcaaaaaaaaaaaaaaaaaagaataaaaaagaacagataatttcaaaaggacattaagctctattcagagacacaatctccaatcaacaaaacgaaaggcaagcgttgccccacagggactggctgaaaggcagcctggcggtgagagcgttctggagctggcttctcacactggggagggcgccctcccagcaaccagccccacctgacgggatcaggcaggaccccaccccaggctacggggctttgggcttccctgctgaggagtttcctcccgacacagcttacaaaggctccctcacaggggtaacagcaggaccgtgcttggctgacagaatgctttggcagaaaactgctgtctgagtcagccctgagaaataattaaccctcatgatgtttcctggaggactgaagagggttgggtgtggaggatacagggagggcctgaagagctgggcttctgaaggggagggagcgcctgggccttcgggcctgggcctccagcagcctcacctgaggtgccaggaccccccagctagctcgcacctgctctctgggcctcaagattgttctcggggagggcagagagaagactcttacttttcttctttttttttttttttttttttgagacagggtctggctgtcacctaagctggagcatagtggtgcaatcatagctcactgcagcctcagcctcctgggttcaagtgatcctcccacctcagcctcccaagtagctgggactacacacacacaccaccatgtccagctaatttttgtactttttgtagagacagggtcttgccatattgcccaggctggtctcaaactcttgggctcaagtgatccgcctgcctcagcctctgaaagtgctgggattataggtgtgagccaccatgcctagccttttattttttatttatttttttgagacagtgtctcttatgttgcccaggctggagtgcagtagcatgaacatggctcaccacagcctcaatctcccaggctcaa

SEQ ID NO: 36046 - DNA, 1042 bp, Homo sapiens
tcagcctcccgagtagctgggagtacaggcacctgccaccgcgcctggcttttttttttttttttttttttttttttttttgtatttttagtagagacagggtttcaccactttagccaggatggtctcaatctcctgacctcgtgatcccaaagtgctgggattacaggcgtgagccaacgcgcccggcttatctgcttcttatctcgggtaagagcagagcctggactctggagcccggagtgcagatactggctctggcttatcaactgtgcaactttgggaagttacttaacctctctgtttcgtcatttgtaccttagaatgttgctgtgagcgttaaactacagtgcccagcacacagtaacagtttaatagatgttagctgtttttattgctactcctaagtgtgttctacacctggtcaccaagcaaaggacagagcatggccagtgcatggagaatcagatttcaagggcagcccataacatgctcacaaaacacagggatattgtttgtttatctcttctaagatctcaaggcacttaaaagtctcaacttatcagttttcacaggactttcctgacataggttggaatccattatagtcaccctagggaggggttaatgacctgctcaaggttacttgccagggtcaaccacaggctaggaatagaaattggctctgcagtcacccctttgtcttagtaacttcctccctatgtggttttggcaaagacaaaacacccaggagtgatgcagcaactggaatgaaggtcaaagaacagcatctgggtttagcacggccttgatgaggccttttttcccttcatcctcccacaagcaggcttgtatatccagcagcctcctgtccctctttaagcacctcaaaatagtattccttgacctcctttcatccaggagatgccaaggagggcaacgcagatgcatccgagatgccaaagaaaggctttcacacacaaagtgactccctgcccttggatgtgtttgcatcctcacatccttctcatccctacgttcc

SEQ ID NO: 36047 - DNA, 1681 bp, Homo sapiens
atccttgcagaagtgataatatggcttcttcctcatctcctaaacaccagtcatctgacatacactgcagatctaaaatgggcctacgtgttctgcccttccttgcctacctgttgagcttgcaccgcttctgtgagtctccccccacccacaagagatccttcttccttcgcgctccactaacccgacataaatgtttatcatataaagttttccgttgcactcttgtgtttatgtctcctggcttcttcaccaagctgtgtgacagctgggccctgtcgcctccttcctcgtatatgcagcgactatcgcagagccgcttaatctttgttgaaggcagctgcggttcagccctgagggccacgggacggacgccactcattcagccctaccgggggcgctgtggcagccggcattggttgccgtgccctccgcttgtctcgctcagctctcgagccacacgccctgggctccgcccactccctgacaacatccctcctgcccattgggcgagcatggacggggctgtccaatggagcgaggcgttggtgcgaggaggcgccgccatcttggggctgctgggactcgcgtcggttggcgactcccggacgtaggtagtttgttgggccgggttctgaggccttgcttctctttacttttccactctaggccacgatgccgcagtaccagacctgggaggagttcagccgcgctgccgagaagctttacctcgctgaccctatgaaggtaaatcgctggcggggccgctgctttgggccccagcccaggatgtcttcccgccatccactcggcccctggagcttccccagcgctcccaggaggtgctgggaatgaacacaaatggaccctgccaagttaatgttctgctctctcgtccccttcttccctgatctagcggcccagtgaggccctgaagctggcaacagccaggttcatctcagccctaaacatttctgcaatcgatcttcccgccccagtccctcagcttcctttatggcttcggttgttttacgagtccctgaagccagggctcctccccctgcagcttcctgtcctttgtcttggttcacttttcctgtaccgcctaggcggtaagggtacctcatgtatataaaactgatgatgttttttctactaccgctcagacattcttgaaagattccaatttggaagcatctgtaccccccagaatattggttcttagtattttgggagtcacaggctttgggaccataagaataatatttgcacctttcctcagaaaaatggtataagtaaatgtataagtaaatgtttgcaaacaattttaagggattcatggacctctgaaatacattcttagcccccacaaaaattataatggaggtggatgtcagaggttagctcattattaaaaagcaaaggagtccaagtgatgggagtttagcattcgggtcttacttttcgtctcttgaggttttggttattttattgtcatgtctaagaattatttgaagcatcttcgtgttaattaaaagttctgcttctttttagaactcagcatattgaagggattttatactgaaaacctcagacctggttatgtatgatgcttcttttgttttgtgtttgttgtaactcagttatctcttttatgctgcattcatttcccactctcgtg

SEQ ID NO: 36048 - DNA, 2159 bp, Homo sapiens
agtttggatttttgtttttagattcaactgacgaagttacgggatcaaactgctgtaggagctgccaaacgcttctctccatttctggccgcggggccgcggaccgccctttaagtagcccgttttatccctggcagaggtggagccttaggcaggcctagagactttcccgggtcctccaggccggggaacgccccgctcggaggccgggcttgggcggagactgcgccggggctgctgaaaactagccgaggagagccagggagccggagagatcgcgcgcctgccgccgccggagcctgcgagccgagaccgtaagcgcccggggccggccgggcccgcactccccggacgcagacgcggttcgggctccgcgcgggctcggccgccggggtgggcggcgggccggggcgccgaggggtcggggctgcggtcggcccgcaggggtgcagagggacttgtagttggtccgcccccagctcctgccccggccaggagactgcgcgtgccgcctactgggggaaggagcctgcaggcgaccgcggacttctcgcagggaattccgcgtcccagactgtgggcggacgccgcagggagggaggctcgcgaccccgagagcgcaccgcgtcccctggcctgggcgagctctgcttccagggccgtggctcgctcggcggtgaaatgcacttaatttgtcacccaagtcggaacactgattttcatgcgcgtccgtgtgaagagaccaccaaacaggctttgtgtgagcaacatggctgtttatttcacctgggtgcaggcgggctgagtccgaaaagagtcagccaagggagataggggtggggccgttttataggatttgggtaggtaaaggaaaattacagtcaaaggggggttctctggcgggcagagtggggggggtcacaaggtgctcagtaggggagcttttgagccaggatgagccaggagaaggaatttcacaagacaatgtcatcagttaaggcaggaacaggtcattttcacttttgtggtggaatgacatcagttaaggcaggaaccggccatctggatgtgtaggtgcaggccacaggggatatgatggcttagcttcggctcagaggcctgacactgatcacaccttttagttgaaatgcgctttcatctccatctgctgccgcagccgccgcccggcaccccctcgctctggtctcgggattgaaggccagccctctcctcttgtagaacaggaaacttgcccgggagttcaccttgtagttgaagccagggaatgtggtcaacctgagcaaaagcgccgcggagaccgagtggccgcctgcctccctccctggcagatgtcggttttctctgagcttctggctccttccttgccctggcggctcccgagatcttggaggtggggtgcctagcaatgttgtaatcctaattttgacttttttttcttaaagttgaatgccccctccatagcccacctcccattgtttaaacttcaggttccgcaaagcctggatccgcccctacaggcaacactcgttgtcctggaagttctgtgagggctcagcttgtggctggaggtgggaggtgagggggacccatgcacttggcaggcccgcttccaggacagccctttgctgggattgatgagctgttggtggaaaattgttgaggaccttggggttggtggctgtttcggtaccactgtgcagcctcctctgcatccagcataatttaaaataaacattttcaggaagccacacttctccagaaagtaacattgttttctggtgtaacggttgcctccttcagggagctaggtttgggggataatagggggcctttcactggccccacttggtctgacttagcagcaaaaactctgcgagtgctctccaagcagtttttctttcccaaatttccacacctaggaggcgctgaggaggcatgggcggtacttaggaactgctcactgtggaactgaggcacagcggggagcatgccctcgtgggatttgcagttctaggggcagagggataataaacaaaatacatttgtaaactataaagtatgttagaagatgatgtgtaatatggagataaataaaactttaaagaggggagaggagtgccaggtggaaagggaaggcc

SEQ ID NO: 36049 - DNA, 756 bp, Homo sapiens
gtggttcttgacccagacctagtggcttaggagcagagtctccaaggggctgtgggataaggtggggattgcaggagggagaaggcaccccagcagttcccccgttaggggaccaaagcgttgccaaggatccagccacacccctctcctgaggagggaggagctggtgggcgctccaggaagagcttcctctcaacaaggagaaaactgcgcaatccaatcctccgttatataactgagcacacgattgtgcaaaccaagctcacactgagcagcctcccctattgtcaaggtttatttactttcccaggggaagtcatagttcatcctttctcagcagaaagcagccatttgactgccacagcctgacctacggcattccaggagatgggttcagagacctggtgtggagtcctcatgcccacccgccctgctgtctgtgtctttccgtctgttgcctggtgggtgggtgtggtttagtgcatggtccagcccccgcacagccacacccattaggctctccaaggcctaactgagcaagcttgcagaagaggggaaagtgttcttttctctgaggagttaaagagacttctggaaaattctccagctactccacaaactaggatcacaggccttgttcttaggtcgggagcaggagtttttgctgcctttagcatttgggaagtttgatgaatagagactgaatttgaatgtctttttggtacttaagagctggattaactacttcacatatct

SEQ ID NO: 36050 - DNA, 2740 bp, Homo sapiens
ttaaaagattaaaaaaagagaatgtcaaggactgaaattgcatagagggcaatgctttttctttataggtggtgaactgggttctgcttgagttttttctctggtaatttagaaccaatggaagcaactcaacagctctaattttaattggcagaatgtgagatggaatgggacctcaaatgaaactccaggccaagagctcatgagccctgcagcatgtggggcatctctcggtcttcttgagttctgtaacttaaagtttgtgtggcctttaaagagtgtggaagtagccgtcccctctccgaaggtgcacaggatttggccagcccacccgcgtggccttccccttcccctctccagaccctccacagcagatggggccacggaggcctggagaagtggagtcactgacctgaggctacatggctggcaggcagcagggccaggcagcaaagcaggcagtgagggcctaactgcccgcgggctggctcggggctccctcaaccacattggcatcccagtgccaatcccaaattgttttctttctatctctccagacatgtagatagcatggaggtggagggaattccctcccacacagagggcgatatgccccagaacagcactcctgcccccaagaaggctgtctcctgacactttttactgctcttttactctcccccagctttttttttcctgcttgtaaactgcatttttcctttcccttggtttctggctctaagctgttttcccagggcttggctccggcgcttgcacagagataaacacggccattggcctggtgcacaatcccagcttgcctgcatccggcctcttccatcctgagtctccaggggtccctggggttcagggacaatggctgagggagaagctgggagttccccccagggtttgcctccgtcactcttgggccagccaagggagtggggctgggagcttcaggatggcttttgggaagcccctgggagccccaaggcttgggtagctgctgacagggagttcacagcaggaacgctcccaggctcccatcctgcgtccgcttggcaggcaggccaggaatgggagggaagccatccgtttttccctttccactggatgttcccttcgccttccccagggaggagtgatgaggctggggtgctggggagggcagtatgggggcaggcttgggaccaggcctgcagaagcagcagaccctccaagcccacctacctctctggcctggcatctgaggggcaggtcatgccatagtttttcccttaccctctctgcccccacactttcctccccaaagtggcagacttcccccaggagaagcactggcttttcacgctgctgtgagtctcagtcactattagagaaacacagtcagagccaggcctgcccaactgtcgcagggctgggtccacctcatggcctttgttctggaaaaatacttgggcattctgccctgcaatgcacttagccaaggccgggcacatggcaagtgctgagtcatggccggctagcactttactgcgattttaggagcactttcttgtggtgaggttctgactgcttgcttgggttgggggaggggagtctttgggcaggcggtagacctgccctttactttgtgtggccggatctgagtctgaccccatctttttagacccaaaaccctgatatttgtagtgcgcctaggatactggttctccagtcttctttggggtcagggggcgttatagtgcctcatgccacctactcagccctcttcctgcatcttatggtctgtctctaccaactaggctaagtaggttatatttattattcctcaaggggaattcagctcttcttgttcaaaagttctgattaattttctatgctctcattcaaagaatttttaaattcattcattcattcaacaaataattaagcttctactagaatgccaggcactgagagtccagatgggagccaaagcagacatggtcagtggcctacaggagcttccgtccagctgtcagtcacataatcaccctgacaaatgtgagctcgacgaaggctaggactgagagatctgccttgctgggataggtcaggagaggctacccagaggagggacagtcagtctgaaatctgaaaggtggatagaagttagggaggtgggaaggggagggaatagcttttcgacagagggattcgccttcataaagccccacagtaagacagcatggtgagcacaaaactgaaagatcggggggcagcgtgagatcccagccctaaaactctcacttagctttcaagtaaactgtttctccataatattgataccagtagcactctgaggggctaggggagtggtgagatcacacaggccttgaaggccacactaacccaaggacaatgggaagctctttaagggtttcgcaggggatgggatatacatgatcagatttgcatttccaaaagatcactctggcctggctcatgcctgtaatccagctatttgggaggctaaagcaggaggatcacttgagcccaggagtttgagaccagcctgggcaatatagtgagaacctgtctccattaaaaaaaaaaaaaaaaaaaaggtttgtatggtggctcacgcctgtaatcccagcactttgggaggcggaggcgggcggatcacgaggtcaggagattgagaccatcctggccaatatggtgaaaccccatctctgctaaaaatacaaaa

SEQ ID NO: 36051 - DNA, 815 bp, Homo sapiens
cactcggaaatgtggaatcatcaactcttatgcgaaaatagcctatgagactcttgtgttttttcattcatgccatgcgcttcctcacttccatcccattccattccacatgctcttctttctgcctggattattcccattccaccattatttttctcctggtaaactcctattcatacttaaaaaccctgctcaatgaccccttctctgtgaaaactttgtggcaaaacctaaccacttctgcttgtgcacacttctcttccatctgtgtgcatatagtatgtgtctataactggaagggtgtttatctgttatccgtttgtctgccctgctaaagtgtgagctcctacagttacagggttgtgtgttagtcctggtgcctgcacagtacccagccagtagttacactcagtgttgctgaaccaacctctggtccaaaaacatgtttatacttgcttttccaaggcgccaatccaaatctcttatttactttaaaaaacaaataacttcttggcactttaaaaaccacattcaaataacagaaaaagagttcatttgaactttaagtatcaatcttaaaatgaattgtatgttttaaaacttgacttagtgacatcacttaagagaatttttaaaaagcaaacttttatttttaccccagtgtaacaaatattaagttccattaaattattaaactgatctaccttttcttttttttttgagatggagtcttgctctgttgcccaggctggagtctagtggggcaatctcggctcactgcaacctccgcctacccaggttcaagcgattcttct

SEQ ID NO: 36052 - DNA, 875 bp, Homo sapiens
tggtgaccccctccgtcctccccagggtgggctccttgggcttgggctggtggaagtgaatattgcctgcagcaagaagaaggactgttcatgtgggagcgcaaggcggcagcggggttggaaacccacccccacacagtcaacacctgctgtcacaccaggctaatcaagaacacttttctttggtgcattaaccacctgctattaaataaagggctgttactaggtggcaaagtaacacactgcagtagagcctatttgtaatctgagatcagtggctgtaaggcaccatccttgagccaagcaagtactaatattcttgttatcttaattagaatgcaagagatcgtgtttttaaaattctctttgaatctgtcactttgccctcctcttcctgggtgatacacctggtagtgctggtgggggccatcataatgccccttgtcccagattcccttcttttagatgggactcgagcactgatcatttcagccctgtatctctcaggtcagcgtggttcagtttgctgtgcagagtccaggggagataaccacgctgtgcacacatgagattggctgacttggcaggactgtgcaattgtcagaaggccgtggggagtgggggccagtgcctgcagcctgccctgcctctctcacaggcccttagagcatcgccaggtgcagagctccacagctctctttcccaaggagtaatcagagggtgagaacgtggagcctggtggacaggtgaaagcactgggatctttctgcccagaaaggggaaagttgcacatttatatcctagagggaagcgacagcagtgcttctccctgtgctgaggtacaggtaaggagggtggtttgtaaagttcactgg

SEQ ID NO: 36053 - DNA, 755 bp, Homo sapiens
gctactcaggagtctgaggcacgagaatctcttgaacccagggacagaagttgcagtgagccgagatcgcaccactgcactctttgagactctgtctcaaaaaaaaaaaaaaaaaaaaaagggaaagcaatggcctggcttggctggagatggaacatgcatcaacgtgtcccacgtgtctccagcagggatagcgaaggcctgccccctggcacatggtagactgagtaaatgttgatcagtgagaccttgaggcactttagagtttcacaatccagagagggagatagattggaagttcaagggtggacacctgggcatgattcccaggacgaaggctgcagtcggttctaagaagtatgctggtgactatgagagaagaggttgtgggtttcctctcttgaaagctgtctccataatcacatgtggggtgataagggctctggtccaggggagggggcgaggcacacagggggctgaatctgatggcatgaggacttggtgatgggctgtggggaaagaattggagatgactctagggcctgagggtgggaagctgggagttcactgggatcactgatagaaacgcggaggtggggggtgccaagctgattttcctgattagatttcctacagaactgcaggaataaggcgagagccatcgccctgggtggatttctgtttggagctctatcgctggaccactgtggacaagtatttcatagaacgacccccagtagcccaattctaggttt

SEQ ID NO: 36054 - DNA, 1873 bp, Homo sapiens
tattcacgatggtccatccacgagccacagacaacacctcactcccactgctcacagaatgtcagagctgggacctcagagatgggtccatctgctatacttggaaaccaagcctcagaggtttaataacttgccccaaagttaaggttaaggagctggtcagggcagaattgaatcccaaacccaatatcctgactctcagatgccacttctctttttactttgccacagaggagaaagtaaagggggtggtctagggtagggacggggagggagtcaggagtcccagggcctcctcagggacctctgggtcccctagctctgcgctttcacacacacatacccctcctgggtaccatcagtctaactgcaaggcccagcatttccaaagcaaacactgctccaggctgggttgttgacctttccttcctgaggctcctggcgcccctggtgaagctaatagaaatctccagtgtctgtcccctgacaccagaggaccgggagttagtgtccaagttctcatgctgtggctgaagggccagaacacatattcagcctggacttgcttaagatcctacctgcccaaatctggtaaatctagaattcccaggggatttttctgctaagtctggtgcttctagctgttacagggacaaagatcttgagaacaagaagaaaagatatagagaacccaaacagatgtttggataccagtagtgctggtgaggtgtgtatgttgggtaacccctaggcctagagtgctggggacaatcacacatggacacctacctacctacctacctacctacacacacacacacacacacacacacacacacacacacgaagcacaggaagcatgaatgagtggaaagcccaagaacatgggagcatcccacagacagccaagtgactttctcaaccttctaagagacttggcaatggctggaggtagtgggggttgtgatgccagagtcatggggctgctgactctgaacagagtgtcacaagagtgacctctggaacacagatgttcttggcttccctttaaaatcccccagtggcaccacccaatggaacacaccagcccaacacttcaaggccaccacctacccctcctccttcctgtccccacacttaccagacactaggggaaggaaggactgtggatgggcccgttggagaggtcctcagttggagctgtctctggcaaaggcaaaagcagccccagccacctcccaagctgccaagggccaggcgtcgggcctaacactcatgtcctgcagggctttcctgaccagcgagtcctggggtaccaaactgtagactttcctgaaggatcacagacaccaagcatcacatgggagccacccttttccagtgtaggggtctggatggaaaccctccagcacacacctgtgtatgcatgctgcccatatggacctttaggttctgcccagtgggctccctcctgccttgatctctccccaaactcccagaactggttctccatccatcagtgctcctctgtgcgaccctactcctccttcctcggccagcaccacctgtggccccagcctctctcctctttgccaatggctcagggacctgctgggtctaggggagcagccctctcccacagaaaccctggaggttgtgggctcacggtagggccccaagcaaaggacttcacctgggccccaagggccaatgctactggggaggctccccagggttccccaagagctagaatcaggaaaagggaacacagcagcatgaacaaggaaggcttgaaatgtgaagtggaaagaaaaaacatccccataaaatgctcacagagagagcattgtccctggaaaggggagggtgctgt

SEQ ID NO: 36055 - DNA, 2463 bp, Homo sapiens
ggttgcaaagtaaagtacaaacttctccttatggcaacaccaaacaggacccagtaacctggacaactgtttacctcctaccctggagcacaaaggaaatgacacagcccctggctgaaaccagaggcagtgtggctcagggattatgtgagcaggctctggagttagggtctcagcaccacgcagttcagacaagcagcctaaccactctgtgccttggcttccttcgccaggaaatgcgagtgatgactttctctcacggagctgttgggaggcacagatcccaaacaacacctgtaaagcacttagcccaggacccggccctagcaagcaattagaagctgtctgcctttattttaagtcgcccctccagctaatgggaaacacaagggcaggatcccacctgacgtcttctctgttagagcccaacgaacagctaggagagacctttgcccccacactaaacaaaggagaggggcgtgtgaagggaaaaggagcctcggcttccgttcatatcccccttgaaggcacagcagacttgaggatgacctgagaggtgtcaagggagggtcagtgggtccgccacgctgtccacccctgcccttgaagaggacaccacctgcctggggctgaatgaccaaggcccctccagggcctcaggtagctagtcttatcaggtgctggaacctttgcggatttggtttcttagcagagctcgcctcaccctttccgcccccgcccttccccccagtccccgagtccccagcctccctcctcaggactccgccaaggctgcaggaagtggtcacccaggaacagcccgaggggtggcctctgccttcctggcgtcaggagagtcggacgcttggccctttcccagcccggcctcgtatagggtccgaggagcccatagctgcactcctagttaggtgggaggtcggactccgccgacaaatcccaaagagaggggtggggaagaaggagataccagccctgaaagcgaaaagccggagaggaaagtcctgaaaagccgccaggaattcccaaggagcgcagggctggaatggaggcgctgcccggaccctctcctcccacccaatcccgcgtcgtcaccccctgcttggggtcgggggctctggggtctgcgtaggctgggagccgttccggaaccggacacctggcgcgcacgtcccgggaaaggcggagggtgcattgcccctcctcacgccccctgtcccctgtacctgcggcggcggcgtgtctggcgggacccagcagcgcggggcgtgttccgaccacttaaaagttacaaagtgaaactccggcgcctcctgcacatgcgcagagctgcggccacccctttcccaatttggagtcttggcccgcggcggcgcaagcctgtacgcagctgactgcgcctcccgcggtggccctcggcggtcctctgccccggcctggcctcctggtcgccgctcagccccgcagctcctcccggaggtctgcaagccccggaccggccagctcacgtccaggctccaagaagggatccgccggggcgcaccctcttccgtcccccggcacgagcccagtctctggacgcctccgggagaactgggccaagcacagggtggtcgcggcgcagggagagcatctgcaaacgttggtccctgtagtgctttgaatttccccgaagagctcttagacccgccccgggagagtggggttgcgggggtggtagcatggggagctcagcaggattcagcccgcacctcggctccgggtagtcgggaaccgcgcggagcgccctgcaagaggccacggctcccccgccgctgtagaaggccggaccgtgaaagcccggagggtctccgttcgggcaaaaatgtgggggcgggtcgcagcatttccaacgccccctggggctagtccattactgctcgagccagggccgccaagggcacctactccagcccaggtccgagagcgcggcatgcctcccggccgggagccaaatgtttccagggagccggtggcctccacaaccggaccgcaagctcgcgagggcagggccggcccgccgcgccagggactgctgggcgctgcgcgggaagcgaggctgggttcggggaggaccgcgcgccctgggaatcaaggagcaaaccaacccgtccgcaggcccctgtttccctatctgtgaaatgagtggttggaccaaagcttcctctcaggtcccttccagcacccctctctgagctctgagcagtcctcaccccacatgcatgcctttgcaggttctccgacctcccttccatttctgagctttcatctttttctgtaacggcataaaaatatcctccttatggccgggcgcggtggctcatgcctgtaataccagcactttgggaggccgaggtgggcggatcaccttaggtctggagttcgagaccagcctgacccgcatgg

SEQ ID NO: 36056 - DNA, 846 bp, Homo sapiens
cttgcagtgagccaacatagcgccatctgtactccagcctgggcgacagagctgtctcaataataataataataaaaatacaaaaaattagcttggcgtggtggtacatgcctgtaatcccagttactcaagatgctgaggcatgagaatcgcttgaacctggaaggcagaggctgcagtgagccgagattgggccactgcactcccgcctgggtgacagagtgagactctgtctcaaaaataattaattaattaaaataaaatagaaaattacaaaattatagaataaaatgtgttttattcatgttttacaaagtctttattatctggattggggatgcacaacccacacttaaccccaggtcttaggtccagagtggtggtggaggactttagcccagatccagtgacaggacaagtaaacaatgacacattgggctttctgccctcaggttacagtatctccacatgtaagtgcttagaatatagtgcagtgaataataagaatagagaaaactgagcaagggctctccagtggccaaagattctcattcctgagaagcaaaaattaggtgaggtaacttgtcagaggaagcaaattcagggctcactagagagcacagagcatttgtccatcagcagttcagtcatcgccagctctcctggtaccctcgaacacttcagaaacacacacaagtcaagtccctcgatggctacactaggcgcctatggctggagcctccttggcacgagcgcaccatccgaggcacagctgcacttctgcaccctcatgttgggcaggctgaccacctggggcctggtcctgcctccctccttgatgctgac

SEQ ID NO: 36057 - DNA, 2042 bp, Homo sapiens
ccagatttcccactgttctggggggaccttcctaggcaagggagcctaggagcatttagttccaacggggttttgtccaataaggaaggagcctcatcctctccctcatccctgctgttcacagaattagagtttagagttgaaaggaatatccaggctaccttctcccccaatttttttttcttttgagacagagtttcattcttgttgcccaggctggagtacaatggcgcagtctcggctcacggcaacctctcccaatttttgagctgaaaaaaaaccgaggctcagaggtgtcaacttcccgaagctcacaaagttaatgatcaatgtccatataaagtcaggtcttgcaattcacaaagttcttggcacactcaaattatttacagcctagttttgatctatgccctaaagggagccaggtggtctcaatccaggtgatcaggtctaggctggggcagggggacaatcccccaagacagaggacccctatcctgaatgtggatttgtaagctggttgaagagttttgctggggaaataaaacatttgggtgatcagccaggggtagggctaccagataaaatacaaggcactatttgggacataattataccaaaaaaattattcattgtctacctgacattcaaatttcaccagagtcctatatttttatttgctagatctgacaacgaaaaataaaacaaatgtggattgggagactgtttacaatggtctgaagtgttgccaggagggagggcagccccaccctttgtcatgcagaagacggagcctggcttccccaaccatccccacctgggtctgcccagattgggcttgagatggtaaagtggccccagaaccagatcttctatctaagggaggagagcggggcaagggaatgagtgatccctaccctgactcagagcacatttggacctggccctcggcccagagctaagggcactggagggcagtggtctggccatactggggagagggggagggggcccaggtaggagggtggatgaggagtggggccctttgccctcgaacaccctcctgcccctggtgggccaggatgtgaccccaaccagaggccaggttgccaagtgagagccatgggaaaacatgggggtcagaggtcatcctggggcctccatggatggggatgagctggactcaggcctgggctctgacgtcagcaaagctaagagtccaggagtggagtggcttctaagtcagagcccagcatctagggtctccagggtggcttttgcccccttcctgggcaggggcagatacttctgagagtgctcaggaaatgccccaaggccagtccaggtgtcctgggctgccccaacccacaccatcaacctccctgaccccaggcctgggggcccatgtggctccttggtggttccaggcaccccctgtgtgggcacttcctgttctcccaaagtagctcagactctggcatcatcaggggtccttccctggggctctgtctgggctgaggagggtgggaaacaaaccaggaatagggacccgtttcagttcatccagcacctttgtgtggtgggcacatcttgccagacagcaacaactcaagcatggcctgggaaggaccctttgtcccttggtgatgtttgttcagtgttccaggctatggaccgtgggaacggccaacctggatgtttaattatgtttaactatgaagaatgtcaggcccctggcctgttacttggaacacaggctgtacaaggaacagaggtccattgttttgaggtaggtggaggctgctaagtagaggttgctagatggaagttgcaatgtggttttgggctgggcgtggtggctcacgcctataatcccagcactctgggaggccaaggtgggcggatcacttgaggtcaggaattggagcctagcctggccaacatggcaaaacctcgactctactaaaaatacaaaaattacctgggcttggtggcagacgcctgtagtcccagctagtcaggaggctgagacaggagatgcg

SEQ ID NO: 36058 - DNA, 700 bp, Homo sapiens
atacaaacttttcaggaaataccctcaggcatgcagagagctgtaggtggaaattataagaggacctgtgtcccctatattcagggacctatcccaccaacactctgccctcctagccccagggcctcattgggaagtctgtctgctgcctaagcgaccacagtccagcccagcgtttcaacaccacccagtgctggcagcaacagaagcaagttgtcccctggcagatgaagtaggtgccactggcttcccaatctccctagatccaggcctgccctgtgtgtagggagctgcccccagctgcccaggctcatgcagtgaagtttggtttgtttgttctctttgtggcttaagtcatacctcagctccacctatcagtgaaccacttcctgttggggaaaacacctagacggtgttttgattccaccacatctctgtggcagcataaacgtgcatactgccttgtgccatagcaaaagtgatttcatgattgacggctgctcctgccactctctccacagctgacactttagcctcgacttccctccttccacgcctcctgaaagctgctacttcccagcatctccatccaaaaacacctcctttcccttttcaaagaaaagtctttccaggattgagaaatgacaaagaaggccgggtgcggtggctcaaacctgtaatcccagcactttggaaggcc

SEQ ID NO: 36059 - DNA, 1853 bp, Homo sapiens
gaggtgggaggctgaggtgggaggcggaggttacagtgagctgagatcgcgccactgcactccagcttgggcgacagagtaagaccctgtctgaaaaaaaatttaaaaaatgagtatttattaggtacctactatgtgccaggtgctttcatcacataatcacctcagttaatcctctaccactccagtgtctggatctgacccccagttatgtctccctgggtgttcccaccacattgagctgcccaagagaaggtggaaagattgtcacgttcctggagtaaaggtcaccgccggccaaagaccagcacttgggcgcaggggccggccagactcacttcatctcaggtcatccttttcctgggcctccacccgcttcccactccgcccggctccacctaccctgagcgcggacaccgtgggcaggttcatttctggggagctggctattatcttgtgagccgacaggatgcctgcagaagacagagcttttcaactaggggtcgcggcccagcccgttaccacgctttccctggctctaaaacccagagccgtcctaacagtgccagtctccctctccccctcaaccctctacgaggacagaagacgcacttgctgctcaaccagagtctcatctaccccaccggacgcaaactcccctttcattcgctcatgctggtgggacggaggccccctcgggcctcgggaccgcccgcgaagccgcctcccgcctccacgcgcttgcctgcggccgtgaagccccgcgccagagcataggccagctggccggccccgatgaagcccacgctcatggtccgcggttcacgcctcctgggagccgcacgaaccccctcagcgagggaccggaagtaacgctaggggaagggcggacagcgcaggggcgaacgggcggcgtgccgaggaccggcgagctaacagcagcttctgggatggtgcaaccctattctcccccggcggatatctcccgggcggctgatggcgccttaggccacgtggccccgccccgtccgggcgaccaatcagtggccaggatctcggggcaggccaatccgcggcccgagccaggccgcgtgcccgcctcctccgctcgcgactggagggcggaactccgggctggagtcccggaagcccctgtggcagcttggcgtgagctccaggcgcccgccggcccaggacgcccggccgcccccaccccccccccccaccccaaggctgaggtcgccgtccctaagccacctcgggctcagggctgaggcctggcccaggcctggctaatattatttctggcgctggccatcagatgcccctcaaggcccacaggaattctccaggttgccgatttgcggggatgaacgaggccctcctggcgtaggttcagaccaggtggcggcgaggttcagaccaggtggcggcgaggcggcaccagggtggtcagccgcggcttattcacttgaacttgagtgtttctcgcgaatttgtccaaactagatacaagaaggacaagttcgagtctccgactcttccgcgatcccgcaccccccagccccttgctgtcacttgcctttttttttttgagacggagtttcactcttgttgcccaggatggagtgcagtggcacgatctcggctcactgcaatctccgcctcccgggttcaagcgattctcctgcctcagcctccccagtagctgggattacaggcgcccgctaccacgaccggataatttttgtatttttagtagagacggggtttcaccatgttgttcaggctggtcttcaactcctgacatcaggttatccgcccgcctcggcctcccaaagtgctgggattat

SEQ ID NO: 36060 - DNA, 1649 bp, Homo sapiens
ttgcttcttcacggaatcgatccaagtctcttaaaattttggtctagactgcagtgttaacatttgttaagcttataaatagtaagcagaggaaatagccgaggaaagcacggatgaggtgcggaaagaacagagttctagatcaagtgccaacattaaaattagattcagggaaaccactaaattcttttgacaactgaacaggtttaatatcttatagctggtaaaagcttacttacttgaaagttcagtaaaagctcacgtgtaactctggaagtccctggtaggttttcacaaatatgcacggacaaatgagaccatcaaattaatagtgaacacttctacgtaacaggccctaagaacccaggccctcaacaggacacacgtgtgaatgcttggtcacaacgactgaccagaagaatcaattttccttcccaatcatcctttggcctgggtttggatatgacatacttctctaggctggggctaacaaggctgtgtgatgagtggacaaaatacacgtcacataaccatagtaagaaggtgaagactggagccttaaaaatcagccggcccaactgccagaagaccattatatttacggataaagaaagagaaacaaagtatttgtaactgtgagcgggactaagtgcctgtaacagtttttttctccctcttggtgggaaggcaaaaccaccaccacaaaagaaaagcaaaggaaggtctcagtaacaattcgaagcaccttaacactgaggaactctcagcctcaacgagtgaaaaccccagagaataaacgtacccccgccccggacagacctactccgcacccagcgctgccacctgtctgcctctttctccttcctaacaggaaccgaaatcctcacctgatcttggcagtgccggtggataaaatcccggacggtgcaccgacccgaggcacaccgcaccgccttgcacccgaagccagggccgcgaatccacaccagcgccgcggcctccgccatgtcaccgactacccgaacctcaagcctctctgagacaccaggcgccgcaactcgcccggcgcctcttgatgacgcgagcatcttccaacgccccgcccctcacgcttccgttcacccctcccctcccctggggcgggtcaagtgagccgggcggcggggcggtgcgggctgggggaggggaacaggaaaggcctggcggaggcagataaggcggcagagcacggggcgaggcgttgctaggagaagttgctagggcggggctcgagggaccggctataaaaggctggcgctgggttaggtttcgagcttcctggccgtaagcgataaggctttaactgagaaccaccttgtgctgtaggctttggcccttttcctcacatctgtgtagttatttttgggtcgcggagaattgtggcccgagaaggctctgctccttgagagtgtggggagagaagctgcagtcccggaagcggttttagggggccgcttccttggcctagaggagctccccaacccgagggggcaagggaaacgacccccaggaggcccctaaacagtggccggcgtggtttctcctccagctttacagagccttctcttcccctccagaaacagccaacctccgggtttctgcctgccacg

SEQ ID NO: 36061 - DNA, 1310 bp, Homo sapiens
gctaaaaatacaaaaattagccgggcatggtggtgcgtgcctgtaatcccagctacttgggaggctgaggcacaagaatcacttgaacctgggaggtggaggttgtggtgagctgagatcgggccactgcaccccagcctgggtaacagagcaagactctgtctcaaaaaaaaaaaaaaaaatcagatgaagggatccaatcatctcccagaaaaaatgctcagtcctttcactaaattctccctataagatgggaattttctccttgtgtcatagaagtggaaactaaagctcagaaagctcatgtgacacagcaggtcagaggcggtgccaggagagaaacccaggtctgtgtgactccaaaggtcacgttcttttcacttcctcattttccaccaaaaaaaaaaaaaagtaccagttttacacataaacaaatactgttgtccattgacacttcggtattagcaggttctgagtttcactctaatggagctcattgggcctgactgggtctagttagaggtggcaagtatgttaacgatatgaggccagagagttctccgccccttaagaagcaataactttattcctggccaaggatgatgagttgactatgttctttggaccctttgtcacggcaaggtataattctcaatctagactagacagattggctggcgctatcacttggaaagaaaggagtttactcctctttgatgtcctcctttgtgtctggaagcaatcaatataaaatttatttagccttatcttctgtaacaaaccaaagaggggaaagtgtcccagagaaggccgcgggcacttactcacccttattaattccatgtaacaactgagaggcactttgagcctcttaaccaaaagcttcacatcttcagatgccaagcctccagcagcagggccacatggctcaagcagacagggagcagactggaagtaggctggaagccaacctgagcacagcaccatgtctccaggaccaggcggcacagaaacttgaggccacctgttcatccactgtatttttacctatttttaaaatgttcaactctcagggctggtgttagatgcttatgatgccaccaggtaagcccacaggtgccaaaacattatgtgcttctgctttgatattctctgatggatattgctggccccagctcccctctggtacttggggggaagtggaagaagaagaaagatgagctggttgttcttgctgctgtttctccacgatgagacagaatgaaaaccctctttggttcccttctgaatccaccatctgaggaccaaga

SEQ ID NO: 36062 - DNA, 995 bp, Homo sapiens
tccctccctttgagtgtgggtgggtccagtgactgcttctttttttttcttgtttttttctttctttttttttttttttttttttttttttttttaaagagatggggtctcactgtgttgccttggctagagtgcagttgctgttcacagatgcaattatagcccactacagcctctaactcctgggctcaagcaatccttttgcctcagcctcccaatctaagactacttctaaccaacagaatatggcaaaggtgatgggctgttagtctgtgattagattacattatatacaattctaccccactagctctgttcctcccttagtggctttgaggaagcaagctgctattttgtaagaggacctatcaagaggtccacatggccaggaactgtgagcagcctcatagagctaagggcagctaacagtcagcaaaaatccaggcccttggtcttacagcagcaaggaaccaaattctgccaacaacccgaatgagtttggcagcagatctgtcactagtcaggcctccagatggagctgagccacggccgacaccatgatgacagccttgcggcctgcactatgcccaggcccctgactcacagggtgtgggataataaagggaagttgttttaaactagtgcatttgtcgtaatacgttatgcagcataggaaacaaatatgctcccttatcctataagcctccaatctgagcaagatggcctcagcccttctgctttttcttctgataacctttactccatgtccgctaatgagcaattcttttttatcttattttattttatttattttatttttttaagacagggtctctgtctgttgcccaggctggagtgcactggcatgatcatagctcactgcagcctcgaccctggctcaagtgatcgtccaaccacagcttcccgagtagctggcaccacaggtgtgtgccaccacacccggatttttataggtttttttcttttctttcttt

SEQ ID NO: 36063 - DNA, 524 bp, Homo sapiens
gtggtagtgatagggtaatggaattatgagtggattgttttcttgatctattctctattttccaatgtgcctttctctcttttttttagagacggggtcttgctatgtgtatcagcagtcagagttctccagagggacagaactaataggatagatgtatatatgaaaggcagtttattaaggacaattgactcacacaatcacaaggcaaagtcccacgataggccgtccgcaacctgaagagcaaggaagccagttggctcagtctgagtcacaaaacctcaaaagcagggaagccgacagtgcaaacttcagtctgtggcccaaggctggagagttcctgggaaaccactggtgtaactccaagagtccaaaagccaaagaacctggagtctgatgcttcagggctggaagcatctagcacagaggaaagatgaaagccagaagattcagcaagccgtcttatcccaccttcctctgtctgctttgttccagccatgctggtggtcgattggatggtgccc

SEQ ID NO: 36064 - DNA, 2533 bp, Homo sapiens
gtttatcactaagccgctttgtgagatcttcagattacaaataattactgcccttcatttatgaaattttcctccttcactaccctacgggatatttgcatgacccttccattgaaaacctttacacacagttgtgaagcgtcaataccatctagggacggttcagaggttccaaagccaatcaactgacaagtcgtgaggataacttgggccatgaaaagtccgtttcctatgctactgagaattggaaaacaggtatatgtactaattcccaaaccacgtttgccttctttctgccgttttcagcctcttctaaactatgcagaagctgcggacatttgactatctatattcggcaattcctttccaaagcaatcctaccgaaaacagatcacacggcccccacgggcgggcaggacaagccaccaggccctggtgcaggagctgcgcgctccacacattgtttagaggccgacgcgacacagccatcttgcgtcgggggcccgggcccgggaggagagcgagccccgtcccctgatcccggaggccaacaccggcgaggggctgccctgcacgcaggcggccggcccaggagtcttagcggatcaagttgtctacggcggactcgggccggtcccgcaggacccggccgcacttggccgagcgcgcaggcgggaaggaggccgtcggtccgcccctcccgctgccgcagcggccaggtccgacagcgggcgcgggacgctggattcctatttgccagcttcctgctggggagcgttttccaatggggcgcggcgacccggccgaccgcgtcctcctcccccactgccgcccgggtctcctcgggggcgcgcgccggggcccgcgcgggggcagcccctccctcccctccccgccgcggcccgagacgcccgcaggccgggcgttcacccgccgcgcctccgcccgccttcccctccccccacttccctccgggcgccccaaacccgggcttcgggggttcgacgccgtgcgcacacggagcgggatgggagtgcagggccgggggcgggggctggccgggtgcgggcggcagtctcggcgggagccggcggcccctcagcgtgtcttttgtgtttgtacacacacggcgcgaggcggcctggaggagggagcgggcggcgcgcgggggaggggcgagcgcgcgccagcgaacgggcgcgcggggggaagggcgggggcggggcgcgagaggagctatgggggcggggccgagccttccctccattgtgtgtgattggctggcgcgcggcgcgggggcggggcggcgtgtgttgggggatagcctcggtgtcagccatctttcaattgtgttcgcagccgccgccgcgccgccgtcgctctccaacgccagcgccgcctctcgctcgccgagctccagccgaaggagaaggggggtaagtttccccgtctgcccgcttccccggaaccgagccccgcttgccgtcagccccgagccgggccctggcggtgccgggaggggacccatagcccctccggcttagcccacaaactttttggcccagaaatggaggtgaggagcgagtttccctgttccctctggcggcggcggctcccccgtctctcgccgcctcagcccaacagcagcaaccgccgcggcgccgagcctgctctccctcctcctccccgcgcccctggctcctctttcttcggtgaaatcccgcccgccgccccttccccggaccccaaaccttcaccatgacccgcgcgggcctcttaactaccgcccccgggccccagcccccagttttcgagcgggaaaggggtggaaatcgccgccgcttcgcaccctggggtaactcgctttttgctgcctccccacagttgttgctaagcttcaccatcttgtctctcttctctggtcaccgaccatattttttcccccgtttctctcttccccatttcaaaaaagcaagaatttttaaaagagggacgtttttttcccttttttggagaggcggaaacttgatgcatttgaaatgcaaaaaaaacttttgcattttggagggcggcacgtggcaggggataggggtattttcgagcgatttggtgttttgtctctttggaacggaatcggatacgttttgcgattgtttccattttgttctggtcggggagccgagttggttcctgctcgaggcgctgggagcgaggcgggcaggttgggggaccctgtgccgagggacccgaaggaggcaaaaccaaaagtttatgtggtgcttggggtggaccggtcggcggatgtcgtgcgttaattaaagcctgggtgcggggcactttttatttcactgcgaagcctgtgaggactggacgcgaggacggggctttgtagaatgctcgctggtggtagctgttgttcctctcttgttttttcgagacgcctttttgtcaacataactgtaaagatgcaaaaccaagaatattttcagatatttacagcaatccatcaacagtcagacgaagggggggcagc

SEQ ID NO: 36065 - DNA, 1447 bp, Homo sapiens
ggcacacacagtgagggctcaattcacggtggattttatttggtcatcatcatcacatttggagctgaaatagaacagttctgattccaagtgaaggggaggtagagtggagggggtggggagggctagcttggatttctgctaagatgtcacagcctcggataccctcaaggcatgccatgcccgggcttagctgggtgaggggcctgtgaagcttgttggtgtgtaagagacctcggtggcatcactgtcagcgcagccgaagccaccacgctagctccagactggtcagcagatggccgcgcaccaggcccttcctgcggcccgggcgactcgtctcttagtggaggaagtagccggccccggacacactcctgaggagcgctgcccgcagtctcgggaaacggggcgtggggccagctgctccttccaactcctcctcgggggcagcatgagggagggtcgctgtcagggcctcgaggactaagggttcagggtgcccgccgctcgtcccctcccccctcccccccaggtcgtggaggccggtccccagcatctctccagcgtccccactgtcgtggctccggggcgggcttctcccttttcaggcatttctgaaatcgccgcctcacccgggctctcttcctccggctcgccctccccagccccaggtgccagagagaactttccccaaaacgcgaaactgatcctttcagacgcctcgcgttcgcccaacagcacctctagcctcggtcgttgtcacgtgacgcggccccaaggcccaggccacgcccccggagctcgccacgcccaccgggtccgcccccacgcggccgcctgcacagggggttccagccacccgcgctctcccaggtttgccgaccttacgggcccttctccgccagccctggctgggtcacccccacgacccgggactcccccgccgttccctcccgggctgcctgcagtgaggtccgctcctgaggcctcagcctcgccgggggtagggccctctcccgccgtcgccgcagctcctttccgtcccggggcctggggggcaccgtcccacgggtgagggccgcctccagcgcctggcccagccatgcgaacgcctggagcccgcgagctgcagctgcggccctgaaggtgccgcatatcctgccgagtgggtgaagcgtggcactttggaaaacaaatcgggttagtgctcagcagcctccgggccgatgggtggggatgtcatactatgaactgagagcccgcgagctggaaaaaacagtgccagtcctgcccgcgcgtcgcgggactcagtaattcccggctccgcagcgctcgagcctgttctccgcagcttcataccctctgccccgcgaaagtgacctcaggggccgggcgtgttggctcacgcctgtaatccagcactttgggaggtcaaggcgggcggctc

SEQ ID NO: 36066 - DNA, 1466 bp, Homo sapiens
aagcctgagctggggcgtccggaccgctccatggggtatgcggtctccatggggtatgcggtcgagctgggcactgacacttccctactttggaactgtgctatgggcaagatgggagcaggcgctgaatccgtggcgcatggggaaagcggcggtcggagtggggcttcctggcctgtcacctcctcctgagctgctgcgaggagaggcgcgttggcctcctgggccacagctgcctccctgcccagggaatcccgggagatgcgaatatcgaagaactctgaaaatcaaatcgcatttctaaacgccaggtggagatttgttttgaggttcctaaatgacagatgtcccggcggaggagcgcagaggagggcgggccagttgcgtcgggagaggaggagccgcaggctgggaggcgcgcgcgtcactcgcgggcaggggctggctggccgggcgcgcggccgggcgggggctgctccggggagcgcgggggcgggggcgtgcgcgtggccgggcgtgcgcgcgaccacccggggcgtccaggctgcccgcgcgcgcccaagccctgcttaaaaaagggagccccgagcccgcgccctccgcccggtgcgtcccgcgggacgttccaagagcagtgcggagagcgcgtgggccgcggcggaggccgggctggggggcgggttcgcggcagttccccccggctccccggcagttccccccggctcctctgccgcctggcccgggagctgccctttatttatttatttcagtgggcaaagcggggtcatttgtgttgaggacgcaaatctttccaggaagtttgtgcctattaatatttcagttcctggcagccgcctcgagtgcggggcgggggagttcagtgctgcgggggagggaggcgcctgcagctgccctggcccactggcctcggctggccgcttgcggcgaggccgaggggcagcccctgggcctcctgggcgccccccgacccccgccaccactggggaaggcagggccggcgcggacccccagaggcgcgcggatccccagaggcaagccgacctgcttccggagccacgcgcggggcgaaagaggcggccccggatgctgcgaccagagcgagggcgccagctcggggcttcccggagcgggggcggaggaggcagcagcccggagaggctgcttagccaccagatgtccgcgggtggcccgcgcggcgcgggcggaggaaggaagggcggctctaggggcgtcctggctagtcgtccgcgaccgcgctctcgggtagccggggatggcggggcctggggcccggggccttgctgaccttgctccagccacacagccggagggagctgcagcagaaacttgccattttaaagctcggctacccctcaccaccacctggcaagattgtcatcatctccaatctacagaagcggaagccggagctaaatagcctgcta

SEQ ID NO: 36067 - DNA, 1963 bp, Homo sapiens
tgctaagagagttcccacgcggggcctcaggggcggcggggccgccttcccccacggccagcctagggagcttgggaatcgcgacccaatgcacagacgggcagtgctcgctctctcttcacaggcgggaaaccgaggcacaacgacggctagcacctgccccgaggtcacacggcgacccaactcggttctctggccggcggccttgttggttccggtctgggaaagggaccccgcaatcgtccctccggccgccagcagcgccaggcccccccccgcaggggccgggggtggcgggcccgccgctgacctcccccgcccggcctgggtcccgcgctccgcggggtgacagcagccgggcgccctctggtggccgccgcgcgcagcaggcgggagcgcggagcgtcggggcctgcaaccgggcggggatgacgggggccggggaccctgcactttgggacgacctggcctggtggccgcgcttccttcgctacaaaaaggaagcacatcttggaaacaccgaacttctgtgacaccagtagttacacctggcctctgaatcgggcgagcagcgccctcgcgcccccagcgctgagcaggggcgggcggggagcggaaacggtggctgtggttgttgccgcgcggctgggcgcctggggagcccgcggaggggcgcggccgccagaccccgcccggcccggaggtgaggagacctcagccccggacgccgaggccccgccccgccggcgatgcaccccccgcccacctccgcgcccctttgttccgcgaccgcagtcccgccgagagccgcactgaagagccccagcctggccgtcccgcggtttcccgccgcctcaccagtctcgggcgggaggggccccggcgctggcgtggccgcggctcccacaacgcagccaggactgcactcggggctgctggggcccgcgtgcgtcccgggcggctccacgcgtcggggtcgcccccgcgcctcccacccccggcctctcggggccgccggctcgcgcgccttccaggcgaaggccagaggccgcagtgaggggcaccgagtggcgggctcctccgcaccacccccgggctttataataaaagtcgccgttgtttaagagccaggtcggaggcgccgctttctgggcggtgaaagccgaagcgagagcgggcaattcgctgcggcggcggccgcttcctgggcgtcggtccagtgccccggcccggcctgggagacccgcaccaaccccgggagggaggacggggcgcgggcgcagcctaggggccgaagcactgcacgcacggccggcgcgggggcagaggggagacagggaagcctgagctccgcgctgctgaaggctccggggatgggtgggcggcggtgaggtagtcttgcccgggccctgcccgcgtgggcgctttctgagtctctgtcgcgtgacggaggcgggacctaggctgtgtctcctgcggggcgaaagcacggaagagatccgagggcatttcttgagcctggcaggaggccaggggttttacagggcaggaaggaacctggaggaaccgaggagccacgttgttggttggaaagaagggtggccaggtggggaggagtctggcaaagggtcccagacagcaggaagggcacctgtgaagccgccctgccgagtgtgtggtagaggcggggtgaaatgagcactgctcataaaagtgactgttgtgattttttatgagatggagtctcgctctgtcgcccaggctggagtgcaggggagcaacctcggctcactgcaacctccgcctcccgggttcacgccattctcctgcctcggcctccccagtagctaagattacaaggcgcccgccaccacgcccggctaatttttttgtagttttagtagagacggggttttgccatgttggccaggctggtctcaaactcctgagctcaagtgatccg

SEQ ID NO: 36068 - DNA, 973 bp, Homo sapiens
tgttagatactgtttcttcttaacaagttgaggcgtgggtagagcaggaactggttttccagcattgtgtccgtaaacctgagtcagaataagatgtaacagaagccagataaagactctgtcaaatcctgcaaaaaaaaaaaaaagaaaaaaaagaaaacacacacacacacacatgcacacaatgcataaagtgtttctgaaactttggtgtgcatgagagacacctggggacttacaaaaacacagatggctggccccaccctagagtttctaatttagtaggtccagggtggggtccggtaatttgcatttctaacaagtttcctgatactgctgctgttgctcttggttggggcccaaacttccagaacaactggtctgaatgaagggctgggtccgggacctgcaagtcccactgtgctgcttgccccggtacctcctcctaagtctggcccagcaggaaacggagcgcgggtcaaagtcctctcacagtcaaccaggagaaacctgtgtcttcctggcagggtggctgggtgctatggaaacaaggctcagcccagaagtgcccagcctccttcccagaagcaacttcagcctctaggggaggagtgaagtgaacaaacaaacggaagggcagagctcagttcctggatggaagcggcacctgcatggaagcgccctcagcaacctcagggcccagacttccgggaaagtctcacagggcccctggcttgagttttggagctggaagggaactttgcaatcttggttcaactttttgttttattttctgagatgaatcctcgctctgttgcccagggtggggtgcagtggcgcaatctcggctcactgcaacctccgcctcccgggttccagcgatgctcctgcctcagcctcctgagtagctgggatcacaggtgcctgccaccacggttggctaaattttgtatttttagtagagatgggggtt

SEQ ID NO: 36069 - DNA, 1282 bp, Homo sapiens
agccagatcatgcccttcctgggcttcatgcctcccccacggtccccaccacacctgcaaaggaatgatgtgccccacctctttctccgatctcatcccctgctattccccccgcctctcacttcgcgcttcactggccgttgtcctccacacacacaaacgtcttcctacctcagggcctctgcactggctgttccctcctggaaggctctgtgcacatcttcacggggctaacatcgttaagttctcaaacagccctctcctcatagagcctttcctgacctctcaagctaaggtagtggtccccgtatcatcccttcacttttctcactgcttttcgttatctgttctttcctttccttatttggtctgcctctggccaacaggatgtcagttacttgacagcagggcccgtgctgggctccatgcccggcttcgccagcgtctggcgccgggagcgcaggtgctccaagagtgtgtgttcaatgaattgttactgaatgctgcagaaccctgctccacgctgcttcctcgccctggcgtttgggagcctgatgacagccctgcccgtgaaggccgcacctagggacaatgtcaggctgaggagtgagcccacgtggcgctggctccgatgctgctgccctctgtgcactcagcccttctcctgcgcaggccgggcccagggcagggcgccctcacagcctccgtgctaggcctggccttccaccagcacctctctcctctcccagtgccaaagtccactctccttcctgctgtggggaaaatggcactccttttaggggaaacacccactccccactcagcttggagctgggcttaggagccagtgagagctacaggaggggagagagaccagccggagcatgcagagcagtggacactcacttccttggtcagcgtcctttgagaacagggtagaaactgagaaaaggcctaggtgtccacatcttgcactgaggtttccagggggttcacacatcaccacagccgatccacagggttccaggaaggaccgaggagccctccctcccccagtgtctaaactgctaacacgggttaccaaaggcgttttacacacaagactgctcaaaaccctcaaacaacgctttgcagggggtgcttatgtttcccggactacaagagaggaggctcccaaaccagcaggccgggtgggagcgcacaggggagggaggagggctgcagccggaatcccagggacctgcatttcggggacaggcgggagccagggagagggcgggag

SEQ ID NO: 36070 - DNA, 1999 bp, Homo sapiens
gactaagtatctttaagaatcaaactaacgggctttcatcagtttttcccactgacaaaaatcatgtgattggtctctccaccattcgactaagtgaatcacccaattaaaaaaaaaaaaaaccgcacactacaatcttgctctaagacaagagacatttaacaattaattatgcgaaaagcacagaaggtactgttaggccttactctgagaattcactcttgcacattgcttacaatgtaaaattttaaccacctagaagttactagaacatagtggacatctctcctcaagagtttgacaagccggagaggatgatgagcttaacactttacttcctcctctctgccacatcaatctgccgggggatcaagtcctgttccagtttatggttcccaagaatggctggaaaagctatgtatggaacctcttgacagatttcttccactaagggtaaaaatcggcgggttctgatgtgacaagccatgggaaataggaaaagaaaagcgtcagttaaaaaaataataataataaaaggcaatcccagaatgggatcctttggaagaaagtgggctcattcttccaccagggctcctggaaatcccagaagctaaatcaggtaaaatgtcccggtaacctctgggaggcgggacatgactgctaaaccaaggttgcaggcccgtcaggggtgtgacctagtggccaagcgggtagtgacaaacttcgggtacccccaaggagggaaccccgcttgagtcaccacagcccagtatgagtgggtgagggcaagtctggtccagtcaccctggggaccacagcccacgccgggctcccggggccgggcagaagcggcgggggtggggctggcccggctcacctttgaagaagcgcagtgccaggccgtacaactcctccaggccgaaaccccagcgctgctccagccgccgcgcctcctccgccgcgcccccagccgccgcctccccgggctcgggctgctcccctgaggcgcccgggccgcgaccggatccaggtggcgagggcggtggcagcggtggcggcagcagcggggcgccctccgccccaggccgctcctccgggtccgggctgagcgtgaggccgtcgacggacacctcgagtcgctctgcgttcagcaccgccgccatctccggctgctgcacctcctcagcggggacagacggcagccacgtatcgacttcctgctgacctctgacctccgcttaccgacaccggaacttccgctgctgaggaggctggagggctccgggagaggggctgaggcctggcgccccaccccctccggaatcgtcagttgccctggctcagcgaccacccttcaggctccccaactcccgttggtcccgaactcccctcccccgcaccccatcctttcggatcccagttgctccaggtgggcgggtgctaccacccccaccgctcggttcggtgctgcggctgtcagtgcccagcaggggcggggtcagtggagccccgcgcgggggtcggagtagggaggattgacgaggtcggccagcacccaaccctccaggtcagaggcccttcacatttgcaggggcctgcgtggttggcagagctcttttgcccaccaccatctcgtttggccttcacagcaactctaaggaaatgcagggcaaattcccaatttttttaaaaggggaaactgagactgcagagaaattcagtgactttgaggttgcagacggggctgatcctggttttgcaggaagcgcagctcatacaatttgtggggaccctcattaggaaagagtacaaaaagttacgcgcagaagggtaggaaagtgaatgtatatttagaaagagaaagaaaaaacaaatgatattttaaaagttaataaaacccacaaacatcacacacataaccgtaatattttcattgactgcctgatattcttctacagggcgtctgagagcccagaaacctatttttttctaaaagatt

SEQ ID NO: 36071 - DNA, 1431 bp, Homo sapiens
gtcttagatgtcagggtgagtaaacatggttaggggaggcaatgccctagggtgggtgtcaggcagggtacacgtacgctgtgttggtcacatccatgcataaaggtacctttatggctcttaagacacatatagaataaagtctgcgggacggggtctacctgaacactgagtatccgggctggatgatctcaggaaaggtccacagccacctgtggtcccaggggaaggggccaaccctctgacacggaaacacttccaggggtggacacaccggtgggggggtggggaggacagtgaagatcacaagtgcccgtagaggcaggagctgtgacaggacaagatcagaggctggggcaagaagaaggggccgtggaccaccccgtgcccagcccgagccctcccccggccccgggacaggcgagttacataaccccggcgggcgtctctcggcgccgggcgagtggtgcaggcggcgaggacagcccccgcgcccaggggccgctcttccctccacctcggctgggggccggagtggcgccaggggagcagccaccgcctccgcctggcacaggctggactcccgggctctcggtttccggccctggcgctcacacaaccccagaaaccaacacacagacaccataacaaaggcggcgacgcggcggcaacaccggagtgggaggactaggggaccacagtggggctggcagtcagcccacctgcccagcggagggcacggccgtccgtcccggccggtgcaaccgctgggcaagcagcaggcgggaaaaggggggggtgctttgaggtgctactcactctcgtcaggcaactggtcgagctccgccatcttgaacgagccgcgccgctttttcaaaggctgcccgccgcggtgcattgtggggcggagactgtctttgcgagggaggttcgaatgcggagctcgctgcccgcggcgccgcgctgcgctgctcccgccgcggctggctgaggcgggcccggctccgcccgcgcctgcccggggaggaggtgccgccgaaggggggccgcgcctcgcccctccgccgccgcctccggccgagccgggcgggaggaagggaggaaggaggccgcacggcgaggcccggcgccggagcgcggggggagcagtaccagctccggagtcccgcccgggccccgctcccggcgcatgttccgcggcccgcgctgcagctgcgggaactgcaggctgtttgttccgagtggagaacgggagggaggccccggcggggggaaagaagccctcggttctgggtcgcattgcccgagggggctctacgcaaagtgaaatactcacagttcccgaaacccacgttgcttgggcgcctccgtcccctcacttttcccgagaccgccggccgcagcagccccctgcgcgtcgcgacgtccggg

SEQ ID NO: 36072 - DNA, 2848 bp, Homo sapiens
tgggcaacatagtgagaccccatctcaaaaaacaaaacaaacaaaaaggctcgaaaaggaaacactgagataattatcaaaacatttgaaaggtaatttgggtacagtaacccgtgagcttttaagcattaaataacaagatctagtacagcctctaataactgtgatttttgtagcaatgagagtaaattatattttgaaaaacttccaactgtaaagtgatatgaaaatatctgtaattatcactggtgaaaaaaaaatagggactgctaatatgcctttgctttgctgcttacatttatgattagaggaaataattttatctagaggttagtggagatggagatatcaattttttcttatctaaactcatggacctcttgccttctacctaccatcccacagaccctgggttaagagctcctgcaccaggagtgagaacttcataacaggctgccttgtatattcaaagtaagttctaggttccttagtgggcaacaaggctcttcaaattgtaggccctgtctacttccctattctcatctttctgctccacttctgtgaattaacgactcctaatcaagcttccacccttagctgggtcatctcggactcctaggcacacaatgcctagagcacagctccatcaggtggcatccatcctctcttacggtaacgtttgtttaccagtcatttcccgtttaaccaaactggaaattcccaaaggtggattctgtgtccttaaaacctaacagagtgcttagaacttaaaaaatgcctaccaaataagcactgtgtgccacgtactgacttaggtatgccccgaggacaccaagatgacaggcatattgtgaaataagataacggaagtacacctggcacttgggtatccactcggtaaatgtcgccctcccttgtactaagtactgaaaatccactgagggatatctggtcattcctaaaacacattacagctcatggaagggaggaaaatcaagctaccttgaccatgagcactaagcttgggtaatatgttggaagcgaggaggaacagggcagatgagaaccagaattattaatacaaaggtagacatcggcaaactggaagctggaggcaggagcccctgggaaatgacaggggccttcaagcccaccacctcacagaaggctcaggaaacctcagaaggggattcaatctatcaaaaagcccacatgagaaacccccctggagccactcttactcaaaccagacagctgcaaatgcaccaagagaacgcgtctgtgaatctggaaaatttggggaaaatgttactttaaagcacaaattaggctcaaagtgaatgtactgtacagaaatgacacctttctgcatagttctgcctaattaaaataaaaaatgagagtgagcgtttaaatgacgtgttgaaatgactgccaaaaataggtttaacaaaaaaaaaaaaaacccacatgtcagtcgccaccatccatgtagaacaaaaaccctccagaacaagataggtcaaaatcagattagcttaaagagaccatgtacaattcccccccaacccctgaggcgaacggcagtaataaaacaccgccacccagaaaggagaagagaagaggctcctcgttttcacaaagcgaaaggcaacaccagctgcagactttatttcccgggcttttcctgcaacatcagcaaaaccttccggaagggtcggccgggccgctcgggaggaggggcggccgcggccccataggccccaagtgccgctccgagggcccgggcccgctcgctccctgggcccgccctcccccagccttcccggacacagttaacccggggcgccgcgtccccgccccgccgcccgcacagcggcccgcacctgcaccatgatggccatccggagcgagtccttggggatgctctcgctgcatttcttgcaagaggcgcgcccgctcttggcgtactcgactcgatagagcttatccgaagactccgccatcctcccctagctgccgccaaagctccggaagcccgacgccacgacctagaaacacgctgccgcctcgccgcctcgcgtgcgctcacccagccgcaggcgcctgagcggccagagccgccaccgaacacgccgcaccggccaccgccgttccctgatagattgctgatgcctggccgcgggaacgcccacggaacccgcgtccacggggcggggccggcggcgcgcgcgccccctgccggccggggggcggagtttcccgggcgcctgccgggtggagctctgcgggccgctgccctgggggccgaggcggggcttgggctgagctagtagctctttggaggacccggcgccacccctttgattgttctgtcccaggaagtcttacttgatttcacaactaattttacccccaacccctcccccttttatttttgagactgagtctcaccgcgctggagtgcagtgccgccatcatggctcactgcagtctggaactcctgagcccagcgatcctcccacctcagcctcccgagtagctgggactacaggcgctcaccacaactggctaattaaaaaaaaattttttttagggacagggtctcgccaagttggctagactggtctcaaactcctgctacaagtgatcttcacgcctcagcctcccgaagtgctgggatcaggggcatgagctaccacgccggccccaaactcttaagtgtgtcctctctcccctgagggcagctgggtccgggaagcgcaggcccccgcctcgggaatatagttgattggcccgaggtggaccctgcagtgctaggtccaccctcctggcttggacgggcgtt

SEQ ID NO: 36073 - DNA, 1059 bp, Homo sapiens
atcttgacttttttccagactgtttgctgttggcatatataaatgctactgatttaatatgttgacttgtatcccatactgaatttgttgatgcactctgaaggttttttggtggagtctttaggtttttctaaataaaagatcatatcacctgtgaacaagaataattttacttcttcctctctgatatgaatcccctttatttctttctcttgcctaattgctctggctgggacttccagtccccagctctttattcccccttttccccacttggggccactgactgcattttctcttctcccttgccttcctgtgttgactcagccctactcggccctgccctgtgcccctttgccaactattgacctcaggctgaaagaatttaagtagacctgtcccaacattctgtaactcagtatcgagccattattggtggcaatcagtcctaatctggggccccacttctgacatgtgggcttcaccttgtttccaagactcaaaccctcctccagcagagtcccattttggagcactggactcctgtcttgttcttgggacctgagtcccaccagggtgagtggcctaggctgggaggcctctgcgatttgttccttccttgttcctggcaggtcctactcccttgggaatggagtcctgctgccccctggaagccctgcctgccctggactccctggcatctggctctgtccttctcttggggcctttctaacaccagtattttaacttaaacccttcatttattaatgtagctgagtcttttctacataccaggaacttctgtgggcactggtgatatagtagagaataagacaaggtggtcccagcccctggggagcttatagaccacagtgtagaactatattaaacattatgctgtatggtggtcagtgccatgaaaatcctgagggctgtgtgcatgaccactcttcaggtagccttggccagaaccagttcctcttcctttcttgcttgtatttctcgagaataactgtagaaagtgctgggaatgcaacatcctgagataaggaagaactg

SEQ ID NO: 36074 - DNA, 1173 bp, Homo sapiens
caggccacccagacagctgttttgtcagcaatagcctggtagctttgggcttgatcagtcaggacataggcctggcattgggccaaagccagcctagaagttaagtcagcattttccttttccagcttacttttttattgtagcaaccaagatagggatcctatcttgacacattaacttataagcagtaagcaagcaccatccatgccagatctccttggaatctcctttgcccactggaatcccctgcagcacttcacgcacagccaaaggttcaaattgcactaatttagattcccagttctcacaaaggccagttcccctggaccattcaattgccaagggggaaaactgggggagttcccatcctgggatatgggaagtccctgagcttccattcctgtccttccagccaaaaagcggcatacttttgttttcgaatcctgttcatgatgccataaaatgttctgtgcaggaaacgcacgaggggaaaagaaaagacatacaataccttttaagagtaagcaacctttatcccacgtatatagcaatacagatataacaagcaaatgatataaaatgcaaattgcagcggaaaggggagaagggaaaaaatatgtatatatatatttacactcaccagactatggaggaaggatcactagaccgggaagcaacaatctgggttccagagtcggctgccagtctgtgcacagacgaggaaaggtctcatggagcttcagcacggcctgggaacctagctcttttgtaacgagttgtttggcatgaggcccagtcatgagggcccttcatgactgggctcaaggaacacaaaaaggtcaacttgtttttgcagctgtccgttgtttttcaataactaacgtacaggagcagatttctccgaaactttgctggatgaatgcctcaaggggctcatgcaatctgttctggggcttagtgaccattgtttatgtccacgttcaatggagttcaaatttaatatttaacttttcctctgcagcaggcagccgcaagggaaggtcacaggtaggctggaagcccatggcaagagctgaagcttgatgatgtccttcagctgcagtcaggaagaaagttctaaggggaaaggagagcaattgttgacccagcagctacttggaggatctccctcag

SEQ ID NO: 36075 - DNA, 1418 bp, Homo sapiens
ctccttccaacctcaaggaactaagagaatttcattcctttctaattaaatatttttcctccaatagataatccacactgaccctatcgagggaaaatctgagctggtgtaactgcaggaggtggtttattttcataacagtaaaacatctaaaccaaatatgccctgtgtttcagcagcttaaacattgaggtctgacaagaacccgagattccactttgcctgccaagggctaagtgtgtatgctgaagcgaaagaaagtgattatgaggaaaaatggggaatgtctgagtgggtgaaggaaaaaaaaagtgcaagatattactagaaaaacctgactgcacacacaatcctatcccctacgcaggagaaagaccgagtgctagcacccggggtgtgaaagcctgcaccaagggacccaggaaccaggcgtgcctccatttctcactcgatttgtttacaatgaacggacggcgccggagtccctccgccctcagctcaggcccggttcccaccgcccgacgctggctggccgaggcaggggcgcggcgggggatttcgggcagggcggtgaagcagggcctgctctacagggggcttttcttcgccgcggtttcttcccctgtcgctgcccggcccccacctcctctctcctcccgcgcgcgctctgcccgccgcccacgcgcggaagcccgcggccggggagggggcgccgtctcccggcatgctcggcggcggtgccggtcacgtgacgggaaggcggccgcccctgtcgccttcgccagcgctagcgggcccgcagcagaggcagtagcggggcttgaaatgctgacctgcacccctggcttgcgctcccccaggcgggaaagacaagggggctgctgttgctgcttacgaaaagaatctcagcgctgctggccgccagcttccggcttgggagaaaggatgtgtttcagtctgggtttcctcatttgcaaaatgggtatactttttgtagggttgaactgtaggtcagcaggctcccaaatcctgtctttccttgtccccctcacccccaagagtaacaacttttaattaattttgttcaagagctaataaaaaaaaaatcttcatttctttggatgacactgtgcccaactccacggtcagcttgcagagcgtagcggttctgcccgaaacccatccgcccaaggcttttattttcctagatctcaaacagtgggagggtcggactctaaatactatttgtttagacccctgaaaatttttgataattcaatcttaagccgaattccgtttacctttacagtatgaaaaaagagtgactacgaaataaagaatataaacattaatagtacaagcacttcagaaaaatgtttagcatgccgtaaaataccaattacaaagcattgttaact

SEQ ID NO: 36076 - DNA, 631 bp, Homo sapiens
caactgcattcatgaagctggccccacaggtaatagtgcttattaagagacatcttattaagacattcttattaagaaagaatgaaaacaaagccaaacaaaatgcacaagattctccaattaactgagggtgctcagtcaattgggtgctcataaataggacaaaaaaaatgaaaattcttcacttaaaaaaatttggccaacaccatgtccaagctgacaggacatttctcagcctaacatcctctacctccttcctactccacctccccaaaatcctttgactccagttcgatatcctcttgagatgttgccaaggtaaataattccttgcagtggttcctaaccagatgcagtacctgcctccagccctagagggtgttttgaaagagagagagagagagagagagagagagagagagagagtgtgtgtgtgtgtgtgtgtgtgtgttgtgtatgttgcacaatggcaaatagtgctccaaggcccagatgcccagatgctcagtgaccttcagtgtgctggacagtcccaaacaatggggatcgtccgaccgaaaatgacaatcatgggttgtttgaaaaaactacccagggaaattgcaaggaaccaacgcttaaatggaaacct

SEQ ID NO: 36077 - DNA, 3545 bp, Homo sapiens
gttctgctactcattatccaagcacaattgggaaacaattttgtctttgtaaacctccattttcccatgtgtaaaaaagcaataatgccctcctctccctgagttcctccaagaattaaaataaggaatccaagacagagacaagacactcatgggtagtgagagagacaagtgaagaagaccctcctgataactcccagtaaacgctgtgcaaagaaatggaagcagagagagctgcatggcattgagcatagctagtggggcatacagcgtaggaggaatgtggctggaaaggccgtgtgtgcaagcaagctttgatttaactgtatgtgagggaatcacaaaattacaatggcttaaacaagataaaagtggttttccctccatgaaaccaagtaaggaattaggcaatgccaagctagtggctccacaattgaggacacagctccttccattttgtggcttcaccgtcctcatggtcttcatggcccagcatggctacctgagctctggctatcatctccatattctcgaaaggaagcagaatgacaaaaaagacatgcctcttctccttccatccgattacctggaacttagttacagggcttcacctaaaatagtctgagggatttctgagtgcagtggcttatgggcagttgtccatgtacctaggattcagggagaggactaaacattcctcatgtagcttgctggtgccagggtgagcaatatggactttgttctcaagtaattgtgattgtgcattttgacatgcctggcagttccctgggggactggtgcagaggcttgtcttttcttcaacccctcaggctggtgcacctccccaggtggcatcttgtttgtttttgagacagagattcactctcgtcacccaggttggagtgcaatggcacgatctcagctcactgcaacggcacgatctcagctcactgcaacctccgcctcctgagttcaggcaattctccagcctcagcctcccaagttgctgggattacaggcgcccaccaccatgcctgcctaatttttgtatttttaatacagacggggttttaccatgttgggcaggtgggtctcaaactcctgagctcaggtgatccacccaccttggcctcccaaagtgctgggattacagatgtgagccaccgtgcccagcctgttgaaaacatttaaagacataaactccccatagctgtctggagcaagggacagcagatgggtcatgcagcacatagaccaaaaatcctgggaaggaggacgctgaggaggaagatgcttggggaaagaaggtcgttgaagggctactgcatataccagggaacccaggctgcaatgcacatgtccagggctggacacatgctcagaaaagatctaagaggaccctaggcttgcacctgtggctgatctttgtattccatgcaagcaggaggtaaagtctagggaaaatggaaagagtggcttggctaagtgtctaaggaatgcctcagctcagagccaatctgccaagatcagaagatttttcttttgtgtttggtccaggtgtttttagtccaggtatttaaggaaatctgtgtcaactgtggctgaccactgaggtaacagatcaaagacttcagtgtctacatataaagaatgcagtctgcaaaaatcatatggaaatgtcactaaacaaagaagactgcagcccttaataagcaataacagcaaatcttgcaaagggcaaagaatctgatttccagagttatcacattataatattcaaaatgaccagtttttttctttcaatcagcttcctcaggttgaaatgtcgtttttaacagcagcaaaaaaaattagaaggcataccaagaaaaaaagaaaagtataacccattcacaggaaaaagaaactgacagaagccatccgtgaggaagcctagacattgaacttgccaggcaaagagggctggactgttcagccctaccccttgacctcctgggtcaatgattttatggccaatgatgttgatcaatcaatggtgcctacgcaataaaacttccataaacacccccaaatggctacgtctggggagcttctgctaacttcaggtacatattatcagaattgaattgaattgtaggacacacacttggtgtctggagaattgtttttgtgtggaataaaaaaaccacacacttggtgtcagaagtgttgtgagaaaaaatagttcagagaagtattccctcctcttctatttcttagtagagtttgagaattggtgttaatttttctttaaaggtttggcagaaaattcaccaagctgaagccatctggtcctgctttaggggaggtttttgattactgattcaaccttttttttttttgtttgtttttgagatggagtctcgctctgtcacccagactggaatgcagtggctcaatctcggctcactgcaagctccgcctcccgggttcatgccattctcccgactcagcctcctgagtagctgggactacaggcgcctgccaccacacccggcttttttttttttttttttagtagagatggggtttcaccgtgttagccaggatggtctcaatctcctgacctcgtgatctgctggtctcaatctcctgacctcgtgatctgcccgtctcagcctcccaaagtgctgggattacaggcttgagccatcgtgcctggccttactgattcaacctcttattggattcaatctctttacttttcctagcttgttcagatttatttcttcctgagtcagttttggtcatttgtgtacagttgttcacagtattcacttaaaatgcttttttttttttttcctgtaaggtccatagtgatgcccctactttcatgtctgattttagttatttgcatctttactctttatttctcagtctagctaaagatttgtcagtgttgttcatcttttcaaaattttcatttcagctattgtacttttcagctccagaattttgatttggtttatttttcataatttgtctctttgctgatattctgtttatacatttattgtttacctggcttcctttagttctttgtccatggtttcctttagttagttaagcatatttaagaccatttaaataaacgtttaagtaaacttttaaacatttaaataaaagtctttgtctagcaagttcaatgtctaggcctccccagggatggtttctatcaatttctttttcctgtgaatgggttgtacttttcttttttcttggtatgcttcctattttatttatttatttactttttggttaaaaactgggcacttcgggcctggcatggtggctcacgcctgtaatcccagcactttgggatgccgaggtgggtgggtcacaaggtcaggcattcgagaccatcctggccaacataatgaaaccctgtctctactaaaaatacaaaaaattagctgggtgtggtggtgggtgcctgtaatcccagcaactcggaaggctgaggcaggagaatcgcttgaacctgggaggtggaggttgcaggctgc

SEQ ID NO: 36078 - DNA, 706 bp, Homo sapiens
aactgggcacttcaacctgaaaaagctgattgaaagaaaaaaaaacctgggcattttgaatattataatgtggtaactctggaaatcagatcctgttaatgcttattaagggctgcagtcttctgtttgtttagatcatgccttagtctttctggccaccagcccctatcctgaagctagtcaggggtccccagccaccagtcatttcattagcataccaacaacattcatcacacctgagattccaaaggttttagaagcttgtgccaggaacggggataaagaccaaatatttatttttattatatcacaacttcctaactcatttattgagtcattatgcttcaccttagggcatatgcagcctcttcacattaggggaaattcagcctatcaagtgcaacactgaaagctaaataacaacaacacaacaacaaccaatcagggatgggcgcggtggctcatgcctgtaatctaatcccagcacttcaggagaccgaagcgggagggtcacttcaggtcaggaattcgagaccaccctggtcaacatggcaaaaaccccctctctactaaaattacaaaaattagctgggcagggtggcacatacctgtaattccagctaacttgggaggctgaggcaagagaatcacttgaacttgggaggcagaggttgcagtgatctgagatcgtgccactgcactccag

SEQ ID NO: 36079 - DNA, 2671 bp, Homo sapiens
aacctcgaaaacatgctaagtgaaagacacaaaagtccacacactgtgattccgtttatatgaagtatctaaagtaagtaaatatagagacagaagtagactggtaattgccaggggctgggggggaagagggcattgggaagaaacttctcaatgggtatggggtttttctttcggaatgaggaaaatgttttggaactagacagaggtggtggttgcacagcattgtgaattcactaaatgccactgaaatgcccactttaaaatggtaaattttatgttatgtgaatttcaccttaagttaaaaaaaaaaaagtaaaactactcagacaacgccaaattattgacaatctcaacctaccccacagaccccaaatcctggaaccacaaccccctaggccaattctcaggtcaggcagcaatttattcctgttcaattttatgcagagctcctggtggctctgaagcgccctagggaacagaccaggaacattctcatggtgttagctcacattgggccattagtgctcctttaatgtgagaacaaccgggaggaggaggggatgtggacccaaaactacaagaaagagtgtcctcgaagcctatgtcctaccgccccacgctgctgccaggcccgcaggaagatgacaggcccggcctccactccttctaaggtcgtcgcttagttccgacgtcgggatgaccctgtcatccacgcggcgtgaaggccaccctccccgcgcgcccgggactccaggtggggccccagtggacgagggaacgcggcgtcgcccaccgggcgtggcctgggcgggcgtggggcggggcctgggccggcgccgggtccggccgggcgctcagccagctgcgtaaactccgctggagcgcggcggcagagcaggtgagcgggcggtgccggggggtgcccaggccagggccctgtcgcctgcggcgctgagggcccggggtggggctgcgccctgagggccctgccctgccctccgcacgcctctggccacggtcccttccccggctgtgggtctgcggcccctgcgtgcgcagcgctcctggcctctgcggccagcgcgggggcggagagaggagagtgcccggcaggcggcggctgggccggcccggaactgggtcgtggaaggatcgcggggagcggccctcaggccttcggcctcactgcgtccccacttccctgcgcccgcctgccgccgagccccggctgggggtgggcgcggcgcgagcggttaaagggccggtgcatttaaaggagcggtgcacgtgggtctctgaggcgtgtagcaggcgggggcgttttgttcttcttctctctcgccggagacctccgttgcgccgagtccattcggcctctagcaccgggtcctgggcatgctttccccgggaaggaggcgcgcgggggctctgcccgcacgtgaggggcagggccgcaggctcaagcctagagccggtttctgttagcagcggtgtttggctgttttatcaggcatttccagcagtgaggagacagccagaagcaagcttttggagctgaaggaacctgagacagaagctagtcccccctctgaattttactgatgaagaaactgaggccacagagctaaagtgacttttcccaaggtcgcccaggtacgatatagcagagccaggcttcgaccccagtgtcctggcttctagatctgctgtccatccctccgagcagacctcacccctgtttattgccttaataagtattccctttgaaaggtatgaacggtgttgagtgaagtaactgcatccctatttacaaatggagaacctgagagcattccatagagacgattgtagactaacttaactcagaagcgacagcctggggttgccaaggctgtctacgaagtaacttgattaggaccgaccccagcttccagtaaggaagcctctgatgcctctgtagccaattctgcagacacctgagcctccaaggccttcagccaagacctttggcggtaattggagtctcgggataagctgcttcaggtgtgtgagcctcaggttcttctctcctgaatgtggttgtgggcagccggtgactggcgcaggtgcagaaggggcctggttcttggccccacctcagagctgcgtcctcacgacgcccacgttgagccttgggttccagggcagagactggagtgagggcttgggggcatgttgctttgaagtgggatggatgtatcaggtttttggggaaaactctgtaccctttggtgttgaagtgcccatgtgccaagtcttgagtccagcatgttcacatgtggggagtgagtggcttgttcctgtctatttgaaagagcagcaaggaggaggaggagcaagggctaggggctgctgctggggtgcctggagctgtggtgcataatgtcacacctgtctcccctccgtagctgctcaccgtccccccaaggggggtttgcctcttgcctactttggcctttctctgttatcgatgttaataatgacatatatctcgcttatgagttggtcataataaaaagctatcttgtacagaatattagaatttaagatcttaagaatttcaatgacactgaaatagtttattattacctttttacagaagaggaaacaagttcagggagttaagcag

SEQ ID NO: 36080 - DNA, 1534 bp, Homo sapiens
ttttatatacatacattttataaggacattcagatgatcaggttcgtaaagttttatgttcggttaaatttaacagcgtgtcattgttcaggttattaaatgtttgaaataagatttttggtggtcctgtcacagtctccatgaagtagcatttcaggatcgaaaggtatgctgtgtttaaagtgttgattcttactcctttcagttaaggccagtgcagtttgtccaggtagtgactgagacccagtttttccacactctcctccgcagtgggcattgttttgggcctttttcagcccaagagctctcttctccccatgccgctctgctggtctgagatttttccactcctcctcctccctagttgctctctgaccagactctaggtattcaggagaaagtgttcattgtctcactctctcatgtggcaatcaagtagtgccaagcagtgagagggtgaaggtgggtgggtgagggacactcaccttgctgagaaagggccccagcctgttcgggtgattataaagcagagacagtgccaggaaaagtctgacactggctgagaatcacccggggaccaaccatcccgaatgcggatccctgacactgggtgaggatggagcttggagatctgcattgttaataagcagcctagcagagtggtgaagagtccagacacactacctaggtccaagggtaaccttgagctaattactttttgagcctctgtttcctcatcagtaccatggggaagaatagtagcaccttgctccaggatgtttagtgccggctaagggctcagcaggtgctggtccatctccaccagcccccagtggcctgggccacctttgagaaacagtgatcctaagggattcagcatttcctaagttggtgcctcccacctgtcacccccaccccaccaggctaggagggttgtgattagagggtgcccttgctgtgacagctgagactagctcttccctgattattccttaatgacagctctctccttccctgctttcttgaagtcttggtcctcgttgttgtgggcacagcttcaggggaggccttggaggaatttttgaaagtggaatgagggaagcagcctgctcaagggaacacttgttttctggtgaggaggccgcatgtatgaatgacgtttgtgggttagaaagcatgttttgtagtttttccttgtttcttcctgaagacatgtcaggtcttgatgagaccgggcctgggcacagggcaggcagtcagcgagtgtggatgatgacgacagtggtcaccaggtcactgtctagaccaggtcactgtctagcgcagtgtcacatggaaagggtatggtcctttaaccctaccctccccagcacaactatcacagatgtcagggaacctctgctcacagaactgctttccagggattgtcttttttttctttttctttttctttcttttttttttgagacagagtctcactctgtcgcccaggctgaagtgcagtggtgcgatctcagctcactgcagcctccgc

SEQ ID NO: 36081 - DNA, 1382 bp, Homo sapiens
aaaaccagacattcattccctgatgcgggagggagaagggaagtaatgatgaggattggccgaaaaggtgggtggctggccatgatggaccttccatctgcagggtttcataggactgcgcattcacagccagagatggacttggcagtgggctgaaggacgctgtccactctgccaccttgggtttacctctctcatgcaggtcactgtttccactgtaataggagagtttgtttggatgcctgggtgctaggacaggtaacacagaagcttaggatggtagcaggggaagcattttttggcagatggccagacatggtaagtgtgagaggagtctgcctgatacacgattgacttttgagctggggatatttgggcttcactgtgatcattcagcccccaggggaggagattgtaacgttagaaagagtaggatatcgttgggagagccacttagttgtgtcctttctctcccgatcagggcagaacatctgaatttgcctgaaccctgttctctgttttgcccattatagaattaaaaaatgtctctgtgtggactgttttcttgcagccagtcttaatcctgcttgctgaaatttgagctcacttctccatgttctccttgagaacggaaccatcgtccctaagccctgagtgaaatcacaccagcttaaggccactgctctgccactcctcagccttttcttgtttgttatctccgggaagttttgtacactttggttgtttcagtttctgttcatgagtagtcttctttcttggctgaacgtctagattgggactctctctgcagagaaccggtactgaagcaactgtcattttcagtttttgtttcatttggctttttctttagctgttcacctcattagcaaggcagcccatgaccttgacttgccacagttccaaaacacaaattcttacagatcggtttgtgctagtgtctggcaggtgtcctgccctccctcgttacctcctcatttgtgcctgcccaccttcccagagcctgcgtcttctcagatgcttaacacctgtttagcctctctagttcagagctacaaatttacatgcttgattctgtggggcagaaagttcaaagtaatttcttcctctgcaaattcccagtatcttagtcacacgcaaagagagtgtccctgtgcactgactcctctagctagtgatttgtcagccaaaaatgtttatttatctcctggcctgtttcctcccatatcagtatggccacatgaacagaattgagtgacctcctgagtccctgtattaggaaggggaaagatcttttgattcattaaccattaagttgattcattaaccattaagtcttgggcctgcagaccatagcaaccttc

SEQ ID NO: 36082 - DNA, 3269 bp, Homo sapiens
aacagcataaccgtgtaagggaacagttactgtaggaggaagcaacggccacccttgaaaggccttgaggcttggtctttttctcctatgtggagaaagggagccagctgacctaatcaaggcaagttgtcaactgtttggggcagttacttgaaactttagccaaaataactccttaattgtcctttaaaatttactttgtatttagtgtggtggagatgggggaggcagaacatggactgcggggagggcatgtgaatgtgcagagaggagcacccaacagccgaccagtgcccagccacagacgccacaaggcacagtctccattctccttggaagaaaggcctcccctacccctaggaagaacggagcctgacacagagcttgtgttcgcccatatcacacacacttagaattctgttcttgggaactcaggcagatctctggggagccgatgggggactgtgaaattaggttcacttctggatttcattataataaagcaggcccctatccccaattttaggcatcaacatagaacagctaactttaaatttttccaagtgataatataaaacaaacgactttcaattaagttaaatgtcaatatttgtgaaccgaaaagtacctgtatcagtttagaaatttatgttgcgaaggtgaaggactcgcgcccagaagacaggtctgtgcctttctccaaagatgattttgagggcttcaatatttaaaggggaaaagcaggctggagggggaagatggaaggtatgttcacattattgaagccacatgttgcgataaagggagcaggtagggcaacagttatgtatttggcgctcagtaaatcggcactttacacaagataaggtgaacatagagtggagatacttcacctttaatctgtagctatctgcttaggaacaaaaggaaaggcagttgcatgactcagctttcagtttaattttttttccttttggcagagtgaattttcgtttcacaataccaaaaaaaaaaaaaaaaaaaaagcggggggaggctcagaataaggaacaatcctttggcttgagtatttcatttcatgaaaaactaaattgttatttcttttttccacaagaacgattaacagagctgcagaccagtgtttggggtcatctgagtggaaattgtcgagccgactttggctcatacgttccttttctcgttaaggagggagtgacggggcaaatctgcgtgctgctggtggcggtgcctcccagggctgctcggcggggacgccgagggctgcacccgagctccatcccgtgttggctgcgcgccctccaaaaccccggctgtcagcgactgcgggcacctgcacgccgacgagaccggcgggcggacagcgactccggtgagggtactatctctctaccctcggggcgcgggtggcagaggcttcctgttttgaggatggcgccacacaaaacaagcatccttagcctgaagggccccggccgaagggccggaagtggaagtgcgcggccttgcccgccgcgtttcccctcctcggagtgctttttgtggaccctgggcaaggggctcttgctacatagagaggagcaaagaacaggcatcgcccggtccttaaagcggcggcaccctccacgccccgcagtcgcgtctgcttggtccacagcctcccctcccaggcccgcgcagaggcccagcaagcaccagtctggaggcaacaagcacgcaggggtgcctttgcggccacgcacactgcatcgcagtgaaaaaggctcccgttctcaaggcgcatgcgcgcaggccagcaactccaaagccaggcctccagccccggtttgctagagagaaaggtagccgggaggtggggaaaaggagaacaggagggccctgtccgctaaggtagcctcccattggctcctcttgctccgctctcggtcgcgattggctacgggccgggagcacgggccgagcacgctcccacgcgcagagcggcattcggcaggcggacggcggtgcagccaatgggagcggcccgcggggcggggcttgtgagctggggctcccccggagcgggcgagttggtaaacagatccggagcgcgtggcgggcgtcagcgcggtggccagcgcgcagaggcgggcgcggaggcggctagaaggtgaccgcggatcccagcttcctgcagccaggtaaggctgccacccgccggcccgccgcgtgcccaggcgccgtctggctgcggccagagctggggtcaacacccacctcagcccttcttgcattctcttcatgtgacagcgcagcttccccgcgagtttcgctggccgcgagcctcaggtccggacgcagtgggggcgcctcagttgcagggtgggtcctctgcagccgtctcacgtccctgggtccacctcagcccctcgttcctgcttcggggaggagacgagggccacgtgcagagccttgggtccctggaacacgcccgctgcttgcccgaccgccttcccgctgccgaatgcccgttgcccatgccctttggtcgccaatacagctttgatgcttcgctttctaataatgttgttcttcactcccagacccccttgcactgtgtgtctggggctctaggctcgttgccgctggctgcaggtttgggtgagaactttgacttccttggctggagccagctgttgggcttcgcaggtgggaattttgtgtgaacttgggacaggggatcctttttgatcctttcttcctttcgcttttctttggcctttcctcttctccaaactctggggggtcttgtgagtggtttgggcttactcccctaaactcgaacctttccgaggctcattctcacccattgcacagaggtaacagcccctctgccaaaccctctttgggcgatggggagtgctgcaggggcaggtttgggtgttgggactccccatttgggtgagagatgtcaggttcctgaagggtgagaggcttgtgtgcagtcttccagcctgagtcgggcctacagcctgttgaaaaacttgtgcacgttcacttgggccttggatctacgtgacaggattgagtagctggtcatgccaggcctacctgattgccaaaggatttgaacattccttgatgccagcctgccagttgtcacgctgtggatgggtaggtcatcctggcaggagggctcttgggagactcttcttttggaggaaggcctttctcccgaggagagacaaaaggggagctacaggagcagcatc

SEQ ID NO: 36083 - DNA, 2927 bp, Homo sapiens
tgggaggagattggacagaggcaggggaagggtctgagagatgtggccaagaatgtgcgggccctcctatctggttgcccccatttctggagtaacaaaggtccgctaaagaggggtcgaggccttctgtttaatgtgagagggccaggggtgggggcttgaagagccttaggtgcctcagcatcctttgaggagttgtaccctgagagagagagagagagagagagagagagagagagagagagagagagagagagagagtgagagagagagagtgagagagagagagtgagagagagagagtgtgtgtgtatgtgtagaagggaggcaggaaggtaggtgtttccgggtcatttggaaaagcccagtcccttatctctccctacctctgcaccgtccactggaattttccatttcccagaggtgtgtttcctgagagacagagaggctgtagcgcccctctctgcctttctgaagacagcagggttggtctgcctcttacctctcactatttcatagaatctctagaaggatcagtatctgcgttgttttgagcattactctttctagaccccgttacatcccagctttcagaacagccctgtgtgtgctctccttgctgactttctgcactccagggatgcatggccctttcctaatctctgggaactagacctcctccaggtcagtcgcctcacttacacatgaggaaatgagaaaacgcaggccccaagaggagaagcggtgtgcctgaggtcacccgcgcttggtggccttgctgttggtcctccccgtcggccctcatcacaatatatgcggtgtcatctgggaactggaggacctggtggcaagtccctgctgttcacggggctggatgaggggtcctggggacagtccacatgaaaagaaatgttaaagttcaagctcagagcctgggccccagcccagtgtttgttctgtgcttggcacattttttgtttggcactgatactggctcagaggagggtaaaagtaagagtcgattgcccggtaagctgaaggtggttactgtttgacacgtgcttgagcaaacatctctaatcttcccgagattgaaaaaatcctgtggctcttgctccctaaggtgtttacagccagcatgtggtcaagggttggacattgtgctgccgcgatgcctgttgtagctgctgtttacacctgcttggtgctcacggttcatgggccagggctgattggcctgctgaggaacagctgcctgctggcttcagcccctcctcttttccctcagtcttagacagggacgggggtgacgcagaggaagcagtagcagtgactgcgtcccctgctccctccctgggtctgtgtgcccaccatgagcgggattatgaagctggcttggaaactcatctggcttttgctcctgtaaaaatcactttttgaacagggtgctgctgccatttctgtggctgtgcatgttggggattcaggttcccctggtgctcagcctcctcggtggtctcttcagtcctgggctctcgatgagggagctcaggaagccacggagcctgggtgcctgggtcctgcctcactgactcataatgctaataaactcgtgtgtatgaggacagtgccagaccccgttgggggtacagaactgggaaagagagggcccctccctccggagcttaccttgcagtaagggaaatgggacaggcacacacagagtcatacagggcatggcgaggtgaccttaggccattaagagatgagggagtttagaggaaaggagatgacttgcctatggaggggtttaccagtccagcagggtggccaagattccagcaggggaaatgatattccatggggaggagggagcaggatgtggaagctggaaaacctgtgtgggtgttgggcggggccgggggtccattctggctgaagcgttggggcacggaggcatctagcgagaggtatcgctgcagaggtgtctggggctccacagtgaagggccttgctggccaggccagaccagggagagtggagatcagcaaggagatggccacctctcctgggtctgtggtccccttgcaccctgctgagcctcttctcatttctcgttgcgtgtgtggttgttgtctgtctaggattgccccttgtctgggttaactgggtgattttaaaagctatcgaggttttacatacacatgtagtgcctaagggttgtgtgtgacctcagggcagaacatgtttatttaacttccataccagtgatgtgtgcatgtccacacctggcctgtgtgtggcatttggaggtgatgctaataaaggttggtgctggtgttgagtgtggcaagactgagggccgtgtgcccgatggctcctcctagctcttgcacacccagaggcagtcttcagtgtagggcgtctgcctctttccactatttatgtttaagatcaaactggctctggaaccaagctttgcctctagtgggtaggatcactggtgctgagaattgtgataccctcagtcctggcagctgacaaactttccagagcagggagtttggccagatggcctttgagagcccagctggccccagaatttttatgactcaattttctgtaaccaggaagacacatttcaggatgtaaaccttgctgatgtctcatattgagtgactattgatttaacaaaaaaggagttattgatttggggcagtgttcttctctgctatctctcagcttcctaggcagtaagaagaaaggactggagcctgagtcagacaggtgtggaagggtccagcatcccacagctttggcccttaggagattgctcagccttgatgagctttaattatcctatcaatgagtggggataatacctcaccaggtctttgtaagaactagaggtaatataaagtgacagg

SEQ ID NO: 36084 - DNA, 684 bp, Homo sapiens
tataggtgaggaacccgctgcgggcgtagtgtgcacttggcctggccccggctgggcacacagtaggtgctcagtgtcccacctaggaccacacagcagagccccaacagaagcagggctggagcccaggtcccggctcccaggctgggaagggtgccgggcctcaggtgcagcactgtgccacctctggaggtgggagggggcgggatgctggtggtgtgctgtcctgggcagcaggggacaggcagggaggagctcctggctcgctcttgctctcctaatgctggcctttgctccctgcagggtcaggataaacatgaagaatattttgctgagaacttcggcggcccagaaggggagttccacttctcagtcccgcatgcagccggagcctccacagacttctcttcagcctccgctcccgaccagtcagcgcccccatccctgggtcatgcccacagcgagggcccagctcctgcctacgtggccagtggaccctttagagaagccgggttccccggccaggcctcctcccctctgggcagggccaacgggaggctctttgcaaaccccagagactcattctctgccatgggctttcagcgaaggttcttccaccaggaccaatcccctgttgggggcctcacagccgaggacattgagaaggcccggcaggctaaggct

SEQ ID NO: 36085 - DNA, 511 bp, Homo sapiens
cagagactgatgtggaaggggttatatataggaagatgtgtaggaagaaaaaggtagagagctctcctcagagggtgggggattatgggtagccagagggagcctgggttagtggagttgaagccctagtcttgggtgctttgtagcatcagaagcctctggagcctttgctgacacctgcctgatgtacggagccatctgtgggtgtctgtgtgctggaggattgcccacagctatgattcagagatgctcatgttgttgcccaagcaattgacagatgatgtttcaggcttggagatggcaggatgggagcaaagagaagccaggtcaggaaagaacgtgccgttctggccctagtggggaattctgggccttctggctcacccagttgaacctttcaaactgtaggttatgaccctttagtaactgtgaaattaatttaatgcatcaggatcagcatataaaaaacaagttaactgtaatctcagcactttgggaggccgaggtggga

SEQ ID NO: 36086 - DNA, 1497 bp, Homo sapiens
gatgaggattgttggatgcctcagtaaaagctgggcttagcgcagcgcctggtttatagtttgctgctgtttagctgtatctttaccccttgctggtagagaaactcccccgagcccttctctgtaaacaggcctagtttctggcaggtaaagccaaagccccaaggaactttacttactcacccctgcccttaagcacttttcacccagcctgctaggaagggccctgtttgttggaagttgtttgatgttttgctttttttaacctcctggtgtccatctgggcagaagccgagtgactgcccacaggagggccctgtttggctctgatgacctcctagagggacttttgggaggatggggccttgtgggggactgggctccagaagtcataggaggttggcctgcagcctgtgttcctgcctgggggagagcctgcccctccctcccctgtcattccttcattgcataacttctctcggagaaacatgtcagaagctttcctggaacaggccaggagggaagcaaggctgctcacagtggctttagagcctggagcttgtgctggggctggttttcctccaggacgaccttgctggccacgtgggccaagccgggggcgctcttagaatgtggatctgagcagggagaggtgtgaggtgtcctgagggctgtgggggtgccgagtggggtcccacgaggacccggggagtgccggctgaggtgctcatcttctggagttgcctccagtgctggctggttctaatggagggcagaggctggcctgggttcctgagcaatgcgctgagtctggggcgggagggcctcagtttattctgggttcactggtgcaggagctcgtgaggccaaggtcagggttgctggccagctgggctggtttctgtcccctggggagcctgcctgtctgtcagtgggcagcgccttggcctggcactgggctggtcggtcctgagggacgtgtggggcctgaggcctcctctgtggaatgttcttttggtcatttgtttaataacaggtccttgccagtggagagctgtgtgcctgaaagtggccagagaacagtttgaggggggtcctgatggagggtgatgagggggacacacctctgcctgcagaaggaggagctcaatgtggcccaccctacagctgtggcatctccggtaacctgtggatccacctgcccctctcgtgggcttgtctctggacttgcttcaggcagagaagaatccagacacagagagacattggtgaaggtcactgcagtgcacaggctaatgttgcctgtctccgtttatttcgctaagtcagatcgtgtgctcgagtgctggcagggcagaggtgggcaggcatcagggagttaatgtttaaacggggactgtgtctcccagctctgagcccagggctttctacagcgagagaaagagctgatgtacctgccaggcacccccatcccaacacagcagacatctgtaccat

SEQ ID NO: 36087 - DNA, 632 bp, Homo sapiens
ccaaacaaaataaaataaggagtgataggctaaagcagtatcttcccctccatccacatttgtcagcattatattctaaccaaaaaatgatcacaccaggccatgcaaaactgtacaatattacgagaaaaaccctaaaaaatttataaaatgaatgatattacactatcaaataaaaagacaagtcattttgttttcatgagatttcaaggttgatttgagtcagcttcccccggaactgcacggtgtcctgtgtggggagggcccagcgtgctgccagtgctggggggcagggcttacactccttatctagcagaagtgcacagagaactctggacttgagtaacaaagtcataaggaaagagattttaaaatgggctccatgaaatgcagctcatctagttcagggctgggccagagagacgggggagtggagtgcccaattcattccctgttgtgctcaccagacatgggctacggcaaagtctgctctgagcgcccctctgtctagattggatggggagccttaggcttggcaaggcctacctgctgggagactgcagtggttgtgatcccggccaaaggcggcaaatggccctgctgcgtctgtggttttgacctctgctcacccc

SEQ ID NO: 36088 - DNA, 1569 bp, Homo sapiens
atggagccggaggccattatgctctgcaaactaacacaggaacagaaaaccaaataccccatgttctcacttgtaagtgggagctaaatgatgagtacacatggacacatagaagggaacaacacacactgggacctgtcagaggacagagggtgggaggagggagaggatcaggaaaaaataactgatgggtactgagcttaatagggcgatgaaataatctgtacaacaaatgcccatgacacaagtttacttatttaacaaacctgcaagtgtacccctgaccttaagaactgtttttaaaaaagacttctacattgaaaactgtttttaaaaaattaataagtggcacacataggggcccaacttaaaagtttctttgcaattaaatgtgaaaaaggtagtctttaaaacaaacaataatcagaaaccacaaagaataaagtgaactttgacctatacctcagaaaacacaaaacagtcaataccagagagatgagacatctaaatgtgaaaggtttgtcttgaaagatcaaagaaagaatttattttaattattggaaaatatgttcatgaccttgaggttagaaaaaaacttcttaaaaacacaaaaatcactaattataagtaaaagtttaattaattgcactccattaacattaagaatttctgttcaatacaagatctttggagagagggaaatgccaagccacggaaaagatttgtcacacacacacacacacacacacacacacacacacacgtgtgcacatctccaacaacagatttgaatctagaatatgacgataagtcagacaactcacccatgcaactcctacttacccaaccccaaaatgtgtacttcatggaaaggatatctaagtgatgtgaggtgatatgaaaatgtgttcaaatgtaggcgctatcaagaaatgcgaaatgaaataacacaatacggccactcactcaccaaaaaaaaactaaagtaaaaaaaaaaaaagacccatgttagcgaggttataaagcaactgggacctttatacactgttgacgggaatataaatcattaaccacttgggaagttatttggcattatctgctaaagctaaataagcctaccctgtgacccagcaattctaaatttgtatcaaacacaaataagtgctcatagctcccaaaagatatgcacaaaaatgtttctaacagcattattcataatggccaaaaaccataaacaacttgaacaccattaataaataacttgtgacatattcatattaagaaaaatactgtgaaccagtgaaaaacaagaatgaattacaaaagtgtactgttgagcacaagaagccagaaaccagagtatatattacataattccattaacataaaactcaaaaacaagcaaaaaaaatctatggtgatagaagtcagaatagttaacaaggaagtgattattcacatggtgggggggggcaatgggagcctatcagaatgctagaaatgtactatatcttgatctgcttgatggtttatacaaactcatacaaatgtaaaaatctggctatggcc

SEQ ID NO: 36089 - DNA, 3754 bp, Homo sapiens
catgggatgtaaaactacatatgctttacaaaatactttattcaacaaataaaagacgtatactcacaaaaccagtaccaaagccaaaattgtctcactcttaagtgagaagttacttgaaagatggtttagatttcttacattcccaggatgagtctggcagtctgttttgaaaagttattctattcacatttacatatttttttaaaccttatgacatcacattgctagaaaccttcttatactggcaaattgaataattaaagttattacgtgtagacattcttgtatcagtggtttacctgagaaactaactttgaataaatttcaaatccaaaaaaaaaaaaaaaaaaagacacaatcagcacttgacttttacttcaggaaaataaagttttacttgggaacagatattttagcataagaacttagcataagaacaaactaaaatgattagtattccaaaggtacaaaatcatatttggccaaaatccttcaaaagccaacgtaccactactacagacagatctgggtgacgatgcgtgcttattgcaacagtgaacttctggaccttagaatgtgccctgtatgtaacagcagacgctgaagaacttgagccaagccttcaagcttgaaggtcatggagcgtttgctcacatcattgatctattccactacagtaggtcttctaaatcacatctatatttagaagaatgaagccaaaaacctaaccagtttagatttaaattaactttcgagtaaaatctaactctcaagtggaagctgcccccaaacattctctaactactatcacaagatttttaaactatgtcatttaatcttacaaacataatttttggaaagtccatgtttagcagtttcctttccttgtactatgtagagatgaaataaaacccactgatcaccaccttcagctttctgttgacctaaggcaaacacagatattttaatatctcctcctattttgagaataatttccatagtctgaatgtttccaccaataaatacctttcaaatgaaggactattatagtgccatgtattaggcaactgtaaccaataatccacttttgcccatcacagaattgatttaaaatctcttactgttgacctaaaaacataagttcttcatagccaagttccacattagctaggccttaaatcaaggcaacaattgagcagcacaattctactcctgggaaaatatttaccaaaaactagcggaaaatcttgaataactagtgtctgtttttttattgtattttttctttgaacggagtagagtttactcataactctctataccaattaaatcataatgaccagctaaagattaacagtttctttaaaaattacaaacttaccccattctaggtattcgagaatgttcttctctcttctcaatggagaattattgcattcatcataaaggcagatgagtatatccagtaatgtctccacactgaagcactgcccattggtctgagcgggcccgtccaaaataaactgctccaactgcctcaaacgcacttctccagacatgtttgcttcgatttctgctggttttcctttaaattattatgatgacttttactattatctgaacctaaattttaaaaggtatggttttaaaaataaaccacttgttattcaaacaactgtcatgcaatgctggtgctgaattaaacatccaacacaccagtaacctcacttaactgaagcgtcttcaatttcacccatatacatatattttgagggtaaattaccataaaatatatacttaatgcatttttaaaagaatacaattaagtcgtatatttaaataaaataataattaaaagtacaacgaactagagagtcaacacttctttaaaaaaaaaaaaaaaaactcttctccttcattcaaaattcaactcgtgcaacgtaatcctgaaacgaatccggttgcatcattaatgaataaagtccgatttgcatcagcaattcacttcccgggaagaagaaaaacagaaaagggaggaaaaaaacagaatgcatagaagggggagggaaaaccaaaaatgttgctgcaaatcctcccaaccaccacttggataatgcatcagcggcaatttctccagcgggaaagggagggggcgaggtccctgaagcagcccctcggctcggagcacgccaagtcttgcccggaggcggcttttcgtttctcctcccgaggtccttctttctttaaggctttgcagtcagtcctattttcaacggattccggtgaaaactcttcattttcctcccggcttcaccctagggcctgaccggcggcgcggccgggggtggaaggcgggctgcgggcggcactggcaccgggctccggagaagcggctacttggccgcccgagcccactccatgtcggtggtcgctcgtgggccgagccgcgccgcgccgcgccgggcagagagcccggtctccccgacacccgcaccgggccgccgcgccggaggctcccgacgccccaggcgggggggtgcttctctgaattcaaaggacacaagcagcagcagctgcggcggcggcgcgggcggctctggcagctacttctcccccttcttcacacccctgggctaagggcatctttccacagcgaggagggaggcggcccggcgcaggaggaggggtcgcttccgcggctgaggagactagaggctgcggcagcccggctcccaaccactcccttcctctcccttccagccctcccccgccttccctctcctctcgcgctcgcgccctgggctcagcgaggctcctccagtcccgccgcacagaggcggaggcttgcggacgagtctggatccaatatggcggcctggccccccggccccggcacacgcgcgcgcacacgccctccactccccgcccccgccctgcccgagcctcagccccagccggcggccaagccgggcggggtccggccggcgcgcccagcggaggcccccaagggggcgcgggctcggggcccgagtggctgcgccagcccgaggggaggggtgtggactgcctaggcggcgaggctgcggctgccgcagcgtggaatgcggagctgcgggagggctgagggaggcccgggcggcggtggcggagcatatggaggcgggatgaccgggccgcgccgggagctgcggcgggactgggcgcaggctgggaactgcgccaccgccgcgccgtggccccggctccccgaggcttctggtgcagatcgcgaaggggggctcctgctcgtcctcggagacatcacctgtctggcgcgtttgttaagggcgcccagaagcagagggctttaggcttccgacagagctggaggagacggtgcctttcagccccttacctgctccccaccggccccccagattcggttcgcgcacactccagagtaatcgtttcttaggtgtctaattacagcacttcgtgtgtcatttcccaggacaaaaacaatgacagacttgtccgagctaccatcgaagtcttgggtctgcacgcaaaggatggaatcccccatctccattcccaaaagtttccctacgggagcctggtgttgtctcctccggaactgtcctcgcggctgcctgtttttccctagccatggttactgcctgcgggggattcagcctgtgaaggcagtcaaggcagttcaccactgtcatcaaacctacacccctgtgtgcatgcgcacacacacttgtaa

SEQ ID NO: 36090 - DNA, 1157 bp, Homo sapiens
agcagcaggaagctattcccacccctaggctggtggaagctaaaaccagggctggtgggagatggagccacagaagagatgcaaatgctacaggggaggctgccatagtcagagagaggggaggagaatcctcttaccacaaatctcctgtcatttgaagctaacacggagcctctgaaagggaggctgcatgactggtccccaaagacagagtagagcaggcaatgggtaagaaatgaatgcaagagcaaacaggcagaatttgcacacatataatcaacacagttatagtttaaccgaaactataataaaatcaataaaacaaatgttttatctctgaacaaccattaagtagattttgacgtggcattatttaaacataggagaagtttttaccttttccttttcaaatttgttttttgttttgttttgttttggttgttgctgttgttgttttgtccctcaagaagttaaaaaacaatccaaccctcattagggcaggtttacttaggtatacagactaatagtttccacttgcttgtcaatggatcttgtccatcttgccctatctttaaatttatcatttaaaatctctcactaaagctctactataaatgggactttccaaaatatgtttagaatcaaacattataatacagatattgtcggctattagagctacttagcaaatttgaacactgcaaagataagtggcattctttcataaattctatcagcagaaaacatttgataaagactgtattgcaacgtgtggtgacaaaaccaaaccaattaagccagtgtgaaccttcggtcctgaggtgggagtggaggtgacacacccaggacctacagaggctggcagccaaggaggtgaaagttgacgaattcagttaccacactctggaaattgctctggccaagattgccagtgacttccacattaccaaagttaataggcagtcctcagtccgcatctcatttgccgctttaacagtatttcacagtgctgatcacttctcttaactaaaacactttccttcacttaatttccgcactctcctgattttctcctacctcactggccactctttctcagtctccttcgctggatgatccttatcttcttgatcttcaaatactggagtggcccaggg

SEQ ID NO: 36091 - DNA, 569 bp, Homo sapiens
actttaaatcaattctttagtatcttcacataagtctccccctaaatttccggtttttagaagtgatttttatacttacccattgcataaacctggacaaattcttttcttcatttatttcaatttcccaatatataaaagagttaataatgtagctaccacagagcatattgtgaaattcactgagaaatcacagagatatgctgctttgggaagagcaggaagaactccgtgaataataggttgtaccaatcttcctccaaacacttctctgacaagcacacaattctgacacatatttctgcagagctctagggtttcaagttttctccttttatgatgtaatcattctccatgaagtttagtcatatgctgctcattttcagtgtctctattttctaaataaaggcatgaatagaattaactcttggattctagaaactacaataaacctaaatgtgtttaaagaaaacttaatgaatcatcgtgctacccctcccccataagactgtagaatgttagctttaaaaagaatacagggaacatccagtccaatctttgcattttat

SEQ ID NO: 36092 - DNA, 1628 bp, Homo sapiens
gggtcaggtagacagactgcgtccccttcaccccccaggtgtgcgaaaacacagttgactccacctgcaattcggtcctgccctcttccacctgaagaagacctgctcacaccccaggggtcagctccgcggcttcttcttggtgaagcctccctgacatcgcctctggcactgataccaccctctgagccccagcacagtcccagcaaaagccgcgcactgtgcaacagaggcctgcgctcgacctcgcggtgcactcagcaggggctgccctcggtcccaccgtctcccttaacgcccctgcctcccagtcccacggcccccaggaggagccagtaccctagcccagggagccgggttgggcgcggcctggggaccgggcgtgggaagctggcccacagggtcgcccctagcaaggaaccaccagagcgcgcatgcgggagccgaggccgcagcactgggtgggcagctagctcaccgaagacccacgcagcgggccaggcgccagcggccgctaggtctgggcgcggggccgggccggcgagagaagggtccggggcacccagtgggctcggatctcgagcggtccccgtgacggccccgcgactgcgcgacttcccgctctagagagtttatggaccctgtcccaggagggctccgcagccgccagggaggtaccggagggaccgcggcgctgggagagggtggcgccaggcggccctggagccctgggcgacgcggccgggccggccagagggcggagaagtccaaagcagcagcccggacagccgcttccgcccctgcgccgccctcccggcccaggtgaccggtcgccctacccggggagcagcgccctcctcctcctgggccggagccgggcgtgggggtcgcaggctggtgccacagcctgaggacaccgcggcctctgccccggggagcacgccaaatgccggacggagcggctgttgcagacggtgaggccgcagccccgcttgagggtagggtcgggcggggtgtcggggtcctggcagaggccgcggcgagggcaggagccggtgcgctggccgctgcacatgcgccgcccggcaccgggaccctgcgggcgcgccccctggtggcagccagcgggaggtggcgtccctgtccccagccaggcggcagcgcgaagctgcctccccgcggggggagcggaagtggcccagctgctcgagtgacttactagttaaaaagctggggttggagctgccacgcggggaagtgtggaggcctgcggggctccgcctagactttctgggtgtcctcctgggacctcaggttcctcacctgtcgcagaggactgatgggctgctatggcagggttgtttggaggattaggccaaatagtcccagtaaagccccattagcctccctggcctctggatttttttttttttttctggcttgggtaactgcggaatgtggccaggtgctgaagcgggaaggctggactctccctaggcgtcggggttccttcctggcgccccctcttcttaggctcttttcaagcacatacccggcaacgtgtgctctacccaagagcgcttcacagatcttcctgtgggcctaaaaccagaacgctttgttccctg

SEQ ID NO: 36093 - DNA, 1088 bp, Homo sapiens
gatgacgttgtttagacactcaggaacagagattgcagattggcttaagagtgcgccctttattaaagatggtatgcatggaaagacatggaacaattttggaaggatacaaaaaaaattgcccattttgttaatagtctcattcaacccctttgctgacctcatctcctgtcactcataaccaaaggaggcgggtcctggagccctgtccaatcagggacattgacgtgggaactgtccaatcaggagcgcagcttgagaggcggagggggtttccgggatctggcggggcctttgtcttgtgctccagctggagctttggtcccgtattctcggctatttatccccagctgcgggaggccctggtgactctgctgctgcagtgtctggtttccctgtgacctgcaggtactgggagttacatagctaagatgccaggacaccccgaaagccggaaaacggtgagagttcccgggagggtgttccaagatggcggtccggcctcccggcgtcagcactagagtccgcggcccggagtcccggctggcacctgtgggatctgtcacctctgggtaggggcggggccaggccgccgcgggattctcctcccatcactgcgccgcggcttccgccccggcctctctgggcggctatgaagccgcagccccgcgggtcccccagactgtgtgctttgtccagaggggagggtcatcggggagaagccaaatcggtgtgcgaaacatgcgtgggaagagctgttccatggggcttatcttagctgtgcagtccatcctttttcctgtgaaaaatggagtcacttttaaagctttgaagagtttgaggaaagggagtttcatgaatgggagagcgcccagctatggtgtgtggcttgtgggtttatggaggaggtgcttgaaggaaaaacttttttgtaaggtgcatgaggaagcaagccaaatttaataattgacgacagttacagtcaccttatttggactgtccaggtggaaatttcctggttatttaattactgattaattggagttttgtgattggttgaacttggattttgtttctacttaaggcag

SEQ ID NO: 36094 - DNA, 1401 bp, Homo sapiens
catttcttcttcgaccttttcataagtttgaagtgcactgattgattccacatatttaagttgcctggagttccttctgaacagacagcagcctgccgggctgggagaacaaggacctggggttgtacagtctgtggcgcacagagtccctgctggaaccacaggcggtgagtcaacgggcacctccgggctaggaggttttcccaggctcgcctcattgctcctgcacctgcagggttcgctggaccctgggcgtcccgctgcccggaacacaagggtagggaagggttgttactgggtttcttggctggggctgcagggccggtgcttgccaccggagcggggggggcgggccccgctgtgctcagaagggacctgaagccagggaagccccagggtcgtcctgggccccgccgcccgccctgcctgccccgcctgcccctcccatcccgtcctctccccgcctccctcccagccccgccccacctggctctcccgccccggtcccgcctccttcctcccgcccctgccctctcgatccagcctcccgccccctccccgcctgtccctcccggccccgccccgcctcccgccccaacctagtgcccgacaggaaacctcccacctggcactgcccccaaccaaagtcatgagggcaaggctccggttcctgccctcacagggtcccagaagcaagggcagtgaggacctggcccacgtccctggcacgggctgtctgattctccttcgctgtggcgggaagatggccggatttgaaggtaatacccaagaccccgattcccgacaggagaggcgaggggaacggtctcgggagcaggcaggccctgccgcggagccgaaggcctccgatgggagcaggcacgcatctctgagtggggccgcgggggtggacactctggtgccttcacgcaggggaggggggcggcaggctgcagaggaaggccaggatccacgagctgcggctctctaggtggggcgaggggtccaggcggggtctgattagggcgtggggccccaggtggggtctatctggggtgtgcgtctgcaggattctgcccgtggattttcctctagcttcaggacagggtttggctctcccagaggaacagggtaggagcccagctccagctgttttcctgtaggtcagagcctgcagtgggagggtaactggggcctgtggaaggggacttctggggtcagaccccaggcaggagtgagaggcccaggtccctggagttcctgcctccagggctgctgactttgggggtacagacaacaggacactggacatcttggtccctacccttggcttctaggccagtggaacaagtcactgacttggaaaccagggcctgccttctttctgcctggggacccaag

SEQ ID NO: 36095 - DNA, 2218 bp, Homo sapiens
aaaaaaaaaaaaaaaaaaaaaaagccgggagtggagacgccttcctgtaatcccaggtactagggaggctgaggagatctctctcaaaaaaaaaggaaaaaaaaccatattgacctcccaaagaacaacacttgcagccatgcggaagacaatccagtttcttttaaactgattaaagtgcctcacggggaaaaatagctccgttgtgcacccaggggccaccttcatcagaaaggcctctgggttcacgcagcgctagggaaggcagcgcctcggtgcgtcccaagccccattacctgcacaagtgccagtctttgaggtagagacagcccctgggagaggagtagcccgcctgtatgtactctttccagtaggtgatgtagtctctgagagtcatgtgctctttggggttcgagttgtattcctggaccccacagtttgcaactggtacaaccacgtctcctgaaatgaaaggcacggtccatgccatctccctgggccccgtcctcactccaaaccgtctgcagaggaactctccaggggccacgcgcctggcctccctcaccctccctggtgcccctctctaggcgggggcctcccgggcctgggtcccgccggcctttcctccccgcccggggtctgcggccgccgccccaccgtaggtccgtagcaggtggtcgaagtcgggcctccccgcgggcgtcacccagcgccgccggctgccccagccctgcgtgaaggcgctggaaaacacgcagggcaggttgggcagcaagaagccccgcacaaagtcggcgtaggagaaggcgcccggctccgagacgaaggctacccggcccggagcctggccgacgccggggacatcgacccccaggcctcggaagtggctgtcggcgagggcgcgcgtctcgcggtccatccagctcagcacgggtcgaaggaccctcctcctcacttccgccggagcggaaacggtgaggaccagcctcggaaccagaagacgcagggcgccgcgtttctgccccgccagcgcctggggctccgggcctgcacgcatgcgcgcggctcgccgcggtcttcactgcgcaggcgccgagcggccgaggcgccgcggtcggctctgggactcgtctggcgtccctcaggtgagcgacggtgttggtctgttgggcgcccggcccaagccaagccgtagcgtccgccctcggctcagtccgcgcgctgtggctgacacagcccgagccctccttcccgcatccccggggggtggggggtatgcgggctgcgctgggagaggggcggggacagaggcggttctgggggcgggagtgcggcggtgcgggggcgcccagggatgatgggacccggagagaacggtgggacccagagggagagctggggggccctgggatggtgggatctagcggagatggtagggtcctggaggagatggtggggacctggagaggacggtggcacttggaggggatggagacgggatctggaggggacggtgggacctggaggggatggggacagtggggacctggagaggacggtgggatctggaggggatgggtacagtggggacctggagaggacggtggggacctggagaggacggtggcacttggaggagatggggacattgaggacctggaggggacagtggggatttggaggggacggtagcacttggaagggatggggacagtgggttcctggagggatcagtggcacctggaggggacatgggatctagagaggatggtggggacctggaggaaaatggtgggagggctggagggggcagggtaacctagatgggcgaatggggcccacaggggacctggagggcatggcaaggggccccaggggatgacgggtgtctggagaagatggtggggaatgagggagggtgtgaaatgaaggtgtggtgggagtgtgggtagggatttggggctgtgtacacatgagcagggctgaagtgggaggacatcggagtagtgacatgaggagtgttttgccaaacttgcaactggagttaccccaaaagtggcggcaagggagttccccacactatcctcaggtgggaccagttgggataccaaagaaagaagtgctaaatgcatggtaagcccagagcagtttttttttttttttttttttttttttttttttttgagacagtatgcagtggcaccatcacagcttactg

SEQ ID NO: 36096 - DNA, 1377 bp, Homo sapiens
cttctcaacagtactgtgcgttctagtttctctcctcttctaaaatgtgcacttaaagctatcactgtcatcatttcagttgctcctaaactggaacctcagtcacaacttcaggtcacgacgcagagcctgagtcacagcctcagggacctctacaaagcctgagtcatagattcagttcaccatacagagcctgagtcatagcctcaggtaagctcaagctgatcatagtgggggctgtgaccccagtcacaaccttaggtcaccatagacagcctgagtcacagactcaggtcactatagacagcctgagtcacagccccagttcaccacatagagcctgagtcacagccccagttcactatacagagcctgagtcacagcctcagttcaccacagagtctgagtcacagccccagttcaccatacagagcctgagtcacagctcagtttgccatacagatcctgagtcacagccccagttcaccatacagagcctgagtcacatcccctgttcaccatagcagaaactgtgaccccagccacagcctcaggttgccaagcagaccccagatcacacccccagttcacatacagagcctgagtcacagcctcagttcaccatacagggcctgagtcagacacagttcacatacagagcttgagtcacagctccagttcactatagtggggactgtgaccccagtaacagcctaggtttctgtttgccatagagagcctgagtcacaatctcaggctgccaaacagagaccaagtcacagattcaggtcatgctgcagagcctggttcaccatctggccctctcctccttcttctctcgagattccctctgtgccctaagccctctgagttggtgagttctctcccctcctctaacattctgtatcctccatccttggagtgtctcttacagggaaattagactaagcccttaaccacactccaatcaacccaggctttcgcctggagcagttcatcccctagggtctggagcctcagtttaccctcttgtctcatcctttctgttgaccatgcctgtcctgggttttttcatcctcttttcctctttttgggtttttgttgttgttgttgttattccacatattccctctgctcatctgaagttgcacaatattttttgtaatttccacagtcaccttcaatgctataccatgtgtctgtgacctacctaagcctgatgctggttagtgccttctctacctgggcagcacagggccagagaacatattcccatcgactctcccgccctgagttatgtgctaattgcatgttttacctccatttgggggcccaacaagacactgttttatcagtcagcactacctccatggcacc

SEQ ID NO: 36097 - DNA, 3106 bp, Homo sapiens
tccaagagtatctgagatgcctgtagggtgggagacgtccttcccctaaacagacaaccctgccacagcttcacagaggtgagatttcggaagggagccccaggcagaaaaagggactaaatttgggggcaggagggtcaccgcttttggggaccttcgtagcccccgcaggtgcagccctgggggagagatctgcccatcgcagcctccagaggcagtgaggacgccctgcccaaggggcaagcaacgtaggtgatgggggcagcaaaggggcgcaggaggcctgggccaggcccagtgatcccacccctcaggccctgcccccgggcctcggcctgcacaaatcaggttgattcccgacctccacaatacccagggcactgtgctgcagggacactttcccacaagcccaacccctcacagcagcacaagggaagaggcaagaagacctgagggtggtgggcagagccaggcctccagcacacggaacacagagggactgcaacggtcctctgttcaggtgcctgagagcgggatctcctccgcctcaactggatctcagcttaaaggccagctcattagagaccactgtgacctcccttctgggcggccgtccccaaccctgggccccacccccacggcccccgcctcaccccggggtccccaggccacctcctcctttgcttcatctgcggccagctccccggcgtctgctccgggcccaggtatgagcccgcgcgtcactgcggccgccggggcgccgaggccagtgcggggacacagcaagcctcccgccttcggaccttccgccgtggccccgcgagtgccacaggtttccacagggccggggcacgtggacccgcgcagcctgggagccaggaaccccaaccccggcgaggggcgcctcgcacccccgtcctcacgcagtccccgaggcctcccggtgactgccgggtgtgggaggaggaaggtggcaaccagccccgcagctccagttgctgcaggagccccccgggcctcagtctccaaatacgccaaacgggcgggagtgagccacaggctgtcttcgcggaagactcacaggcgcaggcgcagacgggtgcgcgcccctagggtgcgcgcgagctaagaccgcggcccggggcagggtgtccccggccccgccccctgcagccctaccggagccagcgcgcctgcgtcgcgggcgcacggtgggcggagttcccggcgtctccgccccttacccggcgtgccccgcgcccggaggcgctgacgtggccgccgtcagagccgccatcttgtgggagcaaaaccaacgcctggctcggagcagcagcctctgaggtgagggcgaggggcgcgggccggtgtgggccgcagagacgttggagccggcgggggctggggactggcctcggggcgacttgaggttcgcgaagggcacgtcgacccccgcggcggcggcggcgacagggccgggccgggggcggacgcagacgggccgggctgaggctggggcccggccggagtcggggctgggcggacgggcgggtcggtgagctcctcgcacccctcacaggttcccgaagtcgctcgcggccgcttgtcctcctctgcctgtccctgcccccgcccgtcgcccggaagtccgcttggacgccgggctcttctccaggaaacctgggcttcctgcttccctcgcctctgcctttctcgtttcccgaggccgcccgcgcgtggacggttgggattagcggccgcgggggccggtgggggtcgtggggcctcccccacccgagtacaggcgagcgagcggcatccgggcggacccccgcctcggggaccgggaaactgaggctcgggcggcctgagacgccgtcaaggtcatgtaggtggtgggggcttgcatcttcgcctcccgactccatccagttcgtgtttgctgtgaagacggtaccgggtcaggggtggtgagagcgggcgggcaggtggacaggaaccccgtgcccttccctgtctgctgaacggaatgcgtggacctccgggggagcccagagtgcctcccttcacaccagtgagacgcaatttggggtcagcactcagggcaccggtggcctccagagggccggtcgatcttcgctttaactccagggtggtttccttgacgttgtcggcagtagataagaaggcctcttctgagctggtgaatctttaacctacctgaatctttaacctgcctgcggaacgacctgctcgcagactctaggccgcagaggccggccccagcgctctctcggagcacagcctgggtggttacggcgtgtgagattggggctggacagccgtgcgcacctagagtgttaaataaccattccgacggcacctcctggcactccctttcagtccaggcagccagttgctgctttgcaggaattgagcagaaatgcactcggaatcgcgggcaggaaaagaagggaggtcggaggctttggatggtccccgaagtcgccgcctagttgagagctgtagagttggtgccactgcccctgttggagtgggcagttgtagttcttgtttcagaactagtggtcagcagttttctttgccggctgttgcaaggctggtggttctggcgttttccgcagtgtgttgggaggagtgtgagatgccgcggtgcagttgtgtgcggcccctgtggccctctgctgttgcgttagccattgtctaacacgtgtgaccgcatggatggtgtcctcatttaatttgaattttcaccagcactgcctaggtagccagaaccataaggtcctgaaatgccgtactattagctgggtccaaaattgagaagaattgagtagtgtaaatgttagtcacacatctcattggacacattgttagagtgtgttgtccatgttttcacatgttggtagactggagaatagctgtcacttgtcttcaggcgtatcttgttgaaaataaatccaaatcactgcagcagtaggaatatgctgttgcctgtgaggcagattttcggatttgctagttgaaaaagatttgaaacagttggtttggacaacagctgagtcacacaatgactgtgagtgaa

SEQ ID NO: 36098 - DNA, 1034 bp, Homo sapiens
ttcccgcttgcagacctccgcgaagtcctgcaggtgcgagagcacagggagcgctcgagtcggccccacacccacggccctccacgcgccccccaccccggggagttacctccttgctcaggcccgtgggctgcttcttcacgttcttgtagccactgcgagagggccggggcaggcgtcaggacggacggacctcctcccaccacaggtcctcaccactccagccttcgtcctcagggtcccgcccgcgcgagtccccgcagccccgctcccgcccagcccgacccccagtccccggccccggccccaccctgccccggcagcgccgtcccaggcaccgaccgctgccgtccgcggacactcacagggcggccagcagcgcctcgcgctccgcctcccgcacggctgccagttcctcctcgcggctcgggcccgcgcatggcgcccggcccttggcgtaccaggtgaggtcgcggcccttctgccagcggcctaccggcgccatcagcgagttgcctgcggacgtagacgctgtgagtccagcgcccgcccgggatcccggagcccggagcccggagcccgcccaccgcgcgcacccacccaggtagttctcccgctgcttgtcagtcttcacgtcctcccagttgaactggtcctgcccgccgcgcacgcctccacgactggagccgaacatggcgccgggaaggcagttgcctggggcctgcggcttgcaacctgcaacccgcaacccgagacccgctacccactaccgtcggacccaggcccgaccccgcctccgcgtcgcgcgccgtgacgtcactcccgcgcccactcggcttcgccgcgcgcctctgcgcagcgcactgccccggatctgtgctcccgcgcatcacctccacgtcggctttgggcgcctgcgcactgcgcctaccctgccgggcgcgggaacgcctctgaactggaagtttaaaaatggttaaaacggggccgggcggagtggctctcgcctgtaatcccagcaagttgggaggccg

SEQ ID NO: 36099 - DNA, 2306 bp, Homo sapiens
atggcggtttcctgctgaagagaggggttccctggggtggcccctgacagtaatccccagggacctaaaagtccatgcttacccaagcaggctgcccacggccgccattcctccttacagccccagtggcacgtggaggtggtcagtacaggccctggcgtgcaacctgctaggcagagaatgaagagatcttttttaaaaggaaggttcttccacctaatggtttcttatcaaatcccagcccaggatgcttccaagacacatgtaatcaccacgccactcaccaacctctcccagcaacccttggacttctcagaaccgcctgtagaggtttttccaaaagcagaagttggtcactactcccaaagattctgagtcagcctgcggcagggcccaggctgtctgttctggccgttaccgagtctgcgaaacctctctgaatggactgcagcctcaaaagtggagctgaggtcatgccttgctttctaaggtcattgctagttttaataaaaactcagtgaagtgaggattgtcatgcttgcttaaaggagaatggaggcccagggctgctttgctgtgacctggattcccatgggagtctgtgctgaggtgtgcgaagtaaaagcccagttttcaatactcagattccaggagatgaggctgcacagaggccgagcgcccagcttcctctggcgtacccctgtctctcaccaaggaagggacctgaagacaggtccggctgcctctaaaatggaaatcctgctacgtgtcctatgcccacatccctctccctcggcctcaccagcacaggagcctggggctggtccaggagggtcttcggggaaagctccctctcctttcctgctagactgcatggggacaagggcttatcacaggtgcagccccctgtccccttccctgcctccctccctcccgactccaccgggagggtacagcgcctcccgcctctgttcccggcccacacgaggcgccaacctgcggccgccacagtcgctgcggaggggtctgaggacaggcggtcctgactcccgctgcccggtggaactaagaccagggacgaggccacgcaggagatcaaggtactcactgcgttgggtgctgctgcgctgcagcccacgacgtcactggcaggcgctgcgtcgcgcggtatgacgtgttccatggcagggagaggcaagagtgggcggtgagacacgaagatatacgcccctgttgggcggggccggcgcggcgtgatgtaatctcgggggcgggacgaagcctaggtgggcggggcctgcgggggcgctgtggcggtacaagaacccaggcggggccggcgagcaggtgacctccgtccctaccgggaggaccagggcgggccggcgaggtcgagggggacccgcgggtctgagggaggacggagtgggggagtgctgagggaggacccggggtggggagctgagggaggatccgcagggctgagggaggatccaggagagctgatagaggtcccggagggctgagggaggacccaggggtcctgagggaggacgcagggggctgagggaagacgcaggggggctgagggaggatcctcggagctgaaggggcatcagctgggctgagggaggacccagggggactgcgggagcacccgggcgggggctgagggaaggaggatccgcggggctgagtgggcaccagctgggctgagggaggatccagggggagctgcggaaggatctgcggggctgagagaggatctagaaggggtgagagaggtcccaggaggctaaggggggaatctgcagaactgagggaggtcccagggggcagtgagggaggatccatgggcgctgaggtgggaatctagggaggctgagggaggatctgtggggatgacggaagttcaaggggggctgaagaggcacgcagcgggctgaggaggacctgagaggctgaaggaggatccgaaaggctgatacagcggggctgaggggggatccgcggggttggcgggggctgagaaatgaccctgtagttcacagcaaaatggagtaatttatgtcacaacgtaaccaaaatggagtggggagggccctaaggaagcagctgtcacgcatttctgaaatgccagagaggctcgctattaccttgtaaacagagcttattccgggcatttccactggcctgcagtattccagatgagatgtttggaccagggcaggcagatagcatcgcctatctgcctcagcgaaccagggtcactttgtgcaatgagttcatgagaccagggcctttgt

SEQ ID NO: 36100 - DNA, 577 bp, Homo sapiens
tcgcccgcctcagcctcccgaagtgctggaattacaggcgtgagccaacgcgcccggccagtggatcatcttttgatttcccgaaaggatttacagaaaactcccctggactatgtgaaactatcccggttcacagatagctcatacctgcaggatgatcgcggtgaatatcctgcaggtcatgctacgcccacttgctttgaggttgggaaagcagcctcttgaccttcagccacttgagcccagcaggtggagctatttgccctcactggagcctgctttctcgctaaggggaaatctgctaaccattacacagatagcaggtaagtatttggagttgctcatgattttggaatgttgtggaaacaggtttcctcactttcaataatgaaccttatgatttattatatgcaatacaaatacctgctgctgtggccatgataaaggttccaggccatttgaaactagactccgtggaggctagaggatactaccttgctgagaatgttgctaagaatgctgcccttaagagtcctacggatttctcacagttctggaggctaggaagtccaaagtc

SEQ ID NO: 36101 - DNA, 2259 bp, Homo sapiens
acaggcacaaaaaagtttttaaattttttggtacagaaggggtttccctatgatccccaggctggtctccaattcctggcctcaagcggtcctcccggctcggactcccaaagagctgggatcacagacgtgaaccacgcgcccggccacattccccaattaatggtttttggagagtggccggtttggaacgggctagcggagtcgttcgttagttaggtccctgcagtgtagatggaggacggaaacggcgctgtgacataagcgggaggaggcgggctgaggcagcgctgtgacgtagcagatgaaagccgggcccgcgctgcactgaggtacttctctgagtgacaagcgggacaagtacgccgtgggcggggccggcgggtcgtgatgttagttcgcgctgtgtggaggcgggccggcgtggcgctgtgacgcagcgggagaagacgggctgggagggcgctgtgctgaacgcccctgcggtcgcgacaggccagcgcaggtggaggcggggctagcgaggcactgaggtaagtacttccctaaggggcggggaagaacgagtgagacatgggcggggcagtcgcctcatgacgtcagtctcgcgcgcgggcggaggtgggccggtgcggcgctgtcacgtaggttcagtgggcggaagaggtggccccggatgctgcggcgcccgctggccgggctggctgcggccgccctgggccgggccccaccggacggtgagtacgacaagcgcgatcgcgagggtgactcgggtcgaggcggcagcggtccctgcgctttgcggtcgcccagtccacgccgcctccggatctcctcctagccgagacgccctgtgccgcattcaactgtgggccctgagaacgggggagctctggagggcggacgggctggcaacgcagcggagcccgggtcccggagggcggggcgctcctcaggagctgggcaggccggcagttatcgcagtgtcgagctgctccccgggcgtataggagcgctcggtgtcttcccgacacctgggcgcgccgccaaagagagcagctgggagtccctaccgctggcccggcgcggtgtgcgctccggttcccacctcaccctgcaagccttggggtcctgggcggatggagccggctattccggggctcccaggattctgcctactccgcggcacggcgcagagacggggacttggggaaacagcaggccttcccgacgcatgggtgtggcatttggggttcggattctccaaagccagagtccgggttggggttcttgaagctgccctgctgccattcttgagcgtcgccttagaagtatgccccagtaaggactggtgtgggaagcaggtgcctcaaagttgattttgaccctgcgtgtggtgggcctcggtttcgtctttgcatgaaagaggtcggtcctgaggccccgggctgggtcctgctctgctgtctttgggctcatggccccttcctgtctcaggcttgctctgctctttacctggggttgctgtcgaggaccctgtgcaagactcggccggtttttctttctccctgatggacagacccaaacatagccgcgcagcatcgtgaagggctggggccttcactcctctgtggctctggaagagcccgatttcctcaggaggtaaaggaatgttcctgtcccccccggggaaagaaagtgaaaatgaaagcgccctggctgctcctggtgtggtcccatttaaaacgaggttgctgaaggccaggatgcgtgctacccggatgtgtgcccagaaaccctgcagccaagagcagccgcctggaccaccagcctccccttcatccacctggcccagcccagagcccaggcccacgtctggtggtttgtgtcttacgagaggccaggcgggggctgaattctctcggttctcagaaggtcaagccctctgttagcatctcctcgaacagtgggccgggggcaaggtggtgactctgttcagtccttaggatggctggaagccagaaggaggagattatgccgccacagcagggagtgcctttccaggaaagcggctgctggggcagcatgggagcccagtccagggagcgttctggcagagaccattccggaacatggatctgcgccggcggctcccaggagaccttccatctcggagctcctgtggagaccacgtgcctggcaggtccttacagttgtgggttgtgtggcttcttgccaggcagctgattggagtttgcg

SEQ ID NO: 36102 - DNA, 2128 bp, Homo sapiens
atacatgctagaccgtggatggactttgagaatactatgctgagtgaaataagccgtcgcaaacgacaaatcccgtaggattctgctcctgtgaggtccctagaggaggcacgctcatggagccagaaggtacaatgggagctccagggcctcgggagtgggtgtttaacagggagtttcaggttgggaggatgaagaggttctcgagatgagtgacggtgcccgacatgggtgggtgaaaacgaggaaggccaccgaatgggacatgggatggcgcttaagaggccggcagaaacctcgttacctaccgagggtggagcctgcgtgctgacggataggccgagtccccgccccgaaacacaccccgcgcacgatgctccgccccacacgcatgccccacccacccagcaggcacgctcgccccgcccgccccttccagctcgggaggccctgctcctcacgcacgcactctcagtcggcctcaaccggcgctgctccgcccctcaggcacgcacgttccgttcacccctcacgcacgcactctgcgcccgccccttcccgcctccctccggcggccaccgccaggggccgctgtggcacccgcccctcccgcttccttgggcccttcccgctgccccactcttgtccaagatggcgaccgcggcgctgcttcgaggcgccactccggggcgcggcggcccggtctggcgctggcggctgcgcgcggccccaaggtgccgcctggcccacagctcctgcagtcctggtggcgacccaacggccggagcggcctgggcctgcttccggctggacgggcgcaccctgctgcgcgtgcgtggccccgacgcggcgcccttcctgctagggctgctgaccaatgaactgccgcttccgagtcctgcggccgcgggggccccgcctgctgcgcgcgcgggctacgcccacttcctgaacgtgcagggccggacgctctatgacgtcatcttgtacgggtgagcgcgtgctgggagggcgctcgggggcgggcacccaggggagtggccagggaccggcacccagggacagggcgggcgcccggggcctgcagagggcgtggggggtgggcacccggggagggccgggatggggtggaagctcaagggtgggtgggccagcgactggcactcagggtcaggcacccaggagattccacttgggatggacacccaggggaagctcacccagggcccagcacccgggggagggcacccagaggagggcttggctcaacacccagggatgggtcagcgactcatccaggggaggcctgggggccagcccaccatatcagagcagaggcgtctctaggtgggcacctcccaagtgggccatctggtgacccttctccctccgcagggacaaggggttcaggggccccgcctggtggcagagctgtgtttctgagtgacagcttgtggtgacactcccgagttctgtttaccttgtgtttccctgtgtctccccatagctggtcacattggcatttggctcagtcatctgtgctgacatcacgactgtcagtgatgttcatgccgggtcagggccttgactgcttacagccttgggtttcccttgcccagcttccagggacctggatccctgaaacctccgcccggtggagtggatctggttcgcggccgcctgcctgctgtccctgctatggcggacccggttcttgttctcttcagcttactcctgtgttttggtttcaggggatggacacctttttaatgacttcctgagctacgtggggtgaatttttggactcattgtgtctctgctagtggctttacctgatatcctggctgggtgtaaaaatctagcttggaaattgtcaccgacaatgttcacatcacaactttgttttctcgctgccagcttttctgagaagtctggtgccgttcttatttgtatgtgaactgtgtttttctcagaagcttttctttattcttgatgtcgtgaaatgtcatgctgatgtgtcttagtttgggctttttccatatcacatctctgggcacttagtgggctctttaaatctagaaccagagttggtgaaatacggccctgaggtcagacccagcccattgcc

SEQ ID NO: 36103 - DNA, 2038 bp, Homo sapiens
gtgtgccccaggcccttcagctcgggttttatttgggttttaagcagcaagacaaggggagaaaaggcaggctgagccctggcatctcagatggcagagatggctcccagtaccccacccagaaatgcagggcagccctggaggggaggttagagaggaaacgactgtgtccccctcatcctgcccagtctggggctttcccaggacttaagtactgacctgctaacacagtccctgcagggagtccatctaggatcggccacctctgaggttctcccactttcctctgattccagctccttgctggccagggtatggccacattttccttgcccccactccaccaccttccaccttccaccttcctctcttagcctctatctatgagaggtacgcccctcacccccgagagcagggtctcattggcggccatggtcccagcctcaaggggcctggttgaaacaggctgtgtcatgagcccccacagccaccctgcgcgacacccccctcacaggcccacagcaggctgcatcctgagctccccgccctagacagagacagattactcccggagcagtcccccaaacctcccacccgcccaggcctccccagtccccggctccccgacgcccctgcacgccacccccgcccaggagcaccttgaggtcttcggccgcgtcctgcagcggccgcacgcggtgcgcccagtgctccccagagcgctcgcaggccgcacacaggaggcgcagctcgtcgccacagaaggcggccagtggctcgcggtgcgcggggcacacgccctgcgggaccggcgacggcgggtgcaggcgccgcgccatctcggccatcttagcaagcgggcggttgggccgcaggttcctctgcggggacagctcgcggcactcggggcacgcgtacgggccctcgggctggccccagcagcgccggatgcactcgcggcagaagttgtggccgcagtcggtcatcaccggatccgtgaagtagtcgaggcagatggcgcaggtggcctcctcctggaggttggtggacaggtcgggggcggccatggcgcggacagaggggaggaaggcggtactgtccgcggggcggcggcgggcggcctcggcagctcgcggggacgcggggtatccgggtgcggcggcgcaggctcgggcactccggggcgcgaggctcgggactcccgggtgctcgggctccggggcgcggggactccagggcgcaggactctgggtttcggtagcgctgggcgcgtaggctccgagcgctcgggggacgcgggacgtagggatcccggatgccggcaggaagaggagccgaggcggaagcaggaagcgactgggtgggttttgtgtgtttttttttttttttttttttttttttttttttttttggaacaacccgcttttgcctccgattggccgctgccagtcacgcggcccgcgggcgggacggaattggagagctttcacttgctgacctggcgtcaccaccgctccggttcttgtggccaggtcttttacccctgccctggggaggactcaggcgcaggggagggatggggacagggggcggggcgcaggggagggatggggacagggggcggggcgcaggggagggatggagcagggggcagggcaaggagggatggggactcagggcggggcacacggaagcaactgcaaggactaagggagtccgcagcctggggcattggagcccttcgccatacccctagtgcgtcctcaccccctcagcccgtgcttcccagggcgggtatcctcggaaggcccggccctcacagccttggcaggccaaggtcagaatgattggagttgggggatgggacgggggcatccctccaggaccagctctccaggaggcccacattctttctgcgggaaccactccaaaggggcatgctgttccaggcagcccctcgcgcagacactccggctttgtcgaggtaggagtacgcttactctggaattctgccttgctagtgactgacacaggctgt

SEQ ID NO: 36104 - DNA, 669 bp, Homo sapiens
tcacaaataaatgattccaacctgtaccagagggagacaatccctacatccttatcctcacagccatcctcaggttttcctgacataagtctactattggatctgtggcctgctgccctagctgtaggatttctcagcaagttggtctctgtgtctctcatccccagagcactgccagactactttgtggcgctgggaagcctgtttcaaagtgctgggcacatgggccacgcctgtctgcgactgctcagtaaactgacttccagggcagagtgccctctttgaactttgggctggggtttcccagtattgatttcacttaggaattaacaatgcacatgcctagctgggcttctcacacacaactagctagtcatctaccctaacagaagacagggtgaatttacaacatacatgactagccagccttttaactgaatgggagattgggtatgttaacacatacaatgagatggacttctaacccgagatgggccaacaccacagctacatatgtgtgcacatgggtgcacgtgcacacacacacacccctagccagccttctaacctaatgggagatagcccaagttaaaaagatacacaactagccagccttctaaattaacaggaggtaggctgagttaaaacacacaagtagctggacttttt

SEQ ID NO: 36105 - DNA, 979 bp, Homo sapiens
gccccttgaacaggtgcaagtatcaagagggtgagtattagcctggagctctgggaaatgtccacagtccatggtttgtggtcactcaagtcgtggtttggatgagctcatgggaaaaaggaagtgtcagggtggaggccgcaggacctgtggtgagtggtgagaggtaccccccgccctggcacacacggtcttggagctgtccctcagcacaccacaccaggttggcctgctgacttgctgtgactcccagcgtgcggcctgaggtacagtgagcagcttccaggcgaggccccagggggccttggccccaccaccaacccactgctgagtcactggtgacccctcctaaccctccctgacctaccagctgacccctcctgaccctttgggtgacccctcatgcctcctccctgacccaaccctgacccctcctgaccttccactgaccccttcctgactcaccagctaacccatccctgaccttctggctgacccccccgacccatcagctgactcatccctgatccctcctgaccctccactgacccttccctgactcaccagctgaacccctccctgaaccctcctgaccctccactggccctcagtgggtggcgaatgtccaggagccaggtctagcctgttcaccagacacctgctgtccaggaagcctggctcccaccccggccccacaggcccaccagccacaatgctttgggctggtttgttatcttggcaggagacacctagaagggcctggccagcaggtgaccagcagggcccactcagggccatgggtgggctgagagcacagcccactgggcaacaaaggtggcctggggcccaaaggcagctccacgaggggtggctgctgggtccagggtctggaagccaggtgttgccatggacttggcatccccagccgcctgcacagaagcagctgccaccaggcagtggtgggacagatgtggccagc

SEQ ID NO: 36106 - DNA, 3268 bp, Homo sapiens
cctcggcctcgcaaagtgctgggattagagacgtgagccacggcgcccggcccagattaattttttaaaatgcaaaacttgcacaatcttattttaaccatgcttgcttgttttcaaaataattaaaaaacaaaaacacaagattgctcttcccaaaggcttatttctttcctttaaatttattttttaaagaaaagctaacggccgggtgtagtggctcacgcctgtaatcccagcactttgggaggcagaggcgggtggattacgaggtcaggagttcgaggccagcctggccaacatggtgaaaccccgtctgtactaaaaatacaaaaattagccgggcgtcgtggcaggcgcctgcaataccggctactcggggggctgaggcaggagaatcgcttgaacccgggacgcggaggttgcagtgagccgagatcgcgccactgcactcaagcctgcctggcaacagagcgaggctgtctcaaaaaagaaagaaaagcaaagcaaagctaacaaatgctcttctgtcatgcatcatcacagaatcaatgagagctccccccagccaggagacagcggacaaccagggtagcttcccagggggccagagggaggctgcgcgagaagaggctcagcgggatgggtccacgcagggagatcccacgcagggtgggcgtatacgagtgtccacgtccggagggccgttcaagggcgggtccctgaaggaagggtgcacgcagggcacgtccacgcgggcaggcccgtgcacgcagggcgtgcccatgcagggcgggtccgtgcaggatgagagcagcggaggaggcccacgcaggccatttcccgccccgtccccagcccacgcgggcgagctaccgcgggggtacgcgcagctcagatcctagcagcttacaaaaacaaccttttaaaaatggaaccttcaagtaaaaataaaactttgtttccctctttcgcaggagttactgaagtaggaagggacagcccagtaagatttcaggatacgacttgggccggtccgcaggcagtagagtgaagcgcgcagctgccaggacttgcgcggtgacgtgcgccgctgccaggaccttgcaggtggagagcatagttgccaaaatcaaggcggaggagcgcaccgccgctaggatccaggcggagaagcccaccgcggccaggacctaaggatgcagtacactgctgccaggatcttgtctgtggagcgcagcgcggccaggacctccggctgcagcacaccgctgccaggatcttatcggcagagcgctccgcggtccggaccccgccccgtgcgcgtccccgaccccgccccgtgcgcgtccccggcgttggcgtcttcgtcctgttgctggtctccgtccggtcgccggccgtctaggtctccggccctccccagccgctcctgcgcccttgccggccccgccgcccgcagccctggcgctccctgcgggccccgccgaggccgcctgcgccctgtgccagcgcgcgccccgggaaccggtgcgcgccgactgcggccaccgcttctgtcgggcgtgcgtggtgcgcttctgggccgaggaggacgggcccttcccgtgccccgagtgcgccgacgactgctggcagcgcgccgtggagcccggcaggcccccgctcagccgccgccttctggcgctcgaggaggcggccgcggcgcccgcgcgcgacggcccggccagcgaggccgcgctgcagctgctgtgccgcgccgacgccggcccgctctgcgccgcctgccgtatggctgcgggccccgagccgcccgagtgggaaccgcgctggaggaaggcgctgcgcggcaaggtgcgcgccgcggggtcccgtgccccaccccggacggtgccctgcgcctctccgcccccgccccggtccccctgagccctgggcccttcccgtctccactgttcctgtccccggattgtccccgtccccggattgtccccctcccctcaccgccacgggtcccctctccagcgtgtgctgggcccctccctcctgcggcttgcctccccatatttcctgcgtctcttcggagtctggtccccttccccgtcttggtgtcccctgctgggcggtgccttatctccccaccccctaccttctacgaagtccttcccccaccagcgcccatctttgtggtcccatcactagctgtgccctgtctcgccctcatagaccccctctagttcctacagattgactcctccactcactcttcccttgggggagacatcacgcctcttgcccctctgtattccactgtgtccacaggcctggcccaccttctcgtctgctccccgggccacccagccctcgcctgcaccccctgtcccctctcccatctttcagaaacccgctctgagagtctggcagcagcgggtccgggagtctggagccttgcccatggcgggttggttgtgggacacagaataggagacaacagccagcctggggtcctgctcttcaatacaggggaggggaagccagccagactgtgtccctgggtgctcctcctgcattgggggtcctgccaccgggcagagcgacccccatccggctcaggcagggcagggtgtagggcaggctgtgcagacctttggtacaggccgaactcacactgaacagggccacttacagacacagaactcctaaacccacctagacagtccccttagccccagcacccagatccttctgaataggtgtgaagcccaagaaaccttttgactgcctgtgcgttcctgccctagacaaccgggcttcgaggttatctctgggatggtcagactgtgtgcagtcagctggggtgatgtccctcagtactgggctgggttgggggacccagagcttctgcccacccctggtgaccttcttttctttacaggagaacaaggggtctgtggaaatcatgagaaaggacttgaatgacgcccgggacctgcatggccaggcagagtcagcagctgcagtgtggaaggcaagtggggggacctggggcagcctggaatgaggggactgtgggctcagggctctagacaaagggaccaccaggccaagtgggccaggcctctgaactgctcagctggttggttggaggaggggcctctggacttaagtgagcttcagggtattttttttaggatgtgtttgtatttctcaaatagaatctagccaaagccagtggaagcctctttttctcctcacattttacctgtaggtg

SEQ ID NO: 36107 - DNA, 899 bp, Homo sapiens
ctttacgagtggggcctttacaaaaaaggtctttggagctgccgtaaaagaaatgaaaacttttcctttctgcctgaaataatttcttaataactcctaccacatattccaatggctcccaggcttctgcagaatttacaccatctttacgttgacctacatgtatttttgccttttttcctttcttctatggcctcacctcctgccttaggttcactaggctccttgctgcttctccaacacggagacagtcaattgctgtttttgcccttgatggtccatttgcctggaacgctgtttcttagacatccacgggacttgctctcttacatctttcaaagtctttgctcaaatatggcctgcatgaggccttccatgtgcaccttcctgcctgttttttttcgtctctgtgacagtcatcctggaacatgttacatcatttatttattttgagtgttgcactgaaacatcagcttcgtggagtgtctgtgtgctcactgacgtatccccaactactctcggcctcacatgtagtgggtgcttaataaatatttgctgaatgagcaaatcaatgcaaatcctgctacacaatctatcttatttagttggaaaagtcctactgtctgagaagaaagggtaaacccatagtggcttgaaaaatttcttgtgttcccccccagatttattcaggtataactgataaataaaaaatcctatctatttataatgtacaatgcaatggcttgatatatgtttacaaatgacatgattaccacaatcattattgtcaagctaattaacatactcatcacctcacatacttatctttctttttggtaagaattttttttgtagagatggagtcttgctatgttgccttggctagtccccaactcatg

SEQ ID NO: 36108 - DNA, 3769 bp, Homo sapiens
tctctgtgcctcaggtgttctcatctgtaagtaatgttaagattaaaagaattagttcttgaagagtgcttacaacagtatctgacacattatgaaagttcagtatttgttattgttatttttactaccactagtatcaatgtgtattaataatatgtggcccttctcacaccacgctgtacacccccaggactcttggtattctgacttggctaagaggcgtcctttttctgaatagactgttgaccacatgtagaaggaaggcagagagagaaatgaatcaaagggaaacggaatattttttcagacatattaatgtctccgaattacctttaagtaaatgaaggaattgggggtataaaaaaatttctggagcatacatgtataaaggttcacggcatgccgaaagacaaagtcaaaggagcattcacaatggagctggcatccttttgcttcaaaatgagaaaaaatcacacgatcagctgcagttagacttaaggaaaaaagctgtctgttaattcaatctcattcgcaggacaggcctccaggacacttcatttttccccctgggtggagccgtggccagccgggggctccacggagtgaataggaggcggctcaggcttcctggctcgcgtgggcgccagaaagcggaacctcccgggccagtcgcgcggtggtcaccctcttgggagctggggaggaggctgcggaggctggcccggctccttcgggcgtcgcttcccggaccgggtgcgcggggtcccccggaacgtgtgttccaggtcctcccgcgccagtgttcgcagtccccgcctggtcgcggcggcgcctcgggcgcgggtgcaggcgcgcggcgcgcaggcggggggcgctgtggtcttggcgcggggaccgagccgctcggccagacccgcctcttttccctccccgccagcccgcccgcctgcccgccccccacgcgtcgtgtcgccgggaagccgggcggagacagagcgcttgggatccacggcgctcggaccgctgtcctccaacagcgcagggcagagcggctggcgccgccggagcgcggagccacgaccctccctggccgcctttgtctactggccgtgcggcccggaaccgccactctccagggccggggacgcgcccgcagctgtcggtgacagctcctccctaccgcaaccctccggggcggaggggcggtcgggccgggccctgctagcccgcgaccgcaagcccgcgctcgcggatcgatgcccccgcagcagggggaccccgcgttccccgaccgctgcgaggcgcctccggtgccgccgcgtcgggagcgcggtggacgcgggggacgcgggcctggggagccggggggccgggggcgtgcggggggtgccgaggggcgcggcgtcaagtgcgtgctggtcggcgacggcgcggtgggcaagacgagcctggtggtgagctacaccaccaacggctaccccaccgagtacatccctactgccttcgacaacttctccggtgagctggccggggggccggggccgggggcgcgtggccgcggtccacccaggggaaggaaggtggcgcgagggtcgcgaggttcccaagggggctgcagggccccgggcgcggctccagctgggaagccggacaaatgaggagtgcaggacgtttcctgagtctcagggaccgggcaagcgcggagctaacacgaaaggaccacggcggagtgggcttggagagaggagggcggagcggcagtcagagccttgccaaaaaaaaaaaaaaaaaaaatctcacaatttaagcaacagataagtaggagtgaaacaggttgagttcagggtgcccggtcagtttgttgcatagagcaaagtttcctgagggcgacgtcgctggcgccgctgcagagtttcaatcagaaggtgacgcgcaggtgcctttacctgagcgtcgctcctttgcttttaggcggctcagctcacaaggggcgtctccgctttaaagagccgcggagacgccgggaaaacacttgatttagtgaaaaagcgcgagcggccctcgtgaaggcttaggtttggatgaaacctgaagagtaaacaccatttctttcttctgagccccaccaccttccctgcccacatgggctcggattctgattgttggtatcttttcaggatccctttaagctacttaaagctcctatgtaccgggtgcgatgccatttcccttggtagatacaaagagaaaggaattctctatcttgctattcaggtctttttgaaatttaagaaaaagttaaaattcacagaaactagtatgaaacacttaactgtcttgcttctttaaaaaaaaattgcttctctgaccttcctttcatcccaaaggtaccttagagaaatgggtgctgtactggtgggttcccaccgcagggtattgtttcttcccctccccccaccccacccctgcagctgactagtataaatatttagaaacaattagaaagttgtgtagaaagagacaaaactgactgcttaattaaaatagaaacctccacaacatgtcctgctgcaggcctctccacactccccgagtccccggatcccagtggaaagggggccatggctttcttttttcttttttaatcctccttttgacctgacatagagataaggagtgccctcatttcttaaacaggacaatgcgggcagcctgtgtttgcacatgttctcaaaacacactagaattgtatgataaaccctgaagttggggaacctttcccaagggaaaacagaattatttgtgaggttttccactgatttaaaactgcagggttgcttcccatttacccccagtgttgtttttaggtcctttgaaacaagtgtgacaggaaaataaatcttccaggactgggagaaaagcataggcctttttagggtcaccatcaaagcgttcagggatttgctgcctggttcacggtaatggagtgacttgccagccgtgggtttgtatacaaaaatgcctccacagggcctccttgtttttggctagtctttaattcattagaggacctaaaataggagcaaaggggtttggagtgagaatgatagtgaaagctaaaactattagtattccgaaaggggttaaaagacacctcctgattgtcattttggttttgtttttaagcggtggtgtctgtggatgggcggcccgtgagactccaactctgtgacactgccggacaggtcagtatcacgttacagctcagtgctgggaaaggaaacagccttttaaagatttccaaataacctttgattccctcagtcagtaactgggtcattctaaagcctcatgaagtggacccacccctgctgttggcccttctctgagggtgggcaggggccaggttattggccggcaggaagcagaggaagatacctccaaactaataaagcagggtttggcccagctctgcgtaaccaggcaagggaggaagcagtgtcaagaacagctcttgtaggagtttctattacttactccctggtttttatgaaaaaatttcagtgatgctttgtcatcatttcccaaactaagttagtgatgtcttataatcgttttattaaaggccagtgagtcagatattgaagaaatttgctcaagaaaaagatggaatttacatcagtaagggttaatatttcccttcctgagctatggtttgactcgctaggaccagccccatcacttgaagcacagatacatttgtcagagc

SEQ ID NO: 36109 - DNA, 1395 bp, Homo sapiens
gagtatgtttacggagtgtggtgtatgtttgcatgatgtgccaatgtagcatgtggggcatgtgtgtggtgtggtgtaggtgtgtgtgatgcctggtgtgtgtgtgttgtttgtgatgtgtgtgcggcatgtgtgtgtggtgtgtagagtatgctgtgtggggtgtgtgtttgtgatgtgtatgtgttgtgtgcatgtgggtgcatgtgtgtgtggtgtgtagagtgtactgtgtggtgtgtgtgtgtgtgtgtgatgtgtatgtgtggtgtgtgtgtgggtgtgtgtgggtgtggtgtgtggggagaggagaggtgttggaaggtcacctccatagggatgatgctgtgttgtgattcctttcagagctcaacactgagttggcattcagcaccctggacttttgactgttgttagagtccaggtgagtcatccagcttcagaacacagtgactgcttccaaggttctgggccccttaaggatctatttcctaagagatgtggtagctcagttctgtcctgcagataaagggtgggaaggaagaagggaaaggattatactttttcccactccttttaccccataatggggaggggatgtgtgtgagggcctcctgcgtcttgttttccgcctctattgagtgggtgaggtcttgcctccctttctcgtgcaactcttttagtggtttacaacctgcagtctctctgctccgtgtccacagagcacaggaagccaacagccaggagcagcctctggcatcagagggagtgggttcaaagtccaattctgctactttctagctgataaactgcttagctccctgtccataagtgggcttgatagtaagtgcttattacttcccaacgacggggagatgcacacaagcatctaatgtggtgggtggtactagatcgccatgattacctctgcagccacttttggacgctcgatgcagccacattagacactgaccgaggccactgcacacagaccgggtgctgggtattgcgggaaccaaggagcaagccagccagtcctggggctccgtcagcatctggtccactggagaagcagatacatctctgggcctcattatggtccatctctgcttggactttacatcctccaccacctcacactcagcacattccaagctgaggatgttgtaacctccccaagcccgcttcccccaggcttcctgctgtgtcatcaatatcttcactttcctaggaacccaggctccacatgtggcctcagtaacccctcctctacttcacaccttctgtaccatcgggagaccccagggattcagcctttcatggagtgtctccctgcctgtcacagtcctcttgcaacccatcctgctgaagatgtgatttgttttagcctgggga

SEQ ID NO: 36110 - DNA, 500 bp, Homo sapiens
ttctgagaaactagatttgtcagcctctgttttcaacttttcagcttctttggactttggggatagttttgcatagacctacttagcagggcacagcgacccaaagtgtggtcctggcagcatgggggaccatccaggccctcacagaggacacccttcctcctggcggtctggctgcggctgctggacctggtgttaggagatggcagtttaacacacagcaccttaaccatccatggcttgccttttctttcacaacttgtcctcaggtacagaggtcttcagaacttggttcctttccaaaagcagagcagtgttttgacacaggaaaacgcaaggtcctttatgcctggaagaaagcagctttctcctgcctcctccttgatgcggttcccagccaccgcccccaggatgctcactcccttttatgagctgagagaggcagaccttagggcctcctccaatagttaatatacattttttatatttttaaaaattaa

SEQ ID NO: 36111 - DNA, 816 bp, Homo sapiens
cagagctcccgctcccaaccgcctcctatgtggagctgtcacactctgggacactatctcttgccttaatcacctcagacaaccagggacagcccctatgccccacagccctgaaattattcaaactagccaattctaaacctgcctgccctgccctgccctgccccacccattccttctctgtgttgtgctgtaactcctgtttctaggaaactgtgaacataaacttctttcttcatgacaatcatttctgtgcctgtgtctctcaccatagcagcttaaaacaaagcccacatgccctcatgacactaatgaatttgtagaggccctgcatcagtcaggagtgtattcaacttaagaaaatggagcatgtgaccagaagcctgaggaggtaggcactgtgtttggttcagaggcgtggtgaggtcagggctggcctctgggccatcctcttggagtttttccagtggtcaaaggtggctgctgcagatgctggcaggcaggggtgaagcaggtgaggaatttagaacaatgctggagggaggcagcactcttgaaggctgtgaattcctaagcagtagcttggcaacttcacggggagcttgggcttatgtgccgaaggtggggaagagccatttgacatgagaaagtcaagagcaggaggctgacctggtttcgggcgtcattcttacacatggtcaagtcacttagcataatggcaggaatgggggcaggtaaggaagagggtggaggaagaggatgactgtgagtcaggtgcctttgggaagaagggtggtgatcagaagatccacagtt

SEQ ID NO: 36112 - DNA, 913 bp, Homo sapiens
gttatgaatacagagtttctgtgttcacttcctagaaaatcaagatgtcttatcctcttggcacatcaatatggtcactaactaggatgctcaatcaagctttagtgtccagagtttttaattggagtttcattatgtcagcatgattgatggaattatttgccacacgattgaactcaaactccagcttctctgtcctccttgaacattgggaggttgggatgatgtcacatggctcaaagttccaaacctctaaacacatgtttgtctttctggcatggccagcccccaacctgaaactttctagtgagcattttttttaatgctcaccctgagttacctcatttggataaactcaggtatggtcccgcaatgaataacaaaggcattcttatcatcagggaaatttctggtgataagaagggtgtagaagatccctcccaggaaccaaggacaaagaccagacaaattatttatgatacattctggtattttcttttttgccagatactatggttatgttaatattgattgattttcaattactgaaatatctttgcattcctagaataaagcctacttggtcatggtgtatagattaaaaaatacatattactgaattctatttgctaatattttgttaaggatttttgcttctatattcatgagagatattgtgtatataattttcttttttcaaaactaggatattgattttataaaattaattaggaagtgttctctccttttctattttctggaaaaattgtgtagaattggtgttaattttctataatgtgtttaatagaacctctagtgaaataatctgtgcctggagatttcttctttggaaggttttaaattatgaattcaattttcataataggtatagataattcaaattatcaatttc

SEQ ID NO: 36113 - DNA, 729 bp, Homo sapiens
acagtggggccccagaggctgggatgggaccatgcttctgtagaatttccatgtgccctgagctatgctgttactctaattactcctcattttaattccattttgaggcttatcagccctatgctcttctactttgggactgggccaaggaggcagggggtaaactgagtccaggcgatcccggagcctccagggccagccctgggagctcgcaggcctttgctggggcagcaggaactctgctttgcctatgacatcctgtgctttggtctgggagatttctgtatgagtcattttcagctcagaacaccctagctgtggttaattacctgaggttttactggactccttctccaagcgttcattgttgtccgggccgcctcatcatgcccccacacgtgtcctcctctggggaggtttggaaaagagcctttagcccaagttactgtgacctttggtacctgtaggacacatttttatccctcttcctgattctaatcttactgagccaccaaaacctttttgtttgttttaataaacttctaattttagaatagttttagatttacagaaaagttacaaagtctccatgtacctccttacagttaaccctattaacatccttcatcagtagagtactaatgagcccagattgatacattattattaactaaagtctattttcagattcccttagtttttacctcgggtccttaccatgttccagtc

SEQ ID NO: 36114 - DNA, 3610 bp, Homo sapiens
gttgacgatgttcactaatcccatagcccccagggcttgagagtatcgttcacagcagaggagtttgcatttctttatgtatgtagtaacatattatcttttatatgcactttacctgcttcttccttagaaggtagactcctcagggccagaaatacagtcctctgtttcttttatccctcctcacagcctctgccagtgctctgcagctcaaaggtccctgataagcagagtgacttcagcattgtaatgaaccagagcacagagagaggctgtgcaagcaaagggtaggagcagccctagaagaaggcacacattcattcctcgggttgcagcctgtttacagagggagagaatctctgctgcagttacccagcatccaggggtccatgctctgccagcgtcactcagccacgtgagatggggtgattggaccaaaggagatacatggtgttttatttagtgatggtggggccatttctgtttttatttgtttttaactggggtatgtgtgtcaggaccacacagcagcagggagaagcttccacctgcttggaacaaaaatgggaaggctgcatttccaggctgcatttatcttatgtgtagtgtaagcagcatcgctgactgggaaagaaaaaagggtaaagagcattatagatgcctgataattcagtccttaagagatggctcactcaattgcttggttttgtattttcatttcttttcctgactgaaaatggatctggagcctgagagcacctgatgttgggcgaggcctctgggtacgaggtggaagttcacatttctggattatgtgtagtttcagaatgccttctatctcggtgtcaggatagatgttaagatgcaggaattctcataaatcttctcgttaaaaagaagaaaacaacaaaacttctcacagaacataaaaaccatgtcaggtggccgggcgtggtggctcatgcctgtaaactcagcactttggaagtccaaggtgggtggatcacgaggtcaggtatttgagaccagcctgggcaacatgtgaaatcccgtccctactaaaaatacaaaaattagcggggagttgtggcacactcctgtaatcccagctactcaggaggctgaggcaggagaatcgcttgaacccaggaggcagaggttgcagtgagccaagatcatgccattgcactccagtctgggcgacagagcaagactgtctcaaaaaaaaccccaaaaaaacaaaaaaaacccatgtcaggttgctcccctgagcaaggccaagctcagttttcacctggtggtcccatggggagcttcctgtggcttagtgtttgcgtctgccatttgctatccctccccagcacaccttcctgtggatggaacttgccagaacttcctcagcaaccctgaagaggaaagctggaggccccaacagacgcagaagtgggctgcactgctgtgcttccatggggcagtcagggctcagggccccagcagcaggccaaaccccagcccagctcccttgcaaacctcctctgtcatgtaccctgggagtcaggtccaaccccactatgtcacaactgaggaaacagaggccccgagaagttcagggagagctggggtcaagatgctagatcctgcctctgggtgtggtggcttttgttcttgtcatccggtgggcactgggcctgccccgcacagctccttcaccccggagaggtgacagcagactacattaggccctgccaggcccaaagactccagcctgttaatctttaaccagagctctggacaaaggtagcccttctgacctcctgagagtttctgaatagctcggaggcttctgtgacagagccacacgttagcaatgacatatatttagtgcagggaggcatgttgagtacagttctaaattctgttgtgaattgtgcccagggaacaagcacagagaacattttcaccatggatatgtatgtacttgtaagaagcagctgggtggttccttcagcaatctgctgagctgtggcgattacatcacacactggtgcaaaggccttgaaccattaatgtgctgcctctgcgagggtgaccaggattccagcaatgaacagagaaggtgcttgtccccactgctcactgggtgccttcagattcttaacttttgtctttttcttttttctttcacttcttacctgtatctataaaacaggactctgtttgctttgaaaagagccagaatgacctcaggggtcagtgactcatgctgttggctctgtgaacacaatcgagtgccccttacgtaagaagctcctgctatctgagggaagggaggtccgagccattattccttggttataaacactccatgtggttttgtttggtggttttaaaaaaggtgtgtccacagggttggtgttctagaatcgtgggcagaaagaagtctagctcctttcatccaaggttctaaagggttctctgagctgtaactcagctctaactggacaaagaggcaacaattcccctcatttcctgtgcgctgtcaccacaggaggctacacttaaggaggtcaactcaagttgtttggaccaagcttccgcagttgttcccattatcctgtttgaatccattcactcttacactggccatgcaaatagacactccccaaggaaagaaggaccttagaaaataagtgatctcagttttcatctgactttcttctggggtgtggggctggtcatgggtctatattccctgctgtggtcagggccctgtgggacatgtggctgtgtcccagccctctagcacaatctgccgtcactcctgggcttttgtatgcctgctcccatttgctcttatctcctcaacaaccacgtcaggtagataatacataccatcagtcccagtttacagatgaaaaaagtgaggcacagggagcttcagtaacttgatcaagactagaattcagagaaatagccaaaccatgactcatgatcctcttgctccaaagtgcgttgtctcccccacagcccactatatttgttgtttatttttgaaaatggtcatgaactcagctaagacgctggggcagtggagcggagggagagagcctgctcttcacagagggcttatggggtgagaggaagggaagctaagtacagggcaggccggggccatctaaggtggcctctgaccatcctggagaggcatggggctagagaatgaagaatgaggcagaaatgagcgtttttgaactggtttaccgagcaagaactagaatggaaggggacatattacaaatgacaaatgcctgatccaaagcccatgagatgctattgatgagggccacggacccttactctgtgcagacacagaggcttggatgcacacacttgcatacacacacacacacacacacgcactgttttgttttgctctgctttatttttgccactgtggaataataagaagtacagtcacgcattgcttaatgatggggatgcagtctgagaaatgcatcaggtgatttcattgttgtttgaacgtcatagagagtacttacacaaacctagacggtataacctactacatacctatactatatgggataac

SEQ ID NO: 36115 - DNA, 1504 bp, Homo sapiens
gtatagcatgctgaattgtctgtctatagctgcaattccacccaagacttatgctaacttttaagatttttgtctcatatcaaaactgagaagactctcaaaagaaacatcactcaagcaaaaaacttttaaagcttttcaaaataatcgcaactcatcctgcacttcataattctatcaccattagagtgaattaattgtgtgattatatgtttgccttccatagactgtgagcttcataaaagttggaaccaagcctgtcattcatttattcaatagagacctaccgagtgcctacatgtgtcagataccatttcacttgtagggccgcaagagtgaatgaaacacgagattccacagcagatggtctcaatttctttgtgtcactgaccccctggaatcccagcctacagtaggcactcaatgaatacttattggataagagatgaacacatttccagcttattcttcccaccccaaatctttccttaataagaggtctgggttttcacacagccctgctggaaagccccctttggccaaacactgtagtctctgcagacagctctcagcctgtggcctgtggttaggcccactctgtctgatactctaagcactggctgaagacagtgacagagaaaggagaaacaatgccccattccagcaggaggagggaggaaggatgagcaaagagggctgacccatttttcttggctaaccgtgaagctcccaactgtgtcctggggctctggcagggaccctggcgacagccctgacccctgctctgtgctgcattattcagcaagactgtgacgttatcactgtgaggtgggtgagtcatcaacaaagctgctatccagaatctcatgagctcagcctgaggggctgatgccagcctgttcaccgactctggaagacaaaaggctatgttccctgctgggctccccttccctgctcctgggaccctgggcaggtccctctctataggggtgatggtaaaggaacctgagctttaataagggagaaatgtgtgtccagtatgggagctgccgctgtctgaacaaatatggaatcataatcaagtccaatcttggtttttaaatttggaaatgggtataataagatttatcccaagacgttgttgaaaggttatttgtactgcatctggcacttcatacatgattggtgttatttcccaggcatctcaattgagatcctacacagtttcatgctcatgataactgcaaatcataaatcataatcttattcctatctcttcctgtacatcatggctgggggacagaggaataacccactccaaacccctatatgcttcctctttggggagaggaaggcacagtgtgtcctatttggtcctgtaggtgttgggttagctccactgcaaaccccacatttgaacacagccagcctgtctgcagcctggcagagtttcctgtcttcctcactgcctatgccacttctcaccctttctactcctactctt

SEQ ID NO: 36116 - DNA, 1439 bp, Homo sapiens
catccagaagggtccagagggagaatctatggcaagagacagcagtctagagggatggaagtggtggcagaaaagctggcttttaaaaggcaagtttttattctaggctgactttctcttatgtaaaatgtagatttgctgagtgccagtgaatttataattttagaaacccatcagggagtttctagatgagtttctaagaagtctaagaaatgtccaggaaggcccttagccacctcgtggaaattgggagagaagaaatgtgtgcagagaaaagagggatttttgatgcagagaaaaagaacaggtgtgtcccggctgctggctctgagtaacccgtctaatctcactgtacagaacgtacctgcactttatactaacaatgagtgccattcagcgtgccatttatgatgttcacagtggccttccttggtgtggtccctgaagccctgcaaagcagggactgtgcggtctgaaccaaacaggggcccctgggaatagggtagcgtgttctgatacctgagctggtagtagagtcagagcaagaacaaaagccccagcgagcaatctgggttcaacccctgtcaccttagctcacgtgcctgcattgtgaagttcacggtaatagcttgactgcattctcgccatggttctgggtcaataaatcagtcagtaagcactgggtgagtaagtagtgcagagcaaagtctgagcttggtgccacaagtggataaaaaagaaatagatgactcaacctctgcttatagggaggctctgatctagctgagatagcacagaaatatttggagaatgactctagtgcagaactgaaggtgcagaatgactctgaaacgttgctgcacagcagggtccaagaaaggagagggcagtgccagctgggtatgccaggaaggcttttgggagaaaaatactggccagggtctgggagaatcagcaaacatgcctgagggtagaaaaccagtgtcccaggacagggaccctgtgcagccctggggtgggctgggtgggaccgagccggcagtgcctgcagggatgatgggcaccagagcacagctctcagcctatgtgtcccggagctctgggcgctcccaggtgtcctcactgcaccgtggtagctcctgtctcatggagccacctgtcctagcacaacagctccaatcactgctattagaacagatccaaggggcaggctgggagggtgttaggttcaaaaaggagcactatgtagaagcaagaaaagagatgaaagttttgctcctatctgcatctggccagagagcagactttgatttgcaacaccgtgtggtctctgcaggattacgaaagggaagagggggtgggcggaaggctctcctccccagtgcatcattttcagttttgtcttttactttcaaagaaagctgtctttctgacactgc

SEQ ID NO: 36117 - DNA, 506 bp, Homo sapiens
caccaagattgcaagagtgctaattttccagcatttccttggtaaaagctccctgtgattttatggggaaggggcgggacaagcagtggctgcacggatcccacccagccgctgcaccaggctgtgccaggagccagagggaagcactgtatgcaagtaaaacgcactcctgtttcaaaatgttttccagcgagctgtcctgggatctctggtgtgaatgcaccctaagcacagactgacgcgcgctcccttacccttctgaccctgcttcctgcctctgcttatcacccgccctgggttcagagtttgagatgcccaggctctgtgactcttcacttccaacggctccctgcagcccatgccggccaccactttagcactggtgaatgctaaagtgaatgaaaaggagatgggactccaactttgtagtaaaaaccacttactctcttattcatgtgcaccctctctaacccaaactatttttgatgaagtacttcaccaagatg

SEQ ID NO: 36118 - DNA, 673 bp, Homo sapiens
aaaggccagcaagacttggttaggaatatcaatgcgtcctctctcacggctaccaaccagccagtgagggatttgcagtgtgacaaaacaggcctaagccctgactggctgagggagccagtgccttacaggttagtcaaccaaatggggatagtggaaaaaacaatgcacaaaaggtttctgaaaagcagaaatcagggtgccctggagtagtcatggcagtaaattagcggcagtcagtggcatggtgcccacagctgggcttttcccggcctctttttcacatgccacaggggaccgtttgctacaagggagcctcagttggcaccactccactgtttatatttggtcatttattcccaatcctcatgagtcaaccagagagctctgccagtggtgatgattctgccgcgctgttttatctggagcagtgccatggactctgtgctgatgtataatccctgaaggaaaacaggaaaagatagccgtacacaggcaaaatatgtacatatttcactggcgcagccacaaagccagaataagtcaactagttcagctgaaacaaaagtcaacccaaacactgaaccacacaagcccaggaaattttgtttaaaaaaagaaagatatgaagaaggaggaggaagatgcgacatgctctggggagccctgtttc

SEQ ID NO: 36119 - DNA, 1904 bp, Homo sapiens
atcatgtcctttgcagcaacatggatgcagctgcaggccattatcctacgcgaattaacgtaggaacagaaaatcaaataccgccattctcacaagtgggaactaaacattgcgtactcatggatataaagatgggaatagacactagggactactagagggggcagaaagggagggaggagagaagggttgaacaaactactgggtactgttttcactacctggctgacaggatcattcgtatcccaaacctcagcatcatgcaatatgcccaccatgtaaacaagcctacacatgcaccaccccccccccgaatctaaagtaaagttgtaattacaaaataaatcaataaataagttaataaatgaaaggaccatcacattgtttttcctacaagcagccttccctggtcccctcacaagcacatcctctccctcaacgctagtcaaggaactctttccaccaatgggttcctgcagcactttgtgaggactcagttaacacactgtggggctgctttttctggctttctttctgtgtcgccaccagcttgaggacagaacactgctttacttctgtccctgcctccctgggcaggttctggtggtaagggctgttttgtttactttaaatcaccccaggcctctcttgccaaaggtcaagattcagtagtcatattctattaaagtacagacaggactttggaccaaaggcagagatgtcacagtgatcagtgcccaccaagaggacaacactccaggctcagatgagtcacagccagccacgcctgagggctgtgaggaggcagacctggaccaccatggaccaaaggtcagcctaaagcgaactcacttgcaaagacaggcagatgacaaggtcaagcaaatgaccggaagtggctctagagtagtggtccccaagggccaagccattttactattgccaaaatgccctttatttgaataactgcaggtgactgcagtagggacaattgtctattttaataccagtctttggaaaaatagaaaaccggccaccccgtgaagtgtacaagactgaaagccctgctgcagaggaggcacttctcatcgacttaccggctgcctcttcccactgcagtactgatgagggaggtagctagccaggcatgagcagggcaggaggggctctcccaacacacacaccaggaatgtcagacaaccatcaggtgatgatcaggttgttgttaactgtctctctaaaataataattgggcacagccagcaccagggaaaggcagtctcccaataaacagaaaacacctgaagctggtgatcagctgcttcccgataaggttgcaggggattgggtgagtgggctcaagcatgcgcactaagaggcaaaatggaggcgtttagctggcatatgaccttcctctaggaatgccagattggtaagggaagaacgcctcaagtgagcatgtgtacaactccagtaaacacactgtgcatgccccgctctcaagcaccgttactgcgcatgggaacagcccacccgaacagcccaccccaagggaagaatcagaggagaagtaatgcaagaccctggaagcgtgccaacatataaaccccaaatcaaaggtcaaaccctgcactcgacctcacaagttgcctgcttggctgtcttccaagtgtactttacttcctttcacttctgttctaaaacttgccttggtcttttcttctgccttatgcccctcagtcgaattttttcttctgaggaggcaagaatggaggttgctgcagacctgcgcaagttgcctctactaatgacatgtcaccagagcgtgtgagcagggtgctgggctgggctctggccaccccaagtgctctaggacagcccctgcctgcaaggacttacagcta

SEQ ID NO: 36120 - DNA, 1854 bp, Homo sapiens
tccctgtgtccatgtgttctcattgttcaactcctacttatgagtgagaacatgcggtgtttggttttctgttcctgtgttagtttgctgagaatgatggtttccagcttcatccatgtccctgcaaaggacatgaactcatccttttttatggctacatagtattcgtgattttttttaagagacaagatctcgctctgttgcccaggctggagtgtggtagcaaacatagttcactgcaatctcgaactcctgggcccaagcaatcctcctgtctcagcttctggcgtctctgaaactacaggcacacaccatcatgcccagctaattttctttatttttagtagagatgaggtctcactctgttaccaggcttgtcttgaactgctaggctcaggtgatcctcctaccttggcctcccaaagcattgggattacaggcgtaggccactggactcagccttaatttgatctttgtcagcactgtaatagctcacaatctgcttattggaagataagcgatgcaatataaaaccttatgagattaagtatcaaaggaaatatcacagccagtcagtggttcagaggaaggagtgaggtttgaggctggagtgggatccaggccaaagtggaggtcatagctgagctggaccttggaggtgggcaggatcacaagaagacaaatggagggggcattttctccactctttagtcacatttctttttataaggaaaaaaagtgcccatataccaaagattgtgctcaggaatttctgatagtgattgaagcaatccctctctctaatctcactctccctgcattccttcaagtacaagctgttttcaaaatattctagcacatttctttgcaaactgttttcatcatttggaacttgctatctcacctaaatggaatgtgagtttactcagttcagagtttttcagatgtgataggaggagtcacatgagctgaagcaaaccacccagcggcccctggaaagatcttcaagctcccagtcgtgggtgggacccttccgaccctacagtgtactgattaaaatacaagaaaaacagatgaacaaaacccaaagcagctgcccttgcttgctcagtgtgtttggatcctggaggggctagagagaaaggaaaagaggtgtcccttagtgaggagtgaccaaatgtcccctccccttgttacacactgcaggacagcattctgcttccacaggacaactcagagaggccacatcctgctgtctgtaaacactgctgctgtgtgtaaataaatctcattcctggaagggtcttgggctggagtgagcagcttgatccataccagagacagtgagcctccaagacaaggcacaggggagaggacagacggccaggcctgggtctgcggcaggccactgcgaacccccaggaagtcacttaacagtcctggttattcaccatggaaatgggaacccgaatgctgggctcaggtggttgctgtgagcagtacattaaaacattttccgtatggctgtcattggcaacggggtagtagtgagtggtggaaagatgcgttattggtctttgccccaccttcagaaaggcatcaaatttagggatttagttgtatctttaaataagatcatccacacggtcattgtgttttatgtgtgcgtggtgaacagggagacagcgatgctaaaactatgaatttgttaaatgtgaaaaattaaaatataccataattgttattaccttgtcttggaggactgtgtgtgtgtcttatatacagattttcttctgcctctgccacccctgagacagcaagaccaacccatcctcctcctcctcagcctgctca

SEQ ID NO: 36121 - DNA, 1101 bp, Homo sapiens
cctgatctcgtgatccacccacctcggcctcccaaagtgctgggattataggtgtgagccactgcgcctggccaagacgggttctttaacagtggaaatagaaacgtcatcttctgcaacgctgagcatctgcaaagccccccacagacagtctactcaggtgagaactgaatttcctcccagaacactctctccattgtcatccttccttccccgatcccaggtgaatacatgtggcacagagcccctcaaagaggccttccattcccttgtccactaatttgattttcagaatgtggagccacgtgccccctggggcctggcctctgctccctgctgcaggtgcagaagcaaacagaccatggggccatgaagtttaacaggctgcccaggcccgggcactcagaccctgctgcttctcccacctcccacctcgcacctccccacagccttttctatcacacagccaaggattcctgttccccatcctctgttgcttatcatttctcctgacccacgcacagaagggactctatttctaggagcatcagagagaagctttcaaacttttttgctcatgacccacagcaaaaagtgcattttctgttgcaattaagtgcacatgcacacacagctgactcacatctaagtcaaaagtttcaggaagcaatacttcctttcactacctgcaaagccttctgttactttctgttctactcttcccaggccgcaccaccccccacatttcaacaatgctcgttgaaatccacgaaactgatttcccaatcccctaacggtttatggtcagcaatttggaaaacactggctgaaatactaatgaaagggcatcgcgggccttccctgatgcgaggggaggaaggaaggctttgctcagctctacgttcccacagacccacttttcctgccctttgccccacatcccacctgccacttgtgattaaataacagtttaacatcaccaaagctccctttcactcaagaactaactcaattaggcttgagctggtgggagcttaaagcagattaagggaagacaaaggaggctttggggtttatcttcagctttcatgttcctaggag

SEQ ID NO: 36122 - DNA, 881 bp, Homo sapiens
agttgtcagggatcatcctttcctttctattaaaaaaaaatttaaatcacccccgcccacatctcccacaggactgtgggacattccgtgccttccccaggacttcctggtaataccaagtgaccccctcccaactctcactctgaattcctgcccttatcacaactctcatcatctggaacttctctctctccctctctctctctctttctccctcttgtttacttgctcactttttctttcttcttcctccagggtggacacagcctcttcccctctgttctctaagtacaacaagcagtgtgctattgggcccaaaatctgtcactgacagtttaggattacgaagatctgagactgaacgttggattcagtattcctgtggttcacaggttatgtccgctgccagggactcacacactggcctcctctgtgtggtgccagccagccaccatattgctgggactccttatctccacagggaggctgctgcccttccacctcaccaggtcccagggccagacctttggtctctcctgctaccacagagaaaacagaacgttatgcaaacaactgtctgtctcaacctctcctatacaaggcccaggttaacctttgaataaccaaaaagccattaagggctgggcacagtgcctcttgcctgtaatcccagcactttgggaatacgaggcaggaggattgcttgagcccaggagtttgagaccagccagggcaacatagcgagacttcatctctactagaaataaaaaaaagttagctgggcatggtgacatgtgtcagtagtcccagctgcgcaagagactggggtgggaggatcgcttaagaccaggagtttgaggcttcagtgagcaatgatagta

SEQ ID NO: 36123 - DNA, 831 bp, Homo sapiens
atccacctgggtcagcagcatcttcgaatacctgctgtgtgatgtcagttcttgcaaattgacctgaagtgaggctgcaagtcttcttttctggggtgttgcccatcacagttctcttcttactgtggggacccagcccaggggctgacctggactttcagagaccctccagggacaaatgctgagggagagagcacagcaccacctacaggatcagctctggtccagctgcatgtccacatgaaaccataatttgcacccactgcccatgacccctggataaaatggggctggggggcggggcattgtatattcctaccacaccacctcccagcaccccgcacactgcctgctacccaaacactgctcaattaatgtttcttaaacaaataactgctgaactatttttgaccttgccaattttttgtgttgtaatcacccattagacttggctttgaaaaaaaatgagtaattaataacaaatgtactccatgtaagcaaaggtaccaaacatgagtttccattaaaaaagcttactttccataaccacattagcattttattagcaaaagagtgtttcagttaaaactggaataacattgagatcatttgttgtccaaggatttctcaattccagctatcaggcctcctctgtaaacctcagaattgctatttaagcctacagaactttatgttctgatattcttaagtgaagagtccttttaaatggccagttgctatttagaaaactgtctaagctgattggagaggtaattatctattttccctcagtttcactggaagaaatgtgaatttgttgaccaattattg

SEQ ID NO: 36124 - DNA, 984 bp, Homo sapiens
ctctgatcaaactagggggcgaaggatggcaggcagggggttgtaaggacagtgatgaccagtcctgatgcctgcacagtgcacaccagcaccagccctcaccaatagcaggaaacaacactgagctcccctccaagcgtgtccatgatgtggctggtctgggaagcggaggtttcccagagcaatgtccagagcgtggagcagagactcgctctggaggaagccaggggagcagcctcctccctagagctttggaagagcctgggttaaaggttagctgggtgctcagagggcaaggaaatgcaaagagaagcggagccgcctggaagggtgggtcttgggagctcagctgagctcattaacttttaaagctgttcttgcccctcatccctcacagcacctttccccaggcagcctgaattgcacagccctgcccggaagctgctgctgctgcttcagtgactctggcaccctgagaagcctgcgtcacccttaacccagtaataactgggctattcaacctgtcagtccttcccagaacccagcagtcccccaacgcctgagaaaggaaatgcagcctccaaaggcaccaggcccactactgggaaaattcttaagacactgacattttaagttaagcccatggaaggggaaaactcaagagagctcattaaacctcccaggtaaaaatgctgtaatggaaaaggctgggaaactgacaagcaaaaaagtgtgaccctttctcgggtttgacgcccagtctctggccagcctggccctgacctcccaccccctggggtcctgtccaccaaggagtcagagtcagcactggcctggctgggccttctaagtgcaaaggaggctgttccaggctcccttggggtataaaacatttacaagttggcaaattgtggttacacagatttgttatttaagccagttagacatggttcggccccatgatcagcctttccagttcctctt

SEQ ID NO: 36125 - DNA, 899 bp, Homo sapiens
ctactctcccacagcatcctccctgagccctcaatcaaagcacctacaatactgccctcatagggaggtgctatctttctgtctttccctgagcgctgggacccattgcatttcacccatttatccccaaggcctagcacatgtctagcacaacacagcaattaaataaaccctgtggaataaattaattgtggaatagcctggtttccatggatggttatacaggttgtgcactgcacaaccatgtgcaacattcctggaaaaagacagaaatttattgattggttgggggttttgaatagccaaggaaaactatttgaccattgcatgccctctacctgggaaaatcacataccctaacaacttcttaggccttactgcatggtcacatggggtaacattcatacagtttctccagctctctagtctgcccacaaaggtgatattgttcaaaggggcaatctttccttgccttccaccagtctattcttaacttgacccaggtaatctctttcactgcttaccaaagatatttcagctccagctatcctgtttgcagaatggtgacgtattccattaggcaggcagggcctaacaaatatcctctctgaagccatcagaaattgtgtcacttaaacctgggcctggcaagagccccaggccccagcatgtctcagaatgcccagcacttgctgtctgccatgtctcagaacacccaccatcaggaccagccaggaagaaggaagagctttcatcacaagcacactgcgacagggggcctacattgagttcccctcaagaaccatccagtggcacaagcttcatggagactaagggatttttctagggtaactggttttccaaccatattactcaggtcatgagagaatcacaggtgt

SEQ ID NO: 36126 - DNA, 1055 bp, Homo sapiens
ggaaagggagaagtctcccaagaggcatctgaggaagatctctttggtctaaatttaaaaagaaaaaaaaatgcttggcaggaaatcatcgccttcttctactgaacgttcttgtagaataaggggtcctgacactgtggcatttaccctacgaccatgcagtgggcctatgacaaagatgcaggatgaagatggggctcaacaatatggtggagcctcgaagccaaccagcgcgcaagctctctcgccacatgttcttggagatggtattttcacctccttggctgagctcttgggggttgctttttctgttatgggaccagttaggatgcatttggctgatagtcaccaaaaaaccaactagccgatgatttaaatcaggagatggcaagctttttctgcaaagggctagaacataaatatttgaggctttgtgggccacacagcctctgtcacaacaactcatgcctgtccctgaagctcaaaaacaccactggtgaaatgtaagcacaaggctagctgtgtgccaataaaacacaattcgcaaaaccaggctggttttggcccacatggtttaagccatgaaaacattcatcgtttacttaattaaaatccctggcaagatcccaggcctggctgggtaactgtgacgtgggcacctctgcagtttcccatccttcctccccaggctccaaggtggaatggacaggaggccgagaggggtcccgatgtcctcctcactgcccggcacactggccttgcatttcatgtgccatcctcagtggcaaggcgaggtgctgtctcagcctctgtcgtgagaaatgagcaagtggggaaatgggtggggacggctccggggagctgaccaagagcgtcagccacgtgacttgtcaaggagacccagggagcagtgactgagagaggaggccagcctgggaaaggagccaggtgcgccagcccccgccctggggccaggacaacagcttccatgcacacacaagaagcagaaaacttttttttttttgagacagacttttgctctaatcacccaggct

SEQ ID NO: 36127 - DNA, 447 bp, Homo sapiens
ctcaatgggacagagtccaagtttcggagcgcagaatcctgactctgccagttaggacagcctggaaagccctgagagaagcctcaggaaaagctgatcttcctggaataaaattgttttcctgcaagtggcccctgagtatccaagggccccaacgatcctagcagctttctgagtgggagtgactactctttagaaagaattgatgccatgtagtaactggctccccagcctgaacacaagagcgggagggaagagctgaacaattactccattgaaatcatcttcacgtgcactgcagtgtgggaaggtggtttgataaagcctggctaatgttaaatctctgtaaggattaaagggttgattcattaataattacctgcagtactatttgcgattctgttgcccaagacaacatcttttagggcagctttcttttcatggcca

SEQ ID NO: 36128 - DNA, 873 bp, Homo sapiens
ctttttctaggagctctgcccctacatgggtgcgtccctccctgcctctgtctctcagcttaaccctgcctcaaatttagtctcgtgacagaaaaaatgggactaatctgattggcagaacccacatcacatccagaatcctagcgcaaaggtgctgggaagcgcagacttgctttccagctgttgcagaactaatggcacagaggaggaagctggggtggatgccacacacgcccatcagccacgagttagcaaaggaagcagagacctatttccaggggactttggcttctgagctgctggtggtgggggaagggaaagggaagggcactggggtgaaaacaacccttcttgctttcctgtgcagaggactcaggatgtggttggtgagcccatcatctggggagacgcatgaaggggaaagggggaaagaaagcttcaaaagaaacatggctgaagggttcccgtcctggagaagaaggggtggtgctggccgtgacacttaccctattgcctcacagacctggagcgattgacctctcttgtgcacaccagggagtgggagggacagggggatgaggacataggcctgccttgaagagcttgcaccctaatgagaaagctagagctgagaagcgcaaagacaggatggaacaggcagggtccttacagtgctacagatgggtaagctgaggcctggggggtgaccacctgcctggcatcccctgtgccaacctccaccccccagcaggctacttccatagcgatccaggcttcagagcatctcaggttccagagaggctccaaaacgcaccaactcaaagtctgttttactggaaatgttcatgaaaatctattccattactatttaga

SEQ ID NO: 36129 - DNA, 1005 bp, Homo sapiens
gcctctccaccttcacccctggcttcttctgctgtcaaactcctctgagtttttaagtacaaaatgtgacactttctggtgttgaccaagctggaaaccagcaggtgcccacatcttagactacccctgccctcaacagcagcttacatacttagagtttattaaatctgtttaccactactctgcaccttagcacaagcattagttaatcccctgtttggagatcaaacccaagaaacatttaaatatgatctcctgcccagtgtggcaaacaaatcatttccatcatggaaaaaaaccagggaggaaaacaatggtgcattgaaaccagttatgcaacacaatcctcagtgatcaaagtcctctggttttcaattaacgcaggacattcagaggaagagggctgcctgcttattgattagttgattgtttatgaaatgaagaaacctcatcttttctctatattctactactggctaggggcctgggaagtgaaaattgccaccagcaccatcctgcaaagcagagaacattccatttactcctccttgcttcctgggtgccagcacccccatcttacccaagctagaccctaaggaacctctagtttctccttcccctcacctcctcatgtaatttctccccaaataacatcacatttgcctgagctctgcctctcagatccctgctctcctttactcctgtctcttcattactcctttctcaccaagacagtaacagcagcttccatccttgtctctttcctgtcaacctatgtgactgctaatgctattcaactttctacatcttagattgggttctaactgtcctttgacacaagccttcctttgagatgtgattgaaagtgatgtctgttacttctggcagagcctcaagggcctgtactcgctttgccatgatcctttttccctctgccattgtgactgaccatgttcctgatgaggctgccacatgagcctgaggaacagagtggtaccaccccac

SEQ ID NO: 36130 - DNA, 818 bp, Homo sapiens
caagtgtgcaccagggccccgctgtttcttcccccagggcgacttccaagcctgcgaatgccggctcttgtttggggactcccacaaacgtttacacgggatttggataacctacaattcttgacttaagcttcattaggattttaaactccgaggggagagctcatgtctgactttcttcgtattccaccgaacagggccagggcagagaggcctctctgcttgtggactctggtccctgcacttcagtcctgttgtcaccagacattatctcagcaaccacagacacctcagggaaatccgcccttcaccgcgagccaggagtgtcctgccccagactttcccacagggccatgaccaccctggaagcacagcgctgctcagtgggctgcggtcctgggcccttatctcatcagcacacaagcccgttattcagccgtatttacataacccttccctcccgcctgcctcccacctccagctgctccctgggcacaaagctccggtttcacttaatcaaccatgcagtctggtgtcccaggtaacaagccatccatttgtgttggcagcatttgaaggtgaggggcagataaccctgagccctgccagtggctccgctgacagcactgggagtcctgggccacttcctcaagcaatacatccagagcaagggttcctctgggaacacaaaatcactccctctgtgtccagactcacatgataagacttcttacagcagctcactttcctctgaggacagaacgcaggacaaccagggcacctgtctgtcttgatggcatcttcccccacacgctttc

SEQ ID NO: 36131 - DNA, 2389 bp, Homo sapiens
gaacaggcaatttacaggagaggagatacaaaggactgctgacaagccttcagaagagaaatttaaactcattattatcagaaaaataaaaataaaacaacaaaacatcacattacacctacgagattggcaacaagtcaaaagctgggcatgaggctccaggaggctaattgcattgctggggcagggatggagtggacgggtgcagccactctggggagcaacttggtggttgttattccatctgggtatactcatacttcatgactcagcaatccagctcattcatatgtatatttatgtatgcaggtattcaggagctggatatatatgtaaatcttccagggaagttctcacagatgtcctagaggggaatgaatgtgtgaatgttctcatcccagtttggtcctggtactggggagttgagggggacctagatacctgtttctaggtgaagcaacgtataccatgtggtgggtactcactgtggaatcctatgcagtggtgtgaaaccacacactgggtgtacacacaaaaacacagacagagaaacattgtgctgagtaaaaaaggaaacagaattacatctatagcacattactatttatgtaaattgaaaagcacacacacaaaatcacagtatgtgttttataaaatatatttattgtctttttttttttttttgagctagggtcttgctccgtctcccaggctaaagtacaatcatggttcactgcagccttgacttcctgggctaaagtgatcctcccacctcaacctccccaagtacttggaactacagccacatgccaccatgcctggctaatttttaaaagatttttttagagatagtatcttgctgtgttgcccaggctggtctcaaactcctggcttcaagcgatcctccctcctcagcttctccaagtactgagattacaggtgtgagccaccgatcctggcctataaactatatcaatatttgtactgatgtaaagtttatgcataaactatattgtttttaaactaaatgtttgtttacaaatgaaaagatggatacagacatagatccaacatgaggaatggttgcccatgaaggaaagaaaatgagagtggaaacacctctaaaaaggaatgaataaattaaaattagaaaccagggtggaatcttgtgcagaacaatgatgattaatgtgccctgagccaagaagtatgattaactcagccctccatgtcatgtctgagtcaaaaaaagtgtccacaattatgaaacacaatgattaggaaatgatctttttttttttttttacacaatggtgtcatctatcatagcgtctctttaaaccacaatgtttccttatctctttagactattttgttttttaaaaagtaagtttccaattaaactattaaataatgcatctgtcatacagggctacacccatatgcctttaatatatatataatatatatacataaatcagacatgttttctatctttgtcctaaacaggtactttggtctaatttttagaggaattggtctccaaacaagtccctcagaactagtcatgacaatctactggagatggaaagagatcttagaaattcaatcctacctagtgaagaaattaagttctagctgtttcctgtgtgactgctgctgctcttcctttctctacacatcagctgtgcatggcccccaggttgggcgccatgcacagctatcctgggggtctggatggtggtggcctgtggctctcattttttcactccttcactccttccactgctgctgtgtgaggcagttacctgtgtccatttagactgtctagttttaaccagattcatgcttacaaaacaggcataaaagattcctgcaaagaaactgcagagggaaaataaagttaaccaagaaagccagctgatccagcagaaaggagcaatggtggccttttccctactcctgacacaagctcttcaacagccatgataacagataaaacaatggcaatcgaatcagaccaggcgaacattcagccacaaacactgaaaccatcaagaagatgtaaagactggatttatagccactatcaatctctcttatgtgtgtgttgtgccgtgacagtggctaatgatagcataaaccatccagacattgacaggctaaacgagaacatgcataaaaggacagacctttacaggttcttcagcaatggttaaagtgaggaaatgtttaattaatccaccactttgaaagctcactgcacttaacaacaaatttaaaaacttctttcacatcttctcacttcataacagtagactaaaaacatcacttaacatttgggaaatgcacaattttttccctactagggaattagatttccttgcta

SEQ ID NO: 36132 - DNA, 2491 bp, Homo sapiens
atcatataccacatataccacctgccatatgccatataccatctgccatccattatctaccattcatcatataccatatatcatctcccatctaccatccaccatccatcatacaccacccaccatatgccatctgtcatctaccatccactattatccaccatattccatataccattcatcatatatcatctaccatctaccatccaccatccaccatctaccattcaccatgtactatctaccatccaccatctaccatattccatatgccattcatcatataccacctatcatccaccatctaccatctgccatctaccatccaccatcctccaccatttaccatgcaccatctaccatattccatataccatttaccacataccatgtatcatccatcatctaccatctaccatctaccatccaccatccaccatcatgcaccatttacgatgcaccatctgccatctaccacataccactgccatctgccatccaccatccatcacataccacccaccatctaccatctaccatcaattgtctatcatcaaccatctatcatgtactatccaccattcttcatctaccatctgtcatatgccattcaccatccaccatctaccatataccatgtaccatccagcatataccatctactctctgtcatccaccatctaccatatactatcaaccatctaatatctaccatccactatctaccatataccatctaccatctgctacataccatatgccatctgcttggtagaaacttccccttcgggcactgatgaaagctaagtgacctaaaagagttggcgtggcctttccaaggtagctggttacaatcagagactaaccctctaccctaatcagttgtaatatggccacaaattagtagttgtctaactctatctacaatatgaaagggaatttgaacccagaacttacaaaaccaaagtaaagtctaagagttcttcaattgattcgattctctgatttcccagatttcagtgaggaggcagctgccagccctgtcatttccaaattggttttcccattggatacatccacccaaggcccatctggtagttactgaaatgtgtcacaggggcaaacaaccaaaggaaaataatcatcagaaagcaacagaaacacaagtgtttcaaccctgatgaaatagtcttcccaaggctatttatactgcgtcatcttcaaaaggtcaccaggcactggatgacttcatctatttaccttgattgagcacaaagtccatgtcctgcttgtggcagtggctgccgtccctgccccacactcacccccacgacagccatgttcctgctcatgcccaccctcctccaccccacactcacctagaggaggaaggggccagggaagcctgccacatctgtcaagacaacctcccatgcagggtcacagcagcaggtagctagtttaaattgtggtatttacaaccaaatgaaagaggtaaggagtcaagtggagatcactggaaagtaaacactgcaaaacctccaaaaccagaagcccagaggcacattttctttggcaataggccaactatttgttcctttggcaagtgtggggtttatttaactagaaaaagagagcctgatttaattgtgtgcatgcatgtgtgtgtacatacacacacggaaggggggtggtaacggggctcctccagctagtcagagtttctgctctcttatgtcagaaaacaggccaacactctgaagtcaaagtcaattactgaacatgggtgtgctcttcctctttatttgcatttctggaaaggaaggggagaaggggtataagtaatcattgttaaatgtctgctctgactggatagacgctaggccagtggatgtttacagcaacagccctctgttagaaacacatttctattgcagccccgtacacacatacacacacacacatgcatacacacacatttacacatatagttcatgaaaatgatattaactattactacatgtgaggcactctgctattttctattctatttcttatgtcttttttttttttttttcattttttagagacaggtttttgctccatctcccagactagtgtgcaatggtgtgatcatagctcactgcaaactcaaactcccgggctcaagcgatcctcctgtctcagcctcccaaataggtaggactacatgtgtgcactatgcaccactacactcaattaatttttttattttttatctttttttttttttgtagctacagagtctcgctatgttatccaggctggtctcaaactcctggcctcaagagatcttcccacctcagcctcccaaagtgctggtgttgcaggtgtgcaccactacatccagcctatatctattttttttaattgagatgaagtctcactctgtcacatagactggagtacagtggcacaatctcagctcactgcaatctctgcctcctgggtt

SEQ ID NO: 36133 - DNA, 1063 bp, Homo sapiens
gcggatcacaaggtcaagagatcgagatcatcctggcctacatggtgaaaccccgtctctactaaaaatacaaaaaattagccaggcatggtggcacatgcctgtaatcccagctacttgggaggctgaggcagaattgcttgaacccaggaggcagaggttgcagtacgcagagattgtgccactgcactacagagtggtgacagagcgagactctgtctcaaaaatatgtatatgtgatttatataccacaaaattcacccacttaaagtgtacacagctcagtagattttcgtacgtttccagagttgtacaattattatcacaatctaatttagaacatttacctcaccccataaagaaactttatacccaatatctattctaatttttttaatgtcagtcataatgaaatgaaatctatttcattcatgggtcagaattgagaattgtaaaatcaatgtagctgtttcaataaaatgtctcatttattcctcacaagacctcaaaagcaggtgttaactatgcccaggtcacagaaccgagaggcagagagacgcacaacatgtccaaggtcacacactcgtaagcaacagaactgaaagtccaagctggtcctccaggcaccctttggagttcttccagtggcattgagacagcaagagccgctgtctgtcccctgaagggtgaatgctgcagtcacaaaagcaggccggccccacacatatctttgcagtgctgggagccaccgctcgtggtcagcaaggtgatctcactgcacaaaactgattacaatcagaaatgctgccagacaacctgggctcagagctcagcaatgaaattcataactgggctgagctggggtgatgcttagcacagcaggattcggaagatgactttgagaagcaaactaataacaaaaggccttcaggaagaatgctgcctcgaattcttttaacctggaacagatgaccatatttcagaagctgcaaaccatcacatgcatatatggatatttttatagcattaaactattgttgtcaagtgaaaattagagcaattt

SEQ ID NO: 36134 - DNA, 1459 bp, Homo sapiens
tgtgcatatgcgtgtttgtgtatatttgtgtgcatgcttgtattgtgtttgtgtatgtttgtctgtgtagtatgtgtttgtgtgtgtttgagtatatgagtgtgtttatgtttatatgtgtgtttgagtgtgtgtgagattctgtgtgtgtgtgtgtgtgtgctgcaacagcagccggggaaagggttaggatgcatggaatggtgaaggtgctggccagccttccactgcacatgctatttaataagcatatctgactcatccaccacttggcttgttgggtggtagaggagagtggaggtcattaggagaggaaagtatattagaaatgagtgttttcctttccaatctagccctatcctgtttctagatacctctaagttattaaagcaggttccctttagagatctgtttcctattctataagtagaatttatgtatttgttcaacaagcattgcctgagcaccttcagctgggacagacagcacaaaactgtttcattttctcccagaaactccctattggttggcgtctaggatcctgtctgagatgttcatgaacatacattaccaacttggatgctggggaagaacggagtttggtccatgcccaagagccatgccaaagaaccagaagccctactcccaatctgaacacgcctgtgctttgggctcagataaactgacatcgctctaactcccaatcaaagccagggttggggccccatggaatagcaggggcggtgggtgcagagcagtggagcgagcatctgatggggcagggtgcgcacctcgccaaagctgggtgtggctttgtcacccaccattctaggttaggcttgacgtttcatggacaattcacagcaatgggggctcgctctgtaagatgcagtgcagggttaaggggtgcggattgatcccaaaagagaacagagctggtcttgatagaggttggaccgccttagagcacaggatgctggcactgaaaagcagtgacagggctggggtgcagttcagggcagctgggcccggccagcagcagctcatggctggcgtcctcagcagcctctgatcccagtgatggcgtgaccaggtctcccctaggaaatgggttcttttgaacttttcagaggtatgaaggaaagcctccctttttatgagttctgctgcaggcagaggaagtggctgtgtgcagaggagagcaattagaggcaaaggtcggcaaactgctcaccaggcagggcatgctgcagcctgtcggggatggatggggtgtgggccaaggctctagtgccctcctgctgtgggatctgggtgcggggaggagctcctggacaaaggcaggaagccacttcaaggtatccccatttgggatgaatccactttgaccccacttgccacagtactctggaagacagtggcttggtccagctccccattcatccagtgttgttaggaa

SEQ ID NO: 36135 - DNA, 948 bp, Homo sapiens
agaagcccaaccagctccccctcccagaactggaatttctgtcccctgtaccatgaaaacatctcacctcctgagctgagtagccacagagacaaagagggtaaggaagggaaagaaccttaggcttggggctgtttcctatacctgtggtttttaaaaggaatctggcattcctaggcagacaagaatgcaaactggccaaggtacagagacacctgaatcctgttcctcagacccagagagacgctgggaggtcatatttcctgctttgttttctgctgtaagattccgctgtaactccttgcctaacagaagtgggtgagtgaaggcagcaacgtttcctacagcggacctccgtgtgactccagctcctccctaaaacataaagcctgctagagcatggggctgaagagagtgaagagaaatcactgcgtggctttgggtgtcagtggcaggtgttcttactgtatagaggggagctgaagactccctggacgcaagtctccaccccagttagagggaggagttggtaaactgggggaggcggcagagaaaaagtttcaacctcaacactgaaaaacagcctggggatcttggcagggttttagccctcacatctgccttcgaatgagggacttccagctgacctctgacagtgtcctccagtattatgcaagggcagagttaagcttttggcagcaggcaggagcacagaagtgccagggacattctgttaacaaagcacaaagggtagaaggaaggaacaagccattcttgtccactgtgcagactgagctccattgtgttgatccaacatgacagaatttgtttcattaaagactccctcctcaccaccactgtcaaagccaaatccctccaaaagccagaacccaagccccaatgtgctgcaaggattctgcagctctgcagtcagtgggtgaagcccaa

SEQ ID NO: 36136 - DNA, 2698 bp, Homo sapiens
acaagagaaaaataccgacccaaatagccactggggaagagggaagctctgatgccaatttatgtggaggatggagccaaactgactcacacacacacacacaaaagtatgtactggcattttccacacagtccaggtcacttgggagcttagccaaggatattttgagcattcgactacctattgtgaacaaggttgggaactatgaggcgctatgtggccctgatcaagctcagatgggccaaatcctcaaccaaaattctctttcccataaatgtttatctctacatttcccacagaaggggattctaactcagttttgcttctgaaaccaaactatccaaggccaggtgagatgactcatgcctgtaatcccagcaatttgggaggccaaggagggaggatgcttgaactcaggagttcaagaccagcctgggcaacataacaagaccccatctctacaaaaaatttaaaaattggcgcggtgtggtcgtgtgagcccctagccccagctactcaggaggctgaggcaggagaatcggttgggctgggctgacagtgccagaccctgttaaaaaataaaaattaaaaaaactcctaaatttggaaacacatccccagctgagggccgggagatacttctcaaccgtaatccagaaccctctaaaatgggatgtggagaggctgcagcctgtagtcttgcgatgaccttttagcacctgggcatcttgcgcttctgtcattccgcccacacccgctcagctccatccaagagggcccggcagtttggagtgaaagcttagcttcccaacgggtaaatgaacctgcctcccattcacagggcggcctctggctggacacctggggcctactgcctccttgttacacattaaccaagttctggcctccatcgtaacagcgtcagggaagttttttcctggctgacagccgcagatgatgaccgaagacaacgtcttaactgagacgggccaatttggcaaatggactgctttcctccccagtgcgggcaccttcctcctctgtccggcaactggaccccactgtccccagccctctgtcacccccaaacctgcccaccgcccgcctctacccgaccctccctcagggaaatcgggactcagcccccaacgcccccacctgccgctctgcccacctcagcgcacaccgccagagcgcccagcccgcgcacgtgcttccggcgcgcgccgaagtcctcacgcgccccgccccggcctccccgtgcgcacgcgcgaacgcggggtgggccgggcctcgcgtagcccatctcctcttcctcctcgcggtcgcggccggacggagggtggagggccctgcgcctgcgcggagctggagtccggctgggccgcagccgctgggagaccggcggttgccgtggggaccggtcgggcccctccctcctccggtcccccgccccaggtccttccccaccgagacgcgccggcggaccgcgggcgagtgcagccggtgacccggcgagaggcggcgccgctcccaagatgtcgcagacggccatgtccgaaacctacggtacgaggcccgggctggcggggcgcgcgggtcgggccgcggggggcgtcggtggcgcggggccgggcctgggctgcgggggtcttgagggtggcggtggcgccggccggagccgggggacggatctcggaggtgtctgggcttgggaccgggatgggggacgcgggccgctgggggctcgggtggggtagcgggtgcgcggggcgcgggggcgctgtgcacagcgcattggcgtgatccgccttttcaagtttcctcttgctctttctctgctcttgcactcttagcgcttttcccctctcagtctaatgtaaataactgaaggtttgaaaagccagcttgatgttcggtttcagctgcgatattatccccagcgagcctgtgaagggcttagggcgacgcctgtgttcctcaaatacttcagtttgacctttcctggtttggaattccttgctttacattgggattacagtgaggagttattaataggctaattcattcatctcttcctccggagacctcttgcttcgtttatttctccctccctctcagtgttttttagccttttctgggttgcattttggctatttataaacatgtcttgtctccttcttaagaccgtaagcaccttggaagcaaagccctggctgtttaatctttgtttcccctgcagcacccagacctggaggtgcttgacaaatactgttttgaataagcgaaagctttcccagtgcatatgctgtgtgcttttttttttttctccccttttttggccttgcgtggtaagaataaacaacttgtactttgtatcagagttgaatattaatagatgtttaccagtccctaatcactctttcagatgtatgtattctcagattaagactttgatttggagttttacagtcccagagagaggctcaagttcaaaattacatacctcaagccaaattagtcctgtctccatctgtcctggcatgctgcttccttctctgcaacaaatactgtggaatggcattagggaagcgagcaccgtgctgggagggctgtacatcctgcagaaacacagcagacacggctctggtctcatggagcgtagtctattgagggaatgcagtattaatccaattgt

SEQ ID NO: 36137 - DNA, 635 bp, Homo sapiens
cttgtagtcccggctacttgggaggctgaggcatgagaattgcttgaacccaggaggtgaagtttacagtgagccaagattgtgccactgcactccatcctgggcaacagagtgagactctgtctcaaaaaaagaaaatgagttttagaaggagcaagcaggacagttgaagtttgccaagctgaagtaaaagtcacctagaaccaagtcctaggctgtcactttgacgtatcagtggccatatttatacagcattgttccttaaaagtgaaacagtcaggctctcttctggacatttgcctctgagctggtgaaggaatgtttgcctaacctttaaactcctttgtactctgtgcttatttgctcttctgtaaaaggaggctctgtgtagcttgacagagagatgaggaatgaaatgtactgggtttttgtttccctttttttttttttttttttttgagacaggacctcgctctgtcacccatgctggagtgcagtgacacaatcacggctcactgccacctccatctccccatctcaagtgatcctcccacttcagcctcctgagtagctgggaccacaggtgcatgccaccacacctggctaattttttttttttttttaattttttttgt

SEQ ID NO: 36138 - DNA, 464 bp, Homo sapiens
gcattttgccttcattaattactctgtaatatggctattcacctgttcctgttaagcctttctgtagttgttaagcactatacacttaacatataaaacatacacatggtatgctatatatatgtcatccactgttaagcaaggaaaaagaaaaaaccacagattaaaaatacaaaataaacccataaaactagtacagattctgccatattctgatatggagtcatgatgagtgagatcatcattgctgcaaaccagcaaacattgaacactctgagagaacatgatgcattcctgccagaatgatttctgtgagatccaggtaattcagcactaactgaaactcctcatgaagttggattctcatcatctaccaaggaataattcattatctccttatagttttatctgcgttatctaaatacatgtatcaccacacagaaaaagaattgatggacagctca

SEQ ID NO: 36139 - DNA, 2509 bp, Homo sapiens
atgtgatttcaggcagaataacccctcacatgtatgttcaaatatctttgaatcatttctcttttaaaccagtgtctgtccctgtgttgtggtttacaaagcaagcatgggtgttttttcatgggaaagtgggatacagtaaagggtctcaattggttgaaagtaaaaccagtataattcttccaggtccgtgacgagaagttattaccgaggcgcggccggggctctcctcgtctatgatatcaccaggtaatgccagctccccctggtgaaggagggtgctcagtgccctgcagcccaaaggctggtcttggcgaggtgccctccgtgcagtgtgtgctttgtgtgtccagggacggtggtgtggctggcatccaggaagccccttagcccttccatctggggtctcagaggtctttgaacgagcccctaccactgctttcccctgcagagaaatgtgtttgtaaggttttaggtggataaagcaatccatgctattacattacatttcttgacatgatgcttggacactttccttaaggttcacaaagctttatgtatggaaagttattagaagtgagttgagagagggtgaggacacagactctgggctgagattgctgggttcaaatcccagttgcagtcactagctgattgaccctctcaggccaggtgcttcagctgcctgggccttagtttccttgtctgtaagatggagatagtaataatcacatgatcctcaggaggttattgggaggtttaaattagttaatgtgaagcagttagtagctgtttgtgacatatggcaatttaactgaaataaaaaattctgttcctcgattgcactggccacatttcaggtcctcagtagctacatgtggctggtgactaccatatcaggacagattatagaacattcctatccatgaggaaatcacattcagcagtgctgatctcagtagcactgtcttagaaatgtgtcatctaaatggcatcatctgggggccctttctgggtaggaacctgtccagtgagaggatgtcactcagcagccgcttccctcttccaatctgtgtcccgggagccaggcgttctgagaggaggaaggcagtttctggcccagcccttcctgcacttgcccaggcagtgaaaggctcagcctgctaaagtgtgaagtcatcaatcaggctagcaaagtgccatgagaagaactcaatccttagacacatgagggccaaaaatagtaagtctgagagttggtcctggagtcagacagagctggtcaagtcctgactttgccactggctgctgtatgacctagggcaacgtaattaatctctctgggccttggatttctcagagaaaaggggaataatggcagtctgtgtcatggaatctttataaagaatcaatgtgataaagtcctgtaaaacaaagtgctggcacattgcaaggattcattaagtggcagcaattagctatgaaatcttgcctaccagagtctagtgccttgcgcatgctaagagctcaatagatatttgtcaattgaatgaaggaacatctctttccttttgccccatgactgggcaaacgaaaaataacaaaatatctcacttgctgtctcattttaccagaaacaaaatggaacaaactgtgggtatggtatatacttggtgcattcacgttgtctgagttatcttaaaggtgttggtgccattaccctgaaatgttgaaaagcggtatgagtagtgagaatgactggaaagagttgctagttttataaaatacatgtattattttcacaatcttatattacgcagccgagaaacctacaatgcgcttactaattggttaacagatgcccgaatgctagcgagccagaacattgtgatcatcctttgtggaaacaagaaggacctggatgcagatcgtgaagttaccttcttagaagcctccagatttgctcaagaaaatggcaagtgaccttttacttcttactatttttcaaatcgcatatttgaggataatagcatttctttgaatttaaaacatatattggaatttcaagattaaactagatttaggaaatgtggaatttccaattgtttttttctataaattagacctattaagcatatttttagtatattgcattctgcctgcagaagttactataatgataaaagcaaatgtagtaacattatgtaatgacttttcagtctagggtctttgaatattagagatcttgggctaaagtgaaattaataatatttaaagactctaaccaaatgatgtcattattttttaatgtattttgaaggaaatttggtgaaatattaacccaaatagaaagggaagcggaagaagaaatacttggctttttggcttcattttaagtcatttggttatagacaactttgaaacttttttgaatttccatatagaatacatgaaaatgccacataaaattaatggttgcttaattaatggataagagaatgatttttta

SEQ ID NO: 36140 - DNA, 1295 bp, Homo sapiens
actctaagattccaaattatattgtaacttgactagtttcttgctaagaaaataaacatgagagaaatccatatgccatcatgacagtttttaaaaagctgtttagaaatcagaagtttagaatgttaacaaagatgaaaaggaatttagatgtcatctaaactcatttttacaagtgaggatacaagaggctagagaggccatggtttgctgagagagcaagcagaacaggcctttctgctgagatgaacagccactctggtgggtagaaagagtattaattcctatactgtctcttcatgggctgtatgacagattgcaatatagtcccctaaaaagtgtaaacacttgtaggtcatatttgtggtgacactcagattgtttgaagaaggacattgcaactttccctgaaatcaatggcagggccattttggcaagccagctcctttctgatgggctgtcatttggctggggaagcctggttgcttgctcagccccttcaccaggttaagtgctagcacaagatagcagttacttttcagaaaaggctaaaattcttttaacatttaaaaaacacataatgacatatattgattttatatttacagaaatatatggttttaggtcataaattatatttcgtctgcttttctaagagaatgctacacaggcttttgtaagtgaaaattatgatcatcttctaaacatgactttattttgtttgatgtccattttagagctgatgtttttggaaacaagtgcgctcacaggggagaatgtagaagaggcttttgtacagtgtgcaagaaaaatacttaacaaaatcgaatcaggtaaaagcctttccattaagcaacttttcttctgcatattttacactgtagctcagtagatcaccttttaattaatagtttcagggtgatttagtaaagaatgttctctctctacctgccaacctaaaatcatcacatatgggttcaaaggtcctgttcttatcaggatgaaagccccatccttatcaggatggtttccatggtgatgaaagtggatgggcacaccagctcagctgtggaaaggtagtcaaggtttcagggagtgtttgcatttagaaccatagtctttctttggtccttcactaaacggaggaagaataggcctttgtccactctgtcaacagcacgctaattctgttgggccagtggtcatgtgtaagggagttataggtacatggtatagtgttgattgttgcagatcgggcatcatggaactatggagtccagagtaattttatttct

SEQ ID NO: 36141 - DNA, 697 bp, Homo sapiens
ttggtagcttgctttttttgactctgcctccagcaaattgaattcagtaaattaaaagtattacaggttggaagtacatgagtgaaaatgcatgtcaattggctttcagaatgcccgtcaccgtctacttctcagcggttaaggcagtctggtactgacatgttggttagatctttctctcgttaaggtgagaaggtgcctgtgaggccttcatggggaggctgttctccacactatgtgattggatctgcctttctagctgcagcagttagtgtattcattctggcggcattcctgtgctgtctgccaataaactattgacccacgctagccctcagctgtgctactcatctctacttagtctttgagcaacagtagaagaaaaatttcattattcactcatgaatttttctttaatctgtaactatgcaattattctactactggctatcctcttttcctcttttttatttccaggaataattttggctttaaatgctagcctgttgctccagacttctaccatatgtagttacattttaggaaacgtctagtggcctgaagtttaggcacagagtctggtgtttgttcacagggatcttctgtggggatgatactttactctggtttgttccatggctgggtgacattatacaggtttgttccatggctgggtgacactacacggcaaaggaat

SEQ ID NO: 36142 - DNA, 1423 bp, Homo sapiens
aggctgccaccttccctattttgtcaagagagacggattctgtcaaccgaaaaaaaaaaaaggaagagccagccccgagtggcgcaagaaataagagatcagctgctcagagcttagagcaaaccgtccctgcgtgcaggcccctcgcgctcccctccgggccgggtacctggcagagccgcgtcctccgcgtcctcggcctccgcgtccccggcctccgcgtcctgctcctccggggccccgcgcgcccgccgttccgcctcctcctgggtcgccggctctacgggcggcgggggcgagggcggggcgcaccggggtgcggggcccccggcgcccgacgactctgacgacgccgagtcctccgaggagccggccgggccccagtcgtcccagagccagggcgcgtgcgcctgctccagcagccggcggcctaggcggtagtgcagcagctcgcggtagcacggcccgtactcctcccagcgcggctcctggtagcgcttcatgtactcgctcttcaccccgctccccggggacatggtgccgtccgccgcctcgagcgccagccgctcctcgctgcccgcagcctacgggacccggtacacgacacagaggccgccccgcccctccgccggccctgcccgccgcgacgtttaaacccggagccccgcccggacgggagcagggggcgggtcccggcgagggcggggagggggcggggcgggggcggcctcacccggcggccgggaccaagagcagaggcggggaccggggctgctggggtcgaggggcgcgccgccgaggagggctgctcagtgggcggaaggcagggaggctgcgggctggggcgaggggaccgcaggagactggggctgagcgggaggaggagcgagggaggggagcggcggggcccgtgatcgggtggtcctggggtctccggaggcgtcccctgagctaggcgtgcggtcccgcggggctgccttacctccttcccgccgcgcccggccgatcctctgcgcccaggcccgaggcgcgcgtggcgcagcagctaaagcgcagctcgctctcccgcgcgctttcctcctgagcaagatgtcgccgcggcggcccgcgctccagctgcaggcgggaggcggtggcgccgcctcagtcccggagcctccacgcgcgctcccggcccccgggcctccgcccgctccgtgggggcggctgcttccgtagagagcgcgaggcgcgggggtgcgggcgtgcctgccagtccgaggggcccaggcccaggtccctggcccacttatttgaggtgcccgtccaccctggtcccagcagacgctgtcccaggcacgcgtcactctgcaggagtcgtcagttaggggcaagagatgatccctccagatatgcagcccccccaggctgcggccgggggcga

SEQ ID NO: 36143 - DNA, 2390 bp, Homo sapiens
tcaccatcaccttacatctgcatcgtggcaattcataataactcctctggctcaggtgagatatattatcgccatttcacagatgaagaaaatcacgagtgacttacaccagatcacacgggtagtaggtgggaagtaggtaaacactgatgcaaatccagtttgtacttcacttctgcacaaaggtatccatgaaaaatgcaaagtggggaatcaactgatcaactgataatcaaaacgaagcagatactacctgcagcagtggaaaaggtctattttccaatactgtggcattctattccgccgccccggttccaaaggcttctaaagacaacaacctatccggcccactgcggcccgtgaggctgttggttgccagacccaaccagggagatcacttaccgcgagcttagcgagctacgccggccgaccggcgagaagagcactggggagctgactgcagaccccaggggcagacccttcctgctagccgtccggggcgtggagccgggcccgagtccggccagcgggccccttcgggacccggtacccggggtccgcggagaaggggcggctgggaacatgactccaaggagcagcgactaggacagcgagggatctggccgtcaggttgcagcctggcctgcgcgcggaacttaaacacctaagggaagagatggcgcgcgatgatgacgtcaaacgcaatggctcccgcgggttgtggtcggagcgctggcgggggcgggatcgtgacgttaagggcggtgcccagtcagcgaggtaggtcgggaaggcagccggcggccccagatctagaaccgctgcagtgccgagcttccagggacgtgaagccggaaagccaggcgcccttcttgactgcgcctaggtggaactggccctccagcagcttgaacgtagcctcttttcacactggtagttcctgaacctcttgtgaaatgaaagatgttcctcattccaagctgaggacggagaaaagccgtaaagctgacactggtatcgcactgtgatatttgttgttttctaggtttgccattttcccattcaactttgcgcagtctcatccacgctgatgacgccacaaatccgtgtctctaacctggatccagctcaaaacccccagacccctatcattcagctccctaggggacaatttcagctggaagtcctgcgaactcctcacaatccacttatgaaaagcgcattcatgttttcctttaggacccctctcctaccaccatctctgttccagcttggtaaaactggccagttgtccaaggcaaagagaagagctctatctgcagtcatccctcacacctacctccaccctaagatcatggtatacgttgtaaggtcctacgtgtctgtactagatcacacatttgcactgcctctgccctggttctggtacttacctttccctcaaccactgcgtagcctcttctgccagcgggagggagtaggggagatggggagagggttccttacctgtgtctagtcttcctccactctatcttctcactgccaacacaatgaattaaggcaaacgtaatgctgctcttgggcctgtaaatgcttcagtggctgaccattgccagtaggttatttgctaagctcctttgcaaggtcctatgtgatctaagtcaggttggcttttccgtccgtgttgtacttccagcacttcccacttgcactccacattccgagaacttaaaaacccaaatctccctccagtgcccatgtccatgtttctctcacctggaatgcactccctgccttgttggtccagaaggcgcctaccttccgcatcaagttagttctgtgctgccttctcagtgaaaccttccacaggattaggtcccccttatcctttgtcctctctgctcctgtgtgtagactgtatttttatcctgcataatagtttgttttcataattgtctgtcaagtacttccttttaaatgtcttgacagcaagagcagtgactttgttacctttgtggcacacagtaacagacacatagtagactttcattcaacgtgtgttgaaataagggaatggttaagtaaacattgacgtattcacatgtgggagaccacagtgtgggtgtcagttgttgacattcccctgggaagccagtcatctatctatgcaccagtggcatctgagcagtcatcttgccaaggttacataggctagctgctttactccttctcccacctgggtgtctaacccaacttggcagcttgttgagtcttatagctctgagagcccagtgcatttcctccctgtttcattcttacaaggaggggtgtgaaataggcaatagagagtattaatagttgtgtctgagaggattggtgggatcaatttt

SEQ ID NO: 36144 - DNA, 2280 bp, Homo sapiens
aaggagtgaagatttagagaaatcgaaaaaattttagatcttacaaggcccttgcatctaaacactcctccaattatggctaaaaaatgaggagctatagaaaactgtcctatttaaattttgtttctaaaaacattcattttggcttcttttaaaaaagttactcaattactgaacagatcactggtgtggcctgttgaacacagtgctgtaacttcctgcacaagagacaagtctgaaagttttgctttccgctgtgaaagcattggtgactgcttgacagactcgcttgaagcaaataatgtgtttttggttaaaaaaaaaaagtataaacgcctaataacaaaataggcatatttttggctagaatttttttttccaaggaaaaacctccagctcattttgctgcctaagccaaaacagatgctcccactaagttggtggtggaacagacccaaagattccaataatgacatatataacgtgtgtcaacaagaaaacaagtgtaaaatctgcaaacgagtccccagctaaggcgaaatcttgacaacgctactctgaggtgagcgatcccctccctcctccggggttaggagtggcccaggagaggcggcggtgacacgcgctctgcggcccggccgtgtccctctcggcgccccgggaccccgcgtgtggagaaggagaggcccggcggagggaagtggccggggaggaccctacctgccagcctccggcgctcagggtacgccagccccaggagcttccgggcctccgggagtccggccgctgcggggcgcagccgccccttgtccccgggaggcgccgccggcccgcgccgccaggcctcgtcccctgcccaggcagcggctgcgggaccgcccgggaaccgggcgcgcgggagccgaggagcgcctggcccggcaaaagccccgcacctgcagctgccggggccgcgagcccacagccccaggagccgcgcgaggcccaggacgccccgcgaggcgcccggacccccgccccggcagccgctcctccagcggcgcgcggctccaacgccccagagcagcgcgggccccgcgccccatagccgcgccggcctcaggccagtgaacggcgatagggacccgggaacgcggctggccgcggcccacacgcaggctaccggcaggagccgacctggctcggcagggctcggtggctcgagcagccgcagcggccaggcaggggggcctcgcatggcgctgcgtgcgacccgtacgcctcagcccgccggccaggcgcgcgcaaagcccgaggaccctcccggcccggccccgagcaaagggcgtggacgcggtggcgcccgcccctccccgctggctgtcacccgccttatcgtgcctgcaccctcgggctgcgcccgcccccgccccatcctcgtccgcgcggtgccgcgcctctccgccccactccggggactgcagctacccggaccttgcaagccacccttccgagcgcccccaacccgctcgggtgccctccctgcagcgcccccaactgcccgctggcggaggagcgccgggcgcgccagctgggacgaggcccgggaagcccaggagcacggctgcgcctgcgtactgggcgcagggaactttttcgcgcttcgccgtcccctctggtctgaacttgggaacgacacgagctctttctcacgccggcagaccgggcggagcgcgcagacgcgaccacacgatggccggcacaaagatggggcgggaggacagcgtgctggatacggcgtggggcgggtccgcggcccgggagacccatgctggggcggccctgtcactcgtctcgctgccaagcacagggctgaggtgcggagggaccactgagaggacttcgctgcgtgtcagctcagctctggacggcgtggaggaggtggttggcgaatagtgaaatgtatataactttgagaagggaagagatcgtttcttttttttcttttttttttttttcttgagacgatctcggctcactgcaacctctgcctcccaggttcaagtgattctcccttctcagcctcccaagtagctgggattacaggcatacgccaccacacccggctgattttgtatttttagtagagacggggttttaccatgttggtcaggctcttttcgaactcctgacctcaggtgatccgcccgcgtcagcctcccaaagtgctgggattgcaggcgtgagccaccgtgcccggcctgagatcgtttcttaactagagcagaaatttgaagacag

SEQ ID NO: 36145 - DNA, 1246 bp, Homo sapiens
cccgcccgcccgcgcgcgcgcgcgcctcgcgaccctcccggccctccccgcccgtgctcccggcactcactgaacatcccaggcggctccggctccccccgccgccgccgcctccgggatcgggttgcttccgcctccgtcgtctctgccgcagggtctcactccgacggccggctcagctgggcccccgcgccccgcgccccgccgcccccgccgccgctctgggcggccgctccatgactgactgacacggagcgggccgcgggctgggccgctcgggcctccaacgcgcaaccgtctccgccaatgggcgaggcgcctcggcgctcggctggcgacgcctggcgtgcgtgcagcccctccccgctgcgccgccggcgtccggcggaaggagcgcgggtaccggtcccacgtggtggggacgcgggacccgtacagcggcctccgccgcaccgggacagcagccgccgccgctgccgccgtcctcccctgtctacccggagctgtctcgagctgagccccctaccgggccggatcccgaggtgagtcccccacctgcggtcagcccctgcgggcagccaggtcccgaggtgagtccccccacccggggctggtccagaggagatccccctacctaaggccgggcccagatggggggccccccaaccctgcccagttccggtgccgccagcagactctgggctggagcggcttcggcacgctccattcgcgaaggcgaactccctcctggctcctagctgctctcccctggttcttgttgcttggtctctttctgctgggcagggagtgctggcagggctgtgctgtccgccctggacttcgcattgcccggtaagggcggttggaggcccggagagccgaactctggcggagccggggagagcatctcggttgtctttgtagccagttcagcaaacacctgttatgcactttgtagctgtcgcgatggcggttctatggtattgaacttagaaagtcaggcatcgttgaattcgttttggacattttgacaaaataggaaaactgacagcacttgacgttcttgttctctgcagtagagtgaaggataacttaatttctaaaatgaaaacgtcttaacgttcctttttactataacttttaggaaactcaaagccaagtttacccagtttaatagtaactgtaggtgtttggtatgtttgctacccccgagatttcatggttttttgttttctatttttagtct

SEQ ID NO: 36146 - DNA, 2531 bp, Homo sapiens
gcctgagactaaagtttttcccagagcacagtgctttaagtgctaaaactagaacagtcctgggcaaactgggatggttgttcaccctatctcaatgtgcccatttagacctgtctggttcctcaattcttggtattaaattctctctgtaaaaataactaatgtggtttaaaactcctggctgggctggagcctggttgatacaggaagaagtgcaggtgctagaggacgcaccagcttgtgcaataatatcactagcatttgagagctatggtggtgacagcacatacaagtgcggtggagatgattgttaggtgcatcaatgccctgaagggagaaaataggccaggctgagtcagctaacaaccaaagtaagcacagaattagaagccagaaaatctctatgacagcatgtaacagctagagccagtcctaatgcactgccaagatagtgccttacagcttgcaaacaataatgacctcctgttaatgccaaaactgccttggcagcaaaaagggtagaatgtctagcaaggtaggcatacaaaaatagatttattatgtaagaccagagaatctaccaattaacaaggctctgtaactggatggcacatcctgctgaaaattaagcttatgatctgataaaagaatagcaaagtctgaatttgtggctccagcaaatgttctgtgtcaaagtcaaggggctgataaggaggaagagacctgaggacctgaaatgaggactttcaggtagatgtgcttgagaaccttcaatcctcagattccctggaactctctcggcttgcagaagtggcccacttcccttgtagagagaaaaagccttcccttaccccaagaccatacaaagccctcacttgaggcagaggctttctgagatgatgagtacccttctcaagatttcctccaccagccctcacagcttctagaccaggggtcagcagacttattttgtaaagagacagcaaaaaatttaggctttgtggtctgtacagtgtttgccataatgattcaactcttccattgtatcacaaaggcagcatagacaatatgtaaatgaatgggtatttcaataaaactttatttacaaaaaacacacaatatttgacacatgggccatagtttgccaatccctgtttaggccaataattggtacatgccttggaatgcccgatgagagaattactgtcatcgtttcagaaagggatgtaacatctagctaatgtgtaccaacatgacccaggaagacatgtttggggctgaattttgagaatgctggactgaaggagagtttatggatatgtgggctgtctcctgtggctcaggatgtagtgtcctggcaagaacacctaagccagtcctgatgcactgccaagatagtgccttacagcttggaaacaataatgacctcttgttaatgccagaactttgcagcagaaagggtagagtgtctagcgaggtaggcatacaaaaatagatttactatgtaagaccagagaatctgccaattagccagctctgggagagcccagagggtttgctctccattagcaatataaggaatacgtcagtgaggtggccatcaacattgttgagaaacttccggtgattgacctttctaggctgctatgggtctgggctccctcttagtgtcattgggtatgatgggattcaagaagggcacagcacagttggcagcacttacccatcaaaggcaaagtagacaaatgattgtaacagcagcaaagttagaaggacaatctgggttcttatctgcaggaatcagggagtagtaactaatagactgtggtgttcctagcagtgagactggaacatattgtttgaactatgtaactaaagatcaaaagctgatgagcagaaggctgatgtcagctgctgcaatgaaaaatcttgatcccttgcccagtttccagacctgagccacttatcagacccagagcctgtattgaaagagaggctgggtacccctgagaaatgaccttgtattgccacattaagcatacacagtagtgataccccctatctattaccaaaaagatctatggacatttcttctgaggactcagatctttgaagagctgtggacacaagatctgagctaaagctgacacgatgggaccagtgccataataacaccctctgttgatatgaggaaagtcctggcttcaaatcagtctcatagtgaggccaatggatctatgccctagctgctgttcattttcctggtctctgagttcataatcgaaatagacatacttaacagtgggagaacctgttataaaataagagccatgatgctacgaaatgcctagtggaagttctcaaaaattcctcaccccagccaagatagaaaatcagaaatactgcctctttctggattagaacgccaccctccaaggctcaaggaaggcagactttatggtggtccccatcatatccctaaataatttactagtcccaccacacaaaaatgaaatggtgcattgcagatg

SEQ ID NO: 36147 - DNA, 1338 bp, Homo sapiens
attaaaatccccaaactaaaatggcagttaaaaaaaaacaaacacaataccgagtgttggtaccggatgcagagcaccaggaactttcatacattgctggtgagaatgcaaaatagcatagccactttggagaaacgtttggccatgttttataaaattaaacataccctgcccaaatgatgcaacaatcccattcctaggtatttgcgactgctagctgcttgctcctaggcatgtccacgtaaggatctgcacatgaatgtttgtagtcacctttttatagtagacaaaccaggagcagcccaaaagtccatgtcctgctgaatggacaaacaaattgaatacattcatttacttgactattactcagcaataaaataaactactgacacatgcgacagctggacgaatcccataagtattatgctcagtgaaagaagccgaactcaaaaggctacaaactatgattctgtggatatggcattctagaaacggcaaaatggcaaggacagaaaacagcagcaattgccagactctgctattaaaggaagagaattgactaaataaaaacataggggactttctgggcagttggaaatgttctagatactgattcacaactgtatacatttgtcaaaactcattgaattgtatacttaaaaagagcatgttttacattttgtaaattatatctcaaaaatattactttaaaaaatactttaaaatatcatttccacaaagaaaactagagtcccagatgacttcactaccaaattgtaccacatatttaaagaaaaataatgcttacctacagaggataaaaactcccaaagaagagaaaaagagtgaacttctattaacttatttcttcagacaaatctaaccctgattccaaagtccacaatgacagtattacaaaaggaaatttatagaccaatctcactcatgaattgtgcaacaatcccaaataaaatattagcaaacccaaaccagaaatacattaaaaaagataacacatcataatcaagttgggtttattccaagaatgcaaaactagcttaatatttgaaaatcaaccactgcgaatcacaatttgacagaataaagaagtaaaatcatacaattattttatatccatttataatttttggaaactctaagcaaaaccaacaatgaaggcaaatttcttaaccagttaaggttatctcttaagaacttacaaaaacataattcttaatggtgatatactgaaagctttccctctgaggtcaggataaggatgcctggtataccacttatatttaaaattttattggtggttcaaaccagtacaataag

SEQ ID NO: 36148 - DNA, 1722 bp, Homo sapiens
tccagtgtttaagtctttgctaattgttgtgcaaaaacaattacatctggttgcttcaattctttattagtgaggataaacatctttccatgtagctactgaccattgcatttcttttaaggaaatcacttttgtctatgtttctgtggggtgcttcatatttttcttattgatttggaagagttcttcatgtgccgatagggttttaatgattgaatcaccacagtgagaattcttttcgggctccttatatcagatttcccctgacctggtttatcatccgaatcatctgggaaggttcacaaagtacacattcctggaccccatcccagaattcctgactcagtttgtctgcagtggagccaaatatccgcatccttgtattttttaaagctccctaggtgattctggtgaccagaatcctcagtggctggcttaagggacagcagaatttaccactttcaggctgccctttgtgtaagacaggttcccatcttcttagggcaagtgagaagagcctgcagtatcaggtgtctgctactttctcacaaggtttcagaggacaaagagagcagagactgaaatcagggccaggttgagcatggttgactctgactcactaggccttaaacccttctcccccagagggaagcattgcccaaaaccaagagaggcagctagcctcctgcttcagacctcccaaaagggaaatagcaggttgcttgcttagggtcgttcaggatgtggctcaccctttttgtttgggtagattgtttccttagggcaccggttgctggctctggtcctccatcagtgtattggtcactttcagggcaagtgctgtgagcttcttcccatcccccacccagagccaagttcagcctcccagatgaggctgagtattctgggggttgagagcagagcttctttccttgaacaaagcagggtgtcttctttctggtcctatgtcattgtcattctctttggcatccctcccatgtggatgtgacttgcaaaattggattaaagtcggctgtttgtaactcagaattcacttttccatggagactctgtttggatggaagttaactgccagcgtggttggtgaaagtccacttcacccgcgaggtgggtgggtgtgagtcccaagggtgccatccctctccctggctctgtcctcagccaagcataggggtgaccctcaccttcctcaaccacagtagtggcctggaaggcagggcaggggagcccccattgtagaaaattctttagaaatattctttataaatcagacaactctaagttatacaagttggggacctctgatattgcacaattgttctgctttactgtccaaagaacaccagggaagcttggcctattttataaaaataatagaaagaagaatagatcaagttcaagttcataaataaaactgatttatagattgtaaaatccacttcttaaaaactctggcactaaaacaaatttacagctggctgcagcctgtaaaatctgtttcttactttccctcaaaagagtttgatttaaactcatttcttcccaaacccttccaagcactcaattctgataacactccgaattactgagactctctcagtgtaatggtgctaggttcattgcctgatgcacagtgagtcaatatactgagacaccgaagtttgcagcagagaaagagttgaataattgtagggtagctga

SEQ ID NO: 36149 - DNA, 4670 bp, Homo sapiens
agattatgttacaagacagatcgttttcttgtatcgttaaagatgcttaatgtgctttttaaagaacgcaacgaatgagaaagaaaagattttaaacaatatattattgctttccttcttcctcattttgtgtttattgaaaagaacaactctaccattgatagctctgtcacccacagaaaaatgttcttttgaaaattaccttctcagttcctaccaactcaaaacctccacatctgcctatatagataaataaaatcgataccagcgggtcaggaatgttttgctgcaagattagtgagaaaactgcagcaagcagcagcaaagtcgggttcaagcgggcggtttgcaccaaaaactcaggtcagttggccaataagagcaagcccgttaagggtctgaggtggccccaaagaccaaggctgaagaggtgacagtctgggcaggaagcaccgaggccactaccgcccccgtaatcgagaggccccgtgtgcgtgagcaaggctctttgcccacgtgtgcgcgcgctccagtcgggtcccggggcagccacctgtcactcacgggggagggggcggccggcggggggagcacgctgaggggcgggcggccgggggcggggcggcgcccaggccctcacggcggagcccggcgtgctgcagccatggagacgcggcagtcccctcccgcggcccgcgccccggcccccgcagccgccgccgattggtcgccctttgctccctgacccccctcgccgcctccgaggccgctgcttcctgctctggtgccgcgcggcgccgccggcccggggcggagctcgggcgccgagtgcgcgccgccgccgagcagtagcaccgcgcgggaggaggagccgccgccgcgcccttccccttcctccgctcctcccccggcccccaccgcgcccgcggccggcccaggcagcactcgcgagcagcggcggccccgccggcggccgagttgggagaatgcggcggcgctcgcggatgctgctctgcttcgccttcctgtgggtgctgggcatcgcctactacatgtactcggggggcggctctgcgctggccgggggcgcgggcggcggcgccggcaggaaggtgagtggagcgccctgccgcggccgggcccctgcgcccaccccccaccctgcgcccctgtcccctgccctctccgcgccgcccctgcgctcctccgcccggacctccgctcgcgtcgcccgccctcgtcccgggcctccgcgccgagtgcccagggcaggggtgcacccggcccctctgcgcacgccgggctccgaaagggcggcccccgcagcctttctctgccccctctcgtggacgtcgcccctctctctgctcgtcgtaattcgagtcttgtccggccgccgggagccccatcccctgcggttggaagtttagggatgggggtgttgggaaacacaaagggggtggggaggagaggagagagaggcgaccgcttttccaacgcgtcatgtacagcaggagagaggagtccaagtttcttttcagccctttgataccagcggctgcaaatcctcgtccctttccccctgtcactccgcggggcgtgggttccgtgtttctgccaccttctttgccctttacctttggggggcaggggcggccgctcccgtgccaagtaaagccccagggcccgtgcgagccaggggccagtgcgcccctgcgccccgagcgaggccagtcccggccgttcccttgcggccccagcgttaccctctgcccaacccggcccccggccctcccgcgcgagccggacgtggcctcctgcgcttgcattttccatccccactccccgcttcagggagaatccctcttctgtggctgtgtttttaacatgctccaggggccgagtgatctggctgtggggaccgtgtgagccgctctgcggttccgcgtcctcgtgccgccgctccggacggccgggccctgggcattcgggaggatggtgagcgccgagaggagccgggacagcgcggtcctgcggccgagcgccggccgggagagcagggcgtcgggctgtgtgctggagcatgccggcaggggacgtttgtagtgttttactggctcctcggctttgaaagcagcgttatcttttccgaattcctgtaaccctcgttactgtgacatttagtgtcaccgcaaacccagaaaattctgagttaatggagatggactacgggtggttgggttggaacaagagagtggtatcctgaaacaagccagagggaactaactagatgaacagacttcagttctgaagtcagacccctaaatgtccacgccggggtttggctgcttcagaggttttttctttgcttcattcattcattcatagccgaagatgttaggtggaatgggtgccttatgtggtttctggtaaattacgtggatttgttttatctagaagggcagaaataaagccctctttccacgtgctgaatcggcctagcttctgagctgacattgtactcttagcgttgtttttgtaaaaaatggtataggtagtatatgtacgcgaagacttggtttattcttgaacagcaaagagcatgcaggcagcaaaagccgtgcagtccattcagagatataatcgtgtaaaactggaatgatttttaaaactttgcttcccggtaaactgtgccttggccactctgcatagcctggtgtgctggtgagacctggcaaagctttctgcctttcatgcaaagaaaaccaaacacataagccacccttggcgtttctctttccttagtctgccactttcattagtacacgtgattagaaagagcaagcgtgctcgttcgcctcccggaggctgattcctcactctggtgggcttcagttcctggatggtgtgaggggtcttccatgcagaagtcttcagacactcctgaagtgtgtgattcttagtttgtttttttttgttttgttttgttttgttttgttttttttaaagaattcctggtggcaatatagacaggtacggagaccaggtagaaaaagtgggggaaatgaacaattaattacacatggattggtgatttgggattctattctttctgtcaacgaaccataaaatttaatgctaccccttaggatgctttagtgatttgtcggttgaggaagaggtgtgtaaatgcaatagcttttgaaattgcagtggaagactcattaacttcgtgtggtggacccagggttaaagagaagccttaagatggtttctgaaggaggtaaatagagccctgctgtcacgaatgcctgatgtataggaaaatcgtgtagtcttctttcttccccaattgtttccatggatttagacactagaagtgtctctaaatttatttcattctcataccaaaaaaaaaatgtggtttgtttggcttgtaaagtatggacataaaaaaagatagcgggccatgcacagaaaggcagaatttaaaagctagctatagtttttttagagataagtggacctatattttttctcttgcctcatactgttcaagtcagggcttttattccatatttagccagtttctgcacatcctgacgtttttcatagggtactaggctgcagtattgggctttagggatcgtctgaggggagtccaactaggatttctgctgcttcagcagcccagcccaggcttgtcattgtgtgccctgcctgttaagtaactcatcacagaactgttattctccacttggcaaaacccagagagccagctcacctcagattgcaggtttagtaaactaagcaggagggagtgctgaagaccaatctcaggcactgccgcacaactcgggactcaacacccaggctcaggacatgtatgttaaagcagtttattcaaaatattgtttaaaattatgtttcatttacatttgtgtccataccctttccccccatattttgctctttccccctaaattgatgatttgcacttcaagcgtgcctttcctttgagcttcttaaatgctttaaaattttaaccatgttaagtctcccctgggctttggtacgttggcagtggatggagccgcagaagagaggaagggatttctctggaaatgaagctgcctgtgggtgaagtgtggctgtttagggtggaaagggaagggttttctctctgctgtaagagtgtgtggagcctgagaccccttgcctgtgtgcctgcatgctgggaggtaagggacggtgttagttgagggacatgatccggagccctgggagcctgtccactttgcacagtagcatcacccttattccctgagctggcacgagtcctgtggcccttgcccgagagtccaagggtgggggactttgggtgggatcttctaggaatcatgcggggaggcgggcaggttatttcttggaacagtgaaggaccttgccgggctagaccatggtacacatggaggggaacgttagggtgtaaagttggagaaattcagaactaaattgtaacgggcttcaaatgccaagctgaaccatttgggaactagtaatgtttttgagctagtagtagacattaaagggaaatggcacaaatccacttattggcattgagtgagacctagctgtttacctctttgtgcttagtgaccttcactgat

SEQ ID NO: 36150 - DNA, 1931 bp, Homo sapiens
gccaagtctatgctccctgttggtttttgtgcttttgtccttgtgaagcctcttctggaagctctgcatgggtgatgctgagccgtacaagtcagtggatatccagatggaaacacactggcttagccatgccactcacatgtaacagtggggcacttccatgctggttgttaaatatgctctgccttgagaccccctgagtgccctccggttcctagctgccctggtctttccttgggatctctttcccatgttcagcaatcaaagggttgaatcctgacacttgaggggcctcttggacccacttctgtgcctgtgccatagtgaacatgctgattgtcacccctgcaaatgtgccacttggatagaaggaggcctagccccacttccatgatgggaacaatcccttttccctctgagtaagtcttgattcactgttactgttgagagttctggttccaccattgtaatcttgtggccttgcctctagactgccttatgggtgaggtgtttttaaggaggagggatgtcttggtacttccatatgcaaacccccctgaatgggtctgggataggctgggcctggcggggaactctcctctatggagaattacattgaattcattgatgtgtgctcaccagtgatcactcctgtccttagagtggaacttgaccttgttctcttaacagtgtgaagattcctttaccttggccctgtgcttgatcttcatgatgaacccagtatggagttggcaggaaagctgtcttcagattacctgcccagtccagaaagcctctcccacctttctctattgtaaaccatggaaataaaaggggctcaagacactaatccatcttccctgatgggcccccacctttctagggttccctgctctaagcaggtggcactgtgctcctgcctggctcttgcctcctgcagcacagggtgaaacactggcatttttgcacttagtcatgtctactagtatgggccccagaagcatggggtgttttatatggattaggtttcttagcatgctgaaatgtagatgacagtgattcatcagggccggatttggagataaacaaaaactgtcacatagagtctcactcataggcttacatttaaaaagctttcccaggctatgggagttatatgagccccttgtctcactgaggcgggctgtcacaaagaagcagttaagggctggctgcctgggggctgggaaatgggccgatccctcatggctcagcctgcccttgctggctgcttgccctggtcaactgtcccttctgccgcagccttccaggagctccccatggaacagagagtctctcctaggccactctgctgaccacctcctcctgcccatggctggcagttttctgtccctaactcttagggaagaggaatggccaggagggttgggggtagagttactgaatttccagagttcaggtcaggacatgcatttgggcagggacaagggtactttcgggactgtggttgctctggttcagtttcttaactctggcaccattgacatttttggctggcttttttttttttttaagacagttgtactctgccacccaggttagagctcagtggtacaaccagagctaactgtagcctcaaactcctgggctcaggtgatcctttcacctcaccctaccgagtagctaagactataggcatgtgtcaccacagcaggctaatttttaaattttttgtagggacagggtttcactatgttgcccaggctgggctcaagcggtcctcctgccttggcctcccaaagcattgggattccaggtgtgagcgactgcactgggctggatcattctttgttgtgcaaggctgtcctctgcattgtatgatgtgtagcagcttccccagcctctccccactagatgccagtagttctccc

SEQ ID NO: 36151 - DNA, 3972 bp, Homo sapiens
agtgctagttagacagctgggatgatagagcaggggatccaggctgatacatcaggggaacttgcagagagaataggggatccaggatgatagagcaggataaggacagctgtggatggagcaggacgactggataatggagcatggagccaggatgatggaacaagcagccaggatgatggacagggagctgggatgatggagccgggagctgggatgatggagcagagcagctgggatgatggagcagggcagctgggatgaaacagcagggagctggaatgatagagcacggcagttgggatgatggaggagggaagctgggatgatggagcagggaagccgggatgatggagcagggaagccgggatgatggagcagggagccaggatgatggagcagggagcctagatgatggagctggcagctgggatgacagagtggggagcaggatgatggagcagggagccaggatgatggagcgggggggccaggatgatggagcggggagctgggatgatggagcaggcagccaggatgatggagtggggagcccagatgttggagcaggcagccaggatgatggagtggggagcgaggatgatggagcaggggagccgggatgagggagcaggcagctgggatgacggagcagggagtgggatgatggagcagggagcgggatgatggagcggggagccaagatgatggagcagggagctgggatgttggagcagacagttgggatgatggagcagggggctgggatgatggagctggggggcccaatgatggaacaagaagccagactgatagaacagaggaaatgatctgagaaacaactttgaaaggtcacctgcagccccctgatgcttgcattatgttaaaatgtttgaaaatttagaatcctcattttaaggcattgatctttccttcagaaagctgtccttgctgttaaacggtgtccggagagtaaggagatggtcagcactgagcatttagtttcttcagaggaatgacagtgggggttactctgtttttacttggagtatctggattgttcaggaccaagtaaaactctgtaagaaagggttggaaatcctggtgggcctctgttagcccttccaatagaagggggccggagggggcccactgtctgtgtccttggacctgcatgcaagctgaaggaaatggtgcctgctgcacatggaggagctggagccgtggacaggcctgagctcatctccatcagcacccggatgttggcgtacatgcctgtgaaggtgagggtctgcacttccagcagccctccccctttgtatgtcactttggacacccgagatttccctgatttgcctggagcctctgtgtaatttttaatttgatcccctgcgtcccagtggactgtgagtgtcttgaggccagcacaggcttggcccctcccacagcagggagacagtggggagccaggctaacatgggcccagggatgtatattctggaaggagggcaggctgggggacggtcacgccaatatcagagtgtgaagtggggctccatgagaggtgagtcctcatcaggaagggccgaggaggggacctgtgggcgaggcctgttgaccagaatgatccagtgtggcagaaggctgtctgggcttggagaagatcctgtgcagagatcctggggccagaatgaacttggcatgtctgggcaaccaaaggaggagggcaagctggtgaatgggacgtgaggtcagagagacagccgggggatggtgagcatttaggatctgattttgtctgccctggcacttcctgtgtctggctcagcaccgagacgttgctaggtgagggagatgaggctgagactggtgggctcgggggagaatggctgagagccagggttgtggagggtctgccacatgggggaccatgcctcacaggttcaaggcatccctggcccctggctccctcctactctccttcagctgtttgcctgctgggtgactcagctatgggctaccaagtcattttgcccttttctgctgggatctgcgtgctgagtctctgactggtaacatgctgtggtttggcagcatgcttgggagttgacatcatttctgggtgcaagtctggctttttctccctggtgcagggtgaacatgggattaggggagacaagaatgtctgctttttcgtccagacatgctgccttgctcttgcagctgaacagaccccagctgtatttgtaagttaagcccttaaatcctgtgccctaaaggtggaggtgccatttcatctccgagaagtggagaaagattgtgcagtgatgctgaggtacaggagagagctgatgaggaatagaatgatcagttgtttgtaagcaatctcctctcttctggctctctttagcaaaagtttttattattaactctcctttcaccactgcggatggcagacatacctgacggcaaaactgaagcataccctgacagtgaccctgtggggcagacacacctgaatgtgtgtttggagttttgagctaaggaatccgggagtggccaacctggagattcattccttgtttatgaggaacatctgagcccctatcctgtcccgtggaacactgggcatacagatgagcgaggccctttgttttgggttaaatgaaggttgccccgtggaggctgttagaggatgctaggtggaaactctatttataaaccacaggcttcaagcagttgcagttttcctgcccagtccactgccactgggccatccctgtgtacaggtttcccactcgtaagcccctgtgtctcatttgctggctctgggtctccttcagcttcttggacctggtgccgtccctgtaggagttcattaggggtctggcatgatccagttcatcactggaaaatggttctgaatgtaggcggtaatgtttgtgattgtctaggttgaagtccggggcagtctacctgtttaggcaagatgcaggattaggcatctgaggttctcttattcattgcattttggatcttctggagctcctcctggctggttattttaatgctctataccttagccaaccacttacagaactgttttgataggccactgacttctggtgtagacgttgggggtgaaggatgtttgacagatgggacggagatggatttatgtttgtgaaatgttggggaaacccgaggcaatacctggagcccagaagagtgggctcaccgtatgtccacagctctatcagtgcccctaaggtgattggaaactgcttgctgacctgcctggttaaggaacgaactcgggttccaccagaaacgtgctgagagatttccgtccaccttcatggaattcacagaacaaatgacaagattttaatccaggtcttggtattcctagggtgccagaggtgaaactgagaaaattttgctctcaattatttggcgagtttgtaggtagagaataatacgagctcctggagggctggaatctggaggcatttcagcaagggtttagaaagggtgggtgatggtgactagggatacagcacgttgctcagctctgggctgagaggtggttagttcagcctgacgacccagcagagcacctcctggtcattctgccggccctttatctggtgaggtagggcaaggagggagttggagtgaggaaaaatgcctaagtcaagggaatagagggagggcaagataagagatggcccttgtgcgagaactgtctgcattgctcactctttggagattgatgctttctccattttacagtttttagggggatgttcttactggcaaaggaggaaaacagctgtaaagtgagcagtttttttttcccccgtgtgttaagggaatttattttccttttcattctttgttcctccttggctcacccctgctcaggacataacttttgcagaaatgaggattttgctgcagcctgaatct

SEQ ID NO: 36152 - DNA, 2365 bp, Homo sapiens
ctttccacagtgactacaccaattttacattcccaccaactgtacacaagggttccagtttctccacatcctcaccaatacttgttattttctgttgtttgatagtagccatcctaatggatatgaagtggtatcttgtgattttgattatcatcttttttttggatgagggaaagtttgaccccatatgtgggtgtctgtcaccaagatagaatgaatgtaatttccaaggaaaaataatcccaggcaacctcttctggattatgtcccaactgattggaaatgctgggaactttctgtggttgaaggaccttgacatttgttgtcaaactgcctgtgagtcacttatcttctgggggaaaataaacataaccgtgtcttccagtctgaagtggggtgggtgggtgatatgaagcattgcacacagcagagcctgctgcccctccacagcctctgcaaatgccgtgtgaaggtggtggacctgctaccagaactggtgtcctgctgtctctgtagttaactcttaggagaaataacggttgtgtgtgtggaggtgaagaatgggaagggaaggaggggtggggagggctggtgcttctgaggttcccaaagttcctggactcgaattttctgttggcaaataagctggtcagaacttaggaatgtggtaagttgatccaggaagaagttgaaggtttctatctgtgtttttctgtgcggttgtgtatgtgtaacacgtttgcagaaatagttgaagcttattattttcttcaaaagatcttattttctagtgtgtaaatcacaggtaattaaatatgagttaaagtaagagagagacccttgggctatctcagacttagctttgagagagagaatgatcatgggtctaaggcatcactcttggttttataggtttggaaactcaatgttattagttccatctaggagttatcaatgggggattggggtttacatgcatcagaattgtaagatactgctaagaatgacagttcattaattgatgagaactgtgcctcgctgagaaagccagcactcctggggtgtgtgtactccgcagaccttttcttttgtttgtttctttctttctttttttttttgagacggaatctctgttgcccaggctggagtacagtggcacgatctcagctcactgcagcctccgcctcctgggttcaatctattctcctgcctcagcctcccaagtagctgggattacaggtgtgtgtcaccacatactaattttttgtattttttttttttttagtagagacagggtttcaccgtgttggccaggatggtcttgatctcctgaccttgtgatacggccaccttggcctcccaaagtgctgggattacaggtgtgagccattgtgcccggtcctcagcaaaccttttctatcggcctatttctatctattttctatcggccaccttttctattggcctatttccatctgtctgaggaatcttgatgcatcggccttctcgttctggggatctttctgtgtatagaatcaataccctctccttagggtagtgatggagattgatttttcaaaaatcccaacatgtaatttatgaaattattgtttcagctccagactctgtgctctgttctgcagtgttggagctaggaccgcacatcccagctgctttgccagtggcttccgggccacctccatcagcaggaggcggtagaagcaccagcaagatggggctttggtccttcctgttggcttcctgttgccccagctgtagctgttgaattcagtcttcagttatcccagcactggccagccagcctcatcgtccacactccctgcagatcccaccactcctccaaggaagtctctacctcagggccctttggctacgcttctaaggttaagtctaaccggttccctcaggcctaggggtggtggctgcttcctgtcgttgctacttccctgatatctagaattttcctttttctacccagttacctggttactgactttctacccagttaacaatttatattaaagcccttctgttcaaaaagcttatgtagtttctgcgttctaattggatcctgactaatacatctgactttcaacattctttagtaatcagtcagcaaaatgatttcatgagatagacgtattatatttaattggattacagttcaccttatattcctttagttttttttttttttttttttgcactgatctttctgattttcgttaggctcgtctatgtaatttgagacataactcctctcattagctactttctaaatcatcagacttgagttctttcctggaaagatcaccacagatggctaatgtcattcattttgttg

SEQ ID NO: 36153 - DNA, 3724 bp, Homo sapiens
aagaaatgtaagtcacctttttttctggttggttctggggcagatgccaccaggctgcagaggcagtctgtgtctgtggggctcaccagggcatgagttctgctcccaggaaagagattcttgcaggattttgtctgtggttctaaggagacaagtaggtggcacacaaaaacagaaaatgaaagaacccatccctccaaaaccacacacacaaagccaaaaggaaaaaaaaaaagcacataattatcatgtaggcactgttgcagctaaccctgattttggcctcaattctgaaacaagttagctggtttagacaaaccccttattaggtaatggattgttattcattcctccccttctcctagtcatttactccgtgagagctgctcctacctgaccttccactgattttggtagcagcatctcccagagcgactgtttccttcttcagcagtgttccttactcagggtgtaagatcttaaccccacagagccccgtatcaggtttaattaactaattgattcagcttgtgcttactgagtgcgaggcagtcatgtgcttctgtttggtaaatggcttcattttccctctaactcctgagcgtcctgaagcttctcttatggttctctccaaaggagtcagcaggctggctctgcaagggtcagtaggttctggggtggtggggggccgagggaggcagggaggttggctctgtctttatttggcatagagctccccgaacagggtctctcctcctttctccaaaggttaatggaaccactatcttaaaaagctgaaatcttatcttctggggtatttgggtagagaaggctagggaatcccttttccatggtggtgcagtaggttctcagaaccagctggtgggcctcaaagagaggcggctgtattttagcctgataatcttgattcctggtttcctggctctgtagcatcagaaatgggaagctttaaaagccgtgccttgttggatgcaccgagtcataaaataaatgtgatgtgctgggtgggggaaatgcgggaggagggaaacaggtggttggagctgcttcgtgatggccgcccaccctggctctcctttcttaataggcttcagaaatcctggaatgcgtaattcaccagctcacagagttccacccatgtccccagtggcttcaaaatgtaaatgacatttgcagtgctgggaggtaggagggcgatcccgttccttccctggatctcagtcgcagaggtgctggctcatgtgcctgagtgcagcggctggcccgtcattactggtctttgcaggaagccactctgaaggcacctgggcccttgccaggctgagtcacagctgacttagggaaatgccacacaggacgcttgcagtccccccgttctaagcgtaggttttgcaactgcatactcggaaaatgaatcagagtgggggaaagtgtcagagaaacagcagaaatggaatgtaggcaggagggccacagtggcgctgtggattcagaccacaccttcggctctgtttggggcccttcctgtaaggagcgtactgatgccagaggctgggggtgtggaagggaagctgctgtgctgttagatccattctgctatttagccagccttccttttcccagctggcacagacaggatgtgttagagaggtgctcagacctcctttcagagcaactgaatcattctccaggagggacagggagtctgaaatgcaaacaggttcccagggttattgaagagcagccaaactgaacacccactgctctgtggactcaagctggttttagacattgtttggtcaggaccagagccgagctctggggcccactgggggctcttgtcgcaccatatcattgattctacaatgcacatttcccccgcctctcatgttttaacatgtctgaaatcaggatgcatcttccatggatggtgtttcagggtttcattgatcgtgtttttcttcctgagtggcacacaaaattaatggtgctccctagagttgatggtccctgcggttcagtgaaccgtgttgctcttgtgtaagctcctgtgggaacatagagtctctgtgtcccaccttcttcctcgcagtggtcagcacggatgaggtgggagttgcataaatgtcagcattcgaaagtgagggcgtctgtcggtgctgtctcactgtggggcttcagagaacgtgagcacctgtgtttgcattctccatcaaggttcatgtcctgttggctcataagcatgattatatccattatacaaactggggcacaggcacccagagagaagtcaaaagacttgttcaagatggacaactaggaagtggtggggacagaccagtcctgtctgatgccagatccagcgctgtatctgccagtcagcatgcacactttcatctctccagcctcttcccactcacctttactcaacatttctgggcctccatagtgattgtagtaattcggtaaagatgattcatttctttagtccggtcttcggacttgacttcttagaagcaggtcttgtgcaatagttgcatattaaccacttggtgacacagtgcatgagggtatgccaactctttttgctcatggccgtgcagtgcagaatttccaggcattgtccgctctgtttcctggacttcggagtgatagcaaagttttgtattccctgatcagctgtgtatctctgagcagcaagttgatctctctgtataagggtgactgtgcccatggaggatggcatgcaattgcctaaagatttcagtctgagaatctgagaaacgatactgaatggagatgacaggcttagtgcctgcttccaggagccatgcctcctcctggcctggaatgaatacctaaacacctgaggctctgagttccggcagtgtgctgaaactgctgttggtctggcccactgacccggaaacccagccacctgaggttgtgactttagggcttctagttttgtatttagctttaattccatctgtgaggcagtggagactgttcattttattttacatcaaaggcttttggaggttgagatgggaacaggatgatagaacagtaatgcataattatggagcatttgctgtatggcaggcattcgtaagagtgcatttgttgatattattgtttggcctctcctgtcattagccctaagcagctacacttgctaagctctgtgctaaggctgcagtaagcaggcaggcagtgcgtgctggtgagcttgggcagtgctggagtgtgtcttgcccagtgtggggatgaacatacaccctttcatgctcacaggtgccttagcctggatgataatgtttaagttcattctgtttatatgcaccgtgtcattaaacaatgctgtgaaaagggcactattatttcccccatattttcagtgataaggcagaggcccatgggctccttgtagcaatggaggcattccttgaggatccaggcaatctgactcccgagtcccggggctggacagaaggaagctggctccgagagctagactgcagtgcagaggaattccacgctccgcaggtgctgtcttcagaagttgcatctcgtcagcaggatgagtgcttttggaatagacaatcttaaatgtcatagtgaggtgacttgcagagataaggaaggacgccagcctcaggcactgactgatgaatccagatggtgacttcctccttgcagg

SEQ ID NO: 36154 - DNA, 2464 bp, Homo sapiens
ccactcttcccttgctgagctgtgattcgttcttttccaagtgacttaaacagaggccttttctcttgtttgtggggatgaggatggcgaagggaggaggagggagagggtggctgagtggaggaagcgcagttgtgctgcggagattcctgctctgcagcttgtctgctgtggattggcccagggggtaggtggcacagtgtgtgtggcaggggggtgggggggaccaggcctggctccgctggtccactcttgggctgtgagccaggacaaaatcttataccaagcaagcatcttttccagtaaaatagagtgtctccatgcccttaggaactgcctgggacagcctcattctgtcctggattttgttctgggctctgctgcctgttgagcgtggaccagtgacctcgtaactgtggcagaggtgaaggtctcagcaccttctgtgtgccctcttgcatgtgtgtttgccagcatgcttggggctttcttcaggtgtttctggcctgaggaagtgtcttacccccatgttatttgtgtggctgcacagcatctggagggagggatagagccccagcgctgggcacatcggatctgtgctctgaacagctctgttgatgccagagctgcctgacttgctctgtgtggtgctgtgaaggtcaggcttggagagtgaggagctgctgaaaaagggtgagttttgttctcttcttccagggctcagtcttccttgtaccagtttctttctctgttcttctctccttgactcaggaatccagtttgcgcagcacttacatggcgggcaaactccagtttatacctggagctgcagggcggagctgctgtcagctgggagctgttattgaggaacagctgtggtagaggtggataagaagaagacctgaccccacctgctggggcaagaagcctgcatagcacagctaaacagccatgtgggacaacggctgagcaatgacagtggaacccagtgtcccatgcaaagtgctcaagaagtggacgggatggatcgctgctgagtggctcttgaggagctcagagtatcttggggctgatgttgcctgttgggactttccccagcacagacagcgtgcgggatttcagatgctcttctccttgccttcagaagcccagggagtgttggcagcttgtttgcacctgatcagataaaagaggtcatgatctctgtgaaggtcttttcggggaaggggtcactggccttgccaaatgtgggaagcgaggcctcttcccagttctgcctgtgactcaatggctgtggctcagggcaagtcattggatttgttttttgttttttttttcagaataacgtcagcatgtgctgagcatctgactcacggggtgaggcagtgaatgaaggacttcatctccgtgaagtgcttgacgtgatagaatgaaaacccttgcgttcccagccttggctgtcagagtctcattttaaggaaagccgtttttgacgtgtgtttcctttcagttcggagctggcttctgttaggacagggggtttctgcccacttagctgtgtctctggtaatctgagattcttggaaacgggccacagtgattcctctggccacattcagggtcaggttttcagttcgtcttcctggtgtttccgcgcctcattctagggggaggtttagtcgttcctttctctgctgtcccccagtagcttccggccattccttgtgaaggaatcttcctaagtcaattttccctggtgaagactgagccctggaagaagagaacaaatctcatcctttgtcacttgggaatttcactggcgaaattcagtgaggcacttgaggtttgtaaatgggcagacgtttcccacacgattacgtctgtatgttggaaagatatttctaagttgtagtgaggtaggagggattctcagcgagaggaggggcttgggctgaacccggcactgctgggacatgaacaggggaaacagcgttggcggtggagcaggtagacattcccttgacctcgtaagtcctggatgccacccggcgaactggcctgcgggctggaaatgatgcagctgacccagtaaacgcactcagctcaccttttagtctggtccagaacgctgaattgagctcttggatcttggtgctaaatacgtggtgtggcattaatggcagtaaagatggatggttatgtaccatgtagaacgtgcaaatctgttttcaataggctttattttttagagcagttttgggttcacagcaaaattgagcagaaggtacagagagtgcctgtatacctgctaccccaacatccagcttcccctattagtttcccttcgcaagagttatagtccacaaacctacactgacacatccttaagtctcccaagtccacagcttacattagggttcactctttttttttttttttttaagatggagtctcactctgtcac

SEQ ID NO: 36155 - DNA, 492 bp, Homo sapiens
tggcttatatgcaaactttgatgtaaacactaggccagaaattggttaactgtggtttaggactcctaatctttctccggatttattgaaaacatgtcttagaatggtacgcaccaagtggttctccctggtactgcatcctgctggccacgtaccctttcctgatgctcctctgaagggaggatgtttaacgcaatgatctccagccagtgtccaaatggcatagagccacttccttgttgacattccctgggatctggaggtcacttccagctctttcctcttttctgcaagagccatggtgctgcacctgcctgctgtgtgctggcacatgcctgtggggttgtgaaggctttgtatgggtccctggaccacacctgaggaggcgctgtcttagtcccgtggcgggcggtggggcaggctccctgcactggaggaagcaccagcaggcttttgtgcgtgaacagacaactctgttggctttcctgccct

SEQ ID NO: 36156 - DNA, 607 bp, Homo sapiens
ctgcagcacatagacctcgggtaacagaaaactgaggacacaactctgaccgccagttttaatttctttctgagaggcctggaggaagacacttccacaggccagatgctaacattcatttctgctgatcccaaattcctagacaaagctttgcttccttaaccaatagcaaatcaaaaaacctttgaatccacctttgacctgtgggccctgctttgagacatcccacctttctaggtcaatcccatgcagagctttcatgtattgatttatgactttgcctgtaacctctgcctccccgcctttaaaaacccttacctgtaagccatctgggagttaggtcttaagcactagccacccaattctccttgcttggcaccctgcaatttaaacctcgcactgtctcgctgctatcctgatgtcagcgtttagctccgctgcaccagccaagtagaccgaagttcggtttggtaacaagccctggagagataaggcaggggcttggctggtccaggtatggggtcctgttggaggccgaagagtgagggtcgtgatcaactcagtataccactggaggctatgtaagtaagcagcgaactgtttctca

SEQ ID NO: 36157 - DNA, 554 bp, Homo sapiens
ttttgatttctttagttcccttgaactgaaaagtgtctcatgtgttacctgatcccgtagcctgcttttctcatactttgtgttagctgtttaataaatattacaaattgcaaccctttgtctatttttaggtaatattttccccacacttttccttttttttaaatagagaggagacttaactttatgtagttaaattctcatccttttgctttctggtttcctccatttcttttaagcttagaaatgcttgtctcaaccagagatcaggtaagtaatacttaattacatattactctgatacttggttggtttgcttgattttgatatttaactcttcatccacctgaatctgtttttttttttttttttggcagagtctcactctgtcaccaggctggaatgcagtggcgcaatctcagctcactgcaagctctgcctcccgggttcacgccattctcctgcctcagcctcccgaatagctgggactacaggctcatgccaccatgcccagctaatttttgtatttttagtagagacggggtttcaccacg

SEQ ID NO: 36158 - DNA, 435 bp, Homo sapiens
tatcgtgtgggtctgtctgcgtgggtgtctaccttataaagactcagaaatggtttctcttttcacccattgtttggagaataataagtctctgtcagattagcttcttggggcctcagtgctttttgaaaagagcttgcataatcagtgtctggtgagctgtgaggccaagagcatattgccattgtgcaacggggatgtggattttgtacattttcaatatttcaccattcagtcttgtcagaagtcaagctgccgtccaccctgcacttgcagtggagacataggcccttcgtccacagtggataagtttttctccacgtgggccacattcttactagaaaagaaaccccggccctttagctcatcaccctctgctctggctttccccgagttggtacagagctgatgccgttggtatttttaagaaataat

SEQ ID NO: 36159 - DNA, 1692 bp, Homo sapiens
tggaaaaaagctaaacatagaagtaagagggaggcctcctgaggcactttgccaaactttatgcacagcaactatgacctgcaaaatctttttagcctgggctccctctcttgacctgagactcttccagggagcctggtatccacaagagtggaagcagctggtcagggccacggaactggagatgccccatgggacagaaggcctggggctctggcaaagtgtcttgtaagtgttcctgtcatttccctccacgtaaaccaagtcaggcttgcaaatcagcagcctttcaggtcctttctctccttctggaagctcttgcatgttgcaaccccctacccaccccgccacctcccatcacagataaagattttgtaccatcagcctgcaagtgagttggatgaatgccatctgaaaggctttgttcgtttgcacacgaggtcgtgaatagctggcaacaaagaggattgaaccttggacctagtgtgtctgagcagtgccccagcccccatgccgctttggatttcagtggcctctgcagcaatttattattcttacatcagatgtttgaagtaggtgaaggggcaggtggcatgtgtctggtgaggttgctgacactgcttttggatgagagagagagtagtggttgaaacagagcattcaaaaaagcgtacactttaacctgtaatccgcaaacattcctttgagtttacccagccgtgggaaaggacgctgtacccctgccctattggctgcaccctttgctgttgatgtgaggctttatttacctgggaattgacagggttttggtccatgattgctcctttctccgcaatcacatttaatgcccatgatatctcatctttgcacacgaaggcaaagccttctactgctttttctcttaaagtgttcagcactcccctgagtttattagaaggatcagaagaaagagaccctgagtgtgaggctaggtcaaccggagaaattcacccaattatttcgtttctttgtttggatccctgcttttcatttctacctattctgaaagagaggcttaaaactaaagtccggttagttgaggatcagatgtgtcatacttttctcagaggggaggggacggtcactttgctctaagtttgggccatgaggtccacactgagcctacatggggtagggggaaaccgtgaagtgtgcagtgacctgagggtgccagatcaccccgagccgttgtggttcccactgggcaggctgtacgtggtgaaggtgatagactgcatgtctcatgcaggccaagtgcctgtcggtcagcttgagggagaagataccttgtctacctccccccacctgcaggctggctggctttgggtgcaatgaccctcctcttccttgaatcgctgtttcattgtggacctgttggaagtgccagcttggctggcctttggctggatccctgtttgctagagctttgttcctactctggaggagtcagctgctgtgccttctgggactgccaagagttgccaaggggagtggggagtcctctctgtggggtgtcgtctgaatccagcagccgcaccacccaggtgcttccctcctccccactcctaggccaatgtccttagtttctgctcactgatcagacgattatccttctccaggatgaccaccatcatctcatagtccttcctcact

SEQ ID NO: 36160 - DNA, 1249 bp, Homo sapiens
aggggatataataccccaaatagggttttttttggtacaaactgtggatagtactagattttgctccatacagagtcctgttgactgaactgccctttcatgttgtgtctccagtgtttttatgggcaacagccatatacagtctacttcctatctattgtgaagttgttgttgaggatttcctgtattatttcactctgcattcatgtctcagttacctttgatccctagcaaactgtcccaagtggaatggcctaacccaggaatgatgtattatttcttacagtcctgtgactgtctgggcggtccttttgctaacttccccagggctcacgtgtgccttgtggtcaagtgatagcagcgttggctggctggtccaaggtggcctcacgtgtcctatagtatttgctagctattgtctggggctcctcaactctccacatgccccagtagcatagaccagcttccttacaccatggtggtctcagggcagcattctaagagggcatgtccaatgtgcaggtgtgtattaagcccctccttgcctcgtggttgctggcatccaattggccaaagcaaatcacatggcctagtccagaggccgactccagctgtctgtgcagacgtggcaaagaaatatggccacttccaatccactgcagtccagtccccaaaatccattcttttcatggcacattttggaatctagcagctgaatttcagtctctcttaagatactcatgactttatttggatggtgagcatatggttggttggagcacaggcttcaaagtccagcctgaattgagattctgacttgctctctgaccattgtgcctttggcgggtgactcacatccatttcttcatctgtgaaatggatatgatgatacttgccttcctgagattgttgtgaagttaattgagactatacatgaagtctctgggccataactgatctcattacaccttaattcttgtttctattacttattttacttctgtctctgggaagttcagagtttaaaaattcaacttgaccacagcatctttacttggtcatttctgcaaccaccatgttccatttcttttgtgtttctatttagatcttttgttttaagctacccaatcctttttggaataatatggggtattattaaagtaagactaaccagcaaaattctgtaaaaattaaaaaaaaaatcttggcgcttccagttcattggttttgctggtaagattcaggatta

SEQ ID NO: 36161 - DNA, 1406 bp, Homo sapiens
tctttaaactgtgcgtgcgtgcgtgtgtgtgtgtgtgtgtgtgtgtgtgtgcgcgcgtgtgtgtgtgtgtttaacctcttagtgtgccttgtaattttatgttgaaagctggatgtgatggacttggtgcacggaaccctggtaaacaggcctttagttgtgtggtgttaaggtgtagtgggaggggaagcttgctatagtcctatgatttggtctcattcttttagggaacctttgtgtctgggctgtgagcctcacatttgcttctcagcttccccctctccacatccttaggtgatactaaagtctagcagaggctggttatttcctgttcctcagattggacaggctctgataaatgctagcagtttagtccctgtttaaatagtttctcccgatggcaggccttattaataagaacacagtgccctggcttctttcaaaatggttattttcccctctcactgttgtaagcatgaggggatatttcttcaatattcactgtgaggatctggtagagctccaggaggtaaaactcacacaaatatagctgccacacccccatgactgggtccccctggagtttttaatctcttaggcttgtccacagtgagcctccaggaattttccactacagtttaggttttcctacccccgtagtggatcttcaggggtttctacttacaggcttctgctccagtgaattgtgattccttgtattcacctgtccaatttggggggctgtggcttgtgacatttctccaacagatccaaggcagatctctaagaagtgctgatttttcattttattcagctttttactgttaggacggaataacgactttcaagctccttacatgcctattgggaactggacgtccgtttatgaagtgtttgctttgctggcaagagtgtttgctggtgagagtgtttgctggtgagagtgtttgcacgttgtgttcttgactgtggttggacaagcgtcaccccagggagtccaagcccctcctttgtgccctccccatgcgttgtcccacctacaccagatgcaggtatgtcactgtctcctccaggaactctgactggacgcatgcatgcagtcaatttgtgtgttaagtcggcctccctgtcatctttccagctcctggatgagtcatgaagccctgagccacagttctttcatatgtaaagtaaacattacccacacaatggggagcatctgaatagaatagttaatattcctttattataataataggaagctaggatacacacttctgttgtgtggattaatgagagacttcctatggattatcttctattaaaaacatacaagtgttctgatggttttcaggcaaatagagagagggagggaaaagccatcttcaggtcataggctggatttg

SEQ ID NO: 36162 - DNA, 1703 bp, Homo sapiens
tgggatcacaggtacatgccaccatgcccagctaattaaaacaattttttaaaacagagactcaccatgttgcctaggtctcaccatgttgcctaggctggtctcaaactcctggccttatgtgatcctctacctgggcctcccaaaactctgggattacatgtgcgagcctccacgcgcagccaaaaggaattagaggctcagaagaaggaggaggttgtccttttcaaccctcccatcccccagctccgtcctttcatgcctcctcgaactttgggggccctacaccctcaaacaccttttcctctactaagtacaactgggaatgcatcccaggggcaccgcaaaggtcatggcaagatgaacaaatcctaccagcagggcctgagaagcacacggagacccatgagccctccttgccccgctgccaagccactgctggtcattctggcttcccaggcctgccctatgcgccacccaccgcagacaacacggaagatgagacggacgccttcttcctaacagccgcggccattcgagagtggctggagttgacctactgtttccttgaactggccttccctcacagcagcaagggactatgggcacagtgccatttttctgtatttttttttttaaggcattggctcacaggattgtgaaatttcagcaatacttaaatggacaaggtcaaagtcaaacgggcatgtcctttgcaggtccacaggagcttcatctggggccagccccctcccacccccacaactctcactgagggaccgtggctgaggagaccagggtcgcgcagatctgcttacatacactgagccggactctttccttctttcctcagaaacagcagcatttcgcatggaagaaacactggccagcttgtgggaaattgagctgccaaggcctgccctagagacgcaggaccggggaaggggccctggcaatgagtttcctaaagctatccaagggccagaaaaccatggcggcccccacactggagcttcctcctggccggaagactatggcctccttcacttgcttatggagcccctcctcctgagagatgttctgctgtcgggagcctgcagagggggcgttctccagggctcagcgcaccaggcgccagggagggcgtgcgggcctgcagtgcccaaggactgccgtctctctccaacgcccctcctgaggattcctgtccccggccccttatctcagctgcctctgcctccaagaccgagtaggagtaaccccttgtcacacttggggccacagcatgtggcccgtgcaggtctcccatctccagctatgttttgatttgcctgacctccaatgacaaccttctctgggtcacaggaggctctggcctctgtagggttccacttggatgtgagcaggtgagaccatccctataaagaaatgcaaatccccttagttcttttcccggaactcaggatgccccgctctgagtcattagtgtctccggtgagtcatggccgctctccgaagatctcggggtttcccatagacccgtccccatagccaccgaccttgcagcttttcacctcctgatttcagcccaataagagcagaggctcctggactgtcactgtcccaatctacctcaccacgggacatgggagaccttctttaactcttcatttctttcccattctttttcataattttaaatt

SEQ ID NO: 36163 - DNA, 998 bp, Homo sapiens
gccacattctggtgtgtatctgtccccaccatctccctttgtgtaccctactgctcctggcagctcaacctcagatgcttttcctgggagtatcatcacaaaaagcagagctcaggcacctcttgtgaaacatgcacccatgttggccatgctggctccaaggtcctatgactcgggcacgtgctcctgctgaaggttattcataatttcaccagcaggctgttggtggaggtctgtgaagaaggcatcctggaaacaggaaggttgggcagatacctggtgggagtggggaggccttctgggacagccttaagtttcaaagccacaagtccaaaagtcttgagggacagcctccagggagatggtagaaacctcgtatgacccactgtttgggtgacacttccagccaacattgctacggcctgagccttgatgagtcatttacccagatgggcttgagtctggaggaagaatgtgcagggaacggggccaggggtggcagcagcctctccagggctggctacccgctgcctcggtgaggagggagcagcccagccctggcctccgcaggagcatctgggtggacttggacccacagtgaaaagggtatgtgaacaagttcttgggtatcagatgagcccaagtcgcccggattttcttccccgaccctcttcaccgaccctccccgggctcagcccagggctcacctggatgatgaagccagtggaagaacattgtctgacccagaggctgaatttccgctttttcctctttcgcagctcccgctctgtgcacgtggcaatgaatacaggatcctcatcgatcaggggttcatgtagcacctgccaggagggaaaaagcagaggctctcacggaaggcagcatgagcttgagggctcatcagattggagctcaaattcagcctctgcatttgagcagctctgtgaccttaactaagttactttacctctctgatcctgacccttcttatctatagg

SEQ ID NO: 36164 - DNA, 589 bp, Homo sapiens
atgcctggtgatgggcacccacttcttttcatggaagccccttccactcatggaaagttccaactgctaaaaaagtctttcactgatccacaatttacctatatttaactgaaacctagggatgtgacttctgtccagtgagaaacaaagaaaaaaaatgctattttttttggattttcaagacagccctcgtgtcagcccacgacctccttcttccaggctgaacctcctctttttataaatcattcatcaaatgacccagttccctgttggcctgttgcaacacacagcctctggttctcctctaggttgtcatgacctttctgacaagattcccaaggcaattttgaaactaatttcatctatttcaactttttgataacatgattatatgacttttcccaatgataagacaataaagaaaaaagagatggcataataaaaataggctccaaggagtggccacagatctgcttcttcaaggtaaagctctttcgggaggctttaggataaacttcaggaacgtgctacacttccctccctgatcctatctcaagcttaattatgaattagattgtgcatctgtagg

SEQ ID NO: 36165 - DNA, 2280 bp, Homo sapiens
agagaaagcttaagtggaataaagacaggagcagctgaagtggcccaagagatggcaatggctggaatcaacccagaaacggtaaagggaagagtcagagtgctaggccctgtggacacggatggctctgggagccccgctcaggagtgggtggccgtctgcggccgtgttctccctagagaggagtgacaatgaggcaaacaccatccacgtgcacagtgcttacagtttataaacctgctgtcacacacacttctgcccttctcccagtgaacctctgaaatacctattgttttgcccatgttatagataaggaaactgaaagccaaacaaggttgcgaaatttacctggactataaagttagagccagcactgaacccaagttctgtctccaagcccagagcacttcctttctcagcatgtcccgctgccaggttgtgagcacactcaggtatagtataatcctggcaccaacagactggcatcccaggcaaccagcctactctctgggtgtccctggggaacatgcacacgctgctgctgcctgcactctggagcagcctccttcccagatggcctgccgtgatggagctgcacttctcagtctcagcatcttggccaggggccgccactggatgtctcacgctgcagtggaccagttgtgcaccccaaccctgatcagaggctggaccctctgccagcctaggcttaccccatccctgcctgagcagactccctggctggcccaggcacttagcagtgggatgagaaaaccacccactactttcttctgtcctatcagtgtccctactgctaacttggctgaattccttgttccatgagcaggggacccttttgtgcctagtccaagtcccagccaccctccacgcccagggttcccggagccgccgtctgtgttctcttcccttgcaactccacagctgggcatccgggacagagtgtgagccacccctcccctcatttcctttcttcccttcaccccagcatgctgggatcactgcatgctgtgccctcgggctacagtacccactcctgtccctctcccatcctacatccactctcacagagatggcaaaatctagctcagctgcaacccttttcatgaaacttttgtcattcacagctttaaaaaaaattgcttccttcctctggattctcaaagactttacatctttctcatgcaaagttttaactttctactgtggactactgttggacgttagtactgtaagctttagtcctgcccaattcttccctgtcagcccacgtggttactgcctactgcagttcctaggccagcaggagcccagcaggcaaccatggagcgcggacatgctcagagacagccctgagtgtctcgctgcagaatcgcctgtggttgttgatgaaagcactcactaatgatttgttcctctacctgggcattttgaagtattttaatttttaacaggacacaagagtcctgtaaaggaatgacatcctaatgatggaatttcaggaatgtccactcatggggacttttccatagtcatgtgaggagaagagctgttgactgccaggcctgtagcggccaactgtgagcacctgaactgcactgaacaggccacactgatgatgggcaagggaagctctggcttttgtatgctggccacccctgatctcagggaactggctcactgatccactggatatagggtgaccagctatttaggtttacacagaacaaaggggtttccttaggccccggattttcagctctgaaaccagggcaatcctaggtaaactagggtggttggtcacctgagaggaggtgagtctgttatgaaaacacgtgcaaggtgttcaggcatctttagatttttataggagaaaaagcatacacatttatttaatgtatatatgtgggagtcttcagaatgaagacccaacatttcaatgagtaacagaagcttatatactgtcttgaggttacagaaagaatgggggcatgggtcctaggaaaagaggttatgggatgggggagaagaggaatgttcaaggagggatctttaaatgtcagatgttactacttcattgtaaggatgcaggctctctatttaaaactttccctgactagaatttggtggggcagctgtccgggcaatggttctctgccatctcgctatttattttccctgccatctcgctgtctctgttttatgtatgtatgtatgtacatgtgtatgtatgtaaatatttgagacaaggtcttgctctgt

SEQ ID NO: 36166 - DNA, 1011 bp, Homo sapiens
atggccccggccgccgcccgcgcgcccgcccccacagtgcctcccagccgcacacgccgggccctgggcccgcgccgcggcccgccgccccccaccagcgcagcccgcagcacagcgcccgccgccccgtgcccggccggcccgccgtcttggccgcctcgggcccagcgcccggggaagcgccctcggagctcgggcgccgcaggctgcgggccgcggcgggaggcgagccgcgcgcggggctggcaggggcgacccagagcgggcgggacgcagaggctgcggccgagaccaggcgccgccgccgccaccgccgccaccaccgccaccaccgccgccgctgcgtctcctcggcgcccgccgcctccctgcccgccctctccacggcctccggcgctcggctgccgaccttcccgggcgcgagccgccagaggcgggccctgccgcccctcacctcccgcccgccggccaatggggagcccggcccggacagccgcgggggagctgggcgggcccggcgcggggaacgcccccaccctcctccgcggggcggggcggggcgcgcggccggggctggcggttagggggagggccgccggcggcagtgccggtctcctcctacagggacgcgcagcccgggaccgccacgcgcagcgcgggagggggagggcgggaccggggaacaggaggggagggggacccgggtgcttccagcggtccgggcccgcggacggagtgcgggccgatcccgctcactgtccccttccgcagtccgcgtgcagctccagggagctgtccgccccggtggttctgaaccaggcgccgccgaaacgctccaggtaggcggcgggcccgaggtcaccacacccgcggcggcggctgctgccgaggtttcctgggggtcactgccagctgcgccgcatgctcccataaatacaggggctgtccagcttctgggaatctcgctctaattaggagcccgcctcgccggtccactgttggtcgctggtc

SEQ ID NO: 36167 - DNA, 1394 bp, Homo sapiens
gaaccaaagggccaacttctggccatgcataacgaagcagagcagtctcagggtagaaggcactggaaaagcgttgtaggacaatttttcccagtagaaacggtgggggtgggagggagacccgctcaccccttttgacccacccctgcagctcagccacgcctcctagggaggtgggcagccttgcaggagcccgcgcgaggctgcagtaccgccctccgccacatgagggcagcacggcctacccgtgcagcagcggcggcccccgcgcccctcttggccagagccaggcgcaggccggcttgcggtgccgtcgttcattggccgcggcgcgggcgctgccatgttggcggaagcggacccccctgtgccgtggaaactggcggtggccgcggccgccgagtcggtctgcgcagcctcctgcgttttctcgcttggatcttggcactgagaggcggtggccggcgggatggagaaaagtaggatgaacctgcccaaggggccggacacgctctgcttcgacaaggacgagttcatgaaggtgcgcgcggcgtccgctccccggagccgggccatgagggtgcctctgccctgtgccctctgtggcggtctcttcggtcggctgctcctgcctgcgcacgctcagtgtcaggtcctccgccgagacctcgctgcacttcgcaatgagtcttttggcgtcaggtttggcgggtgcagcctggagaaagcacttctgtaaaatcgtgcgtgttacatggaaaggcctgaaagttctgggcaagtggttttgagctgcatgtcaaagccactgttacccgttcctgttaccatgcagtgcagtcagattgccagtccccttgtcggaaagaagcttgtggaccggggccttggagctcattaagtgtgtgttgaataaatctccaagcccacgtactttcctagggactcgggtcggaaagaaaaagaacttaatctgaagttttgcttaacattcagctaaagcttccagaatgggatatttagaagcttagaacattcttaccgactattgcagtacgacaaagcaaaccattactctttaaagaagttgctctactttttacgtgatgcatttgaagaagttggtagttgtaggtcataaacttagagaaaagaaatataaactgaaaacacttcactgatgataaagttcatcaggcacagccttgaaaatggccaggctttgagtgagagctgggaggagctttgctcctacttggtgtatccctctgggtctgcacttaagccattcaaaaaatgtttctatttaatttcctgaggactaggatttttgacaccttttagtagctgctttcagtgttaaaaagcgaaaagttttagctggttagtagaca

SEQ ID NO: 36168 - DNA, 1134 bp, Homo sapiens
ttcacttacaatactgtgttttatgctaaattttccaaggttgcatcatcatgtagttggtctctcagcaggaaattacggatttgttcatctaagatattaatgggatgcactggaaatagttggtatatgataatcaacatcaagccagggcaagaaacctttttgatttgtgagcaggatttaaaatagcaaagcatcattttataaaatgatactgctatgtagaaataatgtttacatttccccatctctttttgtcgtccaggtttggagttagattgctttagttatctaatgctgtcacctcacaaacatactcctctgcttcctgcctccaaactttcctggtccttttcctcagaccctgggacccatgcagcatcacctcactcttccatcccacccctgcacctcctggagctcccatgggctatttcagcccatgctcttggctctgccaggctgggccccttggtgacggcccagcttggcttcagctgcatctcccttccatttcagtttctctcaaagctggtaattggaccttaaactacattgaaactcagccagttccctgaaagtcttttttaccttcaccagatttcagccttaagccttcaaaggagctgattagccttttttaaaaaacctcttttatttaaaattcatgaaattttaaaaaaacacgtttgagttacggaagtgtagaacttgtctttagtacatttgtttttccatctaaaaagtaaattccattaagactttgtagaacttttctattgatttttatcaggtgttgagttgtttgctctgaaggatgacaaaaagttccgcaaacatgattagggtcagagttgcattgtcatcagattcatttcaaggtcatttgaagtaaacctaaagacagtggggtgtgatggttggacatttcctaagaagaaatattactctcagtaatagttttctgctcctggatctgactatatacccacatcccaatcaccttcaggaaaaaggccacctccccaccccagccaccaccacaattcttgtgaacacattttgtatcctctcactcttcctgagaccccactgtgtctacatttcatttgcacctacaggcatattgga

SEQ ID NO: 36169 - DNA, 1709 bp, Homo sapiens
cttccctctgctcgtctgacatgcacagctcaccattctcatccggaggctaggtaaatctgtcgaggtcaagtcaggacctggtgtcatggaaaccaccagggccagcgccccatgctcaggagcacagcaagcactgggcagacggtaccctggagcccatcaggccccagatcctcaggtcctctctagtgggacacatctagctgcctgctgaggtcatgtaaatagaacatcattgctaaagggaaacctagaggtcccgagacagcccccgatctcctcactggacagaccatgtgggcaggaagtggctgcctcctttgacggaaactgaggccagcaaagttaggaagtggggcagggtcagggcagcatgcggtggaggccggcgaggatcctgggcttcctttgagtcccgatgtggttggcttttttattcttcctcctcttcctcctggcctggctctgcggtctgggtcaggtggatgtgctctctttcgaagggagacccatttcagatgccactggctttcttgcctttgccttctgcaggaccctccttctcagtgagcgctcctcccagcacttctcctagggacagcaggctaagtccatgtgtccctgctctgccctgcacagtgtgctgccaccctcaaccgggcaaccctcgggctggcctctgcccctgtgaccagtcagtgccagggctgagcaatccccccatctatcacctctccctgaacccgaagggaaagacctcaaggaggttgttgtggtaagaaaaatcactatgcgccactgaacctctttctccacagtcttgtctttcacctcccgcctggctctctgtccctcacgaggttaacatcttgacagagcctcctcagtgtctcttagacacacccctcagccccaccccacccatggatttgccgagctgctccctgagcacgtgttcccgtgactgtgtgcctggactcttgcgtaaccttcaaacaatcctccctgcctccagtctgcacacggcaggcttccgggatgacctctgaacagaacgcgtccccattcccacacctaccaagcatggcgttcaaagtgtctccagctctgccctccccaggcccattttctggttcaacactcatgccaagccaaccgccccatcctcgttccttgccccaaactctgcaggctgggctcatcatgcttgctcctagcttcaccagccctgttgccctcactgccaggcaaggcctgctctccgctccccagtgacctctgtcctctgagagccccgaggcttccctgagttaccttgtggagcacgtttccctgcagctccaaatcctaggcatttgcccattgacctttaaaagcctggaggcagggcctatacagccctcctctggcctcctctgagatgccaggcttaaagtcttacaagtagcaaatcctcaacaagtatttgttaaatgaatgctttaagcaatctgtggctgggtgcagtggctcacacctttaatcccaacactttggaaggcagaggtgggaggatcgcttgaggccaggagttcaaggctacagtgagcaatgatggcaccactacactgcagcctgggtgacagaacaagaccctgtctcaataaaaaaaaaaaaaaaaatcaacaatctttgtagtagagggttttcagtaatgcccctcctaa

SEQ ID NO: 36170 - DNA, 4016 bp, Homo sapiens
gatccaagtgcaaaatgcaccaatatcagctgaattatgtcctacctcccccaacggccataatgcccgtgttgaagtcctcaaccccaggacctcagaatgtgaccattatttggagacaggatctttaaagagatgattaagttaaaatgaggccatgagggtgagccctgatctaatatgacctgtgtccttatgagaagaggagatgaggacatggacacacacagagggaagaccatgtggggacacagagggaagaccatgtggggacacagagagaagacggccatctacaagccaaggatagaggacccagaggaaaccaactctgctgatggctggctcccaggcttctagcttccagaactgtgagataacacatttctgttgttaaaccctcccagtctgtggtacttatggcagcccaagcagattaagacatgctcctgcctgcagctgtaagttctcttcctagagaaacaagtgtgtgccaatcagtaggtctttgtggaggcctcctagacccctgagatgctcattcgagggccctagggtgagggctggggatggttttgtcatctccctgtggtcccaacatgcagccgggattgagcaccacaggctcagcccaaagtccaagtatttcccacgtgtctcaaccccaaaaccagctctcaaccatccctgcatagcgctatcccctgcagagccccaaaggcatgcatacctagcatggcttgcccaatgatagttggattccttagtctgtgctgggaccacgtataaaaaaaaaaaaaaaaaaatagaaaattctcaggtgactctgatatgtaagcagggtttagaacccctgccctagacacgggtccagcaccacgttctctcaaaggccttgcagctgggcttcagcctcagctgctacaaatgaaagctaccctgagacccccagaagaggttcttgggctggccctgctaattcatttcatctgactcttcttgattgaagggatgaacgtttattctattgattcattcaattctaacattttgtaccacatctcactcatttcttgtggaggggggtgtactgcaatatcgtcacttcttggccttttctgtccccccagggctaggccaggcttccttggagctgtagcgtgtcatcactgactcaaggccaccttgatgcctagatttttctgcttcatctaagcatacccagtcattcttcttacattggcagctggcttccctcacccagacccgtaaccagcacctgccctcaacacggtgcagctgctgaagtacctggtgtgttttgttctgcttcagtcattcaaatgccaaattctgacctcagctaccatctcaccccactccccatgcatttgactccatccgctgttctcaggaagagccacatgacatggaaaaatggaacagaaaactctctctgctgcttgcaggcctttctgtgcagagaagcctaagccaccagttcacacctaatctagacagtcacatcaaatcaggtcaacaggggaaacctgtgggaaccgactgctgggaagtcctgcctgacaagcgccaactgttcggggtttggatggcgctggtcgatgcagcccgctcactgtgctgctcctgctcaggcagcgtctccagagacgcaattccatgggccatttttgaggcagagactgtcgtttgttctcagttgtgatctgcggctgctccctaggctggttccaggtctgcacgcagccgcgtcctgggagtaatggtgctctggggtggcgggcctgacaccctcgccctgagtgcccctccgccttctcctctcctgcccctgcctcttggccagcacctgccccttctatgtctccctacttctcccgggctgaatgctaaaggtgaagatgacggctcatgctcctgtggtgcctgccatttgcagggcactgttctcatatcaacccctctgacctcaccatagtcctcaccttccctgaggtttccctgatgcagtatttcaccctgcagctttccccaccacaccgggcactctcaactctctcatccagctccccttttccctccttataaccctctgtaccatgtagttatgcacttattctgtccagcgtctttgtctgtttgctctgatgtgaatgtgagccccggaacagggttcccgctgttgtgtttactaatacagcccacattcctaggatagtccctgggacctactgcatcctggagaagtagttaatgaattggttcatgctgttttgcagaggaacagagaggtccagtgacttgttcaacgtcacacagctgggaagagacagaactaggactcagaaccaggccccctgactctgtcatccacgagctgaagcaccaatctacgctgccctcgaataaaattggaatctgccttttagcttatcccaaagcttagaaagcactttcatgttatattagttctcttcagctataccagagcccctgagacagggagcccaggcatcgttattagttccattttataggtgagcaaatcgaggttcagggagatggtgaccagcctgatgacacacagtcaggcagtctgtctcgagggaggggtagggtgaccactctggggatcccagctggagactgaccgagcccggcccttccctccagccccaattcctgcacaagccctgctattcctcctgatggcaagaggacccggtggactcttggccatgatgactctgttcctgtaccagtctgctccgttcctgaggaccctaacttttctcagcggaagcaggaagacctgaccatcttgtcctattgctgaggaggagcagctcctcctgtaagaccccaggtgggcaccgagtgggggaaagcccgcgtccggatgactggtcttatgagaggggagaggtttttcagtcatcaccgtgcctcctcccggccttttcctcctagcccacagctcagttacatctgagagagacaagaccgagaaggagctgagggggcccccggcttaccttctgctgtagtacccagaacaacggcagcttcttcccccggccgggtcacgatgccctatttatagctgaggggtggggatggagctgttcccaggctgcctgtgcacaggctggagaggagggttacatcacttggccagaccacaggctggccagaaggacagatgccagaagcgacactcacgctgggacctcttccaggaagtcttagtgatcgatgcagagtttcactgctgaacagagtgagccggtgcagggtcgagttacacatttaccgaagtttgcaggagtcggggccaaggttcccagaaacgggagcatctccctaggtgtgtgacagcctgaggccaaccacccaggccttctgacccagccccgggagatgtacccccaagaggccacagggacatgcaggccggaggtgcagagggcagagggcaggggagagtcttgcttaggcaacacgggggccacttctgaccctgctgcccgctcatgggatgtgtgaccttcagctgctccaaagagcctaccctgtgcaaaggcctctaatagacactggggaaaacacacaagcaagtgaaaagtgccttctggaagtttccagtgtagctggggagactgttaaacaccaacaatagcacagccagattgaaagacacaaacaaaatgccttcaggatgcaggcattgaaagatgtgctgttctgtgtttatgctgtacaaattgcaaatggtaagtttcacatgaccagtaaaagggttataattcttattttcctataggtaagacttgcttttgtagtcattataacagggcatgacagagaccttggtgagagtcgccagaagccagtgatcacaagtgacgcagtgggtgaggcaggttgggagtggtgatgtgtccagccttaaatacatggtattagggcactgaagggacaggaaggaagatcct

SEQ ID NO: 36171 - DNA, 812 bp, Homo sapiens
tcagcagccacataaatctgagtaaaatactgttatgtaaaatgtgaattatccaatgtcctcagtttgttttgacgggggatgcatccctagttcagggatggccccgggcaggcctagggtgctatttccatgtcagtagagggaaggaccatgaaagtagagacacaaagtaccgtttccaagtctgttatctccattcagacttatttgcccttatactactgcagcaacatgtcagtggtccgaactttgtgtgtttgctttggcactcagggttgggaaaagtctacaatgaagagttctgctcaccatttaataagtttagataagaaacagctatccaaatggaaaaatattgtcatccttttcccaccgaagccccatagttgcaatgatataaatattgctcttgtgggactgaaatgctatcttttgcgaaaactgagttctagaaataatatttatttaatgttcagttcttctacagaaaacattgcaaagaaatttggaaagagaaatatcagttaatgcctttctactgcaaagagaagtagaagaattcagagtggatccaagaggccagtcatggtaggactgctaggaaaggctcccaaccagagccagtaggacagtagtcactgggatttctgtcaccattagggcctcctgccagccattccacagagacctaaatgactgaacatcatcatgaagagaagtgcccacaacaactgctttgctcaccttaatgataaggatcaactctgccttataaatggttcagtggaaatgatcaattcacaatgtct

SEQ ID NO: 36172 - DNA, 1039 bp, Homo sapiens
taaatttctcctaaagttagcttgacccatgccccaaaatgacccaggacagtttagaggttaaaaggcaagaaggagatggttaggtcagatctcctccgctgtcataatttgctcaccgttataattttcgctaaggaggtttcaatatttatacctgttaagatataactggcaaaatgatagccacgataataaaatgctgccacttactgagaacttttgaggtatgggtcacccttttaagcttttgcatctacggcctcattttcatgctttgtaacagtgtccacagcagcatacagagaaggggagaaaaggtttgtgtgtactctttgcaccatagctctttcagcacatgcattagttttgctcttgcctcacatcctcttttactaatgccaggaaacacatccaacacaaccttatactccctgcaatccctgtctcatgggagtagagaatcctcatagtgaggattgaattagttaacatatgaaagcatttggagcagagcctgccaggcagtgagccctgggagagcattagttgctatatcactcgtgaaaagccttccggaaatgtggttgtccactaggagactgagcaaagacagtcaggtacccatgcagttaactcagtcaggctaacagcaaacagaacttcaaaggccacctgaccctctcccctgacccagaaagcctgaggcacctgcctggtgcagtttctccaccatctgccatgcagggcaccaccatgccctttgacccccaccttccactctctctctggactttcatccgcactcagcaacagcctgttggcgccaaacagcctccagccctaattgctcttcctagctcccgggcagtgttcccaacacctagtagccactgtaaggacaaatgcaacttaaaaacaagaggcttaattctcccggttgaaaatgggggaagaggtttccctccctctcttattctcagagcatttaccttagaaaacttgtaattataagcactttctcctctctttcaaatgt

SEQ ID NO: 36173 - DNA, 1329 bp, Homo sapiens
ttggagggcagtggacagccaggcttgccctcaagggagcccagggcaaggagtgcactgagggtgactcagggaactggctgggaggggctgggaggcagagagggtgataggctcaacctggagagaaggtgagatcacccccaggtctcatgcaagggactgtggacctgagtggaagtgggtgcacagaaagaggaggagggagtatcgggtgaggtctcccagcctgatggggaacagccaccatgcagtccatccctccttgtctgcctgtacccatttatttttggccaggcaattcccccccaccaattctcagtgtaaatccaggacacctccccgaaagtgcccacacccctctagcccatgtgaacaacccctgtggcagacctgtgcacagcgtggcatgtgaccacagcctctcctgcacggtgagcttgccgttccctgtgctgctcccctgacccccaggaggggttgtcagttgttctgggacagccccaaaggccccatggcctccacagtgctgggcacatgacagggatcggcacatagctatgaacagcagcgtctggcatctccagaccttgctggaaatgtggcttttcttcactggaaggccatgtgaaagacagaatgaatgaaaaagaaagagagaaagaaagagaaaaagagagaaggagaggaagagagagagggaaagggaaggaagggaagggaggaagggaggaaggaaggaaagaaggaaggaaggagagaaagagaaagaaagatagaaaaaaagaaaggaagaagagaaagaaagaaagaagaaagaaacaaagaaagaaagaaagaaagaaagagaaagaaagaaagaaagaaagaaagaaagaaagaaagaaagaaagaaagaaagaaagaaagaaagaaagaaagaagggtggcttttccctttgtgaattattcactgtgcttagtagaggaaagtgtgtcttcggctgagccccgatgatgtacaaggtaaacagaacagtccctgaaagcaaacattccagggtgcttggcccttagtgctccaggaaaaccacctggtggtagggctgtggggtgggggaggggagggggagggggaggggtctgcgtgcctccctcggggcttcaggcagcagtctaggttcacttcaggtttgtcaagacccctgcaattgagacacctctgatcgtcctatcacaggactgtagcttcaggtaaccccttcctcatggcctcccaagcaacatttcacaggaacaaatgtacatccaggatcgacacgcacatgcaggacactcacacgtagacaa

SEQ ID NO: 36174 - DNA, 2273 bp, Homo sapiens
ctcatcctcaaggtctcatctccaccaggccacagggtcccaaaaaagtcacatagtaaacagaaggggtatttttcaggcccaaattatagcctgaactaaactaatgaaaccggcttattaggtcaactgtattcactgggggaataatgttcttttttctccaactatactacctatgaaattcctcttcccttctttggacaatatctccaccattccctaaggccttcttcttaagggcaatgactcaccttctggcactaaatgtccagctcaggcccagctagcttctgggtgtccagtttgcactccaggcggtggacgggccaggggctcccaccatggtctctcttgctgccctgccatggagacagccccagatagccccccacatcataaggggttttcaaggatgtgcagagggaggacatacattgccagagccacctggaagcggtgaagccagcagaagtgatgcctaccaggtgccagacgctgctccagagaccagacattctgcaagcctgccagagccttgactctcaaggagctcgtagtctaatggacatgcgagtgaaggatgctttcatctggcagcaagaaggtgaatgtgctttgtaaaatgactcaattattaagatcatagagagcagagacggttatatatgtcgatttttattacagtttaatctagaaaatctaaaaatagctacatgagtcaccagtcaggagatgtgtttcagggtagatggcagtttgctgagcaaagaaccaggaggctatggggagaaaggacatgttgtaaccctagtgcctggagggcactaaacctctatccctgcttctgattcgcatttgctacatgagacagacactgatacaacaaaactgtaagcaactctccaagctataggatgcagctgtcaccgagtttcaggggaaggaaagggcaccagagtttgctttcgggctgctttgataatgagttccctgataatgacaaacaacacaggttaggtttctgctctgtgccagtctctgttgactgtgcttggcagtgttattccttttgtcctcataccaaccgtatgacataaaactattgttttactcatattacagatgaggaacttgggaaagagaaaagttaagtaacatgtcttatgtgacttactaataagaaggcacttagaaacggaaactctttcctaggggtaattgaagcaatttgtaattgtgcccctgacgggacataaccaatgggtaggggaggattttcgtgagtggtccagttctagaaagcaggtctttcatgtaatagcacattttcctaaatggcattacaaaagtggctgtggctagaatcccaagggatttgggattctggcaatgaggagaagtggagagaaactgtccaaagtgcaggctatttattgatcacagaaaccctgcgtcagtgctgactgagtctgggatgcaggctgatgcaaggagagtgagtgattctgggagaaatcagctgttctgcctgcctcccatggggccctaaaactgcaccgtctgcctcagtgcactaccagtgcaagagcccctgttggaggagggagggcaaaggccctggggagagcagagctggatatgcaagggctggaagacagaaaccagtgtacgcagggctggtctgccagaagcaacattgggcacctgcttctccagctgcccaaggccaggagggcttctcaaccactgtcctcatccactacccctgctctggtgctgccaggcacagaatgcacctggaggaagagctgagtagaacgagagctggagggtgggagctgcgtgttggagggaagttgagtatgacttaggtccaggcactcgacaccccctctatggagtcagccctcggggagtcagaaaaacagaggtagccaatcccactgcagggagctggcagagtcaggtggcatgcaggaggaagcaggagaaagagcacagcaagaggggcctggaaatgggagcaaagtcatcaaaggcacggcaccctcttcagtggacgggcatggcctcagaggtggtggcaaggaaggaggacaggagtctggctagctgtgtagaagccttttggggcaccgggacagggagccaccttctgccccctcacctccagcttcccccgattcattgtgcaactgctgataaaataatggctgtcattgatggcatgcttattgcgtgccaggcattatgttaacagctgttttatt

SEQ ID NO: 36175 - DNA, 1987 bp, Homo sapiens
tgtcatctagaatttctaaacacaaaccttttggggtaggggaagaatcttttttcctgtctagatccgactctgctcagctctaaaaactccaggaactataataaaaacagactctagcagggccaggtgggggcccaggggagatcaagcccatctctcaggaactgcagcccatcctgcccagggacctcattctacccaggggggacctgtactggtatgtgtgcacacagcaccaggacagagcgaaaagtggctccaagctcattttcaaagacacaccgacatgcagaccataggaaggcagagccccttttgccatttcaaagtaagttttactgctttttgcttcggtgactccacactgttggccactccccatctcttccagtccagggcacagcctagactttcctagaacaaaagtccattttctacaggtgtggaaaaagagctgggctcttgagaaaggaggtcatgccagccctctcccacggcactgagcaacagggagccagggctggcgggaggatgaggctcatgaaggggaggaacccatgggccatgggacgccaactcatgggcgctggccacagacagaaagccggggtttggggatgcaacttagtggtcttctatagtctttgagacaggggagataggagagtccacaaggaagccgtccctcctgacggcaacactgacagcccagcctcaatgtcccaagtgcccacggaggctctgctgggaggactccctccagccaggccagggctgggcgtcagtcaccccatgcggggaactgggtctcagttggccatgtctgttctaaaaacagaaggaccacaaccgagcccagtgtctatttttaacgtcccactcactgaagaggaatgtgtaatatttcagtaaaagacgagtgcaggctgccaaaactaactgtttggcttggcagcctcggacagatctaaattgttgagacaaaggctacagaagccttgtcagaaaagatcatcatttactggagcaaatcctaatacattcaccaaccacttaacatctattcttcccacctcccctccaaagagggaagaggaggaagatgagcaggaggatactaaaaacctttagaatcacaaatttagtagaagtggcagctgacagggacaaacccaggggcccaaagagacggggcgtgaacgtaagcaaacaaacatccaccccgtcagcctctaaggcaaaaaacaccagccagggagaactcagctgaggcccaacaggaaatgggtgcagaggtgcaccagtccccagggttgtcaaggttaagggacaaataattgtgtctgccattctgggctcatcatctcacagggacaaagacgcaccaacaaggaattcatcagcatgatccccatttttcctctatcacagtgcttcctaacggtaacagggaagagggtaactctggaagctgcatagggcttaagagcccagcactgggcttaggactgcctggttcacatcttcactttatgccatagtttcctcatctgtaaggtgggttgctgtgaggattacactctgcaatgcagggagggtgctcagcacagacccggcacgtggtgagattcctgattgggacaactgttaaaagaggatttgtgctgagtctggagggcaagtggggccttctcaggtggataggggtcaggggacggagcaaaacactgaggtccaagagaacatggtccctgaggtgggtgagaacagagcctgtgggatggcagtgcagggctgagggcagggctgagcgagtgacgcatcgtcccacacacatggagagcagggaaaggccaagagcaggggcacacaggggtctgctgttgtctcaggaaggggtgaggcacagcccagaggaagggcaggagggagggaggggactgctgggcagagatgggggtctcggtgagaagcacagagacca

SEQ ID NO: 36176 - DNA, 2944 bp, Homo sapiens
tttcatcatgagtaggcgtgtagatattcttagctggacaccaagctaagggaaaatgacagtcactctccaacatttgtaagtacttagaagtttacttcctgtcatatttattcgtgactcttccaaaggagtgctgcctgctttttcatcccccaaatctgggcgcaaacactgcacacaagtctttataaatacgcctattttcccactgaaaatgtttcagctctaggaatacattttaaaacctatattttcccctccccagtttaccacacccttgtttttcctggcaaagccatcagaatttgaagtccagtagagaatttccttttgattccatcagaataaagaaacactggcagcatccttcagtcatttcacttttccctcacattaaagtgggtttatgaccatgaacacttcgtattaataaatgtctcagcacacccaagcctgaaaatctgatctaaacctccttaacttgaattccatccacaatccacaacttcctcggaaaaaatctctcccagcttctccttcctctagcccaagaaacagccttaacagcgagcgatttcattcctacactctttgctcagcttgactttgctcctcacggcaaaagttgagtttgaaacgccaaagagtcacagtgcaaattctaatggcaccaaacaggcttcggttaaacacatttctaagaaaaagaagaccaagtttctgaaccctacagaagattcaggcgtttgtgactaagtgtgggtcatccctgagctttttctggaacagattcagcgtttctaccttcacaaatgactgtccctctagcagtctggacagtgtctagatctgagacctaaacatgccctgttatgtggccaagacttactggagctcatttaaacttatcgtcccttagttttttggtggaaaacagggccaccatgctcacccttaaaacatacgctgggcattgtgctcacttggaaaacatcttagggtgatggatgggtttccctccttatcttggaagacaccttttcttccttgttacctggcttggcaattttactttccccatacatctcatcacaagtattcatgttagtatatatcatttgctcagtcccttcacgggcaggcacggggtggcgttattacccccgttttacacagtggaaactgaggctctaagaagttaattgacccaccgccatacaggtagtaagtagcagagctggattaaaacccaggcttgtctggtttaaaattgcttgttgtttccactttggtcagcctcgcttacgacagctccgggagaagtctctggagtccgtgcgagccggcggatcaggtctagatggaggttctttaacgacccacctctcggcgatctcttaaccaactcccccagcggagcccccaccccccgaacttcggctctggggctcccctcccacccactgccattcctgccttttcttttccagcccctaccagctggggcggcctcacgccggcaggtgcccaccgggccggggcgcctcggggcgccgggaggggaagagggtccgcggccaggcccgcacctacctcgtccccgaagcgcaccaccttctggcccgtgggcccgcgcaagccggggaagcgcgtgagctcctccgagtccccggggtctcggggcgccggggcgcgcggccccaccaggcaccggtcgatgatctcgtcctgctgcgcgggcggcagccgcgcccactcgggcccgtacttctcgcggatcttctccttgtcctgcatgatcttcctggccatggggctcagcgacgagaagtaagtgaagcgctttcgctcccggtcgtccagaggccggttcccgctcatgaccgccgagcgcgaagccgcgatcgccgccgccatggacgccatgcccggcctgcccgccgctcccggcccgcgccccgcccctcgctgtgcccgccctcgccccgccccgcgccacccggagccccgccccctccgggaaccccgccctgcaccgccgcgtacccgggtctccaagccaacccagctccccaagccccgggaccccggccctccgtggccccctccccgggagctcctccctccgggcccccccccgccaccccctcgcggaccccacgagtccccctttacgcctccatagtggattaccgcggtgcccgcaggtttcgggctccccttacccggctcaggtggtagccggcgtgtccctgagtccgcgcccggcgctctgagagggtggccgtggttaattcccggtagtgaccgccatagcgccacgtggccactgcttgacaaaggaaacttttttcaacctccagtgagcctaagaaagccccagcatttcaggccaagccgctggctgcctggcttctgtttttactcctttccttctgtccctttctgggacgagccacaccttctctgctttctctgggcccgtccaggacgctgggcccggggcctggcgcggtgagctgcagatagccgggggcgcagggcagcccggaggctggagggcgacctggaaggctggaccggttcggggcatctggtgctcaaggaaagtcagctcccgccgcccctcggggccaggtgggtgcatgaagtacccggtggcccaggtgcctttccccaacccaaggagctcagaactcttggcagttcgacgtttgcaaacaaaccaaagaggagcagaaagttttcagactcagaggcgacatcccaacaggtagggggccagggtttgtaattttgaggtgtgtcccagacagaccacaaaattaaaattatagcgagcccccacttcccccaagcccctctctccatctgactgattttaacaagactaacaggactcaggtgagaattgtgtccactcgtaaaataaaaaaacaaa

SEQ ID NO: 36177 - DNA, 2096 bp, Homo sapiens
taaaaagacccacgacagaacttcaaaacaaaaaaatgtacacacgtattttgtcccagaggcatctgctatgatttattaaactgaagccaatagcgcccattcttaatgaatgagctggcgtagctccaatacacacacggcactgacacacaggctcaaggcctgcaggggccttttttccctctgggagacacctgacagatcgcaggttgatcttaaacaactggaagcaagatgtcaacgagcagataagatgggcttgctctttttttccattccagggatccaatttttaggaactgttgtatacgagacattaacccgggaggtcaggaagcctgatttccaggcctaagatgtgccaggcgtctccctccgggggcgggctccgcaagccgccgggctggttgctcgtccgcccgcccctccctcgccccttcggcatcctcgggaggccggcggcgggaacagggctgccccgggccacctgccatctcctccgccacccttccaacagttgcttcagactcaggagagaggccgccctggccccaggagcatgctgtcagctcatttctcgactcgccgccctgcccaaaggcggctgcaggagggcgcgcggcggcgtgggtggcagcggcgggaagctgcccgccaggacccctggccgagccggctcccgcggatcgcgcgccgcagccggaggcgtgaggcccgggcgacccgtaccccggcccgggaccccagccccgctgccccgccgccccggccgactcggacgcccgccgccgcccactcaccgccgcactcggcagagtactggtccccccagtccccggactgcgggctgcagccgccgccgcccgccggggcctcctgctgctgccggtgctgcagctcctgcttgagcagggagagcggcgagtagtgctcggtggccagggcgcctggccgcagcccggcggacaggacccccagcagcagcagcagcaggacacgccgggcggcgcccgcggcggccacagcgccgccccagaagcagcagcagcagcagcagccggcaggtgccatcttccctcaaggcgcatgcgcgacagcccttgcccggctctcaggcctccccgcctctaacctacggcgggcaggtggaccgtggcaagggggcgggacaaggggagaagcattgtgtgctgggaatggtagtcccagctcggccagcccggggccgccttgccggtgccgggactacgaatcccaataagcccgcgcggcgcaagtcttccggtctggcgtctgacgtcttaccctccacagaatcggaagttctggactgcagttgagtggaaatgggcaacggcgggcggagcggcctgcagcaggggaaggggaacgtggatggggtggcagcgactcctactgctgcctcggcctcctgccagtacaggtgcatcgaatgcaaccaggaggccaaagagttgtaccgagactataaccacggtgtgctgaagataaccatctgtgtgagttgtcaggtgtggggtgcccttgagaagaaaatggcgcggcgggatttggggaccgcgaggagcagggtcctctgatacagtctttagttcggtagttgacattcccgcccgggatctttgcatgaatatctgtactgatagagaactcagctacccgacagcgcttttctcatactggggcatatttgggtgatatgacctaagccggcgaacggaccggaccgacagacagaggtagatgtgggcattttgcagagaaatttaaagatcaattaggttgacattttggttcatgccaaagctacttccttctagctcttctccctttgacagagagatggtaccatccttaccctccacaacccatgttgaattcacctacgatgctttttaaaggtttcatcaattgtcgttattggatgtctacggtgtacaaagcactatgctagacgttggtggtacaaaacccaaaagtgaggaagtaaaaattctcatttcaaggtgttcgtagaataccttgaactttctgatgattttccatctcagagttaaggcccgaatccctga

SEQ ID NO: 36178 - DNA, 1252 bp, Homo sapiens
cacatggacagcacccagaccgggaggacagccacctcccacctttctcaagagggtttgggcaatcagcttcgcggggctgagggacccggccgcctccctcgcccggggtgcgcgtctgctttcgcagccatctgtgcgccggggccatcccgcggtaatcggatcacggacgcgcggcctggggcgccggaaagggggccgggctgttccaatctgctgtctacactggcggcggacaaaagttgtcctcttcgtggtaggaaaacgcaatcgcgttaatccgttgggccgctgtgaaagcctttcccccaccgggaaggtctgtttcactcggggagaggtgacaaggccgcccccgcccccaggccaggcacgaaccccgcacagcgcttccgggcgcccaggtttccgagccagcggggccggactgagggcgccgggcataagaaagccgccctctgcgcgcggggctctcccgcgggggttccaatcgtgggcacggagcacgcgagaaaaatgggggtcgttgggaggacggcgccggcgcctggggcggaggagcccgaaagggcgggtgggcgcggggacttccggacagagcgcggtccccgcgaactttcccgggacggcgagcccggccgggaagagccccagctcgcggagccccactcaccatctctttgcggagcagcgccagagcggcgtccaggttgggaggcttggcgggcagcgctgccgcccgggccccgccgccgcccgggcccccgcggctcagctcgtcctggatgcgcgacttctgcgcgtacagccgctccaggtgccgccagcccccagacgcgccgccgcccgacgccgagtgcagcagcccgctcaagctctttggcagcgggggcagcccgtccacccgcagcccccggaccgcgccgttgcccgcggccccgggcgccgcccgggccccactcatcgcgccgcggcccggccacgcgcctgccccgctgcagcgaaccaaggctttcccccggcccgcccccttcccggcggtgccccgcccacttcccctcccgcgccacgcccccccggccccgccccctctcctcgaggcccctgcgcgggccccgggtccgggtggcgtccgcgtccagcagccgggctcgcctccacccgggtctcctcctccctcgcgcccctccagcgccctaattcatctccaactccgcgtgactaccctctaaccccccgactcacctcc

SEQ ID NO: 36179 - DNA, 854 bp, Homo sapiens
aaattaagaagctaatgttttattaagtccaggagtttgaggctgcagtgagccatgattgtgccactgcactccagcctgggcaacagagtgaaagtccgactcaaaaaaaagaaaagaaaaaaaggaaggaagctaatgttttagtctgtgctggagttaaagctgccccccagatcaagggcctggctgtcaggatggagaagagagggtgtgtgtagagcttgatgactggttgtgtatagagatttgagaattatcctcagagaacatctattcacgttcccttttttatcctgaatgaatgtgaattgagagaatgactctagcggtcactgagactgtcacacaaaataaaagtcattcagttgacaaaattcaaatggaaacaattcattcaaaagctccttcttaaccgcagccagcatttccaagaatcctttggttaggacactgtttgcaaaccctgttcagataacagattagctgaaactaaaacttggcgagtttccacacttggcactgctcactatttaaatgaacattgaataatggggttaaaattcactgaacagaaagtggaagaagaccaaaagctctcagtgcacgctggccaggaaactgcacgaagagcaaaggggaactggactgtaaatagaatcaggagcaccagacagaattaatttacacaaagtcatcagtgtttcctacagcagcgtgacagcaaactgggctttattcaactctacagatgagcccaactgaattctacaataaatcccatgcagcaaacagcagcacaggccagcaaataggttcctaccatttttattctttcagtggaaaggttggta

SEQ ID NO: 36180 - DNA, 711 bp, Homo sapiens
tggattgttattaacaatgatcctccctgcaaaacccttaaaattgccccttgattccctagcagcaagaggcgagcccttattcgctgagctgaagcctcctcccccctcctccccattactctctgctctggaaattacaactcctcggcgcgccgcgcggggaggcagcggcagcggcgggagggaggcggggaggggattcccgagccagccggacgctcgccctccgcccgccggctgcagcgtcgcgcggcccaaggtcagaggcgccgcaggagcagcagctgggaaccagggaagcgggtcaatcccggccgcagggagaaagccccagggcgcagtcagccggcgtccacagccgcccaggagtagggtgagcggctgtctccgggccggtcgggtcccgccgaggtggccgcggccccagcgacccggcgggtggcggcccaggggtcggcgagcaggcagctggagccccaccttcggctcccgggcgctgtccgccgcctcgtggtgctgatcccagccccacggctgagcggccttcgcacctgcctgtctcacctcgctatcaccccgataaggagttgggccggggcagaaggggggcctcggggtagccgcccaccggagccaggggctgaagcagcgagcgcacagcagcccggccgctggtcctggggtggagaggaggcgcgcgctgcagcc

SEQ ID NO: 36181 - DNA, 1266 bp, Homo sapiens
ccgagtagctgggactacaagcacacaccaccatgcccagctaatttttaaaatttttttatagagagagggtgaggatgagggaggaaagcggggccggggagtgcggcagggaggtctctctatgttgcccaggctggtcttgaactcttggcctcaagcaattctcctgcctctgcctctgagtagctggaattacaggaatgagctaccccacctggcttcactgtcctttttgatgtcagtaggttatgtattaatcagtatgtcaacagtttgaggaactcacagtaagatttgagggcctcgggataagagccttttctcagagacaggatgtaagccatgaatcacgaggcctttcccaggaggttaatccagaagcctgccaaatgtgacctgtaggttatcagatgggtgtcaaacctgtgctctccaggactagccactggctaatcacacatggcagttgcaacttaccctaaataatatgaaaagtccagctcctcagtcacattagctacttcaagtgctcagtacccacaggcagctagcggctaccgtcagggacagagcagacctgagacgcttctgccatcactgtatattctatgggatgtttcactgcctaggtgctggcaacagatggtggtacactgtgggccagctatggagtggagagcctaaacccactgaggtggggctgggagtggtgaggctcatggtgtaggaaaaagcttctccaaggagctgcacctccgctgatccttagcctaaggctcctgctctctctgagcagacagcctagaccttgacctctccttgcgtgctggtgctcctggggaccgggcccccttccttgtatttccacctactccctgtgtctttttgtgggcttcctttgccatcttctccataggttttcagtggaggctgcacttgcacagtccaggggatctcaaactgcatcagaaccccctggagggcttggtaaaccgcagactccagggcttcacccacgacctctgatcagcagatctggggtgcagccagagacggtgcacttcaacaaatcgcccagtgatgctgatgttgctggtctagaaccacactttgacaaccgttggtgtggtctaaagaatcccattcactgattcatgcattcaacaaatatttattgaatgccaccatgtgccgggtactcttccagtgccgggataagctgtgagccacccagcaaagcccttgtccttcattctaggacat

SEQ ID NO: 36182 - DNA, 1055 bp, Homo sapiens
tgtcagggttgagcccaggaccccagccttggtttgtgtggtgcagactccccagctctcctggccattggccaccacacccctcccaagggctgcggagcacttcttgggcctttgctgtctttgacagccccttggtgccacctcagtaagaaaagcagaagggaagtgaggccatgagaaggtagagagaacctgcccctgtctgcatgtcctcccaccctcggatgtggatcgggtagggtaagcgctatctgggaggaagccgaggcagccgggaagttggaccccagagctgactgggggcctgaggctttgcttaggttggactcattcctgcacctcccatgggtcactaccgccacccggtggtcggtgtccaaatagcatcaacagtgcggttttagtttccttctcccacctgccggatcccgccccgggcaccctcgggggaaaccctgccttctccggaaacacctgtctgggccgcccaccaagtcctcctcgggacttcctgtcgtgaatcctcactgctcaccttccctctgccctaccagcagcgtccagcagatcaactcattatcaatctggaaggacaaacatggttttcttagcagagtggcgctgctaaggttaaggctaagacctcagccctgagcgggcgcggtggctcaagcctgtggtctcagctactcaggaggctgaggcaggaggatcccttgagcccaggagtccaagaccagcatgggcaacatagtgaggccctcgtctctataaaataatttaaaaattagccgggcatggtgtgtgcctgtagtcctgttgtacctaggcgagttaaggaaacgctacactttgagacgaattaagagtcctttattaagccggtggccaaagagacagctaatgctcaaaattctctcggccacgagtaacgagctcgattaacttttatacttaggtttaggaaggggagggggactcaaatgtaataattctacagaagtaaaaacatgcaagaatcaaaagaagcaaaatagttacagagagataaa

SEQ ID NO: 36183 - DNA, 818 bp, Homo sapiens
cactgaagatgccccctgcccgctccccacttcctagaaagcaaaactcgttacctttgttttccttggccacattttactggaagcaacaggaacttcttaatgggtttgtggccctcaattggtttttaaaaaaatctaacagatcttattggcaaatattcaagatggtgatgctggaaaatttcaggacttttcttttgcaagtgagccggtagctgtgtttgttgaccacattctttggcagttcctcccagaagatcaaaggatcctgcagctttaacctaatatctaggctgtaaaaatatgagggcaggtttcgggcaggatgtattgatcagacaccaagttcagccctcggttacttccctcttttaacctggctttaatagtgattcatggtatgagtgggggccaatctcttatcctttctgtgcctcagtatccccacctgaaatgagactagtcatactaacctacctcctctgatgtattgtgaggattatacaataacatttttaaagaaaaaaagtgcagtctttcatctctggcatctaagctaatgattcccattcagtgactcaaacctgtggggggcgttccagtgttctctgaccagtgtcttccatccaagcctccttgtgaccagggcaaggagctgcctggcctccagtgggtaaaatagacctttaagacaggtttcctatgaccatagaaagtaacaccccatatgtttccattcccggcgaggcctgtttgaatggcgctctgtgtgagtgctatgaacaggctacctgtcagcagtctcactgcgaggc

SEQ ID NO: 36184 - DNA, 1831 bp, Homo sapiens
gaacaggaagtctggcgtaaaagtaagaagaggcactggagcatggaggatttccgggtggagtaccatgcagtgggctacatccacattgcggggcagtatgagagctgcaagaatttggggaacgatcaaagctatttgactataacttgcaagaaatgtctctgtctggcgatggctcagagtcagtgtacttgtgtcactcaaaggacaaagagcagagcctaacctcacctatgctctctctagtataaaagttatgtacacagtgttgaagccagaaagcctggggtctgaacccaacctttggcacttacttcagctccataatcctttatctggcatccttagggtcaggttccagctttaaaattcagaagtctttacattttaaaaaggcaaaactgaatatactgaatattacagaccacttccagtagggtccaaggcagtaatccataattaaacacattaatatttctgtggcaatatctatgaatattcacaccaaatgagatgaacaaaaaatttttttttttgagacggagtcttgctctgttgcccaggctggagtgtagtggcacaatctcgactcactgcaaactccgcctaccgggttcaagcgattctcctgcctcagcctcctgagtagctggaactacaggcgcatgccaccacacccggctaatttttgtatttttagtaaagacaggatttcaccatattggccaggctggtcttgaactcctgaccttgtgatccgcctgcctcagcctcccacagtgccgggattaaaggcatgagtcaccgtgcccagccgaacaaaaatgatttttaaaagcttcatcaggtttttctgccaaataaatctgcaccaatcttaaaagaaaagggatcaatcaaattgtggtttccagagctctgggtgtttggaattgcagatatggggctgtgaggttaatgtttaactacaggcaagtaacttaacctcttgtaagtctcaagcttctctgtgaaatgaagacaggtgccaggaattgtgaggattgagaccataaatgagttaatgaacataaacaaacactctcagtacacccccaataaatattagcaattcgctatatgctcaggggcggccttcatgtacctcagtctcaggatgcaaaggtcccttctgatctacagaacactattctattatgtgtttcttatctctttcttatctgaggccacaaaagaggctaaggttcctgaaacaggggcagtgaatgattcacgttaagatggcccaatgctagctgtggagaaatggcagtgacacagctctaagggctgagcaacacacaggtgtgttaagctacatctgacgctttcattgcttaaaagcataagaattttcttccttacaggcagccttgcacttatgaaagagtaggtttgcccattcatttttttgagatcactagtccaggccacgctattttgaacctggaccactgcaacaaacccctacatcagtctcctcatgcctcttgctattgctcccttataatcgattcaccacataggagctacagtgatcgttttaaaatttaaatcagattacctcatgcccttgcatgaaattctttggtggcttctcatgtacttaagactaaagtcccaaggctcactactgcctatgagacctggcaagggctggtctcagcctgtctctcttgtattagcaccaaccattctcccttctgtcctagtcttgctagacttcttccagctccttgaacacaccaggcctcttcataccccacaatgttagcaaggctgttttctc

SEQ ID NO: 36185 - DNA, 699 bp, Homo sapiens
aaaatgaccagctgatgctatgattggtcatggagattaccattacccatcatatatttttgccacccatgtctgtttaactgtcctacaatggcttagaagtttttagagaacaagggcacaactatactttcccatgttacacaaactcagcacagctggtgtattccaattagcaccagttggctgactaccctttaacttggcatacccaggatatgccataagaactagcattatattcatgtgtatttatttccacaccgcaatgtcaacattctgaggtcattttacaggtgtatgtgtttttaatgtgtccacattctgtttccttaaccagacacactcacattttcaaaggacacatttaaaaaaaaaacaagaggaaagggcagagagcagcaatgacaaatgaaaattttcattaaggtcaggaagttcaaaacgtagagtgagctgaggctcctgagaagagccaactagaatgcatcagggctcgcttggaacgggaagcaaaagacaatttgacagactgccacagatgttctattattaagcaacagggaaatgcagactcattcaatcccaactcttctgtcttttctattaaaaagaaaactttccattccagaaaaaagaacatgagggaatataagaggaaactgaagtctgagacatttgaagaaacaagaaagggtg

SEQ ID NO: 36186 - DNA, 2082 bp, Homo sapiens
acagtgtctatttcatgaagttgaaaattaaatgagcaaatacacgaaaagcatgtgctatatggcaagttctcaacagttttaactattattcctactgtttaggtgaacttagaattttgagcagtcattccaaaataaaaatagcttttaaaatatcacgctgtaaatttaagaaatgtgtgttgtcctgaaatctaatgattttctttggtgcatgtgcaaagggtgtcaccttctcccgggaaagctcttcagagtatgaggcactgtcttcctactgacatgccatgcgactttaataggctcttttattttccttttcccccatcaagacaaagaacggagagtaaaagatcagcgcacttgtttaaaaaaaaaaaagtcgtgaaaaggacaactcgccaaggactatgatgtctctggagagggacacacaaggatgaagctggtgtattatccaacaggcccgaggccccagagcgaaatgacaccatcgcaccagggtcaggcaggtcttgggggtggcatggggaaaggggacttcccagggctcaagaaaacgtggaaaagcgggctacttttaaatcggaaagccttggtgcttcctacaagcaagtaggatggtccccacacttggggacgagttggaaggtttgatgaataactcagcagagcccggtcgaggggtgacttccgatggagaaatgtgttcgctactggaaccaggtgggacgaagggtgcttgacatgcaagaacctttagcctcaaagcagaggccaacccaggacgggcaacacaggagacccacgttcctcaaatctgttctccacgtgggctcctgggaccccgcactcaccaaagtcgtaaaggttctggagcagagcgtcaagaagtgtcggagaactgggaggcgtggaggaccccggcccttgctcctgcgacattgtggggtcagccgaggaatcaaccctcattctgccgcgctgcacccccgcttccgggttccgcgactgcgcgcatgcgctgcagggccctgcgcggcttccgtcctggctgagatggcggcgcccgggatcctgtgtagcggctgcagagggtgccgccgccctaggcgaagtagggccgtcctgagcgaaagaaccgcccccagcaggagcaccaccacggcttagcaaagaatcccagaccccgcccgggaaggcagccgcaccatggagtcttccagttcatctaactcttatttctccgttggcccaaccagtcccagcgctgtcgtgctcctctactcggtaggcgcccagggaaaagaggcccagagcggagccgcgcgaaatagtacccctttctcccagtccctattcctccggcccaccacccttgcccaaaagagctggcccctaggctcccgaggaggggttagttggttggattggtttccaggacaacagtgtatcgctgtgtgtctgtgtgtgcatgcttttggaagtttctacggattatggttcctttggttcctttccactttttccttctctttctttctatcaggccctggggccttcagaaagctcctggacacgagaatgaggaatgagaattggagtctccccatctctagcgagggcatgtcgagctaccttttgggcaaacctgagaaacttgcgggtttgacccgccctgagatagcctgtggctccgcaccccgccctatgctgctgttatattcctgggagtagagcacttggcttgtatgtgggaatagagttttaaacacttcaggaaaatttagaacttctagacatttttattgcctgttcttgtcttccagtcattattgtaccttttccacaaatcattttggaggacagccagcgccacccagcttctctcccgcttgtctttttttcctccaaccccctcttcctctcttggttttaacgggtctttttggctggcagatgttggtcacccacgattttcatgaagaaattatgagatgggagctttatagccttcaggattgcacagacctggggcaactggtttggtttttgtttgtttcttgttgtttttaacca

SEQ ID NO: 36187 - DNA, 2425 bp, Homo sapiens
accttctcttcctctacctcaggaacagctggttcttcttcttcgtcatcctcaaatgggttagtggccttggaagtcacttggggtggccctcgaggggccgctgcctcctcctgctcccttcgccttttctcactgagggccctcttggtgtcctccagcacttccagccactctcgtttgattttagcattttcggcctggaaaatacggctctcggggaacataagcagcttgaacatgtccttcatgggcgggttgtccttgacattgactacggccaaaccatctagggaatagagagcgttgtagcgatacatcccacgccgctgaggcagccaggtagccaccaacaagcaatcgttcatgagaaagccgtgcacccgctgcagttgggccatgtggtccgcatcgtattccactaggtccccattgtacaccaagtactgtcccggcgtctccagcagatgcctgcagccttccaccttctcaagcagggtggtgagagtgcgctgctttccttcctcgcctggaccggagccgtcgcgggaggcacccccgggggtggagaaaaagccggcctggcctcggaggtggtctcggccccccgccccaccgactccctcctcccctccagaggcggcggcggctccggcggcagcagcggcaggcagcaacgtaagcgggatgctctccaggctgcttttctgctcggtcagcaaatggctgagctggtacatctcgctctccaggtaggagatctcgcgggccgtctctatgaactgccggtagttctggtagacgttgcgcttcaggttctgcgccgtctcctccgccagcgcctggatgcgctgccggtgctcctggaggtcccggtccccatccgactgctgcgagagctgcttcacgtacagccgcgcctcaaaaccccctgactccagctgccgacgcaggcggctcgccccactgtccgacatcgccatcgccatttctctccgggtctcacgcactcactgtcactatcggcgccgcagccgccgcggctgtctagacccacccaaggccaaccgagctcctgggctgaggaagcaggaatgggaacgagacgagtacgcctgcgccgggtctgagcgtcagacactgcgcctgcgcaagtgggccgagcgcagacattgcgcctgcgcagcaatgccatcggttaaagcgcatgcgcaagatgagctattgcggaagtgaggggagggagaggccgagagaaatttcggtactgcgcatgaaccgagcgtgacgttgaggtttgaaataaccggcaaagagtaaaggctgaaactagcttcctgaaagcttcgtagggcccgagccctgtgagcccaggttctgcgcccactaggaggtgtcatgctgactgctttttttaaagccctagaatcttggcttcggcgtttggggtaagctccgttctcgttctcaagcgcgtttccgcgaactctcgcgggattgacgggccgtctcgagagccggcatctcctaggagctagtcctggtcctcggctaggcggcttggggtcgcggcgtaactggggagccagcctgacgccggcggaccccgcctgtgatcctggcaacgatggatgatgacttgatgttggcactgcggcttcaggaggagtggaacttgcaggaggcggagcgcgatcatgcccaggagtccctgtcgctagtggacgcgtcgtgggagttggtggaccccacaccggacttgcaggcactgtttgttcagtttaacgaccaattcttctggggccagctggaggccgtcgaggtgaagtggagcgtgcgaatgaccctgtgagttccgagccccgctggggaaagaggcgggactggcagctttcctgcagcccccggccctggttttctctcctttctctagtccgacggtcccagggggcgttaaatgaggggagtctggttttggacctggcaattcctgcctcggcgtgtttctgtcttccttaccttttctcccactcgaacaataagaaagctgtgtagaccacaccgccacggttggactcagggccgtaacaaaaaagagatttttatttgaatctcacttcacttgaaaataacaagttcctgatttgccttatgatagtgctgtaggacccagaagggagaagcaaccaaatctgcacctaagaaagtgctgaggacgcagagtaactgccaaaggatgtgtgttctcctcctctattcccgttaggaaacccactttagttagctcgtgtgttgcattggggatcttcagtgatgcttttaaaacgattctttttctacacgctaaatttcagaaatccctatttgaaataataatctactcctgcacgtgaacagggttaagtttaagatacagttgtatccc

SEQ ID NO: 36188 - DNA, 4077 bp, Homo sapiens
agtaggaattttatccacctaataaaacagtatttttgtgcttgcttcctaataaattttttttgtgtgtggcagaactcagtgtgagttttgctttcacagtaacatgccatttagaagctcggttctgggggaagagatttgtaacactcatttaactgtagcctccaaagaacagcagtacctctcaataaaaacctaatacccgtaaacaactactggctcaggtcaggtcacaacaggcaaacagttatgcaaaggcacacagtacagtgtaataaacaccagaacagagtcttacttacacaaagtacccagacagcaaagacataattaactttgtcacgggaatggggatcagaaaagactttatagagaaagtgacaaacgtgcagaattttgaaagacaaaaatagaagttttccagagtagaagattctgttctgtacagggaaaagaatatttgcaaaaacagaatcaatatggtgccttgagagaaatgcaaatagaaaaactgttggaagatgaagtgcagtgtggagcaatagggatggggcaggacagacaggcaggggcagctcaaaaaggctctcactgactcactggggaactttaccttacaggccagtgttggccaactgtgttcagtaagaatcgcttgggttacttcctaaattatgatgattcttatgccctctgcttgaaattatgacttatcaggtatggcatgaggcctgagatcccgtacttttttttcttgacaattattccttcataagagatcctgtactttaaacaagcacttcattgtaattggcaaaaaatcaaaaataaagagttttgaataataaaatcatttttccattttacaaacatcactcaatctacttgtagaggatggcccagatgccacgaaataaaaggttatggacacactgctaatagatgagagtcagaataaaggggagtgagaatggaaaggacagggcagcttagagcaacagtaagagtgtgaaacagaaaggatatggtgctggcgagagagaaagaactcatttaaaaaaaattaaaccctaaaaatatacactatgtgttcattcaacaaatattttctgagcacctactatacgtcaggcactgttctagatcttggggatacactacttaatagaaaagatacaaagttactgccttcagggaacatttattctagcaggaaaagaaagagaaaaaattaagtcaatatatagcataatataagaaatggcagaagacaagcattacgaagaaaaaaaaaaacacgcaatagggaatataatgctagaatgtaattatttatagggtggttggtcaggtaggcctgactgagaagttgacatttaagaagaaatgaatgttccaggcagaaggaataaatggtgcaaagaatcaggtggcaatgggcctggcatatctgaggaaaaagagggtcagtgtgactggagaggagggaggaaagcagacaacagcgtaagatgaagtcagacaggtaaggggttggggacgcacatcatggagggttttagagaacactataaagattaagtcaccggaaggcactgggtagtctggttgccatgtagagcaggggctggcagaccacagcccactgcctgtttttataagtaaagctgtattggaatgcaaccacattcattcaattacatattctctatggctgcttttgtgccccaactccggtctagcagctatgacagagaccgtgcaggccacaaaacctaaattttttaccatctggcccttgacataaaaagtctgccaagtcctgatgtgcaaaatagactgaaggctggcaagagtggaaggcagaagagtagttagaaggctaccgcataaatcaggtgtggtacaacgatcacttggaccacagtggtagcaatggaggtggtaagaagtgctgggatactcatactatcttaaaggcagaataaagcaagatgtccagaaagactggtatgagatataaaagaagatgactctaaggttttggtttaagcaatagggaaaatgtaattaccataaacagatgaagacagcatatggtgcagcctgagtctggacaatgggagagatcaggagttcagttttgaacatgttcagttagggtatgtgtaaggcatagtgctaggaagtgtgagtagaacagagaggaaaactgatcattccaacacagatgacaattaaaatgaccagtccatgcgctgactacttcactggggagaaggttgggatcaggaaggactatctgaaaaatgagttttgaaagagtatgaattagccaggtaaggaaggagagggggcatattccaggaagagaaaaggtcatggtgtgtgtgtagacacatgctgtgtaaactgcaaacaagggtgaacctgacgtgtgagtcaaggaatgtgacaggtaaggctggacatagctctggccccttcccaaaagcttagtaagccccaatgatgaacttgggttttagtgggtaacagggagccactgaagaggtttaaacaaagaagtgacacattcagactagaggttttcattcacttcggtaggtgactgagtggcaccatttttgtagtacagctataaagcagtaagttgctaagactggccagaaaacatgtaaatcaggctcttaagaattcagtaactgcaataaaaaggagctgatttttttctttttctatttttgttttcctgagacacggtcttgctctgttgctggagtgcagtggcgtgatcatggctcaatgcagcctcagcctcctgggctcctgcctcagcctcctgagtagactagctaatttttaaattttttatagagacagggtcttacttactatgttgcccagctggcctcggacttctggactcaagtgatctgcctgccttggcctcccaaagtgctggaattacaggcacgaaccaccatgcccggctggttttttttttcaataatagcgtaactccctttgtaggcagataaccaaacacttctgaaaagtttttttgtggcatgatggacaaagattcaagtcacaactttcatcagagtacaagttctatttgtatagaactctagttcacagcatttacaaataattatctcatttcaattctgcaacaactccatgaggtattcagagaaatgactatctccattttacaaataattttatctagtcttgttttaagagctgaagtgtttaatctttgcatccataccactgcgggagagtgtggttaatgtaaggacaagatccagtcttagaaaataatgatgagtctgtttcatctaacattaacctcattctacttttatcactttgaattagtttaatgttatttgttttttcacatcattcttagaaaagttacttaattatttatatattgccacacctaaacacactcatttttttttctgggtttccccaaccagactgtagactccaacagaggatgaaccagctcttatttattcttgtactcctagtgccaaacacaggcactcaaatatctactgaataaatcaattaatgatttaccttgagagaacagagatgatagattagacagataaagaagagtaacataaacatctttaatacaattttaaaacagaaggtgggttttaccatccattgctaaagattgatagaagtactgctagcttgtaaaaatatatatacatatattttagacacaaggtctcattctgtcacttaggctagggcgcagtggcttggatcatagctcactacaacctcaaactcctgagtgggagtaatcctcctgcctcagcctcctgaacagctctacaggtgtgcaccatcacacccagctaattttttaaaatgttttgtacagatgaggtctcgctatgttgcccagggtggtctcaaactcctggcctcacgcaatcctcctgcctcagcctcccaaagcactgagactacaggtgtgagcccctgtggctagtcaaaaaaaaaaaaattgaagtttgacaacttgccatt

SEQ ID NO: 36189 - DNA, 4398 bp, Homo sapiens
aattttaaaaattttccactataatacttaaagtaaatgctatttaagtcatattaacaattatttattaagcatactatgtagaaaaattggtggcccaggtctgtctgattcactatatgctgtcaaccagtgtaactagacaaaatgtgaaaactacaatgagaaaattacaagtaaaatgttatggtggtaatagagagggtgaggtatggagctgtccagcctgaattcaaatctcagctctaccacttcctagctgtatttggaaataatgacagtatacacttcaaaaacctatggtgaggataaacaatagaatacatgtaaaagactagcatagcacctggtacctagtaagcatctaacaaatgtcacttattttcatcattactgacagtctcataatctttatcttcatcctcaagcagtcacaggtgagatttttcatccctgtccacgtgtggacaagcagcttttgtttgcctggcatccattccccttcttctctttccaggtgcctcatttacttgggaaagcctgacctgtagtcctcagttctcacccctaggtgaggttcactctctaccctccagggtggacatgtggctcaagcctggccagaagttggttcagaaatgggcaaagggcctaagccaatcagaggcaactccaggatttttgtcaaagcccttggtaaagagcagctctctttctgtatgtatctccatgatgtaatgctgaaactattagggccatcttgttgtcatatcagggagcttacaagagaataactaatatagaaaagaaaagctgagagatcaagttttgataatattgtttgagcccttggttccaactctgccagtcaatcagcagacccataggtaaggaccaatacattttgttctggtttgcttaagctcatttgaaagatttttgttttgtttcggttatttgcatctgagaagctctataacacgtcaggtatcaatcaagagccagaagctggtgacctaaaatatagtagagcttagaagggcatggatttggaatcggagagatctagttcctaatcttgtttctaacaattactagctgcgtggccctgggcatgtgtctaatcctacttcttcatctgtaaaatggcttaatacctgcctcaaagggttgatgagaggataaatgacaatataaactgctcagtcttcttcataacaatgaacaatcaatagaggctattattatatcactgaatcccaagctgatctttgtatctgacctcttatattccatgtccctgtttccagtggtataaacagccatctttacctacatactctcctatccaacctcaaattcaacatttccaaatctcatcctgcctccatgcttcctcatcacaccctctgcctttccctttcagaaaaaaaaatgctcactggaggccaatttatcatcaattattaactatgttcccagtaggttttaatatcagaacagtaggagtcatcctagactgaaacttctttcctgttatctaatcagtcacaaagccctgttaaatatctgcagcctgacaggaaagaattttcctctccctgtggataaaaacaagggcaggattcttccaacttcaggatatgtagccttttcattggcttgcaaggagaactccaatccttctactcctttttctcatctcatcctccttgtggcttcatttcttttcatattcaggatagatttttgctagcttattttttcattaacctcaagctgcaaatcaacaaacgtagactaatccaatttattgcagttcccacacccaagctactagcaccactggaaaaagttataattatgcagattgacaccactaaaagttgtctctgacctcacctggaccttcagaactccttggcaatttctgtatttctggtcaggtttgttgatgttcctcaaaatggttatttcaaatctccattgctcacctctctcagccattattttagtcccaattttccttttttttttttttgagacggagtctcgctctgttgcccaggttggagtgcagtggcgcaatctcggctcactgcaagctccacctcccaggttcacgccattctcctgcctcagcctcccgagtagctgggactacaggcgcccgccaccacgcccgactaatttttttttttttttttgtatttttagtagagacggggtttcaccgtgttagccaggatggtctcgatttcctgacctcataatccacctgcctcagcctccccaagtgctgggattacatgcataagccaccacgcctggccagtcccaattttcttattcactagatggagatattttctatgtacttacctgagataattaaggcaaacaagcaaaaacttcctcaacttttcacccccagatttctaaatttatctaaataaataacccttgtcatctcatttccctcaatcagaatggctaggatgcgggaaagtacacaatatagtgatggaataaataaaaggaagagacattctttctcctatataaggccaatcctgcctcctatagtgcctctgaaattttaatatgcatacaaatcacctagggatagtgttaaaatgcatattctgattcaggaggtctggagtggggaataacgttcttcatgtcttccaacaaaccagtgttggtttgggagcaatatttagagaaaacagattccatcctttctcacctcctcagagatcttttactctaagtcaacatttgttgcttctttatcagctgctccctcccccaacatacaacatatctgtctcttttattttaaaataaatgctcctttgttcctcttttagctaccgcccaatcatctaggctctctttggctccacagacaagtttctatgaagaagtcctatgtcaacggttccaaactttcttggctcaaagaatctttagtgtctcagtgatcttgcagggtaaacctcggccaaaagaagtatctaacaactgtagttgcctccgttaagcagtaagagccaaaccacttagtaagtattttaagttctaaaaactggatgcctgttgggcactgcatacttttcaaactctggactcagattgaacactgacagcctcatttcctgttccacactgattttcaggcagtacttgctttttatcagagcaagcactgaaaatccagcttcccaaaggtatgacatcactgaaaggaatgcagtgatctaatacagcaatctaatgacgccagtgtatttcccttgaaatttaaaaatattccatggcacccttgcaagttagctacagtgctctgggatacatcgatgaacaatttgggatactgagttcaggtggctgtcagaacggcagcatccccattgcttgggaggttgttggaaatgtagaatctgggcatccatgccagacctactgattcagaatctccactttaacaagatctccaagtgatctcccagtgactcatagacacattaatgtagaccagaagtgctggtctaaggtccctgcttacgttttctcacataccactcacacccaacgcaccgctttctgactttgctcccacaactccagtgaaattaccccaggaaaagtcccaaattaccccactcctttaaaaagaaaaaaaaaaaaggcaataaatgtcttttagttccaatcctaattaaccctctctatagtgtttggtactattcatcttcttgaacctctattatttcttggtctctaaaacacccccgtcttctggttttcttccttttctttcaatacacatccccacccccttcctctactgacccaggcagtttttgttttttcctcactggcttctttttttttttttcttttttgagattggggagtctcgctctgttgccaggctggaatgcagtggcaggatctcggctcactgcaacctctgcctcctaggttcaagcgattctcctgcctcagcctcccaagcagctgggaccacaggcacgcgccaccaagcccagctaatttttgtacttttagtagagacggggtttcaccatgttggccaggatggtctcgatcttttggccttgagatccacctccctcagcctcccaaagtgctgggattacaggtgtgagccaccgagcccggcccctcattggcttctgtcatgagcaaatacccttgctatagacaacttttcctctggagaattacattcaatctcatgcccaccccagtaagtcgaggttgctctccagagccttaagtcatataaaaccaatttccatctggatgtccacaagcaaagcaaacttaacagttccaaagcaatttatttgtctgtcttccctg

SEQ ID NO: 36190 - DNA, 4291 bp, Homo sapiens
tcagagactgatggtggaggagggtggcctgggagcagccacaaagaaaagatcaagatctgagaagtaaaatgaaaaagagctgcaagagagttggttaaggacgaaagagtctactgtttatcatgagggaggaaagagggaatagactaggtaagaagtgaagaaatctgtggaggaaaaaccgcaatagtaaagagaaaacaaaaagatctcaccaaattgggaggataaaacgagccctcctgcgccaattccgtgttgttgttttgttttgttttgttttccaggaagttacaaaacagttttcaacagaaggattacattaacaaagcaaataaaggaaactggtgctaaaaatgtagcctacctacactgagaggcctgaagacggaaatacttctttcccctttttgtaacgggtttcaaaacagtaggaacagggtgagggataagagctataacagggggaggggagtagccaagctcttcctgaatacagagtctttcgactaaatgcttattttaaatgtacctttttgcggtcagccggcaaattcctaactgaacacagcgtttgactctcaatcgaaatgtgatgagtggttcagacaccataggaaatttaacagcttatgcaaacacaaggcagatgcagaaccaggacttgctttgggtggtactctaacaccccttcactgggtggctaaaacgccactaaggtttgaattgtgaccaatagtggaatggaaaaaagaaaataggaaagttaaagcgcctacgttgagtcaaaaaaccatgcaattagccggagaagtttgtgaacgggcagtaagtggaaaacagtggatacaaaggggctaactagataaacagctactacaaattctgtccgtcttccttacggggagctacacaagaaagagcgagtcccttctatatagaggaatgctgcttctcagcctaggcagtttcagtcgcaggcaggggctgcccgccgagaagggcctgtccagcacaaacccgcagcacacacttactttcgtccggccattgattttgtagctgcccagcttcccgttacagtggcgtatcaggtcgtccatgctgctcatgagcagcccaatggtttcgcagccgggctccttgccctcgatccaggtgatcttatcgcctcggatgtccttggacgagtcactcttctggctgaccagctgcccgtccgtgaacttcccggtgtcgtgcagggcgcgcacctcgtcgccgatctgctgtccggtctccttgccgaggaagtcgtccaccacacagatgccgtgcttgttcatgcacggcacgatgtactcgagcgccagcttcagcgccggcaggggcttcgtctgcccgttgggccgcaggccgccgccggggctcagcgcatccccgggcgtgttgcttggggggtacaggttcgccttctcctggaacagcgatgagcgggccggcggctcctccttgccgggctcggcttcggcagccaccgccgagccctggccgccggcggccgcacgacacggcgacgcggccgccgctgggtcggccgggggcttggcctttacttttcccttggccgcgtccccggaggcgttgtcccggcgcgccgctgccttcctgggctcccgggccccggccctgggcggcggcactgcagccggcggcgcggggccggaatgctggtgtgggcccactccgtggccgagggcgccctcgctgccctggcacacgagcttgtgcttcttccagtcctgacgctggtgctccttgcagcagtagaaggagctgcggcagcggctgcagcgcagcaggttctccatcttcccgcacagctcgcagtactgccggtctcgctcgctcgggctcggcccgccgggcccgccgctgtcattggccatggcggcggcggcggcggcgacggcgactgcggcggccgagcaggaggggtagcggccggacggcctcgcccgaggctggggagcggggagagagataggggccgttactgcgccatgcacccgctaccctcgcctcagggaggccggcaccccacgccctcggcccggccgcttccgagtcctaagctccggcgcagcgccggcagccgcctcagcgcctcatcgccgccgagggctgagagaatagggcctgtgcggcgaatggcaacctgggctcaggcgcgcgggcctggggagcgcaagaccggccccctcggccgccgccgccgcctcagcgtcccgggcggcccggcccaggctgtggaggagcgcagggcatacgggcgccactcgctctgcgcgctctgcacgtacaccacggccccgcggcgacccgggcgggcggcgcgcgagggcggagggggcggagggagggccgggagggccggggggagggccgaggggcgggggctgcctgcgctcctccgcactcggcggggccgggcctcggcttctgcctcggaggtgggtcgcccgctttccctccgcccgggaccggactgggacgccgagaggccggtgcgctacctcagcccgcagcggcctcctcggggacgccgaggcgcaggcccgcgagcggcggaaaggcgtggggcagcgcggcagcgcctacacctgctggaggagggcgccagccgcaagcgggtagcggagcgaaggcggcgtaatcatggctgctcttcctccaggccggcgcggggtgtgcgaggctcgctccagtcaaggttgcaaggtggctattgcgatcctcattttgcagaggaggaaacggaaattcagagaagtaaagtaacttgcccaaggtcacgcaaaactgggactgaatccaggaatcaggctcccagattccaaggctgttttttccattacaccatacagcctctatttcaagaagccctgaaatggttaagaacaaaataagtattactatggtgttaatccaatctcttgcgccccgtttcgacctagtttaaaggtaatgaaatttgagggttttaaaaaaaatcaaaaactcatttttaaaacctttgaaatcccgccgagttcaaaaccccatgaagaaattttgggctaccaagttaaatgtaatcaatgctcattccaatatccaatttaaactgatgggattattcctgaaaagtgaattttgatggtaaatgagcagtactacattaacgactctcacatttatttttaatagaatctgtgctgcgcggatgaatacaattctttgttttacagagcataaaaaccttaccagaaataagccaaagatgtttctttctgctgctatttgtcttaagaattaaaaggtctgtgatttcgagtttatcaatctttatcgaacactatgtggaaagtggggtgctaggcttgtgtatcacttgagtatactgtaacttcagtccttgaaatatagccttccaaacttaaaaagttgtaatatgtatttcaaaagcaggatataaggaattattgtaaaccatattgtagaagtttaaaaagaggcttgaatccaaaaatataaaacctcttcatcaaatatacagaatttaaaactgttataaaatcctgctgcatgcgtaaatggcattctggggatccaatcaagtgaaagaggatgataattccaattagcttgtcctttgggaaactgagataaatatactcacatcttcaaatttcaaaccgaactaaaaatccaagtttctgtaaagaatttagacctagacctgtcttatgtgtatcctactttcccagagctttattaaatacagtaaaatgtcattgttgcagacattactaattaggctgttcaacaaatgcattgagagtccttgacaaacaaatgaattagtcatactacactcagagacacatagtccaatgcaggaggcaggtatgtaaacaaggacaatccagagttcagagtttcctaaaagagggatgaataggatggaatgggaacacagaaaaaggaattgctagctctgccatttgcactaataaaatccaagcaaattaattcagaaattcttaaaatataaaggagctatctcatggcttacgaaaataagcatttaaaacatttttcatacacataaattatgtaaaatgtaatttaaatacaagtagagtctaatacttcttaggcttccttttgctatagtaattatacatgaggcttaattattcacaagagcaggaactttactaggaggactcattccacaaacacttgattcttccaacaatttctt

SEQ ID NO: 36191 - DNA, 1872 bp, Homo sapiens
aagtctagatatggtggcagcacctgctcataatgaaatgcccacagtttagtggaacacagctgctattactcacctgtctatcattttgtttgggagagccctggtgggagaggagtatggtatttaatatttaattgagcagttatatgtgaaagagcgttttcacgagacttaactcctttcatcctcaaataaccctacaaggcgggtactattctatccctatgttacagataaggaaactgaggcagagaagttgcgtgcttcatcaaggtcacacaaccactccgtggaggcaagttgaacacaggctgtccggcttctgagagccagtggagaggagggagacggtgggagacgggcagggggaaaaggtggaagtagacccgaagggcaggcttgatcttcataagagaaaacagtactaacaccatccactgattgactcgcatatttccatcacttaaagctcctggcgtcactgccaggaatggaaagttaaaaaactcccagctctgtaaggttctgcctggatcctgaaaaaaaccttcccacatgccccgaggaaactcgagggctcgcttctttctcacatccctggcccggggcaccggaggtcccgctccggcggaggaactacaacccccacagcaccgcgcgcgaagctgggcccccctgagggaagggtaaggtgtcccgaaggtgccttcagaaaaaaattacgtacgtttttcgtcgctttcccacgatcacacagatctcaggtccaggaggacgcatcgtctttttagtaacagtgcatgctgtgaggcttgtagagtcgcctctctcttcaggcgcagcagagggcggccgcaatagtacgctcgcgcggcggtggcgggtggtggtccttggaccacgcggtgggcggagccagcggcgacggcctcccctcccctccggacgcaggccggaagtacgtgagaggagacttccggccactgcgttgtagtcggcccggctgcaaagcgtttttctgcaggctgttttcccaggttccctcggcctgtacctcgcgcactcctcttgctccaggtccttcagtctccgctcgtctcaccgtaggctgtgacgacatgagcaacaaagaaggtggcgtccttaacaacacggggcgttatttatccggagggggaggttctccagtctttctatgcagttttccccttttcacccttgaaggatgccttcgtcccttgtagactcgggggcggcccctctgtttctctccccggccagatcggccctgtttacacctccttttttcttaaatttttgaggtgtgattttatcctagttcagtaattgctgtaatgccagatcatagcaccagttggtggaaacttggatgatttgcttggaaaggcctgggcagcgtctctgtcagtctgcggagaaagcctctaaggcgagggccctgtgggtatctggttttaaagcaaggagtaggtttgtctatgttgtgttttgcaaactcttggtgatggaagatccctctctttttttcttctctatataaggatcaggagggttcaggaaaaggaagcatgacaatttcccacataaccaaagaagagaagggaaggatgttaattcatcttcacccgtgatgttggcctttaaatgtaagttctctgcaatgtaagttgaagaaggggagagaacaaaattatttagccatggttatgcgcaagaaaacagtccctaagaatttaatgtgaaactttagctggaggttttgtgatggcgctagatgtaccctaaaagtctggattacaaaggccttcacttttatgtcccattaagagaaatattagtaatcaggta

SEQ ID NO: 36192 - DNA, 890 bp, Homo sapiens
gtctcagtaatttcaaaggcagcagaataaagctgaaatatctccattttggcacaggtgggatcacggtcaggccaggatggggccaggatggggatcttctgctgacacctagctcagcaggccatggggctgttgagggcatgcaccagaatcactcaggcatgtcagacaagagaagagggggtatggggcagatgaggaaggtctcctaaccctacaaacacccacttctcttctccaacacagagaacagtaactggccctcagcaggggttatacctccagaatgactcagagggaaagaatgcctggtgcctccgcaatatctgatcctttcaaagcatcgttccacatgaaggcactcactctgtatggcaccagctccctttccacagagtcccccaacaccactttccattaaaaccttttcaccactggcactcaaatggcctatgtaaaattactggtttcaaattatccaaagagaagtggtacagagaatgctgccatctctatgctaattcctacttcatataatcttaaagtcccccaggcttagtgttttgtgaccccccctcccccactatacacacatgtgcttgtatacacacataactgagaagaaaaactttcaataatttgatgatcacatgaaggtacaatttgagtagagagctcaaaatttcccaaccatcaagaatgtgacagtgggtgggtgagctgactcaccactaatgacaaagacaaaatttgacctcagcatctaaacctgcaagcgtatatagaatatcatgttcttttttctatttttgttacctattcagacagctgacgaatattcccaagatgcaagttttatctaccttattttctactcctcttaatcc

SEQ ID NO: 36193 - DNA, 2183 bp, Homo sapiens
ttttggtgagcacaattccgtaaccaatgcacttgattttttccaatactcaggccagagtcatcttgggctgaattaatttaactcaagcaggttaatgatgacaaatatctcccacaggggtaatgccaagttgttctctctttccgagaagcctcggctctctcttgcagatgatgagccgaaattgattctttgggtttgcggcacggctgaaaattaatctgtaggtgttcccagggatattcccaggacgtgggcaaactaccctcactgacacgggaagacccggagaggcccaggagctggcaaagtgggaagaaaggtcgcggtgagtgagaagagcgctcgccggaggctcccggtcttacaaagagggatccgtcccggtgagggcgcgcgctccgggcgcaccccctctagaaggggaattagccccgcagcaagttcggcgtcagctggccaggcgcgccggggaagctgcgtcgggcaaccgcgagcccttccagagagcgttagtcagagcgaagttctgggcacctggagaagaccctcctcagtgcctgtgtcgccgagacgggaataacctttcagccgatcgataacttggagagaacaggcggcggcggctcctcttccagccggggatcgggagcgcgggcgcatctgcgtctacaagccggaccctgcgccgcgaccctcgcacccccgcgcccctcgcacccctcgccgccgtcagccccccaaagcgccccgaagggcatccccttccccttcgggacagtccccgcctggccgcaggcatcccgaaccgaccctcgccacgctgcccgtcggattccccgacacgaaccttcgcaacgccgtccgccggaacctgctacagcctgtgcgcgccgggcggcgcgtacccgggctgccgcctcgccgcccgccgctgcccggggctgcccatcggcccggactctccccgcgccgggctccggcggaggcggcccggacccgctggctgcggctggagctctcggcctgcgctcgggcggccggcgggggcgcggtgctcctcctccgtcctcctcctcctctcgctccgccagctcctcccgggctcccagtctgccgcgccggctcccgatgccaccgcccgcccgcccagcggcaccgccccccgcccgctctgcgggctcccattggtcgctgcctgcaggccccctcggccccgccccacgattgggcgcggacgccgtcagtctcaccgtccgcccggctccgggcgcagccggtgcgctgttcccaggccccgcggcgcgcgggagctgcgcgtccaggaggggcccggacgcccttcttggggagggggctgcggggcgcatcatgagcggcgctgggcgagctcgagggccgggcagcctacctggaccccggcttctagagagccgtcgccgtccttgtcgagactcgctttcgcccctctgaggaataagttaaaaaccgcgagtctggttctgagccgccccctggcgcaggcgcgaccccacccggccctcccgtctcccaacttgggacagacgcggcggccgggcggtcggatccgtgagcctcggccgctggggctacatacacagcccaggacgccacagaatcgccgaggccccgcgaacgcccaaacggccgcaagtcgaagtgatcccatctgaagaagacagcgcgaggaagcgagaccctgctgtgtgccggcccccggagggcgccccgggccctgtgggtcggagggtggggaagcacagagaaacacgcaggcagtaaaacgttaggaggacagggggtgccagcgtgcaggaaatgctgctaagagacctttaggagccaaggggaaaacggagagattggcagttccaggcacccacatcccagcgcggtccgctcaccccttcctccctgccctccaggcagcgctcagcccacggtagaaatgtcttgcatcttttttccgacgaggaagaattgaactttttatacccaacttttctgctttcttagaaatgttgactcacctgtgaggaagcattatttgaaactattattgtaaattgcttgacatttgaattagatgctgaaagattaaagggtctcagaagaatcttttaagctagactggaattgactctgcctaaatggacagc

SEQ ID NO: 36194 - DNA, 626 bp, Homo sapiens
caatcaaaacttcctcagaacatggagtcaccagctagcttcctttctgcagaccagactcaactgggacacaggcggcctctcaaacctctgccctctccacctcccatgtcagtgttcagtgtcaagttctagtaggactttacggtttagttttctgttaacacgggttgtttgaagaggacgaaccctttcctctgaacactttgaaacacatttgaacaaacagaacagccttcaaacaaagtttgagaccaatctcctcacaccttggaaaagctcctcggccttttggtgattcattccgcccactgtaaagtgggaagtttataataaacagcacctgcctcagaggtccctggaagccttgctggctgtgggatggtttctgttgccacagcatgtgtgtacctctgagtagacctgcaaatatgagtcaccctggtacgtgccctcataaaattatacacaaagcatgccttcctagcttggcaattaactaattaattgatggccagggtatacaatggagtgtacagtctaaaccgcattcattactgcttatagaattccatgaaagcctagggaagaaggtgccacagaagtgtagggcattattgctgctg

SEQ ID NO: 36195 - DNA, 454 bp, Homo sapiens
tttcagacaaacaccaaaaactcgtatatctgataaatatggggtctcctagaagagtcacttcaaggaggtctccaattaatccccaaatgtggaccttcttcaaaacatactttgaaactcctcatgtggaatggacacaaaaacctatggtaccttcttttgactgcccttaatgaagtcagactctgaccccaggttgataaatcgcagcggtgctgtaggtggtaaacacaggccgggccagtgcttatctaaccacaggcactagggctgcagcaagaggagataaggcactgtgatcagaccacgatgtgctataatcaaaggttaaaaaaaacacacacacaccaagataacatagaaggaggtagagaattaattctggatggagttgtcagagaagtttttatgagtttccatctgaaaaatgctttgggctgggtgcagtggc

SEQ ID NO: 36196 - DNA, 687 bp, Homo sapiens
aataggagcttatgattccaggatgaattcatagtatatttctacttgaacagaaaagatcaagagcaacttcgggtggtacttcaaagcccttcacacacaatgaggccttcttaatttcaaacctgtcaggaccagcccttcttatggttaaaaacggcattcacttttccaaaaagactccgagttaatgcgtgaaggtcattcactgcacggcttcttcgggccaaggctcattcggaagaaagcattgactcacagttggagaaatctgacctctgagatggtcattcccttagcagagatggggttctggtctgcactttcactcttttctcttagatgaacatccagttttgttttgtttcattttctcttgagcaaaagagggcagagtccactacagttagagctctgttcaatatccgtgggttcttcatccatggattcagcaaacctcagattaaaaatattcaataggctgggtgtggtactccctcctgtaatcctagcactttgggaggctgaggcaggaggatcacttgaggctcagagttcaagaccagccctggtgacatagcaagaccctgtgtctacaaaaaagaaagaaaggcaaaaaaaaaaaaattggaaataaaaaaggatgctaagcatacacggactcttaggcatttttcttgtcatcat

SEQ ID NO: 36197 - DNA, 2070 bp, Homo sapiens
ggagaaactccatctctactaaaaatacaaaattagctgggcatggtgacgcatggctgtaatcctagctactcaggaggctgaggcagtagaatcgcttgaacctgggaggcagaggttgtgatgagccgaggtcataccattgcactctagcctgggcgacaggagcaaaactctgtcgcgcaaaaaaaaaaaaaaaaaaatagatctgaggttcagacaggtgcccaattacctaccaggctggagcttcagagagctagtgatcagtcagggaaacctgaccttgagagagtgggggtaccaaggtaaaggcaggactagccagaggtctcactgagtaattcatagtgaagcccaccataggggcaccaggttggatgaaaggtagaaatcaagtaaatttggccaccagagtgagaaggattccatggtagcacttcccactgctgaaagcctggcgaacacttcctgttgccttatctggctttatggtagtcgttttcctctccctatttagaagacatcccagtcttatccttctgggccattcatgcttggctaagtttccagccctgtgtcccctagtgacacctgtgtcttggcatgacacaaagagccaatatgtattaaaacagctctgttagtaacctgtatggtgtttaaggagccaagtgaaatcagaactaatagtattatctgtctgcttagtgcataaatgtaatggcataatctcatacaaggagcaaacagagacagacagaaaaacatcagtttaaaggagtcttgtttgacctgtatgtagtgtgcaacagcttcctgggtgttcatgttgctgggttcaagtctccaaaatagtcagcaggcagaaagtctcctctgtttgataacagtcccagatctgtcagttcggttgccaaccctaatttgtaaattctcttctgtaaagattgcacaattgtgctcattttctgttgactgtgggctggctaatggctgctaatgagtcagctgctaagtgactcagcactgcatcaataaaacagatcccttcgtccctgaatctgctggatgaaaatgatgtcttcctttgtcaatgtgtcccttttggcccctgctgagaactcatgacctgatgtattgtgtaaagcgtcccatccttaaagagcccactctatcaactcaatgaaaaccaagaggaatattccaagtttttggtgtttttctattctggtttttgttttcctcactgcagaatgttcacacttgcattctttctagtaaactagaaagtctcatctttcttctcgtgtaaggtgtgctattgttgatggcactctatgggctctgggtgactgaaggtgtgttagaatagatgggtaagaggaagagacaatggccagcctttggtgaatcagggtctggtttatgcccagacgcacagttggcactagcagtaagacagaaaatctggaaaaactgaacaatcagctagccttggggtatctttcacaatgtaatgggtactcagcaacataagtgtcctaactggccgcctctcaaagaaaactaatactgcatacacaaatataaattggcaacagcttaaacacaagtgctgtacgtatcacaaataagatgtttcacataataaaaggtattctctagagagggcccttttcaataatgtcaaacatcatttgaagtgttcacatatttctcaggatccatcgggaacaggaaatgggaacagaggaaacaggagcagaggactcaaaggaggcatcaagttctacctccagaattagaacagaaaagagaaaggaaagctgcaaacccagtcaatcctggctgtgcatgcatcagaaccacaccagccttccacgtctgagatcccgagacaagctgcctctgaaccagtaagagcctcttgctccttccttctgaggagctacccggtgcctgagtactgactacatactctccagaggcaagtgtgtcttcagactttccaccttcataggcacagtccagacctagtcgtcttattacttctttgttatggggcac

SEQ ID NO: 36198 - DNA, 773 bp, Homo sapiens
gactacatgtatgacctaggaaatgttaaaatgttacttgaccattttgtgcctccatttcttgactagacacaaatcacagtttaatggcagtttccgaagaggtggcaaagagtagcatatatttagaaaacgttacaagacaggaaattaaaaccaacatgggagttagcttctagtgacagctctggactggagaagcacttatttttaggctttctaaacctttgcaatttatttcaggggattcagggaaagagcatggattttcctaaagggatgaaatgagctgcaaagcgtgagtcatcacctgacctgtgtgattgtcttttgctgactcttcagttaaatgttccacagggcatttccttgcttcctggcaaagtttacagtttggggagtggaagaaacatcagggacctcttccaggaagactattgagtaactatgaccaggtgcatcccatggcgacggccgccctgggtggaatggttaggtcttgcattagtgcggtgttacttgatgaggatcaggggctcccagacaggcatctgggttggtgacagaagatggtggccctccctggaagtttaacaaggatgttgggaaactgggaaatgaattccctattctcagctcatcagagatggttactttaggctcttcatggagctgtctgcacccgcagtttaactgtgcatttgatgtctggggccctgagctgaaatggaacctgctggtccagcctacagtccatcccctgctcactcaga

SEQ ID NO: 36199 - DNA, 3504 bp, Homo sapiens
attttaggtaatgaggtatttaacaatttaccagactgctccttgttaaaactgattcttaaatgttgttgccaatttgccaaatagcattattgtctgtttttgcaacagtgtcaaccaaaatcaggagaaaagcacccttgttaagagcttggcttacagtcattgatcttggttaaagtttcgaaaaagtaatctggggacaatggccaatttgaaactggaatggactaagactgagtgtgtttgaggtccctgtttggtggtttcatctggtttaatttttaggtttatttttgctttttaagtcttcaaacaaagcaattgaactttggggcttattctggcaagatctgtgtttgcagttccctgttaaatttctgttttattgattgtgggttttacagctttccctccaccctttttatagcaccttgggtagttctaagcactgggactgggttattaggattggagcttttcttaggcaccaacgaggcatgaagtgtgagcattttcttccatagtgggatattcagacctgctagtacagttacataactgggaacacattgatacagttaaggttaatgacctaataacaacagaaggcacttttacagacaaatggtttgttgtaattgttgcagcaataacatactgcacatgggtgttcaatctgccttagcaccacccagcttgagcaccatccaataggctgactgggggaagaaacactttgctttcaaatagcttaaacaacatcactagtgaattcctgagtgccggaacacctgtcgtaaagcctgctgaggcagaaaataccaagtccacagtatttcccacttctccaagactggggatatcagtttgcctcagattttatcctgtgtgcaatttgcactgtgggagttaagttgacctttgcagaagcagcacctactcttttaggtcacttaatgagcaccaattaacgaatgactttactttgaacctctaggaaattaactaatggaaacaggacattgtgacctcagccattgtgcttcatttgctacccaagtaacacgttaacttaagggccctatgaatacccgggagagctgccttctgtagtcacagggagcactcttctaaatctcaaggtgaaattgatctttccataaaaatgtttctgttaactaaaacggaatgagaagggttttcccgagaatgcagtacctcttttggaaaactatcaggctgtcaggatgcccttaagtactcttaagtaactcacttactggcaccctgaggcctggaagagttaacatcccttttgcactgagctagagccacgtctgtgacattggtaaaaggaattttttactatcccacttcctagatggggaaactacattctgaacataggaaatggtgaaattcacaccaaaaattacgttataataaaaactaatctaggcggggcccaatggctcacgcttgtaatcccagtactttgggagactgaggcaggaggatcacttgagaccaggagtttgagaccagcctaggcaatatagcgagatcctatctctacaaaaaaaaaaaaaaaaaaaaaaaaaatgaatggaaaaggaatcttgttctcatgaagcacggttttggaaaacaagaagtgaggactgatggggtcagaggagtgtctaacgtggaagggcgggtatcggctccagccatccccttaaaattcctttttaaattatcgttttccccctctccctttctctttgtaaggttttattctgtcttcttgcccatgacaagttcttttctacttactgcttaatgtgaagtggtctgaagatgagtctgtgttggagtagacgtggagaaaaacactccttgtttgggaggtttaatcatttacccgatgtgctactgatattttaaaatgtcatgctcttctggttacagtttccaatctggggcctgcaatgcggtgtgacccaaatcagccgtctccagtgtggtgacacatcacctcgacatggggcaggaggcaggtggctatgtctgggcacccagctgggtgattcctccagacgtgctctccctgtcttcccctctggccctcagcaggaagccagggtctatttgagctgttgctgcagcagccatgtgcatactttgcccaagagaaaaaaaaaaatccttgctcttaaacttagataaattattctaacaagagaacacaaaacagcttcttggcaggtgaggaccctgtttgcgtgagatcatgtatttttccttttgcttttctccaacagtttacttaaagggcacccacaaatagaatgtcacagtcctgggaaattgtttcaccagtatttcactgagtacttgggaactgagaaagtacaaatgaatcaaacacagtccagaccacagcgtcaataagcaaattatctaaaagaggagttacaaatgctaattctaaagtcagatagaaagttcagacagagagatcctggagttcaagagaaggagcagtgacttgtaacttggagagttcaagaagaggtgggaagaggtggccattttgagggttctggaaggccagtcctatttgtgtttgtcaacttgggcaagatgtcagagggtctgggcagaggagcaagaagagaacagaaaggaaagacccaacatcttattgggtccagagggttttcatttcttctatcagtaacacaggtcctaaatggcaaaaaacagtgaccacagctcattttctgcaatataggcatcacttttgctttttcctgacacatgtaatgaagtttgaatctatttttccttccaaaaagctctaaaaagttttcatacgtgtattgtaaggagatttagtgaaattagtttttttgagacggcttgttgctttgctcagctccctgtactgttgtaaagtgccaacgcataaccaggcagcaataacagttaccaagagcattccctccacagcaatgtggccagatggcactgagtgatcaggcacagcccgaggggcaagaggggcaaggttttggcatctgcttctttgtaaaggtagatctgccgggagcacttggtgccggcctacaggaagtaagaactctgcaccaccaaccccaggcacacctctgagtcataagtcttggaagacttctgaaagtcataagtcattagaattatgcaacaggctttgggacaaatgagacgttggagagagctattctaaaatctgaaagaaaaaagctagttttaagaaaaaaatcacaaatgatagttacatctttgaatattgtatttttaggaaaatgcataccccatttgagaaggttagcgaccttggcctaaagcgttgtttatgttagacatgaggagttgactgaaatgtgctctcataagcatttctagcaccatatttacaacgttggcccacagccagaataagacgtgatcttcctattggactgggttcatagg

SEQ ID NO: 36200 - DNA, 1695 bp, Homo sapiens
tggaaacttactgatagggaacatcacgggtgggagggttctgattaagcaggcctaataggattcttgctgaagccaggccagggtggtcagataccaatgatagaaaatgaagaatttgatcaggtatcgacggtaatcaggtatgaagggttgggggttctctctcaacagccgtagcgagacctttgctacaactcggtgatccagggtccacaggattggaagccaaggtcaaggcctagtcggaaagaaggcttagatgagcctgaccaaagttcagccaaggagagtttttgccagtgtattcacactccgtgtgtgtgtggtgtgtctgtctcagtactactgtaattgatgaggcaggggctccctggccatcccagcagtgtcaccatcttttgggtagaacagcagacacagagatggcccactgtggacagttaactaactggctctgtttagcatgggaaaggaaggagagtcctgattttctttcaatattcctcaggtatattgatctgacccccaagttacataagatctgcagtgataaaaccattacccaaaaaactcactgtcttttaccacttatatcctcagcattatcatcaattgtcttaatacaaggttggtggcaaaaaacggctcacaagtatgcatacaaaggggccaaacacattgagcagcaaaacccccaaagcagacaccgcccgagacccgctggagcgcttccgcaaatctcgcgagatagcaggcagcgatgccttttgctccggtttctcgtgagaccccggggcttcagcttctcgtttgcggagcccgcggcggcgtttcctggggcaacagcaatggcggcctcgctgtccgagcggctcttctcgctggagctgctggtggactgggtgcgtttggaagcccggctgctgccgtcccccgctgccgcagtggagcaggaggaggaagaggaggaaaaggagcagggggaggcctcgtcgccgcgcggtctgtgccccgccgtggccttccgcctgctggacttccccacgctgttggtttaccctcctgacggccccggcgctcccgccgccgaaccgtggcccggtgtcatccgcttcggtcgcggcaagtcctgcctcttccgcctgcagcctgctaccctgcactgccggctcctgcggaccccgcttgccaccttgctgctgcagctgccccctgggcgcccgacgcccaccccacagctcctgggggcctgcgacatttcgctggccaccgcagcgcacagggtcgtggggccggccgcctccggatgctcccaccgtcaccggggacgtttccccctgcataatcgagtgggcgagcggactggggacattgcactggcctaccgcctgactgacctgggaagccgcctgctgagccaacttgagcggcccctcaccttcacccgcacaggaggaggagcggaggtcagtccccaaacccagcaggaaagacagcagctgcagcagccagcctcacagccaagcccaaaagaggctgataagccgctgggggagttagaaatcccagaggcacagaaggatttgaaggaaatggttaaaagtaaggccgaatgtgataatgtgggttctgtggagaatggcaaaaccaattctgttgttacatgttcaggtgctggcaatgggagaaatg

SEQ ID NO: 36201 - DNA, 874 bp, Homo sapiens
taaacaggatactttttgaagacatattgaagtccaacttttttgttttgtttgtttgtttgttgttttgttttgttttgtttttcgagatggagtctcgctgtgatgcccaggctggagtgcaatggcgcaatcttagctcactgtagcctctgcttcctgggatcaagctattctcctgcctcagcctcccgagtagctgggattacaagcacgcaccaccatacctggttaatttttgtatctttagtagagactgggtttcaccatattggctaggctggtcttgaactcctgacctcaagtgatccatctgccttggcctcccaaagtgctgggattgcttaaagtgggaaattcccagcagctgaccagtcatttagaccagggagatgcggttagtcatacggaggaaaggtgcagtgacctcagatacactgtgaaaattctcctttcgaacctgccagagcctttgttatacttatatatccctcaacacagaaaactcagagcacttttaggaaacttactggggactctaggtgtgggaatcagttaaatacccaatgggttgttttgataattcagattaatgtcaacatatgacacaaagctcaaaacaaagttattattattattattttggtagaaaataagtcatgggccttctaatctaggacagaattgaattgaattttaaggttaaatattaatcccaccaagttttcatcttcccaatttttttctcaatgacacagattcatcttatttttacaattccttccagtccaaatctcttggataaagatgtttgtaagttgttctaatttctgttgctcttcccactggcagacagaaaactgttttgctgtct

SEQ ID NO: 36202 - DNA, 799 bp, Homo sapiens
aaaaacaaaaaagtatgttcctatgtcccccaaaacttaagtcaaaatctctgggtgtgccctagaaacctgcatttaaatgaattcttacaggtgtcacctgtgtacactgaaggccgagggcattgctttgtctactttacccaaataagaccaaacatgcaacctctccacacttccctgtttaactgagttggaatagatcagtttccaacaccttctcccacttgaacttttgaacaaccccatcccactgctttgggggccatgagaactgatgtgtgcctctcaggaggagcataccagcatctgtcaggatacatttttaaaatgagctgataatgcctaagaccatcattgttgattctggcaaggcttcaaatagcagcaaccagcaaatatttcgcccttcccgtggtttctggcagtgttgcagctgttgcctcatctagtgaacatgccgggcctaagggcaaacagacacttaattaggttagggtgagcttcaaaaactcgagagtaggcatagcagtaatgaccaccacactttctcactaagaatactcaatgcgtgcaaagaaataattatcccaagaagccatggtttctttcctctaccccccaccttttttggctgttttatttgagatccatgacctgatagaattactcattcaaagaatgcagtggtgttcaatcacacaataggagccatgctctatgaaatacctgaaagccagtgttggtctttagatgtgagtttcagcatgagctgagtttcaacaacgcttggtatcaa

SEQ ID NO: 36203 - DNA, 1699 bp, Homo sapiens
agcgcacttcaggaacttcctggagtttagaaagaagaaaaaagaatacaggtgctcaagactcgctcaagaccaattactcatgttaaacaagatttatgggaggccattgttttggactaacctcctgcactaggtcctagcagactagaccaaaccagaatggagtcacttgtgccaagtgccatgtaaccaaactgaactttgaaacaggcccgttttcccaaaaaacaggagattgtagttaacctgagtcagtacaataacgaagtccaatctgttttaaccctataaggaaagtaactttgaaatacccactctttgttttgttcttcagcctttttttgcccataaagccaacctcctctgcacaactcattggaacactctatttgctttatgaaatgatctatttctcgattctagatcctaaatataagccaattagatctttaaactaaacttgtaattttgtcttctgacactccctattactgcaggtgaaacccaggcatcagagcaagtttaaaactccccagctgattctattctgcaggaatgtttgagaacaaagttggagtcattaacatggcatccccctttgaggaatgcttccaggtcacaaaccttctacaaaagggctgtcccggcagccttgggcaatttcagctcctaggtccggagtcaaggggcagaacttgggtgatggcgctgacttgaagcagcaatagtttaataactgacgttctcacgcacttatctctgcaaataccccacaaaagccctgaacccagaatgaaacttaagagaccgtacaacccgctccgcctataggaactgccgcggcacaggcgccaatgccgagggctgaatgcgcaggcgcggaccggggactcgggagaaggcgcatgcgtggtcttgagggcggtgcttccggtcaaagcaccgcttgggggcggggcctgcgacacgcggtgggcgggtcctgagtcgcgaccctggtccggacctgacctgaattgcgaccccaacctggactgctcccctgaccgcaacccctacccccgcccaccagtatggcccggcacgtgttcctaacggggcccccaggtaaccctgaggggatccccacctccaagaggtcgagggggtgggggcgcgcgggctgcgggcgaccttgtgctgtcggggagggtctccggctccagggctccggcctctgaagttcccaatttaaatggcgggcttggtagtctgaagagtttgtactccttcccggaaaacgtgatttaaaagacacagggcctaaaggattagaacacacttgtgagggggtcctagactggcttcttgatgaagggcagaaaccgcaggggccagcggcagcggtaactcctactgtagtgttgacgttgtggtctgcacaaatggtatttcaagagatctgcggcaaccgcgatgtgaagtggagatgtctaatttctgttgatagtcacaggtatttccttactgtgggtctttgctacattgatcgtgcaaaaaaaaaatggtaaattttagttggaggacagcgaaactgaagttgtaacctttctttcccatctaagttcatccccccacccccatccccatctccatccccacgaattccctccacagctgaggccagaggtggagaagctttggtacctacaggagc

SEQ ID NO: 36204 - DNA, 1454 bp, Homo sapiens
atgataatttatcatcaataaaaaacttatatgtctgctctttataagccatatgaaatgaggcatagactggagaaatgacaatgaattatgatcaacaaaatatcacaatttgaattaagacttgatatacaaataccgatgagaaaaaattaaaattaagagttaaagaaacaaagtcaaaatataactatgcagtcttaggtatagttcttattttcaattaatccactggcattctgttttataaaaatatttctcacttcactgaggatagtgctgtgataaaatataaatgattaacagtttacctttgagatcttctacagtttcctgtgctgacaactcctacacaaatgaaagaaacaaaaatcaatagatgactcagctgaccgtccatttccagacagtcggcaataactgacagcagtcactgattttctaaatggcatgtaggggagagacaatacagtgttcactctccttaagcttctataaaatggggcccagaatggatacaaacatatgtaaatgtggacattcaaccgagacaactgtactgtgacaaagggagatttgctactaagaaagtaagcaaagaaggaagaagccactacttacactatagtgaatggagctcaacaaagttaatctagaaaaaaggtgatttattgacttcccaaaaagacaagtgtgatttaaaatggaaagcagaggtgatatccatttcaggtggaaggcactgcagatatgatgacttaaatgaatgacaacagaaagaagcaaaggcctacatattggttctctgcccagtgtggttgacccagcagcgcaggtggacggcagggaaggccagagagtgtgctttgaacacacgactgggcatttattttatggtcccaagggcacccttcaggccatttccagaccctgggatgtgatattccactgtacacgggccagtgattacagcatgcaagctacaatcactgctgctgaacactcccattctaggtgagatcaacatcgaaatcacatgaagagggtgaaacaggaaagaagaccactaaccaatggcccagaagagtgatgagaggttatgctttgccctctggagctgcagcggaggggaggcgtggagaggtttcgactggcctcttcctttttgccattgtgaatctgcctattattgctaacccaacatgagaaacacaagagcagtgagcgatattatcaaacagaagcatgactcttttagtactagtctaaaaactttttttcctagagtccattttgttatattccttacatataaatctttttttgttgttgttaagagacagggcttcgctctgtctgggtagactggaatgcagtggcacgatcatggctcactgcagcctcaagctcctggactcaagtgatcctcccacctcaacctcccaaaatgcaag

SEQ ID NO: 36205 - DNA, 1790 bp, Homo sapiens
gaccacgggtcactctgcgctgcgatctgtaacctagtcagttctgagatgcacggtggctcaaacgcacttagcatggtgacttgccactcgcactggcccaggtctggcaccgcgctacaatttcttctgtagcccgttctgagattctgtcactctccctgaactgcaactctctctctccccgccacaccctaaagccccacatcttctcaaccctctcccaccgcttcttggagaagcgtcccctccctcagtcttacctttggcttaatttaaactctcccgaaaatttatagcggatgacggccgatcccgcctcccagaccatgtgggcgcggctcaccattgctccggagcacctgcggcgggggcggggtgggaccagccaggcgggcccagggggcgggcccggcccaaggtggtgggggacgggcccgggcgccaggggcgggacgaggctctggggactggcacagaaaagggaagtgaacctggcgagggcggggcgggatggtgcagttggtggggaagggtggggcgaacctaggaaggcggtcccatagggcgggcgcagactgggcgcccgggacgggtcaaggagggcggaatgaacctggagagggcggggcggctgggggaggggcgggaaggccctggggactggcctaggggcgggcccgggggggtgggggggcggtgcggaatggagccggagggggcggggcggccctggcgcggctagggtggggtggggcgtcccaggctctggctaaggagcgcgcggcgggcgggccggccgcagggcctgggcacgaccatggtgggacgtcgcccgcggcttcggggaccgctgcggcagcagaggcggctggccaggaacgcgggccgaggctggaccctttgggcagctagcccgtgatctctgccgtcaccgatcgcgattcctaccccctcgccttcccccggcgccgacggccacaccgccggacgatgcgcgcccgcggccgcccgggaggctgagcccagcttcccgctccgccttccccgcgcagctgcccccatggctttgcggggcgccgcgggagcgaccgacaccccggtgtcctcggccgggggagcccccggcggctcagcgtcctcgtcgtccacctcctcgggcggctcggcctcggcgggcgcggggctgtgggccgcgctctatgactacgaggctcgcggcgaggacgagctgagcctgcggcgcggccagctggtggaggtgctgtcgcaggacgccgccgtgtcgggcgacgagggctggtgggcaggccaggtgcagcggcgcctcggcatcttccccgccaactacgtggctccctgccgcccggccgccagccccgcgccgccgccctcgcggcccagctccccggtacacgtcgccttcgagcggctggagctgaaggagctcatcggcgctgggggcttcgggcaggtgtaccgcgccacctggcagggccaggaggtggccgtgaaggcggcgcgccaggacccggagcaggacgcggcggcggctgccgagagcgtgcggcgcgaggctcggctcttcgccatgctgcggcaccccaacatcatcgagctgcgcggcgtgtgcctgcagcagccgcacctctgcctggtgctggagttcgcccgcggcggagcgctcaaccgagcgctggccgctgccaacgccgccccggacccgcgcgcgcccggcccccgccgcgcgcgccgcatccctccgcacgtgctggtcaactgggccgtgc

SEQ ID NO: 36206 - DNA, 609 bp, Homo sapiens
tatataatgcttttttttggcttcgaagtttccagctgcatcttttttgatgaagtaaaaagcatagtgtacgtgccctatctccctttcttgtccacagattgcttaaggtaggaggcatcagacttggaattaatggtgagtaacttggctgtggtctgtgttattcagtaagccgtagcctccgtagatactgggtcctccctaaactcctggctccttatctctgtgtgtctgtatttgtgcattttgtgcatgcacctgtctgtgaccccccacacagaggcatgccaccgttaatgattaacagccactgccagggatctggatttgccattaccagagtggcctgtgccaagcaattcaacaaatattactgctagtaatctcatcaaccgaaagaatgtttttgtgcttcatacttttgaagtattcaaagggttctaataccccagttttaaaatttacttttgaatgtgttcaaatttattcagaaggaagattacttttgctgctttctcttcaatcttatttttttcttttctgaagtcttaggcaagtgattttttgtttattattcacaaatttgttcacagggattcatgattt

SEQ ID NO: 36207 - DNA, 2768 bp, Homo sapiens
gctcgctgaccctcgcccacatttttgtcactttaaaaagaagtgacagttgggaaagctcagtttcttctggcagttgacacatttgggatgttttttcaccaaaaaacctaaggtcatgttttagaaaattcgaactcagaaataggacttctctgagactctccttttccctcaagtcctttttgtgagggggatgggtgggagagaggagactgattcaaggagccttccaactctgatgttctggtattttcaccgtcattactggcaccagattgctcaatccttcgaccaataagacaaagaaggaaagtacttcagcgcttgctgttttgtaatactggctttgattgggagaaaataagtgggaaacaagagtagcttggacagggggcttggacggccagcgcattgaccagaagcggcccacactacacgcgcgcgaacacacacacacacacacgcacacgccgcgcgcggtcagctagagtttggctactggacccaggaagggagggagcgggaggagctggtggctgtcgggtcggggtctgggcgccaccgagcgcccgccccacctctggagtgcgcagaaggcggtgcgtcccgggccccggcagcccagcccaggcgctctggccaagtttgcgcgcggtctccgctgactctcgggttacctgagccggcaaccacgtcagcgccacatcatctgggctttttatattgcaaggaaacaggaaaagaaggaagaaaaacatcgcccgagagagccaatcgcaggaagacggcgctgcccggaggagcggggcgggcgggcgcgcgggggagcgggcggcgggcgggagccaggcccgggcgggggcgggggcggcggggccagaagaggcggcgggccgcgctccggccggtctgcggcgttggccttggcggcggcggtggagaagatgctgcagtccctggccggcagctcgtgcgtgcgcctggtggagcggcaccgctcggcctggtgcttcggcttcctggtgctgggctacttgctctacctggtcttcggcgcagtggtcttctcctcggtggagctgccctatgaggacctgctgcgccaggagctgcgcaagctgaagcgacgcttcttggaggagcacgagtgcctgtctgagcagcagctggagcagttcctgggccgggtgctggaggccagcaactacggcgtgtcggtgctcagcaacgcctcgggcaactggaactgggacttcacctccgcgctcttcttcgccagcaccgtgctctccaccacaggtagggtatcctgcgcgccccctggccgccccggccacctcgcccacaacccacacaccccggccccggcgccccgggcccctctaaccctcccaccccaccccccacctttcgccatcccggctcctccagcccgcctcccctcactgtcctcccgaccctccgaccttccccttactggcgtccccggcctctgcctgggtgactcgggagggcaagccctgcggagccggaagccagagaggtgactccagacgtgacttggttgttgccgtccgtaactctggggaagtggtccctaacttcggcctgggtggctgcaggtgcttcctccccttgagttcttttttcgcaacccactaagccaaactgtcgggtttgaatgtgtagcagcacctggccgccgtgcggcaaggcagcgggatgatggaaactcaccaccttcctcccgcacccatcccagaggccgaggctgcagtctggtaataataccttctaaagggtcaccttccggagtgtgccgtccctttggaccatgcacagatattccagctcttttgtaccttggaggcagttttgggggtagccgagtgacatcactctgctcttcccaggtgacctctgggcggacaggccgatccggtttcttttcagagtaggaggaagggtgagggagagtaaaggaaccataggattgcctaagatctgacttaattggggcaccctgattcagcagttccttcaacttgaggtgtgcgaggctccccataaacttcgaagcgccacgtccccgtacgactcacccgcggggcgcccggccatggaggagcctcctcaggtgaaagatgaggccgggcgcatgccccagggctcggtcactgtgccagatcagatgaatgaaggccgaatttccccagccggacctagtaaggcacatacccagagtggagatatcaattggtatttggacagtgggaggaatctgaaagagcgttcagcacagtcccttcttttgatctatgagatccaatctttgaaataatccatctcgtcatgcacaaggtcacacacttcctagttaccagtgtcgtcctggaacctgggccttgtgatttctctgccaggaccactttgtaaccccccaccctcaacctttacaggtgaatcacatccctttgtgtgactcccaactcttccttcctccccacccccctccaccacccaaattattgtgtataattccctttgggctatatcttgttgactatcttggtaattacttggtaatgagtaataatacactattcatgtagatcacatgaaacaattattcagaggtctggggtgaattactaaactgatgtaaatctaccctgaaataaacagaagtggaattctagcttgtattgtgagatctaaaaaactgttaaatgtagcgctagacaagacagacctgttatctcact

SEQ ID NO: 36208 - DNA, 3483 bp, Homo sapiens
tatgggtaataaaggccagtctgataaggtctcagagggaaatgaggaccatgttattggacaatggagaaaaagccatcggggtgggggggaaagggaagggagagcatcaggacaaatacctaatgcatgcagggcttaaaacttagatgacaggttgatagatgcagtaaaccacatgtatacctgtgtaacaaacctgcacgttcagcacatatatcccagaacttaaagtaaaagaaaacaaatttttttaaaaagcgtcagagaacttggctgaattgtgcctgtattctagtgttttgcagaaggtagagcggtgaacactgaaattacatatttggataaggaaatttctaggcaaagtgtgaaagttgtggcttggcttctcttgacagcctacattaaaatgtgaaaagagagaaaagatttaaagacagaattgttaatcaaagagaagcagcacttaaagatttggaaaattctcaccctagccatattatgaagaatgagataacgggtacagtggttcatgcctgtagtcctaactgttagagaagtggaggcaggaggatcccttaaacccaggagtttgagacttgtctgagtaacatagtgagagtccatctcttaaaaaagaataaataaataaatgagaaggcacattgggaaagaacaccaagggtgcggccaaatgaccatctgataaggagattagtcaaccaagtggaacctgttgctcaaggtgattcagaagtaattggggctgccacctccatcacagctccaatgtgcaaaagcttgagcaggcaagcatgggacctccacagagagcccttactagagcaacatccaggatagccgagtggtaggaccaccccagcagccccagacctgtagagtcatagacacgattctagctcttggagccacaagggcacagagcaacctttggggagggccaccacgcccgtgggttgggaaagcaggaccacagccctagtgggcctgggggacagagcattgagccaaagaagattattctccagacaaaattttggactttgctagggacctatcctttcttcttttctttctttctattcttttctttcttttgaaatggaaatgtctattctatgcctgtcccaccattgtattttggaagccccttgacttgtttaatttcacaggctcacagctggaggggaaattgcttcagaatgaatcataccttgcgtctcacccatatatgatgtaggtgctgtttaaatgagactttggactacagaccttcaagtagatactggaatgagttaagatttttggaaccattggaatggactgaatgcattttgcgtgtgagaaggacatgaaattttgggatgccaggggtagaatgttatggtctgagtgtttgtgtctctcccaaatttatatgttgaaatcctaacccccaccctctcaaggtgatggtatcaggaggtagagcctttgggaggtgattaggttatgagggtggaggcctcgtgaatgagactcgtgcctttataaaagagacataagagggactccttcctccttctgccttgtgagattagagtgagaagtctatgaggaagcagccctcaccagacactgaatctgctggtgccttgatcagagacttcccagccactaaaactgtgagaaatacatttctgttgtttataagcctgtggtattcttttgtagcagcttgaacagactaagatacccttggatgaggagcaactgaggtaaagtgggaaaaaaaaaaaacggctccaatgccaagggcatactggacagctctttaacttatgcttggtggttgcttctcatcattttcagttaatcgtaaagcattctacttttgtggatttcaagtccctaggaaaggatgctgaaggaaacgacagttttgtgagaccatcagtaattgtaatgttgacacctctgcattcaaatgggttacaggattaaacaagtgtcatccaaaggaccatcaggatggctagataacagaaaagagagtttcactggcaatactggtttacaaacctggaagagagagtctccggtgtgaactgaaaatgctctctctgaagaacaaagagaaggttagaggttttataaaaaggagaaatgttgcatattgctctttgagaagtttcattggcaccagtaaggttttgaggagctggcaggcttcaactgataagtgagggtggtgcgtaaacccagtctgagagttgcagcaggtcgtctcagtagtcgttagacaaaactggtttcaggttactgcaggcagtgtcagctgccaggcctgcagaaaattatgttttttggagcaatgttcttcaccctgagtgctttttccccttggcttattgattctttgttgggtatgacaagaatgactcatttcatgtgatcagctttcacacaagggtgacaaagcttcaattatttatttctttattatttatttatttaatttgggacagagtctctcgtcgtctaggctggagtgcagtggtgcatgatcatggctcactgcagcctcaacctcccagcctcaattgatcctcccacctcagcctcccgaatagctgggactactggcacatgccaccatgcccagctaatttatttagtttttgtatagacagagctcactatgttgactagggtgatcttgagctcctggcctcaagcaatcctctcacctcagtctcccaaagtgctgggattacaggtgtgagtcaccatgcccagcccaaagcttcgttttaagtctcttttatttactttttttggtcctagtcataacacattgtaaatatactctgtcagagaattagatagcttgttgttttttaagtcttttctaattaatctgttcatgtaatttagtaagaaaatattaaagggaaatcttgcccgagagatggccagtactgagtaagaagcccatttggtttgtgtctgggaggatgggcagtgaggatgagtgaggatgagtttaatttagcttggtgagagggggacaaatccaccttttcacgagagctgctttctcatcgctttttgtcccccttcatccacaacccccgcagccaaggcagtgtcagtaaattttgggatggaaaagccttaggtaggattcttatgttttcgaaatgtgactgattggaattgggggaaagctgtattaaaattggatatgtggtaaaagctggatatgtggttattacccatatccagtagtgggtcatgttcctgtgctaccatgatctgcccgcagtaacctagcaagacatcaaatcacagtgtgcagtagatggtaccgttgaacaagccaagccatattgtctgcagggatctgagatgataaagagattattacagaatttgttttcataaggaactgtgtaattatgatgattagccaaagaaata

SEQ ID NO: 36209 - DNA, 2229 bp, Homo sapiens
acattaatctgagaattttaaatttagaagctaaaataaataaaaatcacagctggttgtaatcttatgctttcatatatcagaagtgtgcctctatgtagaatatatatacatatgtgtgtgtatatacatatatatatgtatgtatatatatacatatgtatatatatatatatgtgtgtatatatatatatatatatacgtatatatatatatatagtccttcatagaaaacataaaggtcacatttagatgacgtacacaggatactattatattaaggattttagaaaagaaaatgagaaagcccctgtgtgataatgaatgtccactgacccccgcaatggagccttacctcccatgggtggctgcccaggagttggtggttgaggggctggtaaaaatcagtgcaaaatcagcgccctctgatgagccagccaagcactttgatcgcgggccagtctcctgacagtgggtcactcgctcagtaaccttctaccttctgtaccatgtgctgccatgagtaaattattaccaactgcagggcaaagggaaagcatccccttacccttcggaagatttgctgaaaaatcaactcacaaaaaggcagattaatgagaaaaggcatacacatttattaactaccatgcacacagaaagaattacagagtgattgtccaatatctcaataggggttcacatgcttaaatatcttactgattagaggacagggagatggaaaaatataggtgattttagagggatagtatatgatttttagaggaatccaagtgtgctgccccgtaagcatatttcctccctgctgaccatgtccctgcaatagaagactgctgtcatgaggccagatcattggttaagggtagaatagagaatccttggagaatagaggcatgcatcctgccataactggatctgcaacatttccgatggtcacaagccttggtgtggagcagagtcctgagatgctcatcaatataaatcacagaagctggattacacttggagagtgttattctattttatgcaatgcaggaaaaaataatggctagtttgctacagctgcttggctctaacatgagagggaagttcaaagtccagaaaatgaggaagtacgtgaagaaaaacttctgaatcagatgtgattaataagtaatagagtgtagtacttaattttaggaactcgtttgaatccgcagagaacacattaaaccttaatgcccttcagattgttgttaatgtgaagggcaaagtagaaaagtaggagcaagttttgcctcggcccccaccctagcaggcaggaaagtaagggaggatgtcttccccagggtttctttttgtctttggccgatgatgctgccctttggtccccagggagaagcgagcttggtcacccaggaggagctctgggtcagcctctcagagaacagaaattcggcttgctgcaggcatgacaaggaggtggaagatgaacagtgtagctaagccagaactgaccttgggaaccctttagttggaggcgagagagtgggaagttggaggtaaaagtgactactagagaattctgggtgatgagtacaagctgaactcacttgcttagcttgagccttcaagattgagttcctaagatgcctgcggaatgccctcagggtagaacagcagcagaaagccttatcattccaggacatggtcctgtgcgtgaacttaaatgtgacacgtgtctggtagggatgttgatttcaaagtagcagatacactccacgtgaggagagaacacagagtatctcagagtgggagttcctaagctctcagaaatccaagggaagagagaccaaggggtgggagtagtctctaaatgaatcatgtaaaagattcccaggacagataaagtttagcccagatcactccatttatgacactggtttctttctatagtagtcatgccaccaagatattttgaaagtatttgttcaaaagttgaagaagacaagtgggagaaaaaagaaacattttctgaagacagaaatttggtctgacttcaaaaaaaatcgagtaatgtttagattactgacatggggtcacttttttttttacctgagaaaaaaatcacactcatactttctccaaaccagctttatgggccttttggaaaatgaatgaggagatatttacaaatctggagacctcaagataacggaaataggcaatgca

SEQ ID NO: 36210 - DNA, 2054 bp, Homo sapiens
cagcctggccaatgtggtgaaaccccatctctactaaaaatacaaaaattagctgggcgtggtggcggacgcctgtaatcccagctacttgggaggctgaggcaggagaatcacctgaacctgggaggcggaggtcgcagtgagccaagatcatgacactgcactccaacgtgggcgacagagtaagaccctgtctcaaaaacagaagaaaaaaaaaaagaaagaaagcaagaaaatgcctgtgcatatttctttgtacacaatttagtaccatgacacaaggatagaagcatgtggcagatttttattttgatgaaaagcaagctttgtctatcttgttaaaggcgtttggatatgatgcaattccaaatcaggctcttctctttattcatatgcccaactcacctgtggagacctccgaggaagctcagctcattggctttgattcagcaaccagttttcctgactttggagtaggagtcacatgacaggctaggaggtaaaagctgtatcacagagaaataactccttgtcaatttccagtttctgccattacctaaaagggacctgactgagtgacactgtgtggcctagagtgactttagctgaagagttcactttactggcttctaggcaatttattaccattatgaacaatctgctctttttttgtcatgctctatcatttcgtaacactttctcttctcatagcaacgtgctcttccccaggatgcccttatatggcagctatgcccagggcaatgacactagctcacagttgttgtttaccttgtgcaggggtgagcaaggacagctttccccttcatcctctgaaggttcattgaaaatgaactaaaaaaaggcagattaataggagaaaaaggcatacacatctattttaacatgtatagcatgggagaattgcaggagaatgattattcaataatccaatggggtccaggtgcttataaacctttcttcataggagaaggggtgaggggaatgcaggagtaaataaattttagggagaatgaatgcacccaatattcagatagggataactaaataattctcttagggaattgaatgggactggagaacaaacacagttcaaagtttgtctgagctctaggtttggtgtttaatttttagtctttttctctgtgatgagttttaatcttccctgcttaatgaaatttccaggaagggattgcaggcaattggatttctctttggaagtccggtttctgggcagataagggaacttcagagaatagcctcgtcatctgctttgggagagacaaaggtgtgagagatgggggtcggggaaaggtcagagggatcttgagactttttgtttagttccatattttgggaagtcatttcctgagccccaacacttttttataaaaccagattagtcactccaggctgctttcagggctgctgtgaaacagggataaaaacagttatattggtcacctgcagggaaattatgccaggaggcaagatgcatataattggccatggcaatttccaaagatatgctacaaataatctttctcaattccatataggtccttgaatcctcagatagtccagtcaaagctgatcctttgtccttgccagtgaccggcaggtctttccagacactcagagcggccaagacagcatttttaaaagcgccactctatatttagcagtccaaattgcctatggcttcactctccctttgtacttgcatcacctaaaaaagctccccttcacatgcaaggtcaaagagacgaggcagacattgatttctgttgcctgtagaacccagaataactctactactgaaaatgttgctctagggtggaaactgaaaagaatggatgctattcaattcaactttggcaaagtgcagaggcaggagagaattttagcaaggttagtgcacagaggtcctggcttcccgtgtccagagaatttcaagttcacgtcaggccaggatgatgccttgggatcagaggtttggcacaatgccctgaagttcccactctttcccgtttact

SEQ ID NO: 36211 - DNA, 1104 bp, Homo sapiens
tgcaacctctgcctcacaggttcaagcgattctcctacctcagcttcctcctgagtagctgggactacaggcacccaccaccatgcccggctaatttttgtatttttagtagagacagggtttcaccatgttggtcaggctggtctcgaactcctgatcttgtgatctgccctcctcggcctcccaaagtaatgggattacaggcatgagccaccgcacccagcctaggattcttttttaaaaatcccaaaggctcctgggtctgaaagggatggcttttgtgaaacattcaactgagaattaaactgtaaacaaggaagtaagaagggcccagttcctcttctcagtggcaaaagtcctccaagctccacattccatgtttttgaaccaaaccacttggcagtattcctgggaattcttcaaattatcatctgttgagtggatccagggcccagaaagcacctgggccacaggagggactcaataaatatttgttgaatgaatggatggctgctgcacgaaatactgacctctgggacagggagctttgaatatgcctctgtagtgatttgtatcatttacctctttatgctgacttcctgttatgtggaattgctctactctttcctagttcttccatcacaagtgcttcctgaaccacagactggaccagaattcttggtgataagctttggtttggcccagggtttcttgatctcagcactattaaccctttgtgctgtataagtatttgttgtagggagctgtcatgtacattgtaggatgtttagcagtatctctgacctctgcctattagatgtcagtagcttaccaccctgccccctaagttgtagcaactcagtatcccatggggggcagcctttagttgagacccactcatttagggtaacccccaaatttatgctgcaatagaactctcttctgttgcccagtaatgctaaacaagcaggcctaccttacaaattcctgaccctctccttcctcacctttcttcctggaccactttttaggttttcaggatggccagatcgagtaatcatcaccactggcagtgcaagtgtcttctgaagatttgaaagagcc

SEQ ID NO: 36212 - DNA, 1291 bp, Homo sapiens
ctggggcactccagtgacctctgtcctggatgctgagctgactgctcctcccctggggccactctgaaaagccatctctgctttacagaatacccaggggtgatggcagggacttggaaggggatacttaaggagtcctcaaatgtggacctaaggtattgattctgaagatattcagtgctgtgttaccattcatcacatcaccatttggatacccgctgaattgcaggtctgtgccaataatgcattgattttataatatgtttgctctgttattatccctgtatgaagaagagattgtccccttttgtttcaaattctaaccatttttttatcatcactctctttgagcaactcatgatgtcctgctggttttaacgttcactgtctgtaaaaagattcctagtttacctactgactgccataggctgagtgccgcgtagacagtttgtctgaaggcagcattttaaggaggtccccactaacagagatagaaacaggcaccagggaagggttgctggcaatatactcagctgcagcgaatgttcttacctacaggtgtttggagtgtgattcacccagcagggcgcagattgactaagcagtctcattgcattaatatccctggcacctcatttgaggtgagatatgacttgcttcaaagcattgctcaagcatgcagtgggctccgctctgctgagtcagactcatgatgttggccaaatgctcctggctttggctgtcaagaccaagtgaactttaacaactgaccagtatttgttttttaaggcatggccagcaaacagagattcagcggaaggactgatgccaaatttcagtggatgcgtagcaaaccctgagcaaagggctgactttgcccctctgctctgagaaggagacaagctgggtgccgtctcctagccctgatctctcctcccagtccttctgaattcttgccctaggccaacctggcacctcatttgaggtgagatgtgacatgtgccctgagactctgaagtgtcaagtggtaggtggagagggagcacatgccatcaggatctcagatagtctgttctgttgacacaacttgggtctgatcatgggtccaccatcttaataattattttaaataacactggtagttgtagggactccgtaaagtcaacatgctggaccaggtatcccatgtacattagctcctttaaacctcacagcaacctgcagggtaggtattattgacatattgatggaatactatgggaagaggccccatagtgagcctgagacttca

SEQ ID NO: 36213 - DNA, 437 bp, Homo sapiens
atggggagcagaatgaatctcatcagcattattaacaaatgtaggaaatgatgtagcagaaaaaaaatgtcacttttgcaggtaactttctgggggagaaaatttgctcaaggcatgaggtagaaacatgctgacaagctgaagaagcgtgaacggcattttccctgacctccgggaagacagggagagaacgccctttgcccaggaactcgggactgccctttgttttcccctggggactcgttgccaaggcacacagttgacagctctttcagaagcttgtcttcacctgcccctcactgccttccttttcctggctcgcacggataggaattttggattttcttcccagaacctcctggcctcatacctgacctccctaggcatccttctctcagccagaaaagggctgtgaatctgtcctccccagaacactc

SEQ ID NO: 36214 - DNA, 2020 bp, Homo sapiens
tccactatgagagtgcattaactatgggggaaatactttctatattgcagaacacatatttggtggtacgtagcctcacatcgccacccggaaaagtctgcatatattgaatttggaatggatcaaactgcactgagtgcaaaattgtaaattgcatcttatataaatgttttagaactagatgatggagcagatgggatctattaagagaacggggtgccagatgactgaccataaacatgctttttaataaagactctgctgagagattaactcatatattttctaaaatttttatttcttgttcattttgtttctaagatattcactcacatattaaaaataacaacgtctcaaaacatttgaagcaactctcttcatcccttttaaaaataccttgctgtttcgggggttaaaaaaagccacaagggagattaaaacaatacaaatatttattttcccaactcccctgccatgggttctgggacgtcaccgcctctttctggggcccgtttcatccttttcttttaatccaagaagcgatggtgttgtgcgcctgtagtcccagctacctgggaggcaggctgaggtgggaggatcttttgggtccaggattttgaggctgcagtaagccgtgttctcaccactgcactcgagactgggcggaagagcgagacactgtatcaaaaacaaaacaaaacaaaacgagaaggcatcgcggctctgtaacactccgtccagctctcgcactctcagatgcaaacttccacacaaactcctcggctcgccttgtcccgcgggactagcatatcaagccttccgggacacaccgtgcgatgatatatacgtatatacccctcttgcccttgaaggccggaagtcggtcttacagataaaagcgaaacaggaagtcccgcccctctatggaaagtaaatggtagctcggaagggtcaaaagagtccgcggtttcgccgcgtgagttgctttttgcggctggggaggtctacgcttctagagcttgagccagcggggcgaccctgcagtggcaggactcggcaccgcgccctccaccgccggttggtggcctgcgtgacagtttcctcccgtcgacatcgaaaggaagccggacgtgggcgggcagagaggtcggcttgctgatgggtccgggtggggcgcgcgtggactatgggcccgggaggtcccttactgtccccgagccgcgggttcctcttgtgcaaaacggggtggcactccaatcgcctgcttggtgattgtggcccccacacacctgtttctacagcgcttaggttcgaacagtaaccctgtaaactaggcactgctgtccccgctttactggtgggaaacgggctcggagagaataaatgagctgccctaagcgactgggacagaaccacagttctcagccgggctttctgagcccacgctgccgccccagcagggatcaaatcacacagtgtgagataagcctcaagagcgggtggccttatgctgccactgagaactgattgggttcagttgcctcatcaaaatccctaagcatggttttgttttgtttttgtttttttttttttttttagttttaaaggaagaggagattgacggttttcctctttccttatcttctcttcagattacaaagttcattgttaatctcaaatattattttggccaacagcttcatcgcagtaggaatggcagccccatctatgaaggaaagacaggtctgctggggggcccgggatgagtactggaagtgtttagatgagaacttagaggatgcttctcaatgcaagaagttaagaagctctttcgaatcaagttgtccccaacagtgggtaagtcacactttgatgtgtttctcttccctgttaagatacatcgagcttatactgtgagtggtaggctgacatgaagcgctctctgaggcatgtcaattaacagtttctttgaggcgcagagaaaaccttgcctggtaattcagccttatttgacgcactt

SEQ ID NO: 36215 - DNA, 551 bp, Homo sapiens
caaaactctgtctcaaaaaaaaaaagtgattattttcaatgccataaaaatgagcccctgactcagaaaaccacctaggtctttcattcccttaaggttgtacatcttgaaataagataccttggctctatctaggccaggcattggcaaaaactattcacagcctgttttgtaaatagtttttttggaatatagccaacgcctgtttatttagttcagaagttgcaacacagatcataaagccagcggcaaagctttaaaaaagtttgctacctggcactgcacagaaagagtttgctgacccctgtagtaagcaatatttactgaggctttgtaaaaagcacaggatacacaccatatatattccttgaatgtcgatacaggggaagatgaggggaaatgtagagagggaacaaggcatacgctccaagagtcctctcccagtgggccacccaggacacacttagctcccccagcaacaagctgtgacaacacagtgaaagtctgtctaccagggaagctcaatggagactcagtgcctcgggcttttc

SEQ ID NO: 36216 - DNA, 1949 bp, Homo sapiens
tagggagcaaagctcaaacagttaaaaaataaaatctgattcattctattaaatcaatggcaaaaatacactcaaaaggtcgacttaagaaacatgtttaacaaatattagtaaatcctgttcctaattaccaggggaaatttcagaagagtgtgatggcctctatgacgcttaattctaacactcaacactcaattcactaattcactggtcagtacagataaataacaaataatttttctttcaacttgatagatatcaaccgtttctattgggttgaatctaccatgatatagtgcagatttgggtctgtaaaatcttgcacgggctccattatcttcctaaactattccaggggtgctgtattccaccggctctgggttagaacgttcccaaccgcagtgatttgtgacttcaaagaacaccctcgagaaggggttccaaaggttttcaggctttaggggagcaacgcggaataaccaaattctgcatggatcggagtgacgaccccgataagctagtttttagaagcaggaagactcccctctggggcagccaagtaggtagcactaggctggggggcaaagaggcaggtaccgtttccttcctggggcccgcaggtgcagtcggcccccagctccgccgacacctccaccgccctctgcagcaggtagcgcgctcgcttgcgcgtcagggcgtccgcctggcccagccccgcctgcaccgtcctccagaagcgccagcagcgccgggcgtccgggcccgcctcgcgcgcgccgcgggcgcggtcgccgccgggctcgggcaacagcttctcggccagggcgctcaggaccagcagcttctcctctacgcggccggaccccagggacgccccaggcgcggccagcccgccccacacggcccgcagcgccgccccgccacattggaccagcactggcagcagtcgcccggccaccagcgccgccgcgtcctcggcaggcccggcctcatccccgtccccgcccccgcccagcgccagggcgacggcggtccccgccacgcgctccagtagcggcccgtcctcgcggggccgcaaacatggcccgacggctgctagcacttccacggcagcctcggcgccaggcgcgcgccacccggcgagcagatcgcgcagcgcctcctcagccagcgcggccgccagctgcggacgcccggccaggcggacgcacgagcgcagggccgcgcccgccgccctcagcacgcgccggcggtggcgaggctgcagactggggtccgggccgcccgcggggcgtccgcgcaggctccgcagcagtggcacgaggtaccctgcagccacctcgcgcgccgcctccgggagcgcgcctgcgcccccgctgccgcgcgcctcctcgtcctcgagccgctgcagaaggaagcgcagcgtctccacgcgctccgcggatgcctccccttggcacagcgccccaagcagggcccgggggtcccggctctgcgagagcagcgcttccgcgagcacccactccatttgccgagcgcccgcgccaccggcccgggctcccaaaggaaggcgccggcgtgtgcgatgcgtgcgcacaggaccggccggcccctacgtgcgcgtgcgccgacggagccgggcgcgcggccgcagagagggggatcccagcccggcttggtgcagctcagcttcccttgggttcctgccaccaaccctgcctagatagaacccacctggtctcttatttttaggagaaacgaggccttcgttaaaagttaatgtagtatctacaccagcttcatcgattcctgattggaggttggtctgcccaggaccctaaatcaggcgtgcctgtgagcataaaccagttcacagaaggtgcacagcagaatcactttagattattttccaaacgttgcatgatgggcaccatccacaaagagactga

SEQ ID NO: 36217 - DNA, 3948 bp, Homo sapiens
tttaaaaagacagctacataatcttgggtcaagtgaacaggatgctatttttccttaaaattgttttattagatgcaatatttgcaagatacatttcaaaggtggagataggaggaaggttttgatgtcaaacaagtttagaaactatagcaaactgtagttccttcttagaaatccactacattctcagtatgtgtcatgctcctgagatatcctgcaatcaggtctgtttaacctttgcgtaaccctgactttcccaaactttgaatgccttttcaaaaagagatacaattctgattaataacaccatcattcttggaacacactttggaaacactagtatgaacaaaatatgaggcaaatattctaaggatataaagatgcctgtggactgagccttgagaactgtgggattcacaaggctggaagggaatacacgcgttccaggtaggggcgaagggaagactcctgtggcccgtcatgtggcgtcatgatgtggaaagcaaggcacagaggggccacactgcccagagccgagtgcttatgttgctgtgtgataggaaggctggtcctgaaggaaggatcagtgcccccttgtcaaagagaacctgaggctttcagtatccagttgtagaataaggagtggaattcggaacatctggccctcggtgtcttcctttgggggccctggtgatcacttccagcagaactttatcgcccgcaatgggttccttctatgaggtctgtcaatggggtaaaagcccggatggtgcgcccaatgtcagcccgaagccaccagatggcgcgcggaacccgcaatgcacgtgcgccagcctcgcgtttgtccccgcactggccccaggccttgggaaatgtgtctttccccagcctttttacactttaggaagctcttctttagagaagcatgtgaaacacccccctgcacaactgtgctcctcctgcccttcccctcctggggacacatcagcagcccttccctggtttgaagagtttccaagccgaggagtctcttgcatgtttgttctactggaactcgaagcaggaagcactgagcttccattttgtaacccacgatcctggtgaagacaatcgttagggaaaaaacatcttaaggattgtgtgttagggcaacctcatttctggcgtgaaaacaagccccgcaaacaccctgttgttactctggtgttctgactgcaaacacggggggatgtaagatttttacctaatcccaaacctcggccctgaagagttaatgatgttactcatgccactggggcacaaaagaaagacttgcatgttcgggtggttatggcttgcccagagcggtggaatgagccataaggctgaaggccaagggactcgggccacccatgcagtgaaataatcccccagaaatgcggtgccgggagtggaaatgaaagtaaagagaacagtcattccagggcattggctaaacctgactaaacctgactgatcatcaagcctaaagttctctcgactcccaaaactgcaaatctcagattttgggaggtactgcgtagaaaccaggaaatgacagaaatcaagcagttggaacactgttcttgtccaactctgggtcttaagctctgttctcattttcagttccaaaagcaatgaataattaataaggtagtttttgaatggaaagcacatttcaatggatgagtgatgatttccgaagggcctctgacagtttctgtttatttccttccttctttctctttttgaaataaaaccgtggaagtgaagactgaagcaatattcaaatatacaacagcctgcatgtttgacccatcagaaacttgcaccaataatgaaaagcaggatctaatatctaccttggcacctgctgtatgcctcacactctgttccgtgtttttatggaagtgatgtctcatttaatcctcacagtcatggcttggtagttggcactggcccaggtttttagatgaggactctaggctcctatgaggttaagcagctcacccaaagtcacacaactagtaaacttgagaactaggaattggaactaggtatatctgatttcaaagcctcagttcctcttcctttgcccatgcatttcacagactcatgggacctcatggagttagaagggatctgggagggcatttagacgaatgctctaaataatgcatgaatctcttttccagcattctctgtaagttgaaagctaaacaagtgtgaatgtgcctgaaatcaaaagctgaagctgaaaaagaagtcagagaaagacttcagaattcagatagagggcctaaaatacatgtaatagattttgttcctattttctctaaaagtgggacagatgtatatatttaagtctgtgagaaggccaacaatgcacctaaggaatgagtccagactgttgttctcttagcccagctcaaacgggaatagttgaagaaaaatgactaggaaaagaaggcacgtgctggtatggatgggatgtctctgatatcctgaagatatgtgcactgtaattcaaagagattcagagaaatgccactgtttcagcatacacatcctcaggtcctggaatgataaggcaaaaagctctgctctcccccaatactagggaaaggtaactaagtgagagcaggtgaccagcctcgggccacatagcaaggaggtggcagagctagaaatagaaccaagtgctgagtgtcttggttgtgccgtggtgctgctcacccttgctacctcacacatcttccgtcatgactggctctgtgtgaatttggaaactcaaaaccaggtttcagttttcattacatactggaaacttggccttggatcacaagaagttcactatgggggccgggcatggtgactcacgcctgtaatcacagcactttgggagaccaaggtgggcggatcatgaggtcaagagatggaaaccatcctggccaacatggtgaaaccccgtctctactaaaactacaaaaattagctgggcgaggtggcacgcgcctgtagtcccagctacttgggaggctgaggcaacagaatcgcttgaacccaggaggcagaggttgcagtgagccgagattgcgccactgtattccaggctggcgacagagccaaacaaaacaaaaccaaacaaaaaaaaattcactatggtttgtgaacctttcaagcaaatggagccaggtttctgtcatgcgtcgacccccaccaatgccaggagggatggatggatttgagtgggaatcaggcacaattccatcaacgtggtattgacatgtcccggagtgcatgctggcctggaaggacacctggaaacgggggccctctacaaatcccaggtgccgtggagtctttcagagccagtcagggaataacttggggagagagagagagaaaaggagggaatgatttaggaggtgtgcatattcatttgcaaatgaagttatggaagttgctagtgagatttttattggtaattaagtgataatgcctgtgtaaagctgctagagttggaattcctgtaaaatactgaagggactgaggcccttttgagaaatgtcttattgtttagcattttcagaaacaatttaggtttctgtagtatcttatatcctgtaactagtaactcctcaaagcattcttgcgaggcaggtcgctgggctaacctatttgtgcacctccaaagattgttcatttacatgtagagggtatgttagatgacacctctctctctctctgtgacacacacacacacacacacacacacacacacacacgctaggatagaggatcaaatgtccttcacatggcatggccaggtagagagtgttttgttttgttttaaatcattaagatcctgtatatgattagcttgagataatccagtttaattagtggaattagaggaattaggaagga

SEQ ID NO: 36218 - DNA, 1076 bp, Homo sapiens
aaaaaaaaaaattagccaggtgtcgtggcacacgcctgtaatcccagctagtcaggaggctgaggcagtagactcacttgaacccaggaagcataggttgcagtgagtcaagatcgtaccactacgctccagcctgggtgacagaatgagactccatctcaaaaaaaaaaaaaaaaagaaagaaagaaagaaaaaaagaattagcatttgaactgctatgactgctatgtaaaaaagtaatcactttcttcccttgctggctggcagaggtggccccaacatccacaaggctgggagaaagtatcaaaggagaaaatcaagaacctggccccagttcaaactggatagtaagcccttgattaattaataactgcctcttctgtaaatattatttgatattgagagagagactcacttatctacaaatgtgccttgtctgtagtgagaggtcagccaggacaggtaggtcagagggtgaagtccaaactaagcaattccaatgtatcaattttttcaagagcatactttattgttgttaacatataaaaagaaaatatgttaaattaatacatatctaatcaaaagtctaaaagagtagtgtgctcacataccaaccatgctggaactcagctcttattagctacctgttcatgtgggaggtgggtacatgtgaacatgcctgatataatgtcagggtgtgggcacgcctccaaaagttagagggtctgggctccaggaagtgggtaatgcagccctgggcactgggggaggagagtgaaaaaatgagccattagggtcagaaaggaaaagggagagaaaatttgggaacaggaaaggcgtttcattttaagcacctggtgcttaatccaggattttgtaacacatcctcactttttctggaggttcctagattatatcccctaaaaataccataagtttcctaagcccagatgatgtaataatccatgtttcatggacttccctctgccattggctggttgttctgttgttttctggagaataaagtgactatggagatcttgaaggtgatggacacttaaccaaggcctgttaat

SEQ ID NO: 36219 - DNA, 1258 bp, Homo sapiens
tgagcagaggagtgactgtgaatagaatgggaggcaggttcgtcctaagcagttctgggcttgagttttccttagtgattttgggggtccaagatgtcttcctttcaccacactatcccagccataacatgagagagaacagagcagagagagagagagagctagtgtgagctctggctaaccacttactggctcagccacctgggtaattcgctgcatcttttggcctcagttcttttttcagttagatttcattctctggaaccacatgatgggttgcattgtgtttcccaagaagaaatgctgaagtcctaacctcagtacctgtcaacatgaccttatttggacatagggtctttgcagatgtagccaagttaagatgaggtatgctggagtagagagggcccttaattcaatatgactggtgcacttactaaaggaggagagatgccgagacacagacacaggagggggcaggccatgggaagacagagattgaagtgctgcagctacaagtcaaggagcacctagggttatcagcatcaccagaagctaaaagaggcaagaaaggactctcccctgcaggtttcagagggagtgggtcctgctgacacctcgatctcagatttctagtctccagaactgtgagacaataaacttgtgttgtttcaagccacccagtttgtagtgctttgttcctggcactcctaggaaatgaagacagtgctatgggggaggagttgaagaccctgggctttgaaatcagatgtggatttgaatgaagtttcaatcacataccagttgatgatgatttgggcacatttctcactaagtctcatttctttcttgaaacctaagtggcccataaaagggaaatgatgaaactaatcttgttagaagggctattgcaaaatgaaatgagacaaggtgtgtatattagttaggaatgtttttattgaaaggagaaattcaacatgactcagtaaaaatgggtctttggtgtaagaattgtgggatgtctcaatccaacttggccctagattctaacattggcagctcttcatttttctttcctgcccccctctgaatatctgaacacaagcttcttcttccattcccctctctctcccttccattaaaccaggtgcctctacttttccattcttccaaactttgcctcctacagctttagccgcctggaagaaactaatttgaacctccctcttcaatatatactgcttgggtgatgggtgcacca

SEQ ID NO: 36220 - DNA, 1460 bp, Homo sapiens
agcactttgggaggctgaggcaggcagatcacctgaggtggggagttcgagaccagcctgaccaacatgatgaaaccccgtctctactaaaaatacaaaattagccgggcatggaggcacatgcctggaatcccagctacttgggaggctgaggcaggagaattgcttgaacccgggaggcggaggttgcggtgagccgagattgtgccattgcaccccagcctgggcaacaagagcgaaactttgtctcaaaaaaacaaaaacaaacaaacaaaaaaagctacttgggccagcttatttcccagagcctggccttgccctgttctccctgccttcttgtgtagctggattcttgtgaataacccgggtctgcccccggggacttccaccacgtgtgctatacctctgaggctgcacactctcccacccagtgatttcccatgggttttctgcccctaactatcctggatctaccccagccctatttagaccatctacctgctggccttttttattcacttattcattcatttcacaaaatacttttcggtccatctgccccacaagactttcagcttcttgccagctccccaacagccccaccctcaggcttatccctccctccctggaggctggctgcatcagaggttaccttcacccgctgccaggagcaaatgctgacactcagtcgatatttgttgactaaataaacacatagaaaaagactttttaaaaaattaccaccccttctagatccccagcccccgttcaggctgatgcaatccaaatttctctgcaccatgatgagttcagtgctggcagcttggtgatggcgcataagtaactaggtttcccagctctcaggcagccattcccagcacctctgtgagtttctgattttcaactatccctggggcttacaaatgctaatagtggctctcttcacattactgtaataatacttagcactcatgtcctgacataaaatcagttcaagtgctcccacaccccctggtgaggtaggacccttatagcatgctgctgtaaaatgagcagctgaaggtgctggggtgcagctagggccacacttggctttgatctgaaataccaatttctttttttaattgcttttcttccttgatacatgcatacaaagtgtaatgatgaaatctgggtaattggaatatccgtcacctcaaacatttatcatttctttgtgttgagaacgttccaaatcttctcccttctagctatttcgaaatatacaataaataattgtttagtcactctatggtggtatttttattttatttatctatttttaattttatttatttatttatttatttatttattttgagacagagtctcactctgtcacccaggctggagtgcagtggcgcgatctcagctcactgcaacctccgccccctgggttcaagtgattctcctacctcagc

SEQ ID NO: 36221 - DNA, 1191 bp, Homo sapiens
ggattacaggtgtgagccaccgcgcctggcagcaatgtgatgttttaatacacgtatacattgaggactgtttactacagccagcctaatacttttctccttgtctgtctcactttctttccttaaaggtacatatacacttatatgcacttatatgcacctatatgcacctatacacttctctttttctgatttacgtcagatgaatgactgtgtagcagagatcaagggtaacaaaagtattcctttaaatgcacagactgaattcaaggaaaagacgtgcttaggaagctgtgcctacacacgacaaaactgaaaatatactaccccttaaccacagacagttgctgagtgcactgagtttcagaagcctttaaaaaagatttcatcagtcagtcaaaggcatggattttaaatgcaattactgtgcataattagccgtttcatcttcagtgtcagtgaatttggaatttaatctctgattgcacaaaatagaatactaagtagcttactcaatagaagggctggtttcgttgtttgttggtggccagataatgtggccaaatcccttacagcagccatcggacaaaggttgaagagaaacgaatggagacaaggcactgactcttattagatgtgtaggtgtctttaaagacacagttcacaagtcatctcctggaaaattctgtcctcccctagcccatgccggtggagctggttacccccacctcacatatgtcatttaacacgtgctgcaccacagcaatccaactgtctccatgtctactttccttacaagattatgagttccttgagggcagggacttttatacttcgtgtttttacacagagcatattgcctggcccaccacagcattcaatagataaatgaatgagtcaatgaatgagccaccaattgaaatcaactagaggccagatttacaaaaataagtagtttataaatagttgttctctacatccctaaagaaaaaaatgaactatctgggctgggtgcagtggctcacgactgtaatcccagcactttgggaggccgaggcaggcagatcatgaggtcaggagatcgagactatcctggccaacatggtgaaaccctgtctctaccaaaaatacaaaaattagctgggcatggtggcgcgtgcctgtaatcccagctactccagaggctgaggc

SEQ ID NO: 36222 - DNA, 1971 bp, Homo sapiens
gagtgcaatggcactgtgttggctcactgtaacctctgtctcctgggttcaagcagttctcctgcctcagcctcccgagtagctgggattacaggcatgtaccaccacgcctggctaatttttatatttttagtagagatggggtttcaccatgttggccaggctggtctcgaactcctgaccttaggtgatctgcccacctcggcctcccaaagtgctgggattacaggcgtttgccatcggcctggtccagatttttatttttcaaatgaaatgagaagcttgggtttcactctaaacgttcttttcaactctgaaacccagcaattctgaatctctctacttctgggcaactctgtttccattcttccggggttcatgggagagaaccttcttcagagaggctgatgcaagagctccaggggaggggcactgagggcacatgaattgtggaacagaaacagcgatggttacagcagctggcagagtgaggaagcagcggtctcgggagtcccagcccgaaggcagatttcctggccacaaaagcaccaacggacaagactccaccaacggtgccccttggatggtggagtccagctgccaagctcactcaggggacagtggctcttttctcagtcactcatcatggcactagggattaagtgcatttaataacacccccactctgcatttaataaccctccaaaacccaaatgactctcctgcacattgaagctgcttaaaccattgactgtgatcaactgctatagcaactgcctaacagtctggaggggtgtgcacagggaaaacacctcaactaccacacattacgtgttcttgctgagagagagaaggaagggacgtgagttcaaggctccctttgctcctcgcagatggtacttttcaatgtaaaatatgccaagacgaatgtggagctcaagctactgggacagcgaataaagatgccgggaaaaggaggaaagagatttcacatgggcaacggttgacaagtctttcttgtttgtggcttgcagtgagcagtggacaggcattctcagatcaggtcagagagcaagtcatcaatgggggcaaattccagtcgggtctttcaactgaccgttttgttcaatgaatgtcacactgtaacaggataattggagggtttgggtaagctggtgagggaataagggcttttcctaagaatgataaaagcagagaggcagctctcagctctaagctggctgccctgtttctgcaaaaataggtcctttaacatggagaagcagaaatctaaaccttcttaaatcccctcgaatgttttgaatagaacaaacacctatttaatgaaagaaatacattttcaaagatcatagcaacaggacacacgagctgcttggtcacctaagtgtttttggaaaaggaaaagagctattcagcattaaagattcaggaatgtctgttgacatattaaggaaacaacctcaggggacagctgacaaggctccaagaagcatcaccaagggaacagtgacgcaaacgcattccgtttttacaggctggcaggctgccaggttccctcgcctgacggctgatgtaatgctaatccctatctgggtgagcgttgcttagatatcaactcaagcagctcagtcagttgcaatcaatagcaggatccttttatagaagatagtaaagggaaaaaatacatgtgtgtgtgtgtgtgtgtgtatatatatatatatatatatatatatatatatatatatatagagagagagagagagagagagagagagagagagagagagagagaaaaccccagattctggtgttctgcaaacctatacatcgtacaaaaaaaaaaaaacattatgcactcaggtgtctccatatggagtatagccagttgtctaggaaagatattgctatttcataagaccagttctttttttaaagcataactaaagaata

SEQ ID NO: 36223 - DNA, 4395 bp, Homo sapiens
gattctctcccttgaaaaacagggacgatgatagcacctccctcagcgggctgctgtggtgaggattcagcaagataatccacgaggcttccaggagatgaaggatgctcagtaaatatttgtgatgattattcacagagatgaacctaaaagctaaatgccacgagtgactggctggatgttacaatgtctggggaatgcttcgcagcctgacccttattccagaaagttctgtgagtatcctcatgacctcactgaacgtcagcgccgactgctcttacttaacaggggagagccacagactctgcagtgcgtggcaggcagggcctgtcactgtctactgttgtcgctgtggctgtagcagtggaggtggccgggccttctttcccacctccccttcttccccatggtcagccccgctcccaggctccgtctgtgcccctgcagctccccagcggtggcctttttgttcagtgcttcctcggcggctgggactcaccctgatttaaaagctccagacgtgttctcggcagcccgggagcacaggagtcaaagcaagaccaggagcgggttgctgagaggacgccacgctgactggggatcgagagggtggcttccttcaaacagagaaaggaaaaagccccttgaaccaatctgaatgtaaaatccaaaagctatggccaccgcgaggaaaacaacagtcatgatgcgggccaggaggccgtcgccgtgggaatgcagtcggccctgcgcatgtggtgtctgagcagggcccgagaccttccagggaggggagaaatactttttggctgactctcctgactctgtgtttcctacaattctacaacaaagatccaggaacatgagaaaaggaaaatgagaaaatgagtcctgtgatccaaatttaagccaagaacaggacaggcaatgtgagccaaatagaaatgaggccaagagtgctttcttggggccccagcttttttttttcttttttcgaatgcccaaacctgtttaactgcttagtgtgaactctagttctgggatacagttcactatgggaaaggaaatttaattagcactggcgacctcaccttcattcttaggtcaatacagtaaactggcatatgaatagtgatttctaccaattgattcctgaaggaaaagagagagaaaaggagagaggaagacacacacacctacacacacacacacacacacacacacacacacacacagagacagagacagagagagacaatgaggcacagagaaacaggcagagacagagagacagagagacagagagaggggaagagagacagagaaacagagacagaaagaaagagacagacagagaaagagagacagagaggcagagagagacagagaagcagagacagaaagtcagacagagaaagaaagagaggagcaagtgacatactttaaaaattattcttgagagaggtcaacctgcatcagctgcagaaatcaacaatcacttggcagtgtcagctgtaatacattcccacattgcattctgcacgggcattgactatcttgacccacactctctatatcatgttcacagtaacgtaagtggtcagatttctacaattaggccttgcaagataataatgacaagccgtattcgtatattgctttactgtttgcaaagcagttgcataattatcattacgtttggttcctcatgactgtgctgtgaggaaggcgttcctgttcccattttagaagtgaggacacaaagttacaagtgtccaagccagaacctgatgccaaatcccatgacatttctgccgtactgggctctgccatgccctgggaggatggccacctgcaaacacaacctttctcctaacagagagagaaactgagacgcaagctcgagtagcaacttgatggaatggcacagtggggaccactagctcttagaatacgtcaattttgattggctgaaattgacaggagtatctaagacaaaagatactccagaaaataaagggatcggggagggatgatggagaagtgaccttacggttatcatgaaaagggctgtgtgtcaagacagcattacacctagtgggaattggaaggatttagctgtactttatgtctcagaatgtgctaatgtgattacctcatattagctattatgtgtgccctatgaataatgtcatcccagtgcttctggagaataggagtggagctgcaggcccttcaaaacaatcctaggcagagtctgagtaatcctgcacatctgaatcaccagcaaaagacaagtttcaatttggattcagaaaatacatgatgcaaacctttctcagccctggaagggagggaaggcatgggaagaagcaggattggactggaaggactggctgtctttcctgcgtgctctccctttgacctgcttggcacaccctgcttccaaaatggcccatgtggttgacagtctgcagggatgtgaatagaaacccaagacgtcgggctcggtgcatctcgaagcagggccgcagtcttaagcacaagacaggcacattccgctcacagcatttctttctagtctgagcaaaatcttcccacaaggccaaaatcccaacggctggacatgaacagggcgtatatgtttttccccttccaagctcttttgttgcattttattgtttttcctacctagatattaggctgtctccttgatgcgaaacatccttcctttctagaatttccaggaagcacaattgcctcccacatttagatttaatgtaattcaaaccaaagtttgaggctatttctcctaattcaggaaaagctgtgagcttggcaacccaaatggaaaaagacagaaaaaaaaaaggatggtagtggatttgggggtgtttttctcatttttggttgtgtgtgtggcgtttcataaagcgtataggagaattaagctcaaaaagcaactgcttggagagatagaaactcttgtaattcatgttgtgcataatggatttggcaggcccaagcacagaaatttccagaagtgtttgcgtggcagcagttcttagccaattcacattttttagcagttctggccagctgcccagcctgcagaaaaagtcttgtatctccacaagtttggctggcctcactgacgagtttccaaactgcatggcaacattggatgagctgcttttcaagtgccaaaaaaactcctgctacttatattgttactaaataccagatgtgcttaatcaagagcgcgtggggccaaacctagggtaatcaaataacctatcattaacattttctaaaaacaaaaaatgcaattggaacaccagattactgtttttctttgtttgcttttacgccctattactggaacccctagggtgatatgaacaggacacgggtggggaggccggctctgaagacgctgtttacaatcacaaccctgcacatctgaaatatgtgtgagaaagtcaaggcctgcacagatttcctctgggctcctcacaaggaccctggcccctggcgactcccgcccttcaggggaggggccctgcaggcagaggctcacaccgcactgaaaaacactggaagtttgaggtgcactggagtttgaccttgaaagagggaaatgcagaaagagacagcagggcagctttggggacttggcaaattagcaaatgtgcaagagttggaagctgctgctgctgctgctgctcgaaaaatacacagagattctgaaaggctgtaagagacaagaggatgctgtgtggctttgttggcggccccaactgggctccgactggtagatcttgaagtatttcttaatacaaaaatctccaattctatttgggtccctctcattgctgtaatatagatattttgtaagttttccgggaatccgatgggaaaataaatgtggctggcagattctcccccttgctccattcaaggtcattcctgctgtctgggcctccagggacctgcttctccaaacctctgtgcctcccacctctctaatcccctctcccccagactcacagttctaaagagatgaaaaggacatctttcttaccccagggttgctgggtgaccctgatagataatgtgtgttggggtgattcgagagcgagagggaatattgcaaaatgaaattctatagaaggagatggaacctgcaataagaaatttcagagttaatgactcttctgaaactgtttgttatctgctttaagacaaccgtgtaaataaaggaataagagactcaacacttcgagagttgttttaagaaacctattgctaaaaatgtgttataatcccactgtacctcggatgccattgtgccaagccagactcagagagagaagatttagtgtttctctgttg

SEQ ID NO: 36224 - DNA, 3588 bp, Homo sapiens
tttatattacataactcaaataaacacagcagttcaggaacagttcccttggcgagggccaggaccatgagaggccgacaaagggcgtctccttcagccaccctggtcagaaatggcttctttaaaacaacaataataacaatacacagggacttgccagtccaattcagcagggtgtcttgaatacatcagagaggagtcgctctaattaggccttgtaaggtccctttattttctctagctaaggaaataaatcctaatcagagagcccagaaagaagcaaaactgacacaggaatggctattctcatgtgcagagtagggaaaggaagcccttccagtgggttttctcagcactcgagagccgctgtgaagctgggccagtgcgacgactgcttcttgggcaatcgagtagtggctggctttctgtgacttcagctcctcttcagttcagagcgatgcaggggccgccagccttctgggaagcattgggcagtttacatggagtctgtgtgaagaataataatttaaaacaaacaaacaaacaaacaaacaaaaatggttactaactcagtaaatgacctcaggcctgcaggcccaaagtctgaacaaaatcaatcttgaattgagagcaaggcaagaacctactgaaacctttttcatcagtgcccctaagtctccagggacagcaacccctatcatataccaggggccgagaatagaaataaaaattgtgaacacaatcctgagcatgggctgatggtactagctgccaacaactgccccattagtaggctatgggtacgtgctagggaacattttctctacgaggcttgcatttaaaaatatatctttcttcaaagctggcccggggagtggatggcgaggaagaagccttctttctccgtgcttattgggcgctaattcatcctgtgatttgctgcggatagcttacttctctgagcctgcgtttgctgtgtgagaatgactgagatcctgtctttcagccagttaatgttttagacaattcctggatgaaagccacgctccagaattcgtcccccgcagtgtgtttcctgggtgcccatggggccaaggaggacagaggacggtagctaagggtaaccctcactactaaaggctctcacctcttcttcctccttggatgtgtccctgaagacatttgtctcttggtttctttattctcaaaaggaggacaattcctacccgctccctaagaatgtttaggagtaatagctaacagaagttatttaaaagtacctggcaaataacattcaggaccaggtgctgaatgatccccttcctcacaccaccctacctaatgcattacctatgtgctcccctttcaaatgcattgctgacagactgccctatggggtgtaaggctattctgtacagaagaggtctctcgggctcctccagagaagtttgctttgcaggaaccgctgaaatccttacatgtccaaacgcatgttctgggtagaaaaaaacaggtgatgagctgtaaggtagaaggctgccaggatccacccatgggcacccagggtttggcacccctctttccagggggaagcaaaagtgaaccaatcaacacgacgaggtcaagttcaagtctgcctcagtaaaaccctggggactttcttcttgaaaaacaactgggacagtgtgacagctgtttaaggatgccaaagaaaagggtccccggggaaacctccccaagggctactctgcttgcaggagtctgtgataagtgacaaaaaaaagacagacagtgagaatagggcaagccaggcccaggtgaatgctctgattagctagtgatcggagtgccacaaagatgtaagatctagcagtgacgacaatcatgataataactacattgattattatggttgtcattgaggcctgttaaacaatagactgccttttagctgtggcccctctaagaacattttacccagaaaagtgtaccacattgcaatcctcacagccccttccgtggcttcatttggtatgcttacaaatgaaacacaaatcaggttttatggttgctagatacatatttgcaacaactttaaaatctggttcatgatgcaagttgttcctcacagcaaatgcgtggtgggacgtcagaacgacgacaaaggtgggaacaaaatctctgcccagagatgtgacgtgttggaggcgaaaacagattgcatttgcatggcagccactgccactgaaacaggctggagaaattccttttatggcaggcactggacttagaacccaaagacctggatttcattattggctcagccacctcccggcagtgttaactggggcaggttagttaacctttcagagactcgatggtctcacctgtaaactggagctcaggatacctagctgtcagggtggttaggatggtcaaagggcacccccaggagcatgataaacatgagctgaaacagcgaagtcggaatctgtatacagacatgacctgtcgcctctcggagcattaaccctcccagtgaactggcaggagaggtctcctgtcttacttctcggagcagaggcacagagctgggaagtcggcctgcccacctcccctgagagctggcaagagagccaggaatgggatgcacgcacatgccgtttgatccagagctcttgctaccaggcgcatggcctctttaacagctcaccggttgttggatttgcttccattttctcctgggcctaaatcgttccccagcttccaaggggcactccctctttcacacttgagggtaccacccagggaactgaaggctcggaaagagtagcaacagggagtaacatgggcaccagggagaaggaggcttgttatattctttctagatgaatctccaggctgcggcagtcccgggcgagtcccaggcctgccgcaaaacctgtccgccgtgggactgcctcaacatgctgtttgggaagtcaagatgttcagtgtaaactttgttctcccttccctttcttcggggattcacagaggcagctcttccagggccttcctctccaagtctttctggtgctgaaatctgaggtcacacaccctggaacacgacttctctgtcagaacaagcccgtgaagcggctgtcctatccgagagggctgtgcagcgggtggtgttggcccttgagtttgccatggtttgggtttctcagtggcactatttttggcagatttttttttccctcgctctttatcacaagcccgtcggggaaatgacagcggaattgcaagcttgaatggacttgtttgacaggccaactttcatcctgagcactgctgctgacttttaaaaaggaactctgagaggaggatagtaatttcacactaattccttgctgtaatttgcttttgagtataaaatgtcgtgtttcaatcaccctagctgcgtggtgtaagggagaagatgggacacacgtgtggttaatgtgtttgtaatagacacacacaaagacaccactttgctctgaagcaacaacacaggaaacactcatccacacttcaagggagtctccaccaggtacaaacaag

SEQ ID NO: 36225 - DNA, 5916 bp, Homo sapiens
gcccccagcacagtgcctggcactcagcaaatgtttcttgaatgaatgtgcttcccatgttgggcagatcatgacgaaggcaatagcagggcccagtgtgtaatgcgaggacagcaaaaagggaccctgctttgagaccagagatgcttcacagggaagccacatctggagcccttcctgataagctgggtcaactgggaccgctcctagacagggtgtttgaggaggtggtgcttgctttaggcagccccagcctcattctgagagcttgttccactttgaggatttctctgttttccatttccaaatctttatgctatccctcagttacacttgctcaaagggtgattgctagcagtctccgaagataggctaagaggtgtgggtaagcggcagtgtgctggggttggggatggggggacagggcattgcccgggctgtgtgggaggcaggagcgagatgatgaagattctggactccaagctggccccagatgccagcccaccttgtgtgatacactgagagtgcctcagtttccctgcctgttaaacagtaatggctccttcattgagttgttctgaaaaatcaagttagtacaaaggaagcacagaaagtgtgcctgacacaggcaatctctcactgcatgccagctcctggcatttggaatctgaagatggaatccagtctgacttccttcactcgcaagttgtccaagtcacctcacctccccattcatgttctcatgtctctgagatgaggataataaggctgaccttgccgggtgttgggagaatcagataatcagagagtggagtgagtgcattttgcaagctacaaggtgccttcccaagggaagcgtgaagtcacctgggtgaaggtattgggaagtgaggccctgtcacagatcctgccccacaagagctacccctgtaaggaatcaatgactcggtattaaccatgcttttaatttctgtaaagtgatgcattgacatccacctaaggccctatttgccaacctaagccaattgtgactcacccgttgcaatggttaactttatgtgtcaagttggctgggctgtgctgcctggatgtgtggtccaacattattcagaatgtttctgtgggagtgtttttgaaagagattaacatttaaatcagcaggctttgagcaaagcaggtggccctccatgttgcaggtgggcctcatccaatcaactgaaggctccagtagagccaagcctgaccctaggaagagaattctgccagtggacggtcttctaacttgaactgcaacatcatctccctgggtctccagcctgctggagattttggacttttcagcctccataataatgtgagccaattccttaaaatgtctctctctctccctctcttcacccatccctccgctccgcatgcttctattgattctgtttctctggagaaccctggctaatatacccgtagacatctggagtcctcagataactttaaactctacactctgacagtcacagtaaaggtgaatttcgcaggggtgccacttgcaaacacagctagccggtcccgagcccgcacaccctgccttgcttttccttcccatggaaaccaccctaacagctcctgccactgtcccactctccctctggctcctgacccaccccgagggtggccctgtggtcctgcacgctgtgccactgtggccctgcacgctgtgccactgtggctctgcatgctgtgctgtgttctcccaggcaactgtgagaatactaaatctttcaactttctccatctctctcccgacctcgcctgggcttcctgcacctcctccaaggtaatgtgatgagacagactgtgattgcagcccagtgccagcgaaactgtgggccagccctggcccagagctgggcaagtgagttatttgtccctgtcacgtggtgctctgccagctgcgacggtgctattctatgtgagatctggggctgatagaaatgatggcaaacttcttgagcagcttaggctaaaagaattggtctttgcataaaacagaaattgtcatcatcattataaacactatcctggccctccagagagcccagatgagctgtgttcttggtgaggacaaatgtccttccagaagaggggtatttattggctcttcaggtcccagagaagtcccaatcccccatgcaggaaggattccagaagcatccatgtctgaggataggaccctatctcagagcagagctcgctcgctgcacctaggggaagaggaggacagttgctttccagaaaaaagttaatttaccctgagtgattcataaagttgcagaatcacagaattacagaaccttagaatttcagaggctgaaagggatctaacagggcatccgggtccaatacccctcattttaagcaagaaaaaaaaaataattccaattaaaatacagccctccactcgtctgcagtttctatatagagccccagatgaatgctaattagaagactggttggaagaacagctttttcctacaaccggtgttcattttgtgggatttctcactgttgattaattaatgtaagcatccgtccattcacctgtttgtctgttcacctgtctattcattgctgcatccattcctcaccccagtaaaaaattgaggcagttacatcaagaatacagacatggtttgctctccctccctcctccttcctttttgtttttctctcccatccaggatgaagacgagctagctctgcgcatgtgtgcgtgtgggagaaaggccagttgcagtcagtgtcacggtgctgtttttgaaactctgcaggtccctcataggccggctgatatcacccatgccaggattgcttggccttgacagagcctgtgttagaagggactatcatgaaggtatccaagatactaaagggctgaaacaagcccctctcttgtcttcacagtatcttccagtggcagacaggaggccactggatgaagctgaggacaaataaatgtcaataaaccaccactgggagctgctgctcccccatttcccgtggcctgcagggggtcactgagttaaatgttacagctgattgtgaaagggacctggtgaatccatgatcaataatgacattggtttttacacgagctaagataagggtaattaaatcttgtgcttcaggccatataaactgatctccacaggagggcaagaattaatttaattccacacacacaaccccttccaacccctctgacagctttagtataatggactcagtgcaggatggggaagatagagcaccaggtattaaccaccacacctatcgggagcttgaacttgatgggcctcgtggctgatccagggcagcaaatccagagctgcttacagcttctctctgtgctgggtttattacatacaatctgtacaggggctgtttccacacttaatggcagtcctgaatcactatctatttcccatccttgcctgcaaaacagcaacccagagctagtgctatgccgtcaataccgggccccataaagccactgctgtatagatttgcctttttgtgcatgtgcgtctgattcacgagcactttggcagccttccaggcttgaggagaggaaaaaaacatcctgagcatcccaacagcctcattttgatctgtgatactgagcaactcatttccacttcacaggctctgctgagctgtgccacagaaagacaaatcccagatgtggcaggggtgggaggcggtggagggagaggggctggctggaaggaaggagggtgcaggagagggagggagggagggagggccaagggaagggagggaagatgaaagcagaaaagggccacatttattaagctgtttttcttttggtgaaaagaagcatttatcagtgatttcatatatcatgtgagaggtggcttcctgccaatttccaagaatccaaacaacccgctgacatcatatgctaaatatagctcaggctttgctttaggtgaacaaataatgccgctggacaggaataggttctcttcagttacatggttattatgatcggctgtcaggcttgtgtaatcaaaagaatcatgtccagttccaaggaggaatggtgcaaagaactcatcaaacaatttcgggagatgactgatgaacccccattcctcctgccttcccaggtggccggctgagcctggctgctggaggaaaggtgggcaactctgttgttgcaggtcttcaaagccctggtgtgtgtgtgtgtgtgtgtgtgtgtgtgtgtgtgtgtgtgtgtgtgcgtgcgctgtatttccacctctgccctgcccatcagaaaaggtggctgatctctccaagggaaatgcgtagaaggaagacagaccttcaaactcacagatatggtgcaggagctattcatgaggctggggcaggagcgagcggggtggggttggtggcacagatagttcaggcagtctgtttattctgcaagcattcaggtaagggtgcttgtctgaaggcaatcggagagccatcttccacggctcttgggctctggtacttttgattctacctcccatagcttttgtgttgtgcgtgtcctgtccgggactggtgcctgtcattctgtctgaagccacctgaaagattaagattcgtaatgagacctctccctcctctgccagcactctccttctccctgcccactcccccaggctcacactggggagacagggagcttgggatgggtttgtaagtatttggaggaaggggcagcagtaaggagaagagaaggacgagaaaattagtgagggagataaggagccggtgcatcaaaatagctgctggaaggtgttgtatcccttcgaacatctgcatgatttcccttctcagtcagggatacaatagaggttgttactatggaaactggtgtaaaagcagcacagagaaaggagagggctggatataaagaggaaagagtaaaaggcatataccacttttaaatcatcaaagaggaatactatagcacttcccacctccaagaggaggaaataagtcactgagcccagggagggttgaatactatgatcatgggaggggtcagagactatcggacaccaccatcctttcccctggaagcctgtgtgttgaatctgtccactgctgtaagatcgttagccagaaaagaacgtccaggcagttgagggtggtcagcttcatggtagatggcatgcttggctctgctcggccacggcctttgggaatggccttggagggagcaggccatttttctgtgtcacggtttcatcacctgccttcctcagaggaatgacgaagcaccttgctcaagaaagaaatgctagtgccattcaaggcaaagaaaggacagagcttcatgtgctctgtgtgcagagggaaaaaatgtgagcaattccagctggtgtcctcagcatcatacccaagaggggccacggaccaggcagaggccaaagtctgtgcgtacctagccagtttcactttgtttcagtgtgggtattagtgggatgaaatcatttgctcaggctgaggagagttttgacaagtcattggtgtttcatgcagactcatacacgcaatcctgtagaccagtctgtccgatagaaatatgacgcgagccacgatgcaatttatttatttattattatttctatagagacagggtttcactttgtcacctaggctggagtgcagtgaggcaatcatagctcactgaagccttgaactcctgggctttagcgatcctcccacctcagcctcccatgtagctgggactacaggtgtgagacatcacacccagctaatttttaaattttttgtagagatggctggtctcaaaatcctggcctcaagcgatctttccacctcggcctc

SEQ ID NO: 36226 - DNA, 2490 bp, Homo sapiens
aataaatattcttctacaacatgatttttactgactacataaatgatattcctttatataatgatgtataataatttacctaaccaatcttctattgtaggatttgtaggttgttgtaattgttcatattataaacaatgtcatgattaacatacttatgaataatacctgattagtttcttataacaaatttctaaagtaaaattgtattaaaggagatatatacacatacatgcatatataattttttgatagataaaactaaattgcctccagaaaatttatactaatttatactttcattagttcaagtttttgaaaacatgatttagaggcaaatacaattatctctgttttatcatttgggacaattaaggcagaaaccagtatcgtggtgagggttacacagcaagtcaataggaaagattactttgatagagataagagatatcttcttacatgtactttacatatattctcatttacaacaaacctaaaaaggagttattttttaatccccatttccagataaggaaagggggctcgaaaatctcgaagccctgacatttctattcattcattatccaggctgtctctatgaccacagacagcctgacaatccagctgcaatgtagtcatagaatcctagtgtgtaactcatagaatcctagtgtgtaacccagtactaccaacaccagataaatcaatccttgcagaaacaaatatttaatttttaaataagccaacaatctgaacattcactgttttgataaatgcaacctaaaagatctcgtcccctggatttatttttcaggtaaaaatagctccatggttatgccttcttaggggcttggtgggagggaagggatggggttgaagaagagaaaaacaacttccttggaggattaggcaaggtgtaagagcatgtcttccaggtctagattggcagacctcacgctttgactcagaagtagagaatctgctttggtttcctgactgggttgccttgtttttcagccacagggcaagaaacatgccacagcaatgaaataaaggtgacatgtcataatgagggaaagggagttattccacaggctgagtcaccgctctcctgcaggtacagaatgatacagcctacagaaattcagagcagactgtcagactgtgggattgagtaacaaagagaaacaggtctacagatgacctagcatacgcttattattttgaaatttctgaattgtaaaaaatgagaatggtgaagtcttaggtagatctaagttcattcttgcaacaaaaatcagttccaagtttgcctggaagtgaggcatctaattcataaaatagtggctatagtgacagttatatatttgagggaaacttatctataacttccaactaacatacatcttggtggagtctgagttctacatttttctgctttcttcctcatcaattgtcatggttgacatttgttctttgaaaagactgagtgccaaccatgagctggacagcccactaggcaagtgcaatgacaaaagaaacaagcgttaatcctgtctagccagagcactaaggaacctgcttattctgcgaatgcctcagcaaggtcctaaaggagagcttccactgcctcctaggtgggtgcccctgctggcaagttaatcattctaggcctcagtttcctattctataaaatgggtgataatagtaactataaagtaagaaataaagaagaggtcactggacacttggcctctggcaaggatctagaaatgtcagcagcataatcctgcttaactcacctccactactgttttacctgctgctctccaatgctcacctgctctaattcacactgtagtaggaagtactttaggtcaggcatcagggggcattgctttagttcagactccagcatttactatgtacctgttgtatgatcttaatactaacagcaatatagtgatagaagcagctaatagccaaccgttataatcattactttgtgcttggcattttatataaatttaatcctcatggtaatttactgacatagggaacattggtctctctttttataggtgaaataagtgaggcttaaagagatcttgtaatttggtcccacagcttaagtgtgaggctggaattcacccaggaaagctgtttccaggttctgtggtcctaacaattactctgccttaattttcccctgctgatatttctgcccataagcctcttattatttgattaatggtagtaaagaatatttttaaaaactattgctcttcagcatcctttttgagggagaactttccttcccctattccatgggtttgttttggggctgtggcttacaggaaccctctccagaatcatccgatgtcccaatcatacgtggagaatggccagaatccttccctttgtactgatgtacacacaacacgagaaggaatttttctactggagttgcttagctggagaggccaggag

SEQ ID NO: 36227 - DNA, 16331 bp, Homo sapiens
gatctcggctcattgcaaccttcgcttcccaggttcaagtgattctcctgcctcagcctcccaagtagctgggattacaggcatgcaccacggcgcccagctaatttttgtatatatagtagagacagggtttcaccatgttggccaggctgatctcaaactcctgacctcaggtgatccacccgcctcggcctcccaaagtcctgggattacaggcgtgagccactgtgcctggcctatatttttttttaataattgcaaaacagacacaaaagctaattgaattacctgagatgactgcgcaagtcccaagaacatctggagatttcctgacctttattctagtggttttatctgggggcagaactggacaattctgaggtgttttcagaaaaccttgaatttgcatctctcagcatagttccctctcaaaggtctttgtgaaggagcagagccactgaaattgcattgctgctgtgttaaaaacagccacaggaaaagagcaagaataatttcctaggaattgcatttcaacccggaaaagcttccagattcctcagtaacatatataaagagcagagtgcattgcatgatttccatctcaaacttctaaatggtttttgtgcctattatctagaaagaaaaatatgttggtgaaggaagtctttgggtagggttgtgtctaggaattcacaagcctgaagcaaggcttttttttttttttctagcctcctatccattcaccggttcattcacttttaaacaatcactaaaactattacacaatacttattccacaatctagttgctacttctggtagccagcaccctgcccccccaactccaaggctggtgatggagaaatagtttaatgtcagttttttaaagtgacaggggtcatgctgttcattttttgagaaaatactgcagagtattaaagggaataattaataaaaattagcagttaactaattgggtagaacctcaggtgcacaacaatgctatgatcaaagaaaaacttttttcttcaaatttaaataaaagtttcttgatagaaagtaaactcattttcaggcagtcagttgttaacagtactctgggcagttcccataggggcatgtcctgaggtttgcttaataaatacatttttattagcatgcaccatccattagtgctaacacagatgcttcttaaacacgcgtgtttacttcaccagcacggaacatttggcttattatagctgcagccaaaaaaaaaaaaaaaaagcagcatcatgatttccaaaaagggagtgacatttgatttggggcagctcttgtcatgcgccatctccaacttagaaaatccaccctgtacagcccggcccgcgtcagggacccttgcaggcggcagccacggctgctgctgacgcgcgtttgatcttttctgggccaccgagggctcgccacacccctgctctggcgcgcacgttcctcgctcggcctcgcccagcaggagccagaccttttactttatttggttcaccacgcggtctctgctccagagagcgcgccggcggcggcgcactcgggccctcgcgcgcactcgcacattcttccccgggaacgcgggcggggggcgcgaggaggtggccgggcccgggctgcggtccctctaattatagcccggcagctggcgcgctggcttggcctggcgctcggggccaggactgggcggcggagcggaggggcggggcgcaccgggccgtttcccgtttccgggcccgcgccccgccccgtcccgtcccgtcccgttccgttccgttccgccccgccccgccccgccccgcccggggtcgcgcggctccacgtgcgcagagccgggcgcgcggagactgcgctgctccagcccgggaaaagttctagaatagaggcgcggcgcaagtcagggggccgccttggaaaccgcagcaagggctccttgtgggctccaggctgttggagagtgagggagcctcctcccctttccttcccgtggagtaaacagagcttggcagggctggaggctttcttccttttaaaaagtgccattctgaacaacgatacaaagtgaaaaaataaattttttaaaaaagaaagggaaaaactacaatttgaccattctgaccagcctccttgttccaactggcctcttgatttgtataaagataatggggtccggcggcccccttgatgcatgaattgcacgctgggcataatgaacttattgtgcgaaagcactttggacttcggactgtgttcctatgtcagaattttactgtggtttgtaagataaactggaaggaaacaaactcgtggttaactcttgtcaatacgtgtcttgaaccaagcaaagtgacatttcctacctgtggctttgactttaagctgcacaaaaggtaggagctagcctctcagctgttcaaagcctagaatgagatgcctgcttagtaggtgttaaattataacagcaacaacccatatggtgcttattaggagaatagtattccaaaacttctctaatgactgtgaccctcctgtgaaattctgatttcaattgtatatggggtacaataaatctttatcttttatcaccagaaaagctaattgaactgctgtttgcaggcagaaataacaaaatgggggtaatgggctcttagcctgggctaagactctcaacagcttttttctgttttgcagctcacacatacagtcggctcaggcagacggcccaagacaaggctgtgccaaagaaatgctgatttagtctgacccagacaatctctactcccacatgtcacttctctgcagaactcttactagtatggcaaatactttaaaaatcatacaataaaagaaggcaaaacctcagtaatttgaggttcacttttaataaactctttccatgcattaaaataaattgaggccctgagctctggcgaaatgtttccgggtttttaattcccaccgcccccccaccccggaggcataaatagccacatacgcaattcaaagtactctatttgaactagtataggaaagatgttttctatagatattgcagataaatttgcaatgacttaaatatttatctgctaaagttgctgagtgcctccacaacaaaaccgaactcattttttgtgcacgatgggcatctgaatgctacctgatggtgatgatatagaaatactaattgctaagtaaaagtggtaagtgatgtgatctacagattatgtaatgtagttcatttcccccaaaatgtaaactatatttagaaatattcaaatgtgacattattaccctatacaggatgtcttatctcagcatcaagggcgtctgtagagctgctggaggaggctctttagattacgcaatctaacttctgacagcccattcaaaggatgagaaccggtgccttgaagctctcaatttaaactaggaatcctgtagtctagtctctagacttatctgacctaggcagaaatcatctcctagaggcttttcatggctgattttgtgatgttttacttgcactgaagatttattattccatgttttgagttagtgttatacagtgccattctatatattttccacataaatgtttgtcttacagaagaaactgtttataccattctaatagggttgtttaataaggaaattttactcagttgggttttggattaaaaataaaagaacagcttttaagatacaatgtctaaatgattctcaataatgatctgtctatggtatagttactttttgtcctaaaataccttttctgtgggttgtatggattgttttatgttgtgccaggcagatgtgcataattttctgattaaaaccagtgcaaatacagacttcatattctataatcttttaaagagacaagttacacttcaaatcaaacaatcagagagctgtttcaaatcaagcattttaagttaagttgtattgacatggggagggagcagatgacacacctaatgagttaaaacaatgttcactgttaaattaggtataaattaatgtaataactaggggtagtgtgggtatccctgacaaattatggatttatctgaggattaatggaggaatccacagataatccataaatctacccattttctatcttctaaccgcttagcgagtaatttataaattgtctatttgtgtgctttttaagttacagtgaggggttcagacatattaaggaaaatgcaggctgtcaagagaaacagcaacaagggatctatagagtttgtaatctggaaagtcacacccgtaatttttatttgattgtagtaccattgctgtcagaggcctaaccagtggcactgaaggagttaaaacagtccccacccccactcccgatttctagaaccccacgataaattgggtaaatatgtattccattcattggtgcatctgaccttggtctgtgacagaggaaaggcgtgtcttctcatactgttccctatgaacaaaaggcaagcaaatgagggtgactcaggacttctcatggcctacacacaactgaacatttttctgaatgattccacgtatacacttaggaatcaggaagagaaacattttactcttcactaaccaaataaaaccatctataaatcatatgcaaaacaacttttgagtaaagagggacttaaaagtctaggaattaaaaaaggatttccatagtttccttttaactctcccccaactcccctttggggaataaacaaagacatctgccacatcaagagtctggtttgttttcttaactgaaaacgaaatgcagtcattaaagtatatctttgggaagaggttttgaaatgttgagaattacttctacaagctgcactattttcaatttcactaaaaataaaatttagcatttttgttacaaaaacatagttcatcctatttcttttaacctagttattacatgaaaaattgtttatcatctgtaacttgctaagaatatggtttcttgaaaaccttaaatggactaataatgaaaaactattaaaatatatatagtgatgggcccctcctagttaccagaccaccctagtgtaaatatattcaagtacacattcactgttgctgtttaatttaaaacatatagtaactctatgtatatcctagcctccaactctttatgagtttcacaacttcctttcatagagaagtctgccaagccattaatcaataaaaagagtaaaagctgcaacatctaggaaatttcttattatatgagagtagccagtaaaatgtgtctcagtgctttctaccttttatctctatttataaatttaagtttcaggatatcaataaagctcatacatggctttggcttttttcattcctaagctttccaaagtataaggctttttttttttttaaatcccttttgtctttagcgcatttcctatggcccaacgtagctgttttattccaaagcttttcaaagagcagctccaggtcttgagagtctttccagtgtcgtcactatcttctctttccaatctaccattgcagaatggctggttctgctgctagttgaaaaataaacaaatgctttctagccgtactttgttcagctcttttatctgtgtcccctatccagttgccctttccgcagtccctggcacttctattttataccatcagttgcctttttgttccatgtcttttatctcctgaagttcaggcaaaccccaaccccaaacccacacatcctttagtcacattgccattagtgattaaaacaatagccattctaagcttgctttagaaaattaaaaaaggcctcagaaaatgttcagtgctcccaattttatttttatttaatgctaaaagttaaagaaaaaaaggtactgtaaatctgacaaatgacagaattcaggtgatatttccatagcgtgattttaaaatataataatgttggtatctgagattacactcacttcagttgacatgagtttcatcatatatagaaaaagtatcaccttcaacttaaaaaaagtaaaggttaaaaggtggcacacttttaaaatacttggtggccaaggaaaggtatatagtaaaagttgtaaaccatgtgtatgttctcataactttaaatgtgaggccacatgaaagacagtacatctgttaaattctataaattgttaaaagcaaaaaagggaaagcttcaacaccccatcccctaatattttgagtattaaaagcacagctgaaatattaggatttgaaatctgatactgcccatgtacagtaagtagctttgtgacatttttatccagctgtggagaatctctgcactgtcatcaggtacaacaaaagatcaaacccatgtcccgatgttaactttttaacttaaaagaatgccagaaaacccagatcaacactttccagctacgagccgtccacaaaggccacccaaaggccagtcagactcgtgcagatcttattttttaatagtagtaaccacaatacacagctctttaaagctgttcatattcttcccccattaaacaccagtacagagaaaccacaggttgccctttccacagctggatagacttatccaaaacggcaggatggttctgtattaatctttttggaaagcatgtctgtattaagattgcaaaacatacagatagctaccacaaattaggtcaaacgactgatcaagttgtaacatctgtgaggtcaaattccaaagtgcctagatacacatttatacaacagaccataagagctgaattctttacaaatgtctttatgggcatgtaaaattgactctgcatttctgcatgtgtgcattcacataagagagaccagtctgcactgagtcatatatactccaacttgaaaaagtaagtgtaacaactggttaatcatgcaagtctgtttgtaatataacaatgactggtaaaacatgaattctcgcacagtagtaataggtgcactcattaaaaacactacggaaaaacactgtatttggtgcagtatctgattttcaagtgttagtaacttgaccattaaaaaatagttttgaacaatttaaaaaggaaagacaaacatataactaaaaaagaatccaaagttggtaaaaatctgtattttcaaatgtaaatagaagctaggctgtgaaccatacacataaattgtagaccttgaagccataattcagcctaattataaggccaagttacaaacacctgaacgtaaggatttaaaatagtgttcctgtcaatgttaaatcataacagcacaaaagaaaaaccagtatcactgtgagacaactatttctaataattgatgatttattggttttaaaaaaatcattttactgatgcaaaatagtgatcaaaagaaattagtttacaaaaagacttctaaaaatattttgagaggtggggcctgtctattatataaaacccttaatttctttaatttccactagtttatcatttttttccagaacagtattattcacttggtatttcaaacacatgttaagaaggaaattacaggtttcctccacccacatttgggctgtcactgatatgcccaagggcagtcctggcagcaccacgcggctgttactgtcattgtaccatactgtattcagcactcactagaaacagggtataggtgatagtatcaacagcaatagcactacaggtaaatgataaacaaaacaaaacagaaacaaaaccaatcccacaatctccaagttcacctggactgtaacttctcttgcaactctttcaaaataaaggacaacagcaacaacaaacagacctctagggtgtttaaaaagatgaagtggcgctgcagagctgggctctgctcaaagatggcagtgccatcttgtacacaccaccatccattataaccgccttccatcactggaattgtatcttatgtaaccaactagcatgcagcattgtaatcttacaactgatcacgtggacagtgaacagcggtcaactttgtcttaaaaaaaaaaaaacaaaaaaccccaaaagaccacacaatcctgaaaatttcccagcagcactctcagtcatcagtatctcaggaactgaacttttgagcaaaatagagattcaaaatccactttcctactcctctgaggacaatgtttcagggtaaactggtggtatttcccagtggcatgcccacttgacaacatgcccgttcgatcatttcctttccttctccaccacttggcctccggcctgagaaaggggccagcaataaggaatgacagacagtaaggcaatcttacaatgtcagaaaatgtatttggctttttttttctttttaaaataagtgcatacaaatacagctagaagcatttctgatttgccaagtgctctaaaaaagcagcgcaagtcacagcctacatagaacggtaactgtcaccaggataataaagcacaaagatatgctaataacgttaacaaaagaaaaaaatgtctttataagtacataccttttgtcgtcaaaaaaaatatagaaacacaatgtattcaaaaaaaatcaaaattatacagccatgtttatgaagtctacatttcccttgtcttggatatatatatatatggagatatatatacaattcaagcagttttaattaagggtaatcattgggtttttctgaaaccggaaaagtcacgagtctctctcttttttcactttcacatctccagcaaggatggttgcaatttccccttgcataaaggcccaggggacattggagcccacaagagggcatttttccccactgggacaatagacctctccactagctccctgctgtttgatgctttgtctggagcaagggaagcagaacttgtgcgaagggacggacgggcactgcacaaaatgggtgtcctccagccgctcgtggcagagggtgcagcacagcggggcactggttgccagagaggagtccgggaggctggcagggtgcactggctccagtcctcctgtgttgcctgctccctggccccccacctctctggggcccagccttctttggttcatagaggacggagagggcggactgttgctattcctcctggtagtggagtgaacctggttggcatcttttgaggcatgactgccccctgcattgtctgctactaagatcagggctgccatgggggactggccattctgggccgcttcaggcggtgtggtccggttggaatgaggtgaggcagtgggtggtggcggagacacaaaagaggatgtaggagtcatggggatcttgagcccctctgtggatgtggacagccacggctgggcctctccgttgatcttagggggcccgacttcaccttctggttctggagagggcttccttttccttgctgttcttgcaactggaaacacaaagaaataaaaggaaaaaggtaacataagtggcggtgcactgaaagagatcattctcttcctaacccgaaacaaaagtcgttacagaattcctcctctctaaaagcacagacagaaaatactcatatacgagtttcaggtgcacatgcaacttaaaaccttcaggcgtacgggattctgaggcagcagactgatttaaaatggagccactgaaaatgacacgcttgtaactgcctgtttgtacacatgcacaaaagtaccctcgtttgcactcaacatgtgactgctaatgtcccccaataggttaaaaggtgactggtgccctcatgctcccatccaagaatgtgctgggaaaggaaaaccccgtgtcagagcgtatcagcccagtctgactcatctctgttatgctgcttcagcacatgaacacgttgccaccaagcactggttccgcctcaggcagatcaggaagtggggtgtttgttgtttctgggctggggtaaaatggtgaatccaaagaaccacccttcctctgctctccgtccccttttctcccctagaccccctcacttcacagccgcccctacctgctttagacccgttggccccgttggcctcgaaacccaacaacctgcctgcagtcagggccggctccttcttaaacttgctctcgaagggccccgagtggccgtgctggtgcagcgccagcagcgtgtcgcgcacggtcttgggcctgttgacccagtcctgctctccagacccgcggctcttgcccgcaccttccgcgctcagctcggcggccccggccgcggtggacaggctgtcggccgggccccggtgcgcaggcggcggcggttgtttctccttggctgccgcctcacgctgctcgtgctccacggcagcgctgctcgacacggatgccggccgcttgtgggcgcccagatcggtgggctgcgcggagcccaggctggcggccgcggttccggacaccgcggctaaggaggcggcagcgcggccgccgaggccgagcgcggtgggcagcggcgtggccgagccgttcatgagcggcaccagggtgggcggcaccgcgtggccgcgccgcgggttcgggctctggcgattcagctcgggcggctcctctagcttggagaagccgttgggcaccaggatgccgttcacgggcggcggctgcggcgtcggcggctgggccaggctcgctgccgggcggctgctgccgaagtcagagccgaggcgcgggggcctctcggccgcggccgccaacgggtagcgctccaaggcctgcggcgcgcgcggggccgcctcggggccgccgtggccaagctgctgctgctgctgcaaaaggatgtccttggcggagagcggcggcggcttggcggcggccgaggccgcggcgccgggtggggagcgaccctccgggaagcagccgtgcgcccgcttgagctgccgcgccgtctcgatgacgaactcgacgcggtcggcgccctcgtagttgacgcagccgcggcagacgggttcggtgaagtcccagatcatggcccagggcatgcggggcaggtcacacaggtagcacgactgccgccgggacgcggccgccaccgccaccgccgcggccatgtccgaggagcccgcgacgccggaggaggaggcggaggaggaggagggggcgccgccgccgccccccaccggcaccacgcgcgccctcctccccccccaaccccgcgtctcccccaccagcggcggcggcggccgcaaaggcggcggcggcggcggcaaagcccgcgaaggctcggcgcccgcgcagcgcccccggtgcacgaggggcggcgggcgcgaggtgaggggctgcagccgcggcagcagttccccccggccggcccgggcacgggcgggcggcgcggcgcggcggggcggcgggcgcggcggtgggggctcggccggagccgcggcgggcctccagaccggggcgaagacgggccgcgcgggcgcgggggagcgcagcaggtcgcggcggcggccggcacggagtgcggggcggggggcggggaggccgggggggcagggggcggggggcggccgccggggcaggctcagcccgagcggcggggcatgccgcgccggggtggcggcggccgggcggcgtggagctcgggcgcggcgcgggccccgggtcgctccgccgctctctcacagctcctggcgtcgccgctctccagcgccagcgtcagcggccagcccgcctcagctccgccgccgccaccgtcgctgctgctgctgccgccgcgaccgctccacttctacagacttgattcttcgacagtctcgcacggcgcctgcgcgggccccctcccctcgtgcgcgtgcccgccctcccgcgcgcgcgctccccctccccccgcgcgccgaaggagcgctgccgggagagccggctacgcggcgcccgcccgcccgcggggcagcgcagcagcgcagcgccggtgttcccttcggaacaccgcgcaaagtgatcgagtgcttttcctccactttccctcacttcgcgccccacccggctgtcccgaccaccctcaggatgttttcctctggtgtgcctctgggccaaatcgtgctaaaaatcattttttttcttttatgcaaggacactttgtcacttggtttccgtcagtctcctgagaatggggaatttaggtctagcgtggttcacagttctggttttttaggagttatacttgaaagctcaatgtcggacacatagcatgaaatccgtcactggtgctttgcatttgtcttggaaaggacatacgccccgcctgtcccttttactaactagggagactgtgaatattcccaagcccagcaccacgtgcacacgccgccagctggctcgcgcgttttccacggagccctctggaggggagggagcgcggttcggactagcctctcccgaacaccaagtgccgctcttagccccgtccagcccgccctgttcatcgggggcctcgccgcgccagtcgccccggctgccttatgtaggtatgcgcggcgggcgcgtgacgtgggcgcggggccgtgggcggccgccgccgcgagtgcgcacgctccgcgcagacgtgcctcggcgccgctggcactagggcctcgtggaacgaatgcacattccagggatccggggtctacggccagcgcggccgcgtcacagcgcaggctccacccccttcggcgagtctgggcgtcgaggcgccgcccccgggcccgaacttggactcgaggtggcgggaggcgagggcgcgagtggggggggggggggtcctgctcgcctccgcgaggttcccgagggccgtgggggcgaccggctggctggctggcccgccgtcccgcagggcgggccgccgacggaggcggacttttgccctatatgccacccaggccgggatgagcccggcctgcaggtctgccaccgttggcagcctcagactcagcccagactgaattgaatgtttgagtttcgcacttttatcgggaggaggagctagtgtgtgttatggtaaatcactttgggctggtcgttagtctccctaatacacgtaggcttagtcgctcttcaattgggacttttacacttaagctctttaagggcggcctctggagctgcttttgttgggaacacaggcccacaactctcccttgagactggaatgagctggttaagtgtgggaagaacagggtactaattatattatctttcctacaactggattggtaggtggagagaaaaaaaaaatcatgctgacgtttctctctagtcgttgctattgaaaataccaggttgcttcaaaggattaaccacaaggaagaggaaaaacacccttagagaaacagtggagggagctgcttaaaacacatgaaaaaacctgttcgaaaatggcacagaaaacgtaatgtcagacctaaatgtttttacaggctaaccttgaatgtcttttggggatttccatagaaggtgcgcctgttttaaaggtctctgcatctgttcctggatcttgccctgcaattgcaatcctgcctcaccctctccaagctgggagaatggggcctgtccagatccttcccgggagtagctggtgccagcgggtttggtcactcccaggccctgctgttgcacaccgctttcaagacctgtccctttggtcaccctcctcagagaccctgtgacactcattccagtacatgccttcacccactgcgtcactgcccaaaggggatgaagtccagtccttgtgctgcagagaaatgaaccaactcatcgcccccaagagacggccccactaagcattgactgaaacatactaaaagaaaacacaactcaccattagagttgtggcctaattatactcatttctctgcaagctggtactgtaatggcctcaaggggagagcctgccactccatcctaaaatagaattagagatagaaattctgccacgatactaagatctttgcaaaacggagcttttcttctccaaaggaagagcatttccttcttattttacactgccagtttcatgtcgaaactgagttgttgtaacttccctaatgaaatgcccgatggaaaatggaagggctattttagttctgggctcgatccggaatcaagggggttaaggctggattcagggcagcaattccttatattgtatcagaagtctttcatgcagcctggcctttcatgtagctctgaagcagctttatcgatgtatgctaagtaaacatagctttgtttttgtcttccacccaccgctccctcccggcacagactggagttggatcccatccaaagcggctgctgcagcagttacagccgcctcctccacacacaggagcagggtttctagggtgaggcaatgcgtctgcaattcgcagagacaaggcaggaattgtaattgtagttcatcatgtgatgacttatgaaagaggaagttggtatgttttagtcacgtagactctgccctcttgcttgaggcaccaggtcctctcaaaagagaattatgatcatctttgccacccagagtcaaggttaccgggttggctgcagtgtgctcctgcacattcatatacggacaggcaggcagatgctgggccaagtgtcggcgacgcagcgggatgaggctggcttttcaccagaacactaaaatgttgcaatttgtcttaaggactaaaggaaatattctatggagaacactcctgctgagactagacaaaccaacagtcctttccagctctaatttctgagagttgtttttttttttaaataaaaatcacagtgtaggagtaaaaggaaagccattcagtatgacactatcagaaaagcaggaataaggaagtggcttggaaggcaaacctaagagagcagttgtaagcgatagctcaatgggtagaactaatgtgaccttccgacactgagattgaaacgggcttctactgcgtgaacgttaaacatctaaaatctgaatctggtttccagagcttactccagtcaagcagctattaacacacggaagccctgaactgacagtctatagagcagtgtaaagaaacggttcctacaagagtaccttattggaactttgcccccaggttatgcagctgcaagaggggtgcaaccccattcccccagcagcttgtgggtgctgtccaggagatagatggtattcctaggaactgctgagttcgtggctttcaccctctatccagaggtggaatcacagccttcattctttagagtgcagtttccttaaatagcatgatgttgcaaccatgctaaagcttcttaaactctgatcttggcgtatttgaagaagagaaaaaatgcagccacatttcatctggatttctgtggacatcattgcgggtttcttcagctttggcaaaagtgtcgtaaggtttgaagagcacacgtgatattcagggcttttccaattttttaaataagttatatatatttgaacacatttgtttatatgaatatatctacacatactatggagcaccatgacataaatgaaccttctgtaattgatatgagagtcttccttcttagtaacagcattttatgagacaatcttactgtttttcaaattgcaaatattcttttttagaaatactttccctctgtttgacctctctctatagcctacctcccctgtgcacagagcatacagatattaaagagacttttgcatgtggaggagataaactctctgtggagggtctaagaatcaagccagataaaatcacaggagctcttaatcatccacatattgtacacagaagctgttagtcggcagcctatatgtcaacgtatgtataggtccctatttagagcaaaatttgggatcttgatgaaggttaaatactcactgtgtcagaatttaaagagctaagtgagaaacagacaaaatagacaaaggagagattgaggtcacacacttgctcagtctgcaaggaaatttgtagaactggaagggattcaacagccatttgatgccagtaaacctcctattgactttttggaaaaagcaggatgaaatgcacttttctggaatatctggatgtgggtttaacttagaatatttaaaacactcactgaagccctttgaaagatatcagtaggaagatgttgacaaaataatgaattaacttcacagataatgtttgaaaatataaaaatggtaaattttcccttcttagcttttctattaaaaaatgtacatttcctacatacacattccatagcataagaactgaaaaagtcaaataatgtaataattctaaaacgttaaagaacagtacgatggcatggtatttgctgtatctttcacatga

SEQ ID NO: 36228 - DNA, 5500 bp, Homo sapiens
agtctaatgggctcagcaaaaaataaagtaagcttgttatttgaaacaattattgtatgtatatactgcagattccaatgatatctctcagaggtctacacatttaacaataaaattctttctccaacacctgttttttggcatgggaggagtagtggtcatttttgtaggtaaaggagacacagagagctccctacacaaggaaggaaagttgagcagactgactgaggactgtactttattagttggagtgaattccggtatgcattggcacatccatttctgtgcccacatggtaatgcctctttgtgaggcagagtgcaaaaccactgggaaaattaagaatcacactcagaactgaagttcatacaggggagaaggaaacagacatgcagtaggcagcctagatgtgagccctagcaagagactactgatggattccccaaagtgactgcctaaatgtagtgtgtttactacaaagcttgtcacagacagctaaaatgcaaatacaaatgaactttgatgtacttcgtggcaagactcccagcccttcgagcaaattcctgagtgaggaagctggttctgaaacatgcctgggaactgcacacatgtgaacttcctgaggcctcttctctttagcacttaacaggtagctggattttaaacatttgtcaggctgcttttattctgtctacctacctctcaattatctacctatctacctatccatctatctatctttgcattatcagaccaattcattattcttaacaatagttaagaacatcagtgtctgttcactttatgaactgagacaccaagataataaggaatctgtcttaaaacaaagaaaatgtgtggttaaacgacagttagaattcaggtttcccaaactgcagttctttctttagcccactggtgggctacctcctatttatattttcttcataggttcttttttgcatacatgtaaatatctatgcaggagatcactgagggaccgtagcttctcttcattcacctggcatgtgacctgaggcaggtcagctggacaccctaggccagtttttcttgagtggaggagacggtgctggccttgatgtcatttctgttctgacctctcgtggtgggtgggggtgatgggaatacacaggaatttgacaaacccaagcccaacattcttctgacccacatgggattacaaaacaatgcggaaaaactaccagtaaatgcctgcccattatttgggggcattgtgccatccaaataaagtcaggaggttaaatggctaccagagcatcacatcatcgagaacatcgtgtctgcttggtttgggctcaatcccagattaggagactctaaaccacggtctatacttagtttaaattagccagggcaaaacatctgtatcagcattaatataagcccaacttcaatgtctcagggcttatggaaaatatttgcatttttctttcctcaagagactgccttatttcatatatgtatgtgtgtgtatgtgtgtttatatataattttatatgtatatgtgtgtatgtatatatacacgtatatgtgtaaatatacgtatatatacacgtatacacatacatatacgtgtatacgtgtatatatacatatatacatatatgcatacatatatatatacgggcaaagacttaatatactatccacaggctattcagattgttcaagaggctctcagttgaagaagcaaacagacaaacaaaacggtttcatacacaggcaggcatttggctgagtaggtcggcaggatatggaaacttgctttgaggtgtttttggattctcacctagaattctactacttaatggctgtgtggcttctttgcaggctatatactgaattcataaaggatgttatgagagtaaattcaaagaattctgatgttttgaaatttgttgtgacttggttaactatggtgaaatgttacattcgtgttacattatggcttttgtttatacgggtctgattatgggataacttaataaagttgtaaaaaactctatgtttttcaaaaattctgtgtttttcttatgtgaagaatttgtttcaactattcttcaaacaccagaaaaggagtcaccgtatactttacttttcatataaagattactcaatatattttaaaatgggtgttccagaattagacttccagattccttgaattgagagtgtggaaaaggataggcagctcctgtaataggagacattcttttaaaagcctggaatgctgaaaccctcttagactgaaaacatgtcaggacatgcctttttgggatactgtcaaacggtttaggctcagaattccacattccgtacttttgaagttgttttctgttggcaaatgacctcttgattattttcatgtggtgagtattcaggccaacctttttggttccaagtgatttaaaaacacacacacacacacacacataaaaacaaaccactctgaagtgtccatattttagcataaagttaggaattatgcgagtgctgggtgtatcacggtcaattctgtgagcctcgtcacagtttatagccgaagtcagaggcttcaaaatcagacacacattgacctggaatgctttattctgcagtgctcattcttgattctcagaagtatcgctcctgtgaaaaacttatcaccattagggagctgtcatttccctggtaaaattaaacagcaatttcattcacctttgcttctttttggatgaaggctggcaatggtttaaggaacaaataaatgaatgaataaatgagtggagttccctcctcctgactcagaaaggtgctatttcccctcacgcaggagatacaacttccatgcaagccagttctcctactacatagagcccttctgtttttaggaagttctgattcatggattggagaattgaactaaattagtatactgtacagcatgggcctggttaaattaaacataaatgctctgccccctgccacccacctcactgtgaccacggagagttcatttaacaggcgccactgtctgtgagacccaaacaaaggtagctgacttcaaaccctgtctacatttgccttattatagaccatgtgttagtagatgttgtaatattttttatgaaccagtaggattctcagaatgcttcaaaacaggcatgatattgggtgatgattttattttaagtctcatctcgatttaattttgtgagaattttttaaaattgtctgttttattgagaaattgctcagagatcatatacaatgagaaactcggctagaagaagataaacaaaacaagtataacagagacaacgttcttttaaaacatttcattttgcagaccaataataaaacttgtaaatcttttaaaaatacttttcttatggtgtataaattctgatattttacttgaagctaataaagccaccatagagaagaaagttaattttttcttctttaagctttccataggtagtataatttaaataattctgtggtacagtttcaacacctcagattgagcacttttgtttacgaagtaagaacagtaatcctcatgtaaaaaggtggtattgctaccctagacagcagatggtgttattaaatacacaggcaaagtctaaggtcataaggaactaacaattaaccagaaatacgatctgtcacagtcgtttaatgggtaacctaacagatatataccgcttgtattcttctgagtggtgggaggtaaatagtcaagcttcagagcagttgcacaatcgtttagaaatattgtaattatattcttatttaagcatttagggaaaccaacaagcgagaaagaaagtgaaaatcagtgtgatttcctcataatactgtgtcctgttaatctgctttgaaaaatactttacaaattcagacagcacaatttcatagctatccctgaatctaactcgtctccccaaactaggaatgtcaaaattttgaattttttactgccagtctcagttgttctaagatctctttacattatcataggtataatttttgcccctgaagttttcgtcgtgtgaaggtaaaaaattggagcatacacaacagcaaatggaagcagggtggcaggagacagctgggaaactgtagtggggaggagaggcagtcagctggtggggtggaccgtaggaagagaatggtctcaccagtaaggaatgggtggcactattaaaatctggatgtgggctcaatttctattgtaaatcaaatataaatctatcactaaaataggagctggatacacagtgcccaagtcctcgtgagagtttcccaagaagggtttaccatggagaatgtgtcatcagttccttttcagttagggcttttgaggatgaggaactgaatcctaaattcacccaaaggaaaaatggccaacagggcagcaactaagcctggatcacaaagaacaaactgcttggttagaatttggaagagtggctgggtgcagtagtaatataatcccagcactctgggaggctgaggcgggaggatcactggaggccaggagtttgagactggcctgggcaacatagcaagacccccatctctacaaaaaaaatacaaaaatcaaggccaggtagagtggcttacacctgcaatcccaggactttgggaggctggggtctctaccaaaaaattaaaaattagccaggtgtggtggtagtgcatacctgtagtcccagctactaagcaggctgaggcaggtggattgcttgagcccaggaggttgatgctacagtgatccatgaaccatgatcacgccactgcactccagcctggggaacaaagcgagacccagtctctaaaaaaaaaaaaaaaaaaaaaaaaaaagtttggaagagtgaaccttgtcccataggcaaataactacgaagcatacccaagagtcatgactctagccattgtgtcaaccaattgtaaaaacagcatctggaaaagcaaaaacatcctcagtgccccaggtgaatagaagatgaacaatgaaaagcaaggttcagaggtcactggctgatcaggctaaaaaagtgggtagattccaatcttcggacaaaaactattcttaaaagacaaaaagttattcagtttccttgctgttggatttggtgaggatgtctgagtcccagaaaatgcatactaataaggacttttttcttatacagtttcatgcatttatatatgtttatttaaatttctctaaatttaatttgaataaggcaggcaacagcatctcagggcacagactcataactggagaccttcatccacaagcttagctagctagattttccgtgtggccaggacgcctgctgaaacttccagcagtcctcagaaaaactgatgagatacccttgggctgaatgagtaagaactttctggagagtggaagactggtgaaagtccagctggaaaaacatatggcagcagaggcggaaagagt

SEQ ID NO: 36229 - DNA, 718 bp, Homo sapiens
gctgaagaaaattatgacataaaaattttaaaattaccccaccacttttttttgtttgttttttatctctgtcagtttgttacctttattcctgaaagaaggactcaagactcatgtgatactctaaaatagatattaataggaaatgttcctagacaatgtgggtttgcaagagaaacaaagaatttattgttgacttgattactagctcaaagtaatcagaaattccatgaaagacactgaaagttgacctcttttaaaactactttcaaaagcggaggttgatttgtatttcttaatcagcatctcagaacaatgtacattctttttgtatagtgtcatgggcatctgggactttggcttgatcaacatccacttcctcctgtgataccaagaccctagttttcttttaaagaaccacccctccctgactctcagtctttgttttctggtggggttgactcttacccctaaccccaggggtggggcatgtggtccaagtctggccaatgagaattttaaccatgctggtgattcaagaatgagtatatgttacatgctgagcttatcagaaccaacattgtcagccacaggggttatgctagaagtattggaaaggataaattctcttctggggtggttaaaccaatagaaaattagcctggagcttctggtggacatcttgtcaaaaaaatagtgattgcctgcttgagaatga

SEQ ID NO: 36230 - DNA, 2176 bp, Homo sapiens
ttatggtatttatatacttttttaaaaaatgacaaatgttctccctaaatcagaaatgtggacaccgtgttttggctttagtgtagtgaggtggagtattatgattaaatactgtgttttcaagcattaatgactcaaagagcaggtacttacagagcacctattattgccatcaaccagtgttattgagcacttactcaataagtgttggcctctgactttacgcctaagagtcaggagaccacaaaaaagcaacaatgtcaggtctgcaaggtgaaggcaagaagctcatgttctaggtacttgtgactgtcctgtaatgctaaagaatgaaccattaccaaagatttggcaaactcgcccaagcttactcctaaggagtctaacctttgcccaagtatctaggactcaggcccacctgcttagcctggtctcactgaagtgtggaggcaaagcatttgcagcttcatcatattccattttgtctcataaggaaattgtgttagtccaagaggcttggtgtgttacatggttgtacagcttagtgctttcttagcactctgtttaagtgctgacaacttgatattttcatcaatggttgctatatttctccaatgttaggttgacaggctaataatttcagaagtcaatttctccctctctctctcttctcccagtttacatatttctattttccaattcctttatctgcattttgtaaatacctcaaaatagtggaaggcaaggcctctaggatcacttggcccaatctccatataattggatccttagggcttgctatatctttaaagaaattgaggtcaccttttgtcaccaagaattaagcacctgttgtgtgactgatggagatctgtacacagagcacattgcccagggcaggggtgatttggttacaggcagcctctcgatgtatgataaaagttggcatcaggttgtaaacattttgctcactgtagcagaaagctctctgtgaacggagagctgtctaaacagggtggttggccacagaacctgcccagggatgcacctcctttccacattagcccatggcctttccagccctgaaatctgagttgcatgtgagtcacttagacaggccatctgtcaattattaagcgacatcagtgggcccagcaattccattctgcgtagtgcaaaggtcctccacacattccaggtctataccatcaaagtggctatttttctcaacctatccctgccctttaagaaaatgggggtcatttatttccagggatcactatttacaccccattggcaggtagtggagcccagtggttaataaacaaccttgttttaaatcccatctctgttgtttgcaagctgtgtgtctttcagaaactttacttaaatttcttgagcatcagtttcctcacaagggtgtggtcaagtgataatcaagtatttgtactttaaccctgtacctggctgatagcaagccctcagaaaagaattaacttagagtttttatacattccctccagtacaatgttcctaacatacaaggggcatatgtgtgtattatgagtgggaagaaggaaggaaggatgcaattgataaggcttgcattcaacattgctgtagtcaaaccctctttccttaggaagatctggatgtgccaacatttcttatatatcatatgtggaggtgacttaggtttttctttcagtacttcatcatttgaaagagcatttggtgataatgagcaggttctgaagtctgtgaactaaactaaaagtaaaaataaatgggacggtgaaattttgtttgtgccttaagggaactcccttttaccctcccactatgttgatgatgtcatgtttgttctaacatatcatctaacaattccctccattcattttttttctccttatttcttttcctttcaagtaacagtatcttcaacaatcgttcggctgttcaggaacttaaaaatcatgagacgattcttaaaggataggaactaacattgatcacacagtgtgtaatcccacatctatatactggcaaatgatggcacaaacaccataaaatctcagcttgctttgtagccattctggattgctgagttctaggcaagtaagagctggtccttcaaagcaccaaaagaaagaaaggaaggaaggaaagaagggag

SEQ ID NO: 36231 - DNA, 1367 bp, Homo sapiens
aaaaactacctattgggtactatgttcactattggggtgatggattcaatagcagcccaaaccccagcattatgcaatatacccttctaacacacctgcacaagtataccctgagtctaaaatttttttaagttaatttttaaaaaactcattttccatgactggtcatttctgtttaagattctattggtcaaaactgctatctaggcagttgccagtccttcaggatttccaagcagaaaccataatgagtattaaaaatcagtgggctgggagctctaagtccccaaacacattcacagtcaaccatgtgatgttccccattgacaacccacaagcagaggcaagctgcggggtgccgcccgaccagagcagattgcagccaggctggccttcctgaaagacacacacactggtccctggaccctgggacgcccccgctcccccgactgtttatgtttgctgtcacacactgaacaatcacgcggtacacttcacagtcagcaagtttatcttgagttaaagtttgaccagtagaaaccaagttgtgtttacccccgtcctacagcaagtcatgtgcaaatagcacctgtgaacatttttcagcacacattctgtaccctctccatggttctcatggcaatgaatgttgcggggaaagccagtaagcgtgaaagctttggcaaatgttaaaatcctctccggaaatggttcacaatcactgacatcagggtgcatgggtcatgaccatcttcgtcgttagagcacattccctcttccccaaaatgcaaactcaacccaataacccttctactaaacagactagaaactctgaatgctgtgacatattttctcactgtaataagaatacacttacatgtttttttaattgttagaatttaaaaggattttatagactggatttcacaatactttccaactgttgtatttcatatttatgcattggtcacaatgtgttaagcactattctaagtgctttcaaatattattaattcatttattcctcctaacaactttgtgagataagtactattattaccccattttacagatctgcaaactgaggcacaaagagattcagtaatttgtccaaggttacatgcattgctagagagtggtagagccagtgagttgaacccaggcccagacaaaagcaagtatatacccattttccatgctgccttactacataaatgtaagtattggtaatactgtctctttttttccaaataaattgaagagaagctgattttttaaatatttactatattagtttgctagggctactataacagagtaccctagactcagtggcttaaacaatagaaacttattttctcacaatt

SEQ ID NO: 36232 - DNA, 2675 bp, Homo sapiens
ggaagaggcatccaggcacatgtcgtgctgtggttcacaaaaggtgcgaccaccactatctacaagaggctgacaaaaactattttgcaaaaagagaaccatgactgtttggatcttgaaaagtttaagggtcctcctcccctccccaggcggccatgagcatctgaggccggcgcctgtggcaagacgtagcaatgagccaccaggtccctaaggtactacgttgcatttctcaatctgactttgtttagtttggggaaaacattttttcggtcctgaaaaaaaaaatcactgtggtttctctcctactcccgccctctgtaatcgccacttgcaagagtttcaccattttcccggaaaaccaaaaaaatgaggatgctgggcagacattctttgtttcttttcttccatctccctctgccccaggccgtctcgtctgcccactctccctacacctccttccttcacgctgggctcgcctctttctccttaccagatttccttttcggaatccagctcaaccctcaccttggtaaataacgcctcagtagacttagaggtagcccgggtccttccgcccatacggtgccagcacacccttggccccatcacaggctcaggctcagccagctgcgggcagttcactgcttcctctctgcagcaccccctggtcatcctgcttgatgtttcccttctccctgtgggcacttgtagcttatcaactcactcatcaaccaacagctcctgagctcccactaaggatcaattgcactgtgcaatattattttgcacccgcccttttggaagccttctaacgtcatttcacatgcataggcacgcaggcttctctcctccaccacatgttgtcaactgacctattcctgtcctttctactccctttaccagggtggtgtcaggagtgagtagcacattagtcaaagcccctggattctcttaaacggttctgctactgactcactatgtgagtgtagacaagtcacttccctttctcagccctaacttccccagccataacatgctctctgtagtctggaaagaacacagctagaatgaatgggatgtcctctatacacagggcaactccataattcattgtccagctttcactttcgagaacagcagggggtgttttcatgtgtataacaggacaggcttaaacaggtttgtacctggcaaacccagggcgtacggggcatgccagtttctgggatctcaggtaaaaatggggataggagcaggcattcctcagcttatcacctcctagttcacagagatagaacatcagcagcttgctgtagtctgagctattaggtttgctctagggaaggaggcaagaaattcagtctatctttcatacatttccaacctgtgtgcaaaaacaatcagacataactctccaacacccacagggtgatctgagacatggtgggtaaagatgagcaaaactgttagagcaacaaagaaggctcttatctgtgcattataagtcccagcctcaaacatgccatgccatgccatgcccctctgaaatttaaaccaccctgataccaagcacttgcctatttcgggtgtctaaaataacaccgggccaagtcaattaagttgggcccagaggaagagctaacaggaccccagcatggctctaaggggtcttagtaacttctgagaattcagaagtggaagtgtttgcatataagagctacatctgggcctgcagctctcagggcccttgacttaattccttctggggaggaatatccaggcaggaatagagaatcaggatgtagcatgcaaccacgatgaggaatcagcagaaacagagccacccttgcttggctcagaaaccagataccaggcgctaggcaggaattcgcccctgggaagctgttgcttaatcctctagttcctcaggctcctggcctccttgacaaaggccaagccaaacagggatcccaggtgaggccaggctgcccagccagtgccagctcattcaggattagactagggctgggaggagcccaggcaaaccttcaggatgtcaggcactgaacagaatcccagaggtaggcaagttgctgcagctccaataatccagtggaaaagtgctaatttcccaaaggcctttcatcacaaggcccaagtagtctttggcctgagtctagctagaaccactgggatctgggatgaaactgagcaattgcaggtcttgctggcgagtgaagagaggtttggctgcaactgggtcccagttgaccgggtcacaaggatcagccagtttctaggtgcagagttgggatccgcggcctttgcccctaagcagccccactgatacctccaaggaactgttttagtataaaagggagggggaagggaaaagtttattccattatcgaaggtggagggtagggagaagaagaacaggagatggttgtctgagtgtatttattttcttctaaaatgtaaactgaactggaaatgcctacagaaacacacaggcactttgatcatcagcccactgggtgggcaacatgtctaatctctgctctgccctgcacattgcaggcactttacagctgtataacgacatctccaccgtggtggtggccacatttattggctttgtgacattcatcagggcttccttcttattaaaa

SEQ ID NO: 36233 - DNA, 1018 bp, Homo sapiens
aactacacagacagacacagaggccaattaagtataaatatttcacaccagaactgtctttttgacccagccactaatatctacccggccacagatctaaatgtttggatgaaaacgacagagcagaggagggctggtcagccagctgcagaggggcgccccttcggagcgttcgcatctgcctgaagaatatgtgtagtacgttttcctagaagcatggaggggcatgcgggtttgaccatcttcctaaacctggagaaggtcactgttttccttcagggattattctgtctcaccgcttttgttttttggtttcccttgatctaaaacaaaagggtctactttcttctttggattttgaagctgtgggtgcctttcttctcagttaatttttttttttgttttcatctgttaagacttagctagtttaggttttgaaaatgaacacactgacagccattgtgagaagatagcctggccttttggaggacaaatgctgtggggtggcgtaaccttgaggctcaagtcctggcactggcatttagtgtgagtcatgctgtattgcttcacctcctgggcttcagtctctccatctgtgaatgtagaatgacaatacctgctgtgctgtaaggtcactgtgaagattaaatgagataatgctttgtaacctgttggcctctgtgcagtttaaaatgatgtttttcattacttggctaagtgctgtacacccactgctctgtaggcaaaattcaaacaaaaagctttgtaatgctcccacccattgaaaacattactatgttagcctctatatacataaattattataacaatacctggaaggtaggaaacacactttgaattatattgtttctaagagtgaggataaggattactttcattcatttatactttttgggcaccaataatatgtatttgtaagatgagatggccactttatagattgcatcttgtatattaagaaacaattaaatctattttaaaagtacagctaaaaacc

SEQ ID NO: 36234 - DNA, 10591 bp, Homo sapiens
aggtgaactgccacctgttagatttccacttcctttgttctcctacagtgaggtctttgtcctgagttgaggggaggacagattttggtgggaagatgatctgagtttaaaggggctctgagagatccacatgcagctgtctagtaggttaatgggaatacccatccaacactctggaaagaggtccttgctggagatggaaatctagggtccttcacattggcatggttgttggaaccacggctgggtcagagttgttgaggagcacagacctctgaagggggaagaacaaggaaccttgggagcaccgataattgctggatacacgagctctgcgacaggaaggcaagcataaggctgtcatgccataaaaactaaggcaagagagagtttccatgcgagggaggggtcacacgaactgaatacagtccaaaggactgtaggcagtggatgatactatttaggaggtctaaatatagctctagtaatctcagcaagaataagttacaatgaaacaattacgggtaagggagaagctagctagatttcactggactaaaaaggagtaagaaaggagtggctgggcaccatggctcacgtctgtaatcccagcactttggaaggctgaggcaggcgggtcacgaggtcaacagatcgagaccatccgggtgaacatagtgaaaccctgtttctactaaaaatagaaaaactagctgggcgtggtagcgcatgcctgtaatcccagctactcgggaggctgaggcaggagaatcacttgaacccgggaggcagaggttgcagtgagccgagatcatgccattattgcactccagcctggcgacagctagagactctgtctcaagaaaagaaaaaaaaagaaagaaagaaaggagtaaatggtgccagcaagatagctacatagaatggaaagagcagggagggccgtgtggacacttagctcctctgtctgcaggttgtacaacttcaatcgtccggcaggcccgtgagcaccttcggtgtgacagtctgttcagcactggggctataaagataaacaagacaaagtccatgtgctcaaagagctctccgtctgtgatcccagagagacatctggacagagacgtcaaaatacaaaacaataaattctggacagagcagtgtttagcatgaatcgtgatctggaggacaaagacacagtccttgctgtcacggagctcaccattgagggatgcccacaggcagctgaaatacagcggaagtgataaatctttaacagagggtgttttactcggggcacccagaaaaaaatgaaattttaactgcagattcaggaagttatccatgaaaaggcggcagttgattccaaactccaacaatgcgctgtcaaggctcatgggctggctgagaccgtcacttcaggcagaggatgtagcgttctgaggggaagaaaaagttttaaaaagaaacttccagagacactgtcttgatgcaaggagtaaacataaagtacaaatctggaacacagcgtcagacttattaggaaagttactcggatcagggcctctgaaatcacccagacccgagctccgtaactgctctggtatagagctgggctctgtgctatggagacagtactgacatttcatcttcccgaggcacgtcccctggctccgtgatgtggccgtacaacaagcctgccctttgttacggtgtgtgcacacatgtaagtgctctcgacaaatctgtgttcctgcctctcctccagtgcttctcaggcaacgacgttacccttggcctcaaggaaaaaaaacagacaccgttggttggagattactgagtaaacctacaacgtcctcatgcttaaggccccgtctgtgattccaccatgaaggtcacatatcctctctcctaaaaagacctcatgtctccatttaagtatttgtttgggaaaatgctgtattgtattgaaattattgtataaagatagggccttggtacaaaatctaggaatgtgaggtttaaacacagttggataaatttttaaaaatcacattgcaaattttaattaaggcgagggagcttaatttaaacaaataaatgattagtgttgactaccagagtataaacaagactgtagttttaaaatgtaatcagcgttctccccattttcagacattatcctggtctgaattcctcaccctgtcctctctttgcaacacgaggcacagtgagctgtggtctggactgtttttgcagcccctctttggcgacaacagggtagaacccacagccatcaaatcagcctctaggttggcccaaaacatcacagtggcctggacatgatggagtatttccaggcacatagaaacttggcctttattcttccgggttgtaaatctggcacctctcaggatcagtaaataagcttttttaaaagcccaaacaaaccataaggaaatcctgcattctgaaacaaaaggtatgaaagctaagtcaagacccacactgccattgtgtcacttgccaggatgtgagctgctgccttgggagaaagataacatgaaagaggctataattgcagggctgagactccaggtcccatgaaaacaggataaaaaatagcaagcaagaagtgttccctgagctttcagctgggctagggtggggaaaaaaatcaaaagagcaacactctcctgaagttgttcaagaaatggagacacagggggaggagaatgagaaagaacaccaaggccaagttaacgtgtttaggaaaaatatgggggcaggagagaaaaaaaaaaaaggcggaatgatttaatgccagccaaagtaactaaggggaagaaggtgtgtttttataaacatgtttgcttttgtgtgtgtgtgtgtgtgtgtgtgtgtgtgtgtgtgtgccgggggaaaagtgtggaaaaagagaaactaggtccattaatgaaggagtagggtgttgcaagggaaatgactaaattagctgagcttttaaactgcttttaaaaaattagcttaaatgagaaaaataaagataagaggtaagaatgattgggaggatgcagtcaataaactattgataaggaagggttaaaggagtatttagagaaattgaagatatgcaaatgagaggtcaaaataacagtagcccagtgtagttagtggaactagctgaagaatttggaacaccacggcgggacttcataaccactcagtctacagggagtactaagaacacattctaacattgtacagcaccttatactaacattgtgcatgataaatgcattcattgttctcacattcttacattcatctgagtctggtctttacctccactatcagcagcaatgtgataggactgaccaaagcgaaagatgtttaaaactctttttggtatgaaacagaagcaaaatcacttctctcggtaataaagaaggacattgaggcattgagtagtcaaaggaattgctgaagatgaaacaccaagtcagtgactaagttctgacccatttttaagaattcagacatattcccccaaaaagaaagaatgtatttaacgcaggttttcagatagggagtcccactagcgctaggaaccatttcagaggtagaccttgcctgcattcctaacgtgactattgctgtagttaattttccccatttgcctactccaagttacacttagccaatggcacagcttaaaatcggaacaccaaaccactctttcaacccttaccccgagcaaatgtcagaaggcctccagctattctttgtgaattgcaaaatgaaccagtgtctgcccctttacccttccagagccgtggagtctaggtctatgcccaagagagatgcatgaaatgttttactggtttctgcaaataagccagaccaagggagaaacagaccttcagcaagtagtaaccaaatgcaagttttgagaatgtggagggagaggaggtaaggttaatgaacacccctatacatcttttcagtgtctcttgctgaattacccagccctgagctaacaccttgctgaatcacccagtcctgatgcaggtttatgctgtgtcctgaattggtctctggtgtccctttcagcttctgcccctgcaaactgggcagtgcatccaaggtctcctgctaacatctgtcactcatcggagccacctgatctgaagcgttgtcagggtcagtatttttgttctgcctgctgttttgctaatggatcaatggcagtcagtaaagaacaaaccgtgccagaaaagaatgtcctcttcttctcagctgactcagctcgggacaggaagacagggggcatctggcatttggggaagcccttgattgtcccttaggaaataactgaaaatggatttgtgttggcctggttctaagaaggtcacccaggttgaatttgaaaagcagaggcactgtgtccacaaaagaaagtgataagcagcaagccatttctcaaagctaatgcccgagtgtgtaccaccgggatccattttatatctctctacagattggtgtgtttttcatgacaaccatccccatagcaaccaggtgtccaggcactaaattgatctcaaggatatgaaatctcagcctggtgagggaagcccactctgactgcagtttccttggagtcgtttcacatcgagggctggtgtgcaggtcatggggaatggggcttcttcctgagggctcagctggacacaagggacagccctggtgagaggggagcctttcctttttcatgtttactaataatccagaagaaagggtaagaaactggtaaatcaaattcaaatgaaactaaatgggaagatgttgcaaacgccagttggatggaggaaattatgtggacagccacggaagaaatgaccacgtaagacctgccctggaaaggccacagttggaacctctgggagccaatattccaaagcaagaagctagaagagatttaccaagcagaattatttgaggagattggggcgagggagagatgataattaagctgaaaaaaagggacattacagggtgcgcagagctgagggccgtgcagggaaggggcagagcagttctagctggacgaaagcttaggtcttggtcagggaaatgaggtgctcccatggattgtccaggtgagcccagagagcgcacccagggaagaatgttgagggcatggggggtcataggaaggagtgagggagagcccacacaacagtatcctcttaaggcagctcatgctcgcccagaggcagctacctgccatcaggctgtccctaaggtcagccttgctaatgctgagcccctgccttccacagttaccctgtcctggggctttggtgatggtcctcctcacctcaacagtgatggacaagggctccttttgctttgaagtgatgcccacgtgcttactgcacaaggagggcagggaagagccaggaagggaggaaccgccacgccagcggggacaacgtgacgacacggaacaaagggacatgccgttggaatcctaggaagaagtttcttaagtgacatctaaataggctgcaaatggccttttcgagggaactcccatccctgtgataatctaaaccagaatcggatgagatggggtggaccgcatctcgggaggagcacatgggtgtgagggaggagggacgtggcaacctcatgctcccttctctctgtaatcactctgtcaacccacgattctgggaggggagtatgaaatgtgtggtttgtctattgcatgaagatatttggatcccccaaatctaggtgtgtctggaagaaagctgccctctcccagaggaaagctgggggttaaatccataactgtcagtgtgtctggcaacaaaataaaaggaaaccacattctccatgaatgaagggagaagcaggaaggaggtagttttttcttttttaaaaacatgaataagatcctccaatatgtttgagattattgagcaaattctttgaaaagggccctgggtcactaaccaacagattgtggatgtagaaaccacattcttccaacttcccttcccatcctgaccccagagatagcaggttgggtatgctgggggtctttgtttagttaaccattaacaattcataaaagtgcagatccctgcacgataagtccagtccttggaatgttattagaaaatcctatttctagtctgttatgaaacagaggttttgatgtgctgccaggtttatggggaactctggaaacaacacttgcttctctgagaagctgaggctgggtgggtgttacataaagctttcctagcaacttagctttatcacagaatgggaggctgcagtggaaaatatcagacgagttaatgcaaaacctgagccaacccactatccccatttgctctaaggccagccagcaaatctgtgggagtgattttaacccacgggggagcggcaggcctagggctccggttgactgcagattcagcccaagaatgctcgggcagctcagagctgaaaggcaccttcagacagacctcacggaaggcaaaacagctcttcttgactctgaaccaattgctgattgaaattcacacaaacacaccttccttttccttctttgggtcattcccagtttctccgggcactgcaggaacaaaggggagtaaggtcacttcgtcgaatccctgccaagggaaatgcgtctaatgcatgacggtgtctctgaagtcaatggataagaatctcatttctaaactcttggatccaaaagtatgcctcttaggatggaatccttctgtggtgttggttgacagctttttgggttttctgaaaagcatgtgtccagtccattgtttttaatctcccagggctggcgtgggggtggaaggagctggaggaagaaaccatgcaaaaatccatttggaagctgcaaatcaaagctaatagcctctcctgatctgctcacacacggtgcccaaccggtgttgtagagaggaagaggaaaagattccccagacatgaggacaagtgtaaggcgaagggctggaaaggggaggggagctcgtgtcaagagggagctggaactcaagtggggagaggaaaggcagtgggagagaagagagctccttcgtgggcggcctctgcgacatctgccccaggggcctaacgcctccctctgtgatgtctctgcacccaggctctgttgctgcttcctcaaccattattctcatttgggaagggaaagagtggttttataaaaccggtgtccacgtgaaggcagccatccagttggtggagaaattttccccacataaattagattactccaagtctagatggttcctagcccctagtccttctcgctgaagacggtacaaggagggtggcaaggcagaggtctggagggagaagagtaaaaagctccttgtttgcgttaaaacaaacaaaccccaagatatgccagttgtttcagaaggtgaattcctacttcaggtagtccttaagagtcaccagaaatccaggagcgaaactgcactgagattccattaactgtgaaaaaaaataacaaaataaacgggccacacaaaaagaagaaaaccggcctgcccaacgagggctgcggagtgcagccagagtcccttgtaccagtagatcatattgtgtccatttaataataataagaaggggcaccctccgcggaggcttcacccaaggagtcctgtcccacccgcaggctcgggcgcccgcctgcagacctcggacgccggccagcgtcttgtcgtgcaaggccgtccacagccagcatggccttaatgagcccatttcaattgaaatgagatcaatactactcatttttctcttgctggctcccgagtgattcatgaatctgaaaactagttcatgaatcagagcagggtggggtggaggggctggggcggaggcaggcaggggaacatttgtgcagtcggcaaacctcgattcctttaatgaacctagccatgagttgcataacgctggcctgcctgctagtttaaaacagtcttttcggaagcagctttcagcttgacttattcacctattttcctcctggaaaggggaagaatgacactgggtactgattgtgtgtctgtctgtctcagggaatacttttttgctcttcgtgtgtggaaccgtaggggcttccctggacaagaacgtgtgtccatgtgtgtgtgcatacatgtataatggtctttgtgtgcacatcctctgtgtgtgtgtgtgtgtgtgtgtgtgtgtgtgtgtgtgtatgagtgagcaatgtgtgaccggcctcgggccctttaaacctgaacaggagccaagttcatttctcagcggagcttcataaggaagcacgagctggggcagttggaaaccacatccctgtgagtgctgattacagcctactaaggaaaatgagatttttatctcacaggaattcagttataaaaataaaatacagcgtctggcttgattcagctaaatgtacaagcactagggtgtttttaatttaacagagaagctggacaagaagaatgacctaaaacattgcatttaaagaaagtcagaggcgagggggaggctacaggaagtgagtgggagtagagatgtgtgtgtgagagagagagagagagagaaatggagggagagggagggaggaagggaggagggaggtggagagagagagaaaaaaaccaccctgctggcaaatgaatgcagcagggatgatgtcattggaacagttggaggagagaggagaaaaacaactcggagctgtgctaatcctgtttgctgccctgaagggaatggaaggcggccaaggcagggagttctgggaaaccatataagggtgccaaacaagcattgccgccaacattaggaactgacagctttgttctttgtaacttggctgcccgccagaggcctcatttcagctctgcggcatgattaccctggacggccgccagccccgcgctgagagctccttttcttctctccgagctttttttttttttcctctttccctctgccaaacatgcagcagttaccatggcagtggaaagtaaagttttaaaaaaacacaacaaagtagagaggcacgcctttatccagatgtgccacatgagcagatagaaaaggcagttcacctattcatcggggcctttgactgcagaagaaaacactggggcactggctgtcaagttcgggagggaggtgactccaggataaacagagcagcgagcagccctggctgcagacagagaggggctggctcccaggccctattttccttccctctctctctcccttcctggggcattgtggagtgcgtaatgtgaaacggaaaatgtcatgatttccactgggaacgtgtccacggttttgagaaagctccagaaactcaggtccataaagcactgaggggaggaggaagggagggaggagaatgggcggtcacagtgccctctggtcaccaaggtgaacccagcgagcaggagccagtacgtggctgtggcccaagcctctgcctgctgctggagcatggccaggccgtcgtcgtagggttgcaggctgttcgggggtcctgggtcccacggagccctgggacctgagggacagggatgttcccttttcccccttggaggtgtagccagtagtttggctttacagggggactctgtgaagagtccagttccctatttttaatcaggttcatttttcacctgcttagaaagtggaacatctcctgaaaggtgacaagtcgtgatcaaaggcaagtctccaggcagagagttggcaggtttccgaagcaaaggttacttagaagtggaggctccactgccagcttccccccgctgcaaaatctgacactcctcaccctcagggttcagcaagattctcggaaaggccttttctgattctaggaggtgctgcagcaggagctgactcggccatttcctggcctctttagttggaagatgacagaaaggcggaagcagggactgctattgtgaggcccatggcagccttcctgtaaaacaaattggcaaattgtcaccttcagatggaccacagctggccctctgaacagccctccttggcctttccagagtgtacatgattgtgtcccatgtccagggagaggacagagccaccaggagggtcaaggtcgtggagggaaacatgggtgagtaagagatggaccccagaaatccctcctcatgctcctccctgctgttatcacaggccttggctgcctttctcaggaggcattcccagctcagagttgggtatgcactaagttaaagcaaagagggccctactggagtgagggcaaggggacttggttgacctcctttggggatgttgcgaagcagacccattcccgcccttgctggctggaatgcccagtccttccctgcctccccgggccccacacaccctggctgacacctgtgctgaggacatggccgaggagagctgaaaggagcagaggaggggagaaacgtgtaccagttcccatacaaacaggacccacaggcttggggtccccagaggttgg

SEQ ID NO: 36235 - DNA, 552 bp, Homo sapiens
tcttcacactgtttgcaggttttttccccctcacgcattcagtttttacttgctgcggcacaattgatttggtcttcactttctgcgctcaaaacaaacactgggtttaggcattctgctctcccagcaccgcatggctgagggtggaaaaaaataacatctgaaacaggccgggcttttgatgatacctccttatgacagacacatcgaaaaccaccgacggtgagtcacccacattctgtgcataccctctccgaggagcaggaagtgtggctattttaaaccctgaggcaatgagaagttttcagatgcgtcctaaggcgctccggccagcgccctgcatgcacacgagggccttcctcagtgtggccccagcacatctgtagacctgaggcgacacacccagccttctgccagcatctctttgtttattctgcttgtcctggttttgcgttgacacgagcaagccgagtctaaaaaacacagagctacagaatttataaaatcaacaaaaacttaaaaaaaaaaaacaaaaaaaaaaacacaccacca

SEQ ID NO: 36236 - DNA, 754 bp, Homo sapiens
gatatcccagaacatatttgggctacctgagttcttaactccaaaaggttgaaattacctgagttcaatatcgttgttgaacagcatacatggacataatagaagtaactgtccgtcatctacaaccatgcataggagctcaaataacccagtactgtttagtgacagtaaaatttttctcacctgaaaatgaagttgcaataatttatacagaagctatggctttcaaattatatttttatctagagaaacacagaaattgtttccttgtacaaaaaggctgatgtggaaaggagttgatcacatgcattctgggtggcagtgagacttttgctccagaggaaaaactggcttcctggaaaatgcaccaagttggagaatgtggatcaatcccagctgtattcctggcaagatttagatctacccaaacagatttaacatactcgccagagtccggagtccaccaactcatcagaaaatggacagatgttcatttggagcctcaacatcgggaaaatgctgtcttctcttcctatcactccatttggttctctgtattactcaagtgagtaaatgcccagcctgacccagccacttcctctgcagtataaggagggcaacaattctttgtcaacagcatctgtggctctctgaggtctggatggacagtggcttgcattgttgtgtatgtaaatgcatgttcccattattttacacaatactaacccaccaccaccactccctgcagtgcttg

SEQ ID NO: 36237 - DNA, 3605 bp, Homo sapiens
acttcttgctagcaaggtgggtcttggccgttcttgttttgttgtttttttttttttttttttcagatggagtcttgcactgtcatccaggctagagtgcagtggtgagatctcgcctcactgcaacctgcgcctcctgggttcaagcgattctcctgcctcagcctcccgagtagctgggattacaggcacccaccaccatgcctagctaattttttttgtatttttagtaaagacgggttttcaccatgttggccaggctggtctcgaactcctgaccttgtgattcgcccacctcggcctcccaaaatgctgggattagcggcgtgagccaccacgcctgggtcttggcaatttttaaacccccagaatctagggcctggcacaagatagattctcaaaaagagcttgctgaacaaatgaatcataaagctgaattccataatccaagccacattttctcatttactcacaatatggcacacagattatgcctctagaaataaacaaggtcagaggttgtgagatgagaggtgggtcagaaagcagggcagggtcaggagcttccaccgccctgacacctcaggccccggctccagcaaccccacagaatgacacagcaaccacagaaggggatggcagcctcctgccccttgccaagctgtaaaaagtaatggcaagaaaccatgtcctaatttccctcctcagatcatgccagcttgtggaatttaaccacgagaatattgataagtcccggaaaaaggttggaggacaaagtcgatgtctgtcatcagccaggttccgcatgcctgaattgcagagtcatggtggatcttaagggtcatctagtctaccctctgctctgtgtacaaacctctccgagccagcggtcactcccagtcatggggtgtttcaaaatctccagacttgaagttgtaagtggagtggcaaagacaaaattcactccatgatccctccaatgcagggacgttttcgagactcagtggagcacttcggatacaccacgcattgccttgggaaccacaaagaacacagagatgagacgtcatgcctgcctccaaggctcaagcttcagatgtggcagaaaggccgtttccacagtgggcataattgagggcacctagagtcagggccgcaagctggacatacgtggtggatggagacagaagccatgtggggacattcggcagagcaatggacccccttccttcagaaattcaaccaaatccgatggtagacttgattccaaaaattaattttcagaagggaaatttcaatatggactgggtattgaatgatagatagcaaggaagtgttggcaatttttaggccagacgaccataacatcattacgtataaaaatgcccctctattttagagatgcaaaatctagtacatagatataaagtggcgtgaaacattaaagcaactcagaaagaaataagtagaggcagggatccatgaagcaactgtggtaagatcttgatagccatggattctgggcgacatatggttcaggtgcatcgtgcactctctctcctttgggaatgtttgaaatgttcataatttagaaaagctgagaatgaaaggaaggtggcccaggaaggaagaagcactttcagctgggccttagatcgcgagcaggagctcacagatggaaacagacaggaacgttatttgcaggggggcccagctcatcagaggccccgggtgggaggggttggctatggctcaggagttcaggttgcccctgtgtgggtcagagttccaaacatggggcccatggctcctgagggccacctgtattgacctgtttctccaggatgtggtaagtgctgtggatcaacaagcaaggcaaagtactccacagatgccagttcctgcaggcaggccgcggggaggctgccagacaattttccagaacaacctgttcgttcttactgcgccggccctggcctcgaggaccgtgcgtactcacttcatcacttgcataactggtggatccaggctcccgagatcagcgcccctcctgagctccatcgtttccctgtgcgggggtctacagtcttcttgggaatatacttcctgttgcccctactctggatttccccatctccagagggagcagatcagaggaggcgacacgggaggggtggatgaggtcacctgcccaggggggcatccgcctgccacaccccctggcccgtcctgccctcagtctggacccttcctcccctggcactgtctctggaaggaagtgggcttccacagggcctaatctgctgctgctgctgccctctcacacggacctccaccaccgcccacctccccagaggccaccacaggcctctgctggggcacgctggggtttcagggcctgccataatgtcctaccatctcatctctgggcccgatttgccccgggcttatccagtttctctaagatcatggaaaaaatgagccctggtcatatctgcagagcagccttggcgttgacctcttgtggcaattgcctttgacagcctgagagtcattcagaaattgcctatggttcactcgggggaggtgggtggttcctctcttgcaagcttatcttcactttgcagccctggtaagtaactgctgagcgttgcacaatcagggagaaaatatttacaatgaaagttgatccagaaagacttagacaagggtcagtgtaccttcagtttagcctgacctcttccagatgaagtgactttggacaagggttgtaatctctccatgccttagggagagacagagacatatggtacaaaaagcaggagcttcagagtcagagaaatgaattcgaatccttcctccccattcactaacctgggagtttgggcaacagggatcatctcagattatatttcctatctcagagtattttgcagattaaatgagataaactcgagatggtctgcaaggtataggcacatgccaccacctcctcctcccacatcaatacaaagttcctcatcttttttttttttttttctttgaggtggagtctcactctgtcacccaggctggagtgcagtggtatgaccccagctcactgcagcctctgcctcccaggttcaagcgattctcctctctcaacctcccaagtagctggggttacaggcgccaccatgccccgtatggtgggattacaggccgccaccatgcccagctaattttgtatttttagtagagacggggttttcccatgttgaccaggctggtcttgaactcctgacctcaggtgatccacccgcctcagcctcccaaagtgctgggattacaggcgtaagccaccgtgcctggcccctcatctttttgataagggagttggaggggatgaccagcaaggccactttcggctcggacccaatgcagtcccaagaaatcacaggagcagtaagttattctccttcctgtgtccagccccaggctccagtctcagccggtattctaaaaccatcaggactccaagaggtccaggcaaagtctgagccccacatccactcagcccccagtaccgctgctctatcctccgcgggcttctccgttccatggcc

SEQ ID NO: 36238 - DNA, 2853 bp, Homo sapiens
ttcacagactagaatgctggggctcaggagttgagtgacctgcctaacattgcacagctcatgattgagggagccgagattttaactgaggtcaggatgactaggaccttccttctttccacctcctttcccatctcatctggtgaccctgggacaggggaaggattcacgaaaaccctgtgttctgacaatgccaagtgccacgcaagccgactgaaaacccagctcacggacaggccggccacctttggggatatgatgttcacaggcacttcaggtccctaagcagtgacagatgccacagactctgagctggcctggcagagaatcaggtgacaggtggactcttgagttacacctatcctcaaagagcaacagtgccttccatttgaatggcgttacagctgacggtcctcacctccaagtgtggggaggaaagttgagtctgtgatagacaaggcgtgcactttagaggcggaagtattgtgttgcctgtgcgccctgccaactcgaagaaggagaggaaggaaaagcaactactactcactaagtacctactgtgagccagattactcttcataccaaccatctgttttaggaatcaggaagctgtgatcagagaggttaagtaacttgcctcaggaggcacagtgagcaagaaactgggagatgggacttgaactcaggtctcccagaagactccatctgtgcccaccctctgacaggcctaacaaaatctcgggttcagagcagatccttaaagccttccagtccagctccctggttaggctcatgagacggccacgatgtgtctgcccagtgacaaccagcacaaaccggaaggtccacccctctctgccgtgtcacctgctgaaattccccttctgccttaacattccctctgaacaggaaagaacattttcaacaccccaacaccttcccaataaggagtttggcaagggcagggctgctccccaatccatgtgattttgaggttgatttcaccaagacacaaagaacctctcgtcctttctcaccagctccacttgctggggcaggagcagctgccttcagcccggaggagggctttccgagacacctgtgccacaggtaacctgagctggaacctcagttctacataacttgtacctggggagtttgtgcctcccagagccacaaaacacagattcaggcagagccacagtgcaaacagtcacgcctgctctccagagcccagcatgactgcaggatgacaacataccccacctgggaaagcaggcaccagccctgcacagacaccgcctggcctccacgtcagcctctgtgttgcaccgtctcagccacatcttttcacagataaacctctgaagttccccctacccccacccccatgcccagagtttcagcttcataaggtgcataaccagaaaagcacttgagggtaaactgggttcacactgggctcagccccagggcctcaaacagttcctagaggaaaaattcagccaggcagcagaatcctgaatcttcttctgctttggggtgcagagagagcctcctcttacattccaaagcagtctgtcagcccaggacacatggcattgtcacacttcccagcaatgaccttctgatctgaatttctgccagactaaacatccgggcaccagcgcgcaatggagaagccgccgccattcactgaggttgctatctcctaccatttagtgttgcctcttgccttgtttgataacaagatgttgtgtgtctcaatgtaaatacaatcagaggcagcatatggctcgcaaaacaccatttacaactattagcgtgcaccagctttctgctcagctacgctccacgctgccatggcgcagagtcgtgggggtccgccttctccttggcctcaatctgtctgccgaggctccctccgatgctaatgagaaggaagcatgtgggtcccggggagaccaagtctcagcatgcggcgctcaatgaagtcaagcaatcgtccaaagtgaaatattgaattgaaatgaacctgctgtttctgcaagaagatgtttttgggctaaggcagtttcaagatgcaatccaaccaaaacatccgtgaaaccagagaaacggggatccttgagaacagtcgcattacagcacaatttaaatacattctgaatgtgtttttagacatacctaatttcaccgggctcaaagctcaacttatggaggggatcgatgaatcgtgggcgtcgttacagtcatgggttttccttgtgagagtcttccaactttttcaaaatgcgagattttgccagggtgatctgggccagcccttatcttgccacgctggttgtagaaatcttagtggtgacccttctgtaacatggacaccatgaaaatgctgcatgggccttatcgactcacacattcactttttgaaaatttttgtttgtatgctcattctatatgggaatgccgatcacattctgggtctcattttcagaccctcagggacaagaaactcaaacctcttctccatatcttttgtcctatgtctttggggaaggggaaaaatactactggggcggccacagtcagccaggagagaatcaggggaccaggtgaagtgagcaggtagaggggaactgatgcagcacagggcctgggggaagatacagcaaataagtgagatcaggaacacggtgagagcaaagacagggtcagacacaggtcagacccaatcaggacagggcccacagagtgcaatccagcctgagacagtgcctggacagaagcttcccagagagatgactgcagctgtttcaggcctgcacgtgctacaaccttatgccaactaca

SEQ ID NO: 36239 - DNA, 910 bp, Homo sapiens
taactagaatcactgttgcacatcctcaaggctggtgacagtgcacacagatttcaggactcaaaacgataattcgtgtaaagccgttgttgttatctttaggctgtgactagctgccagactatgagaggtgaccccgagtggttcagtgggaccttagcctctgaatgaatgtcatcatccagctgagttcctgcatccaccgttattaagttaggacattcttttcacgagcaaattccaaagtagaattgtcaggagtcgcataattagtgaagtttactggcacgaattatttgtgtcttttgagtgttgacccttgagtctctggaagacttgaagagctaaaagttctactctttctccagattcaggtccctaggagcccccacctgcctgatctgtttctgtcctccttctcttccacccaaggaagcatgtaaatgtgcccggagttcccagggcacctggccaaggccactgtcaacatccacatacccaaagagcatgcacgcgtctctggggttctttcctcccaaagcccagagctgtgactgtttcctgcagacacaggatttcaggtcaactcaagccagaggtcaaccaagtcccaggccagaaaatgcattgtctggaatgttccttagaaacaaatgagtctctctgtgatgcaaggtttagacggaagcaggcaggttaacgtgccatgtgtcagaagttttcgtctaggttgagagatgtcaatgaatggcctggagataatgctcactgggcatttgggaaagttagcaggacagacatagacttctaccaagtacagggtgcaaaggcccacgggtaactcctgaggggaggtggcaggtgggatggggaagggagacctccagggaaaggctctctcagtacttac

SEQ ID NO: 36240 - DNA, 1934 bp, Homo sapiens
atttccgggaccggccccttatacagagacttccatccagcatcctcacagtgtctggcctgggctgtacaaatccagagacctagaaacagaaactgtgattcctctcgagaagtgaggctgctatgtggctggcgtgcacaccacactgccagcttcgggctctattgccttatcttaaattacaaactctaccagaagaaaatgtcacccttctgctggggtccggaaggctttgtgtgtgttaacaatcatcttggaacctgcgctcaagacgacctcaagcacactttgttcttcagctctggacgtgtcgtggccgtcagggtgaagagagagatgagaacagaggcttggacaggacagccctggctgaccagtcaagtgtagaagacacatacatacatttccttttttccttttctttttcaacttttattttagagtcagggagtacctgtgcaggtttgttacaaggtatatagcatgattctgagctttggggtacgattggcacccaggtaatgggcatagcacccaacaggtagtttttcagcccttgcccctcctcccctgtccctggtctagtagtccccggtgactattgttcccatctttattcatgatagcaaaaacacagaatcaacccagtttcccatcaatggtgaattggataaagatgtggttcatatacaccgtggaatactacacagccataaaaaagaatgaaatcaggtcttttgcagcaacatggatgtggctggaggccattaacctaagcgaattaatgcaggaacagaaaaccaaatatatcatgttctcacttatcagtgggagctaaacacatacctttcggaaggcaccagaacactggtttgttcctgctttgtcttggcaccaacccacttggcccctgactcatctttctctacaacactcctgtttgcttttctctaccatggagaaggtatgtctcagtggaagaactatgggaggtattcagcccaaacatcctctaagacagtaaagtgttaacagcttagaaagagctgcagactattaaaatgtgagctgcgttagtcagctgaaccgagaattctcatcctggcccttgctcttggagggaatgcatgccttagtgcttactcagctcttaaacagggtttgttgttttgtgtgtttttgtttcccgtgactgtgtgtgtttgactttttttaaactgtggtttaagaaaaaaaaaaaaagttgatcagtaagtcaaagtgtcagaactgtctgggttgaagcaggcactcatagggaagcaggaagaccagtctgtaggtttaggggaggggagcagaggaaacagaattttcattccacaccaagcctgcaaaatcatacagacaggagagcccagacaaagctaaatgtcattttctttatcctaatttattgatttctgctggctgtcgggagctctcggggaggaagcatgctgagtccatagctaatgcttttcgttgttctcacagttagtgggccctggagcttggggaagggggtggcataagtgcagggaaatggtgacgagatgcaaaagaatcatggtggccagagcagaaaatgtgtgctcacatttctctctctgcagtgtttctgaaatggcctcttcatttacttgaaagagacctcatgccaaaaaatgcatagcatcatcccccacctgctcagtcatgccttgaatctcaagcccagaaacgcaactgctgccggtggggggtgcaccccaaaagtcctcatcctgagaacacctgttaaaaagtccacgatggcagaaatccctggtgctgcatggagaatctccactcaggtgcgtcaccccctagacgttaggaaggtccggggcaggtgtccggtggggtcagggagacacgcaggttcaaggttg

SEQ ID NO: 36241 - DNA, 1101 bp, Homo sapiens
tcccctctctcagttttcttttctctttccatactatttcctctttgtctttcttccatcctcttttctttcctgctcgcccttgggttcatggctcagcactattattggcactgctgacccggcaaagcacatccacctctgcgatgttttccaagagcaggggatcagagggatgtccttctgctggggccagtgcctgaggaagaccctgttggccatggatgggaactgattctgggcttacaccacagctccaaaggaaaggggccggggatgtgtctacacaggcctgactgacctggcaagaaagtgacatgcgcactgactggcccagaggaactctgataagaggagatgccagggctgaagctcctcccaaatgctttctccaggctctgtgtgacaacaactgcccttcaggctcactccacctctcatccgctgtccacagctcagggccccagaggctaccatacccacaggggacactcctccaagatcctggggatgaggatgaaaatgtcagcctccccgcccacggtcaatgagggtcaacattaaatcagaactttaactttgcagtagcagccactgggagcaattttctagaaatgtgctgctgaccacattagcatatcccaaactaaatgtaaatgcacatacgctgagttacagtcttggaaactgaaatctgttttgagctatagaaaatgaaaaagtgatgtgtgcaaggaatctatgcaaaggagcctcaaagaggaagaatgagtcaggcttgccccacataaccagagaccatggccagcacccaagggccaggctctgccaagccagacaaaggtccttcagccagtgacactccaaaatctctcaaaagcgatccagaaaccaagtgtggtggtacacactgtaggctcagctactcaggaggctgggatgggaattggaggccacagtgtaccatgatcacacctgtgaatgaccacttcactccagcctgagcaacatactgagaccccatctctaacaacaacaacaacaacaaagtgacccaggggtttgaatcactaaaaaaaactaagggtattttgtgtccat

SEQ ID NO: 36242 - DNA, 11582 bp, Homo sapiens
ggagtctgctataggtcaggaaaaggattgccgaataaactctactgagcatgggctgcaaactcagatgcccacggggaacaggcaggcatctcatgaatcaggttgtctggggagtgggaggaagcaagcccgttgattaaaggcatctgattctcagtttggggtccaggaagacactctctgttgttgcagagaaggtagcaaaatggagtgtatgccccatgtcagagaagccactgcctctcagctccagccagtggtccttccagaatgggtaaagaccgggtaccgccagctctccatctctgcttgccgagctaaaactctggattttctggtgacctcctatttcttaaatgctcataactaaatcaaattgttttaaatatcattccggccaaaaaaaaccccatttgatgctcctgatgaggtccgtgaggtccgagacccctgcatgaaccagtcagatcaccatggaacaagtcgccccagggcatggctgtctccagccgctctgagtagccagcggtgcagccagctggtctcagatttgggctgtgatgagtctggatggcagaagaacaagagggatgggaaattgagggagggcctcattgaaagggctcactccaggagccagaaaaccagaagagcctaagggacccagagctagagtgagaccagagatgcacagtccccatgaggacaaagagcccagtgaggagaaagggagaggtaaaaggataaaagagtcagaaggagtttcagaatctaagagctccaaaaataaacctttccctttgtatcacttttctctttttactttagttgctctcaacttgctgcttcctttttttaaaaattctagcaattctgcaggaaaccagaagtgtgaaccaaacacagtaactctaggtgttatggcgctgtcctgctcacccttcttttggcctactggcttcaaaggtaggcacacacaccgtcccttttctaatgatccggtcgtggattcaggctcagtaagccaagaccacaagcaacagggcttgggctccatctgcctcggctgcttgcagctgccttccaggaagtgctggaacagcagaagcagctagcagtgcgctcaagaagtggtcagcagttgggagcagctggaggaggggaggccagtgagcaagtatcagcttgggaaatagggtttcggctgaacaaagttcactgctgttttctgagaaagcagaacctagtggagccaccctagagaataaggagaggagcaactggaactgagtgttggctccaaacttccacggcatgatatgcttggccacccaattgtgatcagggccattgttgttcccctgggggcagggggcagagggcaggccgccgctcggagtaaaaagggaagacagacaggcagtccaaacaccaccaaatgacagagatgcagaccaagacaaaaggaaaaaacaacagaagggatttttgtccttgagacgtgctatgcaaattcttttcaattagtttcctattaatgattccatcttgaacatttagagctgctcaacccaggcagcatctacgttttgaagtagtaagttctccattcctagcagagtcggaggagaagctcagctgttatccaccagaaattctattaaaaggatgaaaggttgaactagatgacttctcattctgaagactgtaattcagcagaactgactaatccctggcaaatgataccctttctgagtatgcatgtgtcactgaaagtcactcagacaaaccagactatttgtaaataggtctgattatctgcaaattagttgattgaaggttcccgggtatcaagcagggcttattttaagaaattaagttaatttagataatagctgtgttgaaaagcaacaagttcaaaaacaattaaaaagaatgcagcttcccttttatttttttcaactctatattttcttttcaaattgcttctaatagaccatctgttaagaaagcctcttttgaccgggtgcaatggctcacacctgtaatcccagcactttgggaggccgaggcaggtggatcacctgaggtcatgagttcaagatagcctgagcaacatggtgaaaccccgtttctactaaaaacacagaaattagctgggcgtcgtggcacgcgcctataaacccagctactctggaggctgaggcacaagaattgcttgaacccgggaggcagaggttgcagtgagctgagatagcaccattacactccagcctgagagacagagcaagactccatctcaaaaataaaaaaaagaaaggctctttcgtaaattacttaaatatgcttagaagtcattattactttttaagtcaatagaagtctttttagtttatctaatagcatattaattcctatgctttatgtgtttgtacccacacaacacccagccctgcacctaacacataacaggtgctcaatagatgttcattgaataaattggttgcaaaaaccgagtgtatacattgaacatttctgcatattggtgataataatagtattttgaacacttgttctatgccagtgactgggtcaaataaacactcaacctcatagtaatatctgcgaagtgattgctacattagccccattttacagatgatgcaactgaggctggtgagaggcagagccaggattcaaggccaggcctgtccaactcccgagccgaagctctcagcgagggtatcaaactgaatctgaatcctcttagtttatctattttaaagtgctgcatgtggtatgttcaggagacgaaaactctctgatgaggcacgtgtggatgggatggcagggctgagaaggccggctcccccacggggtgtgcacaacctacctccccagctgtttctgctaccggctggggccttcaactccaccgcctcccctcccccaggccctaaatcactctcaggccttttgttcttccccacagctgctcagcaaattccttgatttgaaattacgatcacaggttggagtgctacttaaaataattttgccaaatgttccatctctctgtgttgatgaatataatggatgacaatttaaagagcaaaaaaaaagtaagtattcactttgttgaagacaaaaaaaaaaaaatcataagctgcatgcatagcattagtttggctctgaaagattcattcccccaggaagctagccaaatgctggacttttgtgaaccgcagcatggccgggagagcaggctgctggcaggtatggcctgcaatagagggagagagcaaaggtcagggcatgtgttgggtttgtttaagcatgagtcagaggagtgggggtagacctggggatccaatttccaatttcctgtgcaagtcactgagccacacttctccccttccccaaaagctttttatgcgtaccgctctgcagaacaaagggagatatggtagggggacacataaataacagggacaggccggtcttcttgaaggtggagcctctcttgaatttggaaaatgcaagctctgagggaagcggggatgaaagcagaccacacgcatctagcactttggccaactgaggcttcctgggcttggaggtcctcacccggggctcttagcgcagcctgagcccagtgtgaagccatgggccagcccttcctgcaggcgggccctgtggccaggctcagctcaggcgaggggtggctgggccatgaggaatcagaacaaagcttcttccttcacacccggtcctgctcagcaggtggactccacgttagacatttcccccacgtcctaaggcttcttccaggcttgagccctgaaaagcaggtggggagagatgagcaaatgctgagcaaaaaagaggtggtggtgacgcctctctaaagttttccataccaaaaaagccctggtacaaggcaggcactgctggcagcccggccccacaagcttacttccagtgcaggaatccaatgggaacatgtgcccccagggccacccgaaacgcaaactgctctctgaaaaccaggtcagcctctctgtaggagtcttgccatgcagaaaacaccaggccctctggaaacgccccctgttcactgagggtctctggctggccggcactatgcccagcaaggccacctcccgtaagtgacacgccagggtcttgctgaatcacaataagctgggagctctgtgcaccccccaaaatgatcttccacacaatgaaaagcactcgaaagaaatggttacagctgctgggggcaccgtcagcctttgagggcagtgaggtgccagggtggcagcctctggggcaaacaagtcccagatccaccgcttcccagctgtggaagtttcctgcccctttctgggcctcaatttcctcgtctgtgaaatgggcataaccgtgtcacttcaccagggggttgtaatgggtaaatgcccctgctctgtggataagcaggggtcttttgagctatttccaccagaaatggcagaagcacggcagggcaggagaagcacctgtctgcgggtcaggacagaaggcaaaggtgtctttacacacagaatatgctacagttctttgtcacgccctcaacctccaggactgtctgcttggctgtacagtctgcttaccatattccctccaaagtagggccccagccccgcccagcccctcatggactccactccagaccctcctcccagacagccggggaagagaggcagagcctgcggtgttcccctcactgagctgcggcagttcccctctcttcctttctctcaggtgactcttttgacccccaaggatccctgaacactcatgtgctgtctccagcctctcttgcttggaagaggaaagaaatatctcgggttcctttgtcttcgggccacactagctcctccctaccccacttactcaggacacaccaggagggtgcagaaggactggctgcccaacggaaggagattttatcactgatattgcttgaacttactggtgtgtggcaattaaaatggtttaaaagcagtctcacttggagctggattgattcttgtctttaaactctctagggacgatgccgtcctcactgccagcccccaaggcacacccatccccgtaccctccttgctactgctcatccaggaccccatctttacgggcctcccaagtcataggcggtcactctcttctctccttggatgcccttaacacagaaaatgatctgcgccctagttaccgcctctcctacaggagccctcgggagacaggcttgtcgggaatcctcaaaaagggtgctctccctctccccggaagctcttcttgggccctttgggaaagcaaagaaataacccgtcctccaaatccccatgggcataagaggagggtctttgatgcctcatttttcttcttgtgtttttattttccctttttgcagatctctgcatttaatgaggaagtgctgtcagcagaaaggagaggaagcttcaccccgaccatccgcaggacccacatccctctcagcgggaaggcagaatcattcatctattgctctccttgaagggcagctccagacactcacgtggacacaagtaggaaaagcacagagtgtgtcatcacactgtgtacctcatacaggtgacgtcctggagaaacctctggaaaaacagaaattttatgacccacaattaaaatgatttaagtaataaataaccctgatagcttgccccaccaagtgtatgctatgttccacaccccaggcccctccacatccatctccttgccgagccctctaacaaccttacaagggagagactttttaccctcacttcccagaggaggacactgaggccaaagaagggaagggattccccaggtgacaccgtaagtgacagagtcaagacccacatggcctggctgaagtcaaggtcaccctaattcctcacacagccccaccagaggttcccacagtgctgtgtgccagccaggtgataaggcctttccacaaaggacatcaaaatacctcaacaggctggacgcggtggctcacatctgtaatcccgacactttgggaggccgaagcaggcggatcacctgaggtcaggagttcaaggccagcctggccaacatggcaaaaccccatctctactaaaaatacaaaaaattagccaggcatggtggtggatgcctgtaatcccagctactcgggaggctgaggcaggagaatcgcttgaacccgggaggcagaggttgcagtgagccaagatcgtgccattacactccagcctgggtgacagaacgagactccatctcaaaaaaaaaacaaaaaaaacctcatcatcagtagagaactgtcaccttcctaaacgaggaaactgacacttttaaaagcaaacagatttctgaacttggggttaatgataaaactggaaaaacataaaagactccctgttcctctcctccattatcaatatgtgccttagatttggatgccaagtcaaatctcaccagaactatatcctccatggtaacttattaaagagtcaatcaaagtttgctttaagagaaaagtaaatacacccaactttccatacaatgccggaccccgagttcacttcctggtttcactgttgactcaggttgcaatcctagataagtaactacacatgctcactgccctgggcccaaagctggggcgagagcctggaatcagcgcacccccaagaattccggaacatgggaagatgcccatctttcatggagggggcatgcctcgaagaggaaaatcaggcaaaaggccgtgtgcaaagctccacgtgcaggtgcaagctgcttgtccctgagtctctgattgcgaggaaaggggtcacccgctggtcgcaccaccaacaaagccctgccatcctttggctctgcgctcacccataattactgggcgtgaggtgggaagggccgccctttgggactcaggtggtggggaggctgcagaacagagtcggcaagtcaactccaatcacagtaagcattttcaaagaaacacataaaaatagccagaagtgggtcagcacttccagtgaggttagagacaggaaattgggacagactcccggtcctgtgtagagagataaaagttttatttcataagtacaaactcatactctttccaatctgattcctcgtttcttttcttttgctttttcatctcctctgtcttttggatacacaggaaacacacacacacagctaacaaaaacagtgtgatgttggaatcttgctccttcagttctaaggtcctctttttcctgaagctgaagaaaaaagatacttaaagaaaacttacttgagagtcaggcaggaaggggagatgggatacacactttccctatctttcaggtttctgcaatctcagcgcatgctgcttaagaggaaaagagcagcaaagcagatgaaaagcactgcatccttaagtgatttacctgttcccaagcaggcctgcctcacacctgcctccccccagttccctgtcattgaccctcccgccaccatatctgtggcatctggtgtgctgcacacacagtatatgtgtgcaagtgcatggtatatacacatagcacacatgcatacatgctataaacacatgcccatatataggctcagtgcacaggtacgcacagtgctcaggtacacagagtacacacacctgctagccacatacactctcagtgtacacacatggtgctcatgcacacatggtagtgcatggtgaatccacatagcatccatgcacacacacagtacccacacacacacgcggtacatacacatggcacccctgcacatacacagtagacatgcgtaacccagaaagtggttcttgctctctctgcaaccttaagactttggcagtttttgttaactcccacacttggcaggattacatttccttgtggcctcaatgacgtgatagggcagatttattgggcttacagaaaaaaagagagaggagagagagcgagagagcgaacagtaaactctgctgtgcagtcaacctggaccttggttttaagttgcacatcatcagggccaagagagaagatttggcaacatggggtggtttggtgagagtcggcatgtttcactggtaatctgctggagcactaaaatatatacatccaaaggttaccttctttcaattcactgaaaaataaaaggagcttcaaggctggaccaaataacacacataaataactcatgcatgcctgcatgcatagatgcaaacatacatacccaagatgtgtagcaaacaaaacaggcacagtgctttcaggagaaacttgggtgtggaagtaagttctacctttttgctctattttcctcctggagggagagaggaaaagcagctgcctaaatgctcagtcagcccacaagctgtcatgcgtgactatctccagggcagacaggagagcaggaacccctttctgaagctgagttctgatgcagaatgttttcagggcttaagacagcccccacacagctagccaacagaactttctgggctgcggtcagttagctatgtcgcacaggaatggcatctgctttcacttatttcagaactcaagcataagtcctgggagtatttgaccaaaagagcctcccgcttggcgtgcgagggttaggtttccagaagatgtagcacgtacctgcgctttcaactcccagaagccaaagctatggaaagatctcagcgtgttttttttttaattttattttaaaatcataccgttttaaaagttctgcttgttataaatccagcctgaaagcagatgaatgaaacatagacccacacaaaaaaaatctacaagaatagatcttttttttttttaacttggggtttttgaggagggattttagaggagtggcggggaagctactcagtcgagataaactccttaaaagcatgggcaaaattcccttttctgtgaccagtttttttaaaaatgacaaagtcacacaagagaggaaatgaaaagggaaatttttagacttctcatctgtgctgaaagccccgggctgtttcagaacccggtcagggtaaccgtcaggcctgcggtcaccgcgctgcaatcccaggaggccttgcgtcagcggccattatatcaataaggaagtacaatcaccaaaccacaagccggcttcttttctaagcccacatgttgctttagagggttttcaaacaagagactttcctgtttttgaaacctgtgaatccacaggtcttacaggttactcaaattatcttatcacttgcagcatgaatttcaaaactgcttactccagccttcccctcccctggaggaacagacgtccatttacaaaccagaatccttatttacagtgtcccgttgccaattgctgacacagaagggggaaaaaataccagttatacattaagctttaaggttaaagtatctgtgccagacgctgtccaaacaccatctattcactgacctgaaggcaggatgaccacaccggagaaaattctacagaaacagttttgcggtcacagcagtattccttcacagagccaggctatgtttcctgcagatgcatacacatgcttgcaaatgtactgtaagaaatcatcacaattcacaggaaacatatttatcctaagatgtgtagcaaatctgttggaaatttttaagcacagccaaaagacatcccaaaccacctatgaggttgcttcccaggttgctggaaaaatcaacgtaggatagcatcggtagaggacgctaccgcggcgcaggtgaaagatgtaaacagtgcaatctaaatcttcaatgggatgcaagtcagacttatttttctcttgagcaaataaaaagattcagattaaagagtgccttatagaactggtacagagttctacatagaactgatatagagttcatctaataagagtgtcttatagatgagataaatccataaacaaacgtctctctttcctgctcagctcagcagcttgagaaagatgtgccacacctaacaactgcatttgacagccatctcctggtttaacttctaccctggccagcggccacttagcgttgccccagcaatgcctgcagacttcatcacgcgctccctcgctggaagcgtccctcctaaggcagacctgaagttcacagagggcttctggacagtagttcacattctgttttcaatggtggcctaatcagactgagaataaacaacaagtgaactttatcctgcagctacaaccagtgaactctaagcccatttcacagaatgcacacagcaataatggatctagcagacacttatctaatctcacactttccgtctttttgggttataatcaacacttagctcatcaacacacacacacacacacacacgcacatcttccaaaaaagaacctgctctcagtttaagcacactgagattttatttatcttattttatttgtctgcattccaataaaccttctaacattgaaatgttgagacagacactctaaagtcaggatgctgtgatgtttatgtttgagggagggttctttcaaagtagccaaaattgtctctcttaggaaatgtgaagtgtgaatgaagccacaccaaaaagtctcagaagtaaatctctcaaagattatgaccagcctgttgtggaataacgcaatatatccttagaggaaaatacaataaagtaagagaattccaggcttcctacacaggcccagtaggtattttttatcttaataactcgttggtaaatggcctactatgtccataggaaaagcatcctcttcttcaactgtgttttaaaaagaataacttcttctttcctcctttggaaaagccattgctccaaaattcacataaaacaaatacagactggttttctgttcctttcactttctgtccctatcactttaggctgtggtaaccaggacttctaggcctaaatatgcttgcctgattttgcctgagtttgctggagaattgctcaaccaccctctcactttggctgtgtagaccatagctcttgccctccctccaggggagaggcattaactaatgaagaaaacagtgactcccctcttctgccaccactgacactccatacccaggcctgtgccaccaggcctgcttccaggactgtgggctgcctgttccctgctatcctgagccttccagctccagtgccaacaagggcactaggtaatgggtacttctgatgaaggacactgcatgagatcttcccatcacttagagaagtgttccatttggggtcattaccaaccctgtctactcagaccagcaaagcatagagaaaaataggatggataggcaagtataaggcatcaccttatatctgtgtcttaaaaagctctttatattacagaatttctttatttggaacaacaaaatactctgaagggaatctcatgaattttagtttggaacgtttatagaggttgtctggaagaatagtttttgttgatttggttttttaatacaaagaaaaataaaagcttt

SEQ ID NO: 36243 - DNA, 2826 bp, Homo sapiens
ccaatggtggctctaatgccgctaagataacaaaaatagccaaagcatttgcagagggcttagctgtagggcagctgaaggcacttgagtttccatcaggctctcaacatgctaccattgcttatgttcacccatgcgtctttttcccattcagggttgctaactccattagatagttgttctctgccacttcctctaatattatcttcccataagatgaggaaaagaaacacaacaaattcagccctgctcagccacgtggtccagcccacacaggtctgtgctacatataaacttgtggctccttgtttagcctcacccctgaactgcaggatgattccccagcaactcatttaatctttctttactgcagtttctttatcactaaaacgcgatgtttgaagaccatggctgaagtagccaaataatattatccaattaaagtgaaaagcaccatataaatgctacagaggctaagacttaaatagccacatatggtttggggaaaagcactccagtgcatcagctagcagtaaaaacatgcaggagcgaaatgatctggctggaaatgaactgcaaattgataaacatttagttgctaatgcagtgtttattattttttactaggataaaaattaacttgtgcggccttagccagcaaacacactgaactctaccatctgggtagtggaatcggtatttctgtagcctcgggttacaggtgactgttgccagatttgattttattggcaaataggtcctggtgtgtccggacaacagaaccgcgggatgcttctggaagcacaaacacgccagcgcaccaaagggtaacattcgagagggagcttagggccaccctcaaccagactcagaatcctgtatttcccaaaaagaggttgctacttgtgttgaagaatcgcctttagccttcgaaatcagccagggctgcaaggcgacgacctctcgaggaaccgggggttcgggcagcgggggatggggggcgcctggagctgggaatgggacgcagggggcggacgccggcgggaccacgtgacagcgccagcagcggccgcagctgccccagctgcagacgccgccgtcctctccccggggccgttttccatgagctttgcaagcagctggatcaatttactcgagccacagcgccctacacaagcacggtctgaattattactcatggaaatcccctctgtttcatggaatcaggtagctttcaaactcccaacaattaatggcccttttggtcaaaggagaatagcaaaaaaataaaacaacccccgccccaacccaccccccagaaaaacccaacccagactgccaggctgagggcttctaaacagtccgtttggtttctagtaaattagagagagtgggtggttgaggtacaagtaatgctatcctgtagagtgtggtcttctttgacgtcagcaaaatgtttctctcgcgtttctgcttctttccctctctccctccttttccctctccaccctcctccttccctctttatgtcaaagagacagatgacatagggtaactgtggaaatgtgctcatagttttgcaacatagctcacaggctcagaaaaattcccacattttaaaaaatgaagagtattgtgggaggtgggtaaattggcaacacaaaaatacatgctacccaggaaaggaagggggaaaggctgctgggaagtgcagtcaccaccactggcggtatggtcttccctccatcctgcccggttagcagctctgtctgagggaacattcttcctgtggcgaagaacacattcttgctccagctggcctgaaatcggatcctggagagcatgcgccctgctccctggctactgtatttgtgggacccatcccggactgctgagccaggatttctgttggctctgctccccctcaccccccttcagctagagttgtttttctctactcatcaaaggcagcaacagctgcccccatgggttagcatagaactttctagaataaggattccaagtctaggcaaacatttgtaacctgaccctgcagtacttttgtttccccttcaaattgcttttgtcagccccactgtttcaacaggggcagccgtggacaccctaggggtctggcccgacagtcacagggtgaggattggtggagtgggccactccctttgtggctgtgaattgccatttggtctctagagtaatgtgactctcacattctttgcccaggcagctctttaaaagcaggaatctatcctgacctcgcgggttctgacgtgctgactgcaagtgtggtttcaggcaggcagagaaaggagcggggcccagagtacacataggcctggttttctccatgtggggtgtactggcttccccctcatcccttccctgatctagacagcaagggcatcagagaaccttagaacagggagtactttgtaaaccaaagcctctaaatgctgcagacaccaggttcatatgaaaagcatatctgccatggaaaaaatacatgcacgagaaaatggagcaaggtcacatgaatctactcagaaatgagacctggaacctgaaaaagaacctctgtgtctgtgtgtgcttgtgtgtgtgtgtgtattgggggagggataggtgcatagcagcatcataagcagataacataagagcacagcacacagtagatatttattaggttgtgcaaaagtaattgcggtttttgccactaaaggtaatggtgagaaccgcgattactttcacaccagtgtaataaggattgggcggatgaacaaatgagcaagtgaatgaattacaggaatg

SEQ ID NO: 36244 - DNA, 9275 bp, Homo sapiens
gaacacttgccacgtgctggacacggtgagtgtctgacacacatcatctcggctggttctcatagcaaccccaggaagtaggaactaggttaagggtatgtcgactctttggggcaccagagaagaaaatcctggacctgaagggtttaggaagatttgaagcagatgtatccaaccaagagcaacccatgtgtaactccaagctggcaaagtgggttctttagtggccctgcctgcctaagtctgacctccactgtagtttctgcccgcctcggtcactgttgagaggagacaattgctctcctgctgacttaccgtgcagagaccctgagggggccgagggtggaatggctctgatcccaggcagcaaaagctggcctagccacctccttcccattgctccttccttcccgcagaaactgcgggagggaagggaagaattggcatccctaggcttcgagggcggttcttttgtgcttccggccccagccttactgggcaaccgctgggctcttgaggaagcagactccagttttccaggacattaagggactgaggtagccagagtgatgccaacgggcctgtccttggtggcctccacggaccttctctcacctttatgagaagagcaggaaactttggtttgacccaactgaagcgctggtgcctcgcagcagctctggtttattaaggctgagcaggctctgttttcaacatcgtcacagggatcattttcctccacctcacgtttcctctcctggaaatgcaccttagtcattttttggtcacttcaggggaattctccctccttcatggtctacaccattgctctactgaattattctttcttccaaacatgctattacagccctgacaccacaggtgtacatttaataaaaataatcctccaggggcatcatttgaaatatccccctctcatgtaagatgtttccctgagaggtggagtggggtgaggtgggagggaccttggaggaggagcttctgcttgaacacagctcgttgccctctgattaccaggacagagtggagttggctgtcaacttgagcttcttgcctactcctcacggaccctggacccccatgcccatacatcccaacagactggattcctattacccacccatgggcatgccattaaaaatatggaatatgaataagctccagaacgcactggactctgcaactcagcaggtgtgtgatcaacctgaacaaaagacagagcccttagccactgccaggtggtttagcaagggcgttgagaagctgtttggctaacagcacacagaccagtctgtgctcccgtgatgggggcaaagatgaagcagatgccctcgtggccacctgacacagcaagttgctagcctccctaaacacacacacgcagtcatgacctccagtgtccctggaaggtggcacgggtaacagccagtgcatgctctctagtcctggccagctggagtccaagccttggataataatacctccttgatgggctaatacagtgtttatagcacttctggcttctggtaggccgctttttattgttggcagaaacaatgtttacagtggcttggtgctgaagatcactgcaatttattgagccatttttatgagccatgtgtgttaaatacattacctctactcacattagccgtcaaggtaggtatcattattcctgttttacaaataagaaacctgagcttaaagcagttaagtaatttgcccaaagtcacatagatagtggcaaagagatggctcccattaaggtaatccatgcctccttcacggcgctgtgctggcctgcatggagagacaggtccacacaagcagagcccctacttcagggcaacacagagtaaatccaagtgattatgcaaaagggcgatggtcgtgtgtgtgtgtgtgtgtgtgtgtgtgtgtgtgtgcgcgcgcgcgctcaccctcagctcaggacagcgcttttcagctgcacacagtctgccaaaggcccatgttcaaaacccacctattgaaaagcttgattctgaccctcagcccacagcaaatgtaggaaacaaacaaagggcattcataaagactagggttcaatgcaaagttcctgcacatagtaaagctcaataaaccaagcagtcaaaaccactggaaagcatcagtagacattcaggtaatgatacatttattttaagcagtcagaaaggaagagcaaaaggtaaaatcagcttctgcatgggtagaggtttatccttgccccttcttcgagatagagctaacaagcccaaagtgacttgaacaaggagaaggagcctcttgcaggtcactggcatccatagataaactgtaatggaagtgtggctatggggataagtgggttttaacacatcggctttgactggtgacaaacactcttttgctctatatccctccataccccctttagttccttgatgataaagactccccctttagcttttccaggccactcttgttgagaagccagtattctagaagttgaagtggccttggaggtcattctttgttgcagcaaactttccttgctgaatcagaccccataaaataccaactatgagtcacacacaagtaaatgagccgctattgggaagagagataatggggtgatatttatcagtggctgaatcttagcaaacaatgagcattgcctaatcagtggtcatgttcgtgtagattaccttccagttcactgcatggtagctcttgggatggtttctaactgtcaatatttacaggaaccaggcacttaacacagaccaagtgggctggatgtctccacggatgactcatgccaaatgaagccttttatctaagggtcactgctctgaatcctcattggctagagcagattggaagtgatcaggtcactgaaaagcttgtacatggctgtgggctcagttccgttctctggatgtaccaacatttatgaaatgaaagcgtagaagagagcaagggtttgaacgcgtgtagacctgtagtatttgtttgtttttattggctaactagtaaatatagctctggggctaggggaaggtggcagtgagatggcaccatgagcccacatcagtctccatttgcagcaagattcatacccttgagtgataggagcctgcatcaccccagacctacctgagaaggcgtctgcgcatcagccaaacatgcagacagacacacaccgaggaaggggtgcagcttagaacccagcagatcaccttgcctggttatgtaagtaagcagagtagacctgtctgcccaaccagtccaggtagaaaaccttggctccgttcaagcattgggagataatttctttggattttgaaagcttaggatattcaggaggcactcatctaaaacgcagctaacctcaggagtagggcacaccctaggtcccatcaaataagaggattctgcttgggagtaagcagggagcaagaggaagaaggcagggccgaggggcagaaatggaggccaggaaaggaaggcactgcaggaggaagtggggcaggagaagctgagcatacccaggctttgggacactcttgctgggctggccctcagaacatcactggaatagacatagaaaagaaagggaagcttgttttaacatcaacgttaaatgaagaaatgccacgagacttcagaaacaccactatggatatgagggaaaagtgaatgtgatgtgcaaatttcactccccagcatgcacaaagaagctgattgcagccacattggcagtcacatcttggccaaagtcctctggggacccagtactatgcaacacgggacccgttggtcaacactgagctcttggaatcccagttccctttaaaatcagcgaactaagccaggattgcaaaacgaccaatgggacaggattattattgtgttgagtggtgaaaaatgtctttgatccaaaatggtagatactgtagaagaacgaggaatattgagtcttccatactgagcctgttttaaatgggcttggcttgttaataggcgcagcaggtttgaagactggggggtgtttccagagatcccaagatgatttcagaatgaaatgagctggtgattcctgcagataaagagatcagagcacacagccatcctccagggccataaatcaaaggacagtcctgtagcaattgtgtggaaacacaacattgccatcatttttgcacacaaaggacaaaaagtgacataattcgtgccccagagaatcattttattgcagccttttccagccaccatgccccataaagctgggactggcaaacactggcaaacacactgccagccacacagtcacagcgtgtccacaacagctggggtccctgttcccagtctttctgagatgcacacatgcggctgcttcgtcaggccatgtgtgtgttctggccgtgagtgtgtatacacgtgagctaaaaacaaacttggagagtgggggacagccaaaagaaaatgatgcttctgattctatactgaagggtctccattctattccagagcttccgtagggcggcatctgctggagagcactctgtttcatttccccctaagtttctgctttctgctgagggtagaggtaaggagaggctgagtagggagggtttgggaggagaaaatgaagaagaaaagatgagctcgttcccgttcctcttttcctgtacttctctactttcatctgtagatcatctagaataacttgcagatggctatatgctcagtgaacgtgttgagaggctgtattcattttcccgggctgtcataacaaagtaccacagactggcttaaacaacagaactttacttcttcacggtctggaggctggaagtgtgaggtgtaggtgccggcggggttggtttcttctgaggcctctctttggcttggaaatggccatcttcaccccatgtcctcagatgggcttccctctgtgtgtgtctatgtcctcatctcctcttcttagaagaacaccagtcatattggattagggcccatcttcgtgacctcatttgtacttaatcacctctttaaagaccctcacacttggccaggcacagtggcccacacctataattccagcagtttgggatcactgaagtgatcacctgaggtcaggagttcgagaccagactgaccaacatgatgaaactcagtctctactaaaaatacaaaaattagcccggcgtggtggtatgtacctgtaatcccagctacttgggaggctgaggtaggagaatcacttgaacgcttgaacccgggaggcagaggttgcagtaagctgagatcacgccactgcactccagcctggataacagagcgaggctctgtatcaaaaattaagtaaataaataaataaagaccttatcaccaaataaggtcacattctgaggtcctgggggttagatattcaaccacaacaaaagcagagcaggaagagatgtaaacaaatgtgcagagccctggcagaagcttggcactgtgccaggcaggagagagaaaaagtgggagagacattatctcaacgtgattgaatgatgaaatgatagccctggtgagtgagtgaataggtggatggatcaatcatgaatgaattgaatgaacatcaaaactgctccccgaatccagaggactcaacaaactccaggcataccaagtccagaagccgagtccagagctgacagcctattcccatctctatctcccacggagctgcagagatcattagggaactaacgtggccactgcttcatgcccacagaggcccaccagctctttcctagagcagaaccaccgtgcagagaggtgaggcactcccagatgaaatccaggccttccccatctgtgagccctttcccaaagtgggctcacagcagcccacagtcacaaagcagaactgaaaccccctacaggcagcatctcaggtcagctgtgcggacagcgctacctgccacaggccacaccagctgcagtgcggtgacgggtggtgttctatgcctgggatagtgtcaccctgccaaatgagagtgaaagtctccacatcctccacgccatcccctcaaaacactcccggtgcccgaaactgtacccctaagtaaggaagccaaattagaggaacagagagggaacatgcccctgagctttctcatcagtgcattcttccacgcactgcagataattcagctacgtcactcaattatgattgtctgtgctgtgagtgtttacttaatcaatcttcaaagagctttccagatgggtgttttggtgactaaatcaaggtcagagttcctcctgcaatcaagcagaggcagcagggggcaggcccagctgacagtcatctgatctccgcagctgtgcacaaactttgaaccagtccagtgtctctttcaggctccccatgaaccccagtccttagtccactcctgaattgcaacaacacacaacacaaatgcacacagcgatgcctccctttcttggatgactcttttatatcatgttcctgcacattctccctccagtccaaacataagcaagttgcacagcgtatccatgaatctttcctttattacagaatctgcactccaaaagcactggcttggtatttcctctgccccggtagggatttttatggggtttttatttggtttcatttttgccatgcttctgagaatggttcttttgttcttccttcactcaccgcttagatcctccaaggcattccactcagaaaatcacacggctgctgcccccactccaaaaaaagggagctgagaaaaacccccattttcctatggattttcaagccaaaaaacaatgggctctgtggacagatgtcacccctcccccaggccatgcccctcactgccaggcaggggaagcagaggcgaaggaggagggcccactgcgccctaggacttgggaatagctctcagcaccacggtggtgggctccattgtatgtcttccaggacaggggccccttcttctggaaagtaccccctccctagcacaaatcagagtccagatgtgagcaggcatcagttcagctcttcccaagccgcagtgtttgagccaatgatggtcacctggccccagtgaaggccgtgaaggcccctctctgtccctttctggcagtgaagtcatgaggtacaataagcaaaagctgccatcgtgcacattacctgccatagagaggaagcttagcaaagagatttagatcagtattcagaggaagttgaggcgtgagaaaagagagagcacgtggcagtgttggctcccagttgcaggtgtccagggtcacacaaagcccccttttaaaagcccaggctggtttgacttgcatttctctctctagaagctctcaagtccttgttgaatatggcagtgactggatgctggccatcctacctgaactagaccagccgagcctctgctctggccaagcaaatgggaggagatggagggagaaaagaggaaatgggagagactgggccggaagaagaacccctgtccaaggtgatggagggcgtcggaacacagaacacctgtagcagttttgcagagggcttccaattctttatcaagcctgcacccgactcttaggttatacagtcttaggcacaagcaattatctgaataattggagtgtttcttagaagaggttttaggtgtcagcagcgatgtctgttcagacggcacactagtgacagatccttggaaaactccatgctctagaagaaaaagccaatcctgacttttcacttcggaatgtctcagctccccacctgaccctctcctatcgtatcattggctaaatagacaaagggaccacaagaaaactacctcctccttcaactgcctcctccatcagtctagcgcctgcctaggtggagcccctgagaactatgctgctcccccaaatgcaactcccacaaaggagggagctcttgaggcaggcacagatccaggatttgcctcggctctctatgtcactagcctctctcagctgaaaccacaggaaggcctcaggtcagaaggcttacccaatgtgaagcaaggtcatagggtccagctgagccccctcactcatccaaaggggtcaagggagggccagcggctacaaggggtcagagcctcaggtttgactccaagttcaaagaatctagctaaagccacactgtgccccctggcaccaccctcagaaacagatccaatcctgagtcagagaggaagcagacactcactgaatcacgcatccacttcctcctacccacagccgctcagccaagaccagcagccgcttccaagggacaaattagtgactgacactcggaaaagttgatgctgtaaaggagagcaagcagggcgccacgcacgcggtgtgaaccaccaggaccgagtttactgtggctccccaccccctgcatttttcagagtaaaactgcacattttgtaacagcccctatcctgtcctgcactgaccttggctgtgttatttttcacttccctgttcagaacacagccacactttccaaatgccatgaatcatcaccaccgagcaacggccatttagcaaggcaggaaaccactgcgcaccaggcctggaaggagtagctccctgcagtgggcctctcccaccctggctgttcgtcgtggcaagagtccaccacggaggctggcagggcagagttgccaccccatgttctcagtttctccaccatcgtccctgggggcttccagttcccccttgcactaggtcacaggcagcgttagccatcttctgactttcccgaagcctctcttggttgcattggctgaaatgaagctgtcaccttccaatctcggaagggagagaaattcttggtgacattggctgaagtgaagctgtcatcttcctatcccagaaaggaaagaaatggggagacccattcgagaccaagggaggccaggcgccatggctcacgcctgtaatcccagcacttacggaggccgaggcaggcagatcgcttgagtccaggagttcgagaccagcctgggcaacatggtgaaaccccgtctctactaaaaatacaaaaattacccaggcttggtggtacatgcctttagtcccatttacttgtggggccgaagcaagaagatcccttgagccagggaggtcaggtagattagatcaggtggatcttgcacagacatcaacaagacatgggacgtgcattctgcctgcaagtg

SEQ ID NO: 36245 - DNA, 2347 bp, Homo sapiens
gcgcggtttttacaggctcaagcctgtaatcccagcactttgggaggccgaggcgggtggatcacgaggtcaggagatcgagaccatcctggctaacacggtgaaatcccgtctctactaaaaatacaaaaaaattagccgggcgtggtggcgggcgcctgtagtcccagctactcgggaggctgaggcaggagaatggcgtgaacccgggaggcggagcttgcagtgagccaagatcgtgccattacacaacagcctgggtgacagagcgagactccgtctcaaaaaaaaaaaaaaaaatcaaactggagtcacccacgctaaagttccataccaccaaaccaaaacaaggttgttatctgaccttctgagaatggagagagagaacagccaatctcccaaaaggcccgtttaaatcttcaatcagaatgataatgaagttctttctgctttaatcctaccacaaaaaaaggtagcatgaagtcacccaaggttaactaacgagttatttttctattgttctatctccctgtgccctccttacaagaacaagtaacattgaaaagtaactaatacaatctttgttccctgtttctgttttcttcagtccttctctgtctacaaagccaacctcttcagctcagctcagggaacacttattccattgtgtggaatgaagtgttgttcgatgccagaatcacaaatcaagacaatcaaggtctttaagctaaattttttgtcattctggtttttgacactcttttctaccgggacctgtttcccagctttctcatggaaaatccctgagccggccacttcctgtttttgttttgcttttctaccccattggtgtaccctttgaccttttgtcccttgtcatgatcctccatctcaaactgggaaaccacgcatagatcaaatccccagccccaagcagctagctctgtgccgcgtgtactaaacaaatcctttctccgaggggtcctctgagttgcttccttacctacaaatgggatgctgagaagacttaggcatttgttttgggctctgctgggctccctaccctgtgtcgtgatgcccccagcaaagccctaggcaggggtggatgccggggtgcaggatctctacatgcaaactttagtaacaatcattgctgagttctgaaacttcttgatccacttttatttggagctagaggttctcttctgctttgttttgacaactagactggctagactatggcctggtgacgcctgttctttttccttcttttctcctgttttgtcccctgcctctgggcccggcattcctggcatatttggaaagagtaggagctggcctgaggccacttttccgagtatcttctcagccctgcagtcccgtttccaacacacagtctctttgcttttgtttattctgcgtttcacactcccagtcaggagccagtcccacaggcaggcccagagatcagactgcacaggcgagagggctggaaactccagggtcctcaccgcctctgcaggtggaacatgcaaaccggtcagacaaaggaggggttaaccttgtacccatcttatggggaatttccccaaatacatctggcacctacgaagtgaaagggaaaaaagaaccccacacagtaagccccactgcctttgaggatttactgcctggagcatggtccactgcaacctcattaagggcccaaagttaagcactattttcccttggtctctgtctccccggctgaccttcgctagcacactttacccctccagcctcaactttcctctctctggaggcgcctaaagaggcttacagagcaaggcgcttccagccagggctcaatcgggtggtacctggggtgacctcattttctgtcaggcccagctaggcctgtcttacatcttacctggaggaaaggtcaacacaattcatagcagaggaaaacctgaagtttactctagtctctaaattgttttcaagttcccatgggggaaagagattgattcattttgttaataagcaaaggtcttatttttccacctttagtcgtataaacgtcaagggggaaaaaaaggctttgtattcaatcaaaagacagttccagcattttaaaaaagtcaagtggagatgaaacagatgatcttccaggaaaaaaaaaaatagtcttaactcccaaattataacaccttaaattatctcatgtttaattctagcaacaaagacctcagtgtttgcctgtgttaaagaatagttaaaagcatagagtgttaggagctacagccaagattcttccaggtttcttgtgccctgcaatgaatcaaaccactggcccagaaaggcc

SEQ ID NO: 36246 - DNA, 2985 bp, Homo sapiens
tatgtgtgtatgtatacatatgcatatatacaaatatacacctgctcatatacatatacacgcaaaggcatatttatgtgctgtttttttgttttgtgttgttttgagacggagtcttgctttatcgcccaggctggagtgcaatggcgccatctcggctcagtttttaatagcaaaacattggaaacttcttaaatgcccatcagtaggtgacagtttaaatcacaggtctgcaagtgggccagtgggccaaaacccagtctaggacctattttgtgaataaagttttattggaacatagccacacctggtcatttacgtctttgaccaatttggagctacaataacagagttgagtgtttgcagcaatgaccatctgacccacaaaaccaaaaatatttactatctggccatttacaggaaaagtttgtcgacgcctaggttaaattatgcttcctctaaatgaagctattaaacgatcctgtaagtctgtaattatggctacgaaaagcccatgatctcttaaaaagtaagaaaattagttggaaaatgttaacacaatcccatttttatcaaagcaaaatgtattcacctgaacgtgcatacaaaaatgtgcattgaaaactatgtatctttcctctagaaagttatgggagaaggaagataatagacggtgttttttcttccttatattttctttttgtgtttgatttttaaataatgagtacaccttaaagttctttttattgggagaaacagttgctcacttcctccactccctaatagctggtgaaaggtgtcagctttaggaagggctgtgtcagggaaatatcttggcttctggggtgttggggcaacaaagggccaggaaagacagcccctcagaggaacagaccccagtgacatccttgggtgggcccccgcctgagcagcaacttcttccagctctgtctcccactacagcctctgcccttggcatggtccagagctgcgatggcgaaaactcatcaccaagcattgcctccgctgcacccaacccagcagaaaaagagtccagagaacatcctggtcctgagtcagcccctggcttcaacccacaggacaccacagggcgccacgggacatggcacagcgccagatgccagggatccgaggagacagagcatgatgtccaaacatgaatggcttatttttagcaaagtccagccctcacatcctggccctgctccagggtgagcaacaacattccctctgactcagctccgcaagctgactcggtttcagaggaacaaggtagtctctccttgctgacgttagcggcaggcagtcctccccttcaggaaaaatctgtacagcagttctgattccttctgggactgtgtgctggctgcttccagaagaaacataactattcccttcacagtctgggcttcggaactgggtgcagaaacttccacactccatctcctggactcccatcttctaaccttcccgtgtgatttccaaggaaaccagatggctgccttctcccccctcttcctcttcctcctgcacaatgagccgagagacccaaccctgcagctctggcctgaaactggggcctgtttctcgggggtttctgtctcttcaatcagtccccacactgtgtccagcagactagagcaatgaagggaggaatcattttcttccagtaacgacactagaacctatgttctgctgtaatgaatgatacaggtttgccaggaagacgtgtcatcaatgccaataaaacaaggcagagtacagatacctccagagatcttgccagagaggctcacagccccgataggtttgtgtatgttttggggtgggggaacatgagagaatgagagattattttccttctggacgttctcaacatgcctgaaatagcaaggacacagctgtccctccccagttgtccctgtgtgattggaattgcaggagtcagttgtctcaaagcaaagaaagtgcagagcctgcacgtatccagatcttccgaaagacgaggccctgttctcctggcctggcgcctgggtttctcatttgctcctaggtctctggtattgtgccgcctgcatcccaggcaacgccagcaacccaagccccgctgaacaagtcaagacctctctggatgaggtcaggagctggagcttccccttattttgttaggaagcaccatgcgtcagcctttattcacaccctataaagttgtagcctttaaggttagtctcttccacacctataattctccaccagagcaatttgctgcagagaaagagccctccagcaggcagtacctgtgagtcacggcttcttcctggcccccgcccgccctaaaggagtggctactaacaggcacctttgatcctcaggctgctctgggagttggaagagtcgcggaggctcacctgtagtcataaggtcaagagacttgccatgagaaatagtaacagtagcaccgcctggatcccacccccggtcttctcctttgggcctctgttcttcctctaggggttggatctttcagctctgccatctgcctttcatatcatcagttctatttttgttttgtttttgtttttgtttttgtttttgtttttgagatgaagtcttgctcttttgcccaggctggagtgcagtggcgtgatctcggctcactgcaacctctgcctcccgggttcaagcaattctcctgccttagcctcccaagtagttgggactacaggcaccgccaggctaatttttgtatttttggtagagatcgggtttcaccatgttgtccaggctggtcttgaactcctgacctcaagtgatccacccgcctcagcctcccaaagtgctggggttacaggcgtgagccaccacgcccagcttagttctatttttgagtgaacaacactctccattggcagggaaaggtcaccttggtatgtggcctcgcttacggagtagagtttctccagg

SEQ ID NO: 36247 - DNA, 2472 bp, Homo sapiens
aaagaacacaaactaaaaactacaatggagtgggagaatttttctgaaattagtttctaaagatttgagactacataaagtcagaatcaccccaatacaagcaacaccaaaatacattctaataacatttttagactttaaagaaaaatataaaatcccttggacatccaggaacgaagagcacactgcttagaagggagagaaagtcaggtcatcctcgaacttctcaacagccacactttgtgccaggagaacagatggaaagagggtgaggatggaagcagggagaactgacaggaggcagagccaactggactttctggtcgatcaaacacgggatgtcagaatacctgagcagctaggatgaagtttccattgatgctattgggtagactgtgggaggcagtggtttgggagccaagaataagctagtagtttgtgcatactatgttttaaatgtctactaataatccatatggagagctgagtaagcagctatacaaagcatctggcatttgaagctgaggtctgggttagaaatatatatttggaaaagatcagcatatggaacctgggtaaaatcaatgagggagtgagtgaggagaatacacccctattcaaaacttcacattggcttttaacaaaatacaaatcttttatcttgaccaataaagccttacatgtggctccctctcacacctcatctcctgtcactctccacctcactccaggagctctaggcacataggccaccttgctatctctgagtaacttcacttccatctcagagtgtttacatttgctcttccctatgaccaggacatgttccctcagatgtttgcatgcctgcatgctgacatcgttcaactctctgcataaatgtcagctcctcagagaagtcttctggtaccctatccaaaatatctgcccccaatcccaaacccaccgctgtcactctctaaccccttaatctgctttatttttccattattcacaggttcctttttcagtttctattgctgcaaaacaaattaccccaaaacttaatggcttatcacagccattttaccaggcacatggattctgtgggtcaggaatttggacaaggtgcagaaagaatgccttgtctctgctctacaatgtctggggcctcaacagggaaggctcaaaggctggggtgactcggcagctagggtttggaatcatccgagtgcttgttcactcctgtgtctggcatcagagctcagctgactcaaagactgggaatgctggccagagatctccatgtggcctcccagtgtggcttggcttcctgacagcatggctgcctcagggcaatcaaacttcttacttggttacagagacccaagagcaagtgccccagcaaacatggaggaatctgcattgcctttcaagacccagcttcaggagccatacagcgtcacttccccagcaatttacaggtcaaagtagtctcaagcctggcaaaaggatgaacacaggtgccatgtctcaacagaaaaagaatcaaagaatgtcgaggctctgtcccaccatactgcctgagaaaaggttgagctcttcttcccaagcatgctactagatgcctgtggaaagaatgaattgtcttcttaatatttgtctgttgacctatgattgtcttgctctcactctctccccttaccctggagacaggactctgagctcccagctgctctagtatatatcaagtcttgatataagatcttgactccacaaaatggagaacacagtggttctctctttacagcagggctcctaaatctgtcaacagccccctcctccataatgaatggtccatgtccattttacaatctggtcccttaattccctgtaacttcttgtcgggacttcttaaaagggtgaaatacttttctgaatattggaaaaacccacaaaaacacaacagaagaattaaacaagttcacagaagctggttcacaatgccatttgattaaaaataattgaacaaggaaaattaattccaggcagaactgagtagttattttcctaaattggagaaaatgcttctctttccaccatcaaagcccctaaaaatgccaccaagagtgttgaataacattaacttgagatgggaaaccacatgactttacgcccacacactcgccctttggcctgggcatgcttgattcaagagaagagttacatgtgcctgagcacctcccatcaagttttagaagctttgcattgcactgaccaagagtttctcttggattatagctaaggctgggcataggcttgtgtgcaatcatgggacagaaagagggagagactgcatccaaagggagatcaaatgaagcaaaacaaagacagggaaggaccagacccaaacccagatcccaccggcaagctagaacatggcttgggttgtctggaagcagtacccagacagaaacctcagtgtggtgaatc

SEQ ID NO: 36248 - DNA, 2118 bp, Homo sapiens
  modified_base (1)..(324): a, c, t, g, unknown or other
nnnnnnnnnnnnnnnnnnnnnnnnnnnnnnnnnnnnnnnnnnnnnnnnnnnnnnnnnnnnnnnnnnnnnnnnnnnnnnnnnnnnnnnnnnnnnnnnnnnnnnnnnnnnnnnnnnnnnnnnnnnnnnnnnnnnnnnnnnnnnnnnnnnnnnnnnnnnnnnnnnnnnnnnnnnnnnnnnnnnnnnnnnnnnnnnnnnnnnnnnnnnnnnnnnnnnnnnnnnnnnnnnnnnnnnnnnnnnnnnnnnnnnnnnnnnnnnnnnnnnnnnnnnnnnnnnnnnnnnnnnnnnnnnnnnnnnnnnnnnnnnnnnnnnnnnnnnnnnnnnnnnaggtgcatcggttctcactctgtcaccaggacttggatttaccttttaaaaccctctaactttctgcatcttgcacctgaaggagacacacctgtggctcagagtgaaccagaacaatgtccacctcttcccttctaagctttcatagtacactttttatttgaaacgtgcttgaatgacgtgtgttgtgatcatttttagtccatcaaagtcctcaaacagatacaaaaaggaaagtgttccaaggctcatttcacaaatatctgggtgtctcagagaggcagagtgactcaagcacaatcagcggttttctgaatcctttagaacatagggcagaggcctctgtgggtcagttgaggccaaactgtctcttcatccactggctctggtttcagtaagatgcccttttccatcagcctaagcctctcagtccttccccacatactccctgtggtctctcccaccccgaccagtgagaagctccagcctctactttacctgcctttggttcgtcccccaccccaacaccctgagaaatccgagtggctgtcatctcctgtgcccaaatccacacactcatctgccagttttctcactgacctgggatagggactccacttacttccctcctccaccatgggcttaataaagacaataataacctgctttgtagctctcctgggggtgactaattggttaatcttgggaaggccctttgaagatgagaagccggtattactcacggggttgaaggcatgcacctgccccagtctgggcctgagtcagcagagaatggcctcccacctgcaagcaggctgggagagctggccggggcctctgctcaaggtcaaggttggccaacagaggggtgtggagcacacacctggcacctgtgggaggaaaccaagaggccttggcggcctgcgctgggtgagcctttccaactctgggaactgtgccccatcagcatttgcaaggtgtaataagccttccagtaactctgccaagagggcagcacatgtcaggaatagcaatcgagacagtatttcctgataattgtttggggaaaatgcttttctcatagcaaagccctcccattttctccttcctctggaggaaggggagccaggggaggtaagtagggcatagagctgtggggcctgagatttaggatgcaagctgtgggcagcggggctctcttcttaaacagctcatgggtatcctcagcctgtctcctactcatctctccaaggaaaaggaagtggcagcaagaactgggaaccacctaaataaattaaaaatagaactaccacatgatccagcaatcttccttttggttatatacccaaaagagagaaaatcaccacctaggagaggtagctgcactcccgtgttcacaacaggcaagatagggaagcaacctagatgtccattatggacaaatgagtaaagaaaatgtgtgcactcaacaggaatggggaaagaaagaatgaagaaagagagaaaggaaggaaagagaagggaagggaggcaggcaggcaggaaaagaaagagagagaaaaagagaaagaaagaagaaagaaagaaagaaagaaaaagaaagaaagaaaagaaagaaagaaagaggctgggtgcggtggcttatgcctgtaatcccagcactttgggaggccgaggtgggcggatcacctgaggttgggagttcgagaccagcctgaccaatatggagaaaccctgtctctactaaaaatacaaaattagccagacatggtggtgcatgcctgtaattccagc

SEQ ID NO: 36249 - DNA, 1882 bp, Homo sapiens
ccccttctctactaaaaataaaaaaattagctgggcatggtgatacgtgtccgtaatcccagctactcaggaggctgaggcaggagaatggcttgaactcgggaggcggaggttgcagtgagccgagatcgtgccactgcactccagcctgggttacagagtgagactctgtcctcctccccaccagccacccccaccccccactgcaaaaaaaaaagaaagagaggccaggtgtggtggctcatgcctgtaatcccagcactttgggagattgaggtgagaggatctggcttcaacccagaagttaccagcctgggcaatctagtgagaccccatccctccgaaaaaactaaatattagccgggtgtaatggcatgtaccagtagtaaactcctggcaggaggactgcttaagcccaggagtttaaggttgcaatgagttatgatggcactgctgcactccagcctgggtgacagagctacagagagagagagagacagaactgagaaccagaagaggctaaagcaagtagaagaaggcaagcgtcccttcagaccacgcctccacccacccttgaccctgcgagagggatttagacacagtggcagctgggaagccaagaacagaacacattaagccttgcaacctaatgccaagattccgcccgagagaccccatttcctgccctctctgcacattccttccattcctcccaagcaccttctcccactgctattttcttctttcttctagaaaacaagtcatgtggccagaaggatgtcaggcacttctgctttctcttttagattcccgggttcttataaggttttcctggccttctctctgcctgcaaagcccctggcaccgcagaggcccccaaaacacacaggatgataaagctctagagagacaggatggaagcctgggtgcatgagtgcgggaaagagggcacaggggctactaaatctttgcccagatggcggggcggggctgggggagcagagcagcagcaacaggctgtgaagtgattttgttctgttcagttaggaaggaggtgggtggaaatgacagtttggagccgatcagaacagaggaaactgtttcaggagaagctgcctcccttctccagttctaacagtgccatcaagcggctcgaggagcaggcgcagggcagtgcctccagacaacctgagctgacccctcagcagaggagcacgaggctgggcagaggggcagctctcagcaccctgcctgtggcaagggccagtcttcagcctcccagacagatggccaaacacctttccctagaacgatctgcaaggaggtgggtaaggtatctccccagttgtaggaataatgcacaagcaccttgatggatacggacagtcaagtttatcaaggtcctgcgaggcgcttcactggaacacactgggacaaatgccatcgtcctgtaaaaggcgccaaagcacattttcaacctgagacgtggtcagtcaccagggcaagcctgtcaatgccatcaggcccttgttgattgatgttcaaaggagagcagaggacaaagaggacaaaagggcgctgggcaaaaccagctgtgaccagcacaccagggggaaggctcataggatcctccaagctaaatttattgtttcacctacttcactcgcattcctttttgaattctgcaaatcaaaatctattcacctaagaaatacaaggctgggcacgctggctcacgcctgtaatcccagcactttgagaggccgaggtgggtggatcatacagtcaggaattcgagaccagcctggccaatatggtaaaaccctgtctctactaaaaatacaaaaattagctgggcttggtggcgcatacctgtagtccc

SEQ ID NO: 36250 - DNA, 1578 bp, Homo sapiens
cacgattcccctctggtagacctctcttaaaagatgtcgcaggtatgaaataagactgagccacgggagaagcgcagccctttggactcccctgcaatttctatagcattcactcatatcttggaagcacttagaacgaagctaccaagagggtttaagaatgcagcaatgagccaggcggatcatctgaggtcaggagttcgagactagcctgaccaacacggtgaaaccccgtctctactaaacacaaaaaatcaccgggcgtggtgacgcccgactgtaatcccagctactggggagactgaggcaggagaagcgcttgaactcgggaggcggaggttgcagtgagccgagatcgcgccactgcactacagcctgggcgacagagcgagattccgtctcaaaaaaaagaatgcaacaatgatactgcactgagcatgcggatttagcctcagactaaaatttgcgacaaaaatgcacgactttttagttaagagtagaggtttaaaaagatgaacgacaaaaaaagagacaacctcctccccaggccacacacacccgagattgcaacagaaatcaagagtgcatttgcacggctaaagtgtctggggaaaacaaaacgggaaaaatccttcctccaaaatggaattcctacggggcactagagcccccggagcggcgcagccagcgccatcgcctattgagggccgcaccacgcggtcgccctgcgcggcccacaggctggtgggaggcaatgacccctcctgtgaagggcggcggccgaaggcagcaagcctggccaggggagagaggacccactcacgttctcgaagcctgttcttgaagttggggtcacttcgtcttttgcggtcgaagtagatgcagtacccaatgaaaagggccccgcatacaccggcggcgatggcgctgttccgacccaccatcttctctacaacgctgagcgtggacggtggcggcagggaccgcgaaggagcggtgggccacgaaccctcagagcggtcggcgcagctcacacccgacggccgcgggccaggaacacagaaaggccgagcacacgccacttccggtcccagtcaactaagggcctcgaggtcgtccgcggcagagcctgagcagaggcccagagcgcggctcctgcgcctgcgcagtgggcgaagccggcgtttcccctgcgccgctgggtgtacgcactggagtcgggaatttgcacgtgaccacggactttttttcatatccgccgaccatgctgtaacgaggcgtacgcgttactggcgtgcacgtactcagaagactagctgacagccttgtttgtggcagacagagatgcagggtcccagactgcgaatgcttcatcttgtctaacacaggcagcctgtgacttgtttgaattaaactgtactttcttttcaggttgccacaatccattgtgcgtagtggttccatttcaaaagaatgttacaggatagcctcattttatgataactggaataaaattaaatggagtaatttcttgaaaaatatacacaattgaagaaaaaatagaaaacgtgaattgtt

SEQ ID NO: 36251 - DNA, 1602 bp, Homo sapiens
gattttccataataaaagttttgaaagaaagtagaaatatgaaataaaactgacgaatattccaagtataggaatgttaatttaccatctaatttctttaacatcaaataagagaattttaccaacctgtctgccaactttttttctgcgttagtgtgtttcttcttcgctttcacttttttggcaggttcttgcgaaagtggtctttcaatctgggatgtactttcttcctcctcattccgtttcgtttttttgatggtttgctttttaaaagtttgaagttatatttgagaccccatacttctagaattctgaccctaagccataattcagtctttctaaatgagaatctcttctctctcactggtatgtaagagtcatgaaaggttacttaaaatgaatcctgtctgccccctttagaaatcacgcttcacgcggtaggtaagaagattgctttgtatgtaagtggttctaacgagctattcgggaagaaagcccagtgacttactttaggcacaggcacgtacacgggttgaatctggggctccagagaactgaagagggacgccagccgaccggtgccacctctggaatggtgttcgccgcgaaataagctactggcgacctgtccaagcctgtagtcttccggcggactcccgcgaacgccgtcgtcaggattctctctagaaatggacgacagaaactcagccacgccacgcaccaccgcttcgccagcacgagggaacgtacaacatccctccccaggtactcgtgccgcgcgccactcacccctcctggacacttctctttctcttccgtttgctcatcccttccaaggccattcttactccaaagactcccagactgcagctgcgcgccagctcgcacttccgggttccgggcacttccgctctctggccacgccccctcccctccggcagtcggccgccgggcggcggcgaagggaggcgctgggtgagggagcaggtttgtcgccgtcggttggtggtcctcgccgtttcagaaaagcctcattttgggagtgaaggacgtcttctgggagtggttgaagcctgcagtgtgaagaatcagccaggctaggagcggggtgtccacccaagccgagagagaaacacgtagaatactgacttgttgaaaaggagggagggaggtttggcaagaaatgcggttaggggtgaacgcagtggggtgtttacaatttgctaatcgctgtgaagagtacaaaggaattctttgtactcttcttgcaacttgtctgaaacatgacattattccaaaataaaaaccacaactctaacgagtcacgtcaacatacaattcgaaagattgtaatgcggacctgctattctacctggaaaagtagatacttggcattcaaaacgcttcaaggtgttctcagcccgtcttcccagactcatctccctccagcccctgacattctagcctgctttctccactgcctctacagttgttattcctgtcccctctgttgtaattgccctcctctttccccttctgcaaaataatgtccatccttcaaggcctacctcagatactgtctaacttagtatttctttgcag

SEQ ID NO: 36252 - DNA, 3288 bp, Homo sapiens
actgatagaaccacaatacagttcagtttctagggtcagattacctgacttgctttttattttaccttttaaaacactttaattcatgccgttattcctctcattccctacaaaaagagatgttcaatatgggagaatcatcttcagttgagacatcctataactgcctccaactccacagcaaagcccgccagctgaccccggtctctctggggaagggctcggtcaccaagtcaccaaacacaccttcctctgcaaaactcggaagccccacacgacgacctcgtcgaaacctcctacttcctgaattcgataaccccagagattcgttttccgcaggcaatcttaccttcatgatgactctgggaccaaggtatcctctaaaacaccaggttcagctgcacctggaggggaaacaaaagacacccagtcaacaccacaggagcccctctgcactggcggaggcggagggaaagaagcgagcgacgtccgaaccccgaagaaagagccgcaaccaggcgccagcccccgaaccatcacacgccgactcggggctccctccggccccgccatccccgcaaacccaaccacctacacagctcggcagcttcccgtccccattgtcgagacccgacggagtttcccgtctacgacaatgacgccatttctgtcagagaagaaactcacaacaagcccggcgtccggcgcagggccggccgctctcccctagggcctcggcgcccggccgagcgaatccgcgcccccacgcgccgcgtccgagcgagaggccggccgggggccaccgaggggccaggagggcctgtgggccgcgggcaggaccggcccgccacagagcccctgcccacgtcccgttccgggctcagacccgacaagtgggagcgagatcaacatctggccccgccgcggggacaacgtgagggccgagggccccggaggcggaacggcccccaccctgcccgggcccccgaccgcggccgctaaaccgctgagtgtgcggccgcccagccagggggcggctcggacacagcggctgcggggggtgggggttcccgggaggccgaggccccgaattcgggcgccgcagggaccaccaccgcgatcttcctctgctccttggccgggcccagcgactcccaaaagaacccccttaggagaccacgaaagccccagaaaatatccctaccttcctcggaggcgagatctgaccctggcacgtccagagtcccctctctccttctcccccccaaaaccagcaggcccgggggagagatggggaagaagggcggcgggtccagcggctgctgaggcagaggctccggctcctcctcctcccgcggcggcgactggtacctttgtttggcggccgctcgggctccctggttggggggagggggacgacgaaaaatcccccccggactggaggtccgggcccccaatcgcgctgccctccagaggacggcggcgatggaccctctgcagctccctccgggcaaaggtccaggcggtggccgtggcggcggcaagatgaagctcaagagtctccctccgcttcggcgaccgagctcctcactccggactcgactgacgggcaaacatcgcttcccccccaccgactctaggttccccccctttctcccctcccctagattttttttccccccctcccctacctctttcccggatggcctcttagacgaccttggattggttaaagttctttagaacccgcctatacactgttcctattggtccctggatacaaacaacgacgccattttcccaccagttctatggaaacagaaagttacgcctcaaggctttctgggaaataaagtccatactctggggccaacgcgcaaatcctcgtccgcgagaactgcaaggcccgcaatgccctgcgcctgcgtggaccggtgcgggggcgggggggaggtgaaaggggcggggcaacaaagcagtagggaggcggcaacgacgcctgcgcagtgtgaccgggatggcgcattttcttgcaccaactaatgcggtgtcgctggcggctgaggagggcggagagttctgtggtgaaatagtgggaaggattcatgtaggcatcgggaagagcctaagtccacattataaaataggaagttgatgcggggtacagttactcccggaccggcggcgtgaaagtcgtgatatcatcgttgaactgtgagcggcagtggcggcggctggggggaacccggatgggaagaagggcgggggaggctgggaggcggggcagaggaaagaaagaaaggagagtgaggacccggatgctgaaccggattgtgtatgaattttccatcccctagctttaagcgaggagggagaggaagggttggccaagtggggcggaagggagcatctgagcgaggaggaagcagaaacctcaccgtttcttcccctccggactctgtgctagcactgtatacgtttgcagttctctgcccagccgctgtggaaaatcggcctcgaagtgattgaaattccctgtttatatcaggcggcttctttcagatccatcgtctttctcccggagtatgaatggaaggattcagtatgcgcttcacatttgtatgtctctggccattctcaaaccaggcccttccctttgaaaagtcttttgcatgggatgttcacttcttagacgcaaggttgtgtgccctggtttcatcgtctaacgcgttagaaggcgctttcatttcttcatgggtgttgagcgccgaccactggggtggcctctgccttcgtagacctgcgcctggtgagacggacagatgctgaacaaaacgatgtgaaattaccgcagtggcagtgccccagaggagagttccacggtgataggagaatgagggaatttggcttctttagggagggaaaggaagggtttctgagcaagtgaggatcgagctgagagctgaagggctagcaggagttaactaaggaaagagaaaaggaaaagacattccagacaaaaagactaacttgtcagaaagccctgtggcggaagggagcttttccaatatgaagaactgagcctggagagatgggatgagggggagtgtcgaaccttttaggctttgtaaaggagttttggttttctcctaatagcaatgggatatcttccaaggaatctcaatcaaaagggagagatggctccgattggaatgtcatccctggctgaagagtagaggaagcgaaaaaaagaagagttaaagaggcaaatgcagggaacccgacgag

SEQ ID NO: 36253 - DNA, 1447 bp, Homo sapiens
tttttctatcactgcatttactttcattctgccttatgctttaactaggtaattttttttttttttttagttttggcggtatcaacactatattcttctctttgaccaccgcatgctgcctacgtggtagactctcaatacgcatggaactgaacctcttacaggatttgtaactcacttctgtggtatctagtaaactggaacacgcgctttccctgggctgctctgtcatcccaggtttcagcactcggaaatcgcttgggcccccgcccagaggcggggcttgggtgggctgaccactcctctggcctccaatactgtcgctgacattctcgtctatgctccagcagccgtacctcactccggtggaggcgggacttcctacagcacttccggccagagcctcaagcttcgctgctgggcagttggctggaggggctgctgctgggaacacctggagtctccgcgggcaggtgagcttcagaggttcggggagctttcggaacgagcattcctggccggtgcgtcaccctgcagtgctcttggccttttcttcctttcctggaatcttcccagattgccagagccgggcgttgcctgctccgtgcgctgggaggcggtccagccggctgggttggggccaccctgcgcctcctggaaggccttatttaggagtagccgcacgtgatctctagcattttaagcttctctcagagaattggcatgtcactttggaagaggtgaaaatggtacaggcgaccaacgacttttacaaggtgtcaccttagaggaacagcctcgtccttccgaatcagttaacattggtgatgacagagaaataacgttaaataggtggagagcacttaaagtaactgtttgttcttttgagacagtcttgctctgtcgcccaggctggactgcagtggcgcggatctctgatctcggcttactgcaacctccgcctcctgggttcaagcgattctgctgcctcagcctcccgagtagctgggattacaggcgcgtgccaccacgctcggctaatttttgtatttttagtagagacagggtttctccatgttggccaggctgctctcgaactcctgatctcagatgatccacccgcctcggcctcccaaactgctgggattacaggcgtgagccaccgcgcccggcctaaagtaactatttttacttggtgtttactaccaaatggggactgttctaagttgtgggtggatccaaatgatggtgtgacagccttatcctcagagaagcagtcctggcaggaagacggggttaacaaattgccaaactgttagagaaagttagtggaggtagagatgaagagagaagacttttcttttctctggcattaatttagccacggccgctgtgttttgatacttgcttcaaacgtttttcatattcttaagttttaacttttctg

SEQ ID NO: 36254 - DNA, 1974 bp, Homo sapiens
acagtcctttaaattggatgaatgtaaacctttctggctcattaccaatttacaatccagtaagtaaataatagaaaagagaaacagcctagatttccagtaagaaggaattgattacacaaaatacagaacatctgaatagtggaatgttgagccaccattaaataaatttcttatcataggaagagttacatgtcacattgcatttctttgtctttttttttttttttttgagacggagtctcactctgtcgcccagctggagtgcagtggcacaatctcagctcactgcaacctccacctcctaggttcaagcaattctcctgcctcagcctcctgagtagctgggattacaggtgcccacgaccacgcctggctaatttctgtacttttagtggagacgaggtttcaccatattggccaggctggtcccgaactcctgaccttgtgatccgcccgcctcagcctcccaaaatgctgggattacaggtgtgagccaccacgcccggcctgtcacattgcatttctattattatttttgatcgcctgatgtcagaaaaactgcatgaagccctgaaaagggtgctggggagccttcaggcagagcctgtcttctaaatttttgttgttgttgttgatttttattagttttcaatttctgaaaacgatctttccctagtaagctgtttttccttaagtatggtacagtgaacacaatactgccctggaaatcagggggcctctagcctgtttttaacagtcttttttgtttgtttggttggtttatttgtttattttttgagacattgtctcgcctagactggaatgcagtggcatgatcatgactcactgtcaccctgaactcctgggctcaagtgatcttcgcgcctcagtctcctgagtagctgggactacaggcgtgcaccagcacacccagctaatttaaaaaaataaaaataaaaaagagatgaagtttttctatgctgcccaggctggtctcaaactcctggcctcaagcgatcctcccacctcggcttctcaaagtgctgggattacagatgtgagccactgcaccagccccacttttaacagtctttatggtcctgaacaagacaagtttactaacctttaaaatgaaggtcagaattaggtaaccacacagcatatctcctggtccactatttcataattttagaaagtcagggtgttcttaaaaggccaactctacttgtagacttgccatctctgaatttgttcagagctgttcaggttatatggttagggagaaatattttagccaggcccacagattccttaggtacctggaccatgaccttacaaaccctccagtgaaaggacttttttcttttttttgagatgtagtctcactctgtggccaaggctggagtgcagtggcgtgatcttggctcactgcaacctccacctccctggttcaagcaattcccctgcctcagcctcctgagtagctgggatcacaggcgaacgctaccacgtctggccaatttttttgtatttttagtagagacggggatttcaccaggttggccagactgttctcgaactcctgacctcaggcagtccactggcctcggcctcccaaagtgctgggattacaggtgtgagccaccaccccctgtgaaaggactttttatttggaacttaccccagcctacttccttcttgtaaaagcttgcccaaattgtccatacttttatggtctttaatggtctctggatacagtgatattttcaaagtcttggttgctctgagcagaaaaatcaagaattgcttcaagtcctgggtgatgcagggtttgtcctgaaatgctaatgggaagccttggttcagggacattgagtcagtatagtcatgcattgcttaatgaaggggatgtgttctgagaaatgcctgttaggtggtttcatcattgtgtgaacatcatagtatacttaa

SEQ ID NO: 36255 - DNA, 1314 bp, Homo sapiens
aatattaaattcagctgattagagaagcaaacaaaaagagcagtctacagcaaggtgcttatctactgtactgctttactcacaggaaaacaacctctctgggtcagctctttagatgttacagcgctgaacactgcacgaaagctgagttctcctctcctgatgaacagctagttatgcaaccttgctgaacactaaacattcctgaaacaaacagggtatcaagatcaacagtatttattagaaactccccagagacctggccttttccagtagcttgtatccaaagctccaacaagaaagaagcttactgtggaagtctgggagtctgttggggaccctttacctttgtgtagtgttgccagattcagcaaacaaaaataccaaatgcatagtgaactttggatttcagataaacagccaatcttttttttttttttttttagtataagtatgagacatgcatgggggcatacttacttaaaaatgatttgctgtttatctgaaatacaagcttaactgagcatcttcgattctatgtggcagtcctgatggggacataggacagaatgaatcttgataactgggttttatgagcacatgctgtttccacaagggccatgggtcaggatgatgattttaccagcagcatgtgtaattggtaggcagaaggaggaaggaacctgaacaggccaaatgcttccaagagaaacgtttttggacacccctccctgtattctcctcctcaccaacatttttctctttagacatggtttggaatttcagtgtttggatacagtttcttaatatattaatgtagaatctcagtggagtctatgtaaattattacagtttacctcttggagatttgttgttattgatgggcacccattcagctagggtttttcactatttgttgaggctgttttgttttctgagaaacctgctggaaatgttccagaaaatattgatctttagtgttagtctttgatctgtaaagggcatagcatccgttttgcaactacctaacaacattcctaactctcctttcatctgcctgcaactaaactcaacagtaataaagatctgttcatgacttcttgtttttttaccatggttttaaaacttgtttattaccactgttttaaaaagtgtagatttagggcctggcgccgtggctcatgcctgtaatcccagcactttgggaagccgaggtgggcggatcacttgaggtcaggagttcgagaccatcctatctaacacagtgaaaccccgtctctactaaaaatacaaaaaattagccaggcgtggtgg

SEQ ID NO: 36256 - DNA, 554 bp, Homo sapiens
cataggcagagcagccagtaaactaggcttgtaacttaagagacatgtttaacttacagaaacaaatcactgatgtgtgtgtataagccatgagagagatatgggacttaattttgctacaaaagaggatttaatttcctgcataatcagcttccccctattccactgaattaatttcatcaacatacaaggtggatattttctcctgtcttaagcaatctccctcctttgacccctgtgccccttcaggacaagggtaggctgtgctcacttgcctcccagtctttggaactcaccctcgctgggctttgccctattgccccacccagactgctcgtaggaaaggttatgttcatgttgctggattcagtggcaaggcctcagctgttaccttacctgacctggttttagcattggacatggttgttgactttcttcattggcttccaggacaccacactctccaagtttcccttcccatccctttcccttcccatccctttcccttctcctccccttcccctcccctcccctccccttcccccctcccctcc

SEQ ID NO: 36257 - DNA, 611 bp, Homo sapiens
agctgggactatgggtgcccaccaccactgccagctactttttgtatttttagtagatgcagggtttcgccatgttggccaggctgttcttgaactcctgacctcaggttttccacccacctcggcctcccaaagtgctggaattacaggtgtgagccaccatgtcccgcctctttaaggacactttaatctttaagggcacattgattattatagccttgcaaacggtcacatgaggtgattcatgaataaggaatgtgttttaacttttaccaggtggggatgagttagattttcattgaactgcaagatcttatttttagcctgaccgtaaagatggaaggttgggggaggtgatatttaattggggagtaggagaggagaggtgatattattaaaactgcttgtttatttgaaaacttctagcgtttaattgctgtaggaatgagtaatttcattgggatactgtttaattctgttttgataaggatttttcattaatctacctattttactaatgtcacacttttctaggccttcctgaatatttaatttgttttaatctcagaacctaactttccaagggcttagccaggcttcctccatttttt

SEQ ID NO: 36258 - DNA, 2832 bp, Homo sapiens
aaatccttttcaaagagctagtgatctaataggaaaagagattgttaccaaaataacctcaacataatttcatataactgagactgttttgaggattgccgaatactttctacttataaggcatagagtgctgaactgcaaacactcaattctaattttaagaacttttggattagaaaacagctgttttggggagagatggtaagggaaaaaagtgccagtatagttacaaaattaagtattacataatatttaaaagagctttctaggtttctttcatgttctagggcaagcccttaaagaagaagacaagagatacagggaaagctaaagtagtgttcagggtggtggaacccactaacaaaacaatccgctgggcaccgtaagtaaagcattctattaggctgtgacgcgaaacaagaacaaaggtttcattcctacgagagattaagttttagagcaaatggacacgatcgttaaagaatttgatatttccatgtaaactgcattagcaggttatgcgatccaaactcacaggaacaactccaactctcggccatgccctatttcatgtctagatttgtttaaccgacttacatcataatccaagaatacgaactacagtatattcttacagcaaagttattccttaaaagcaaaaccgagccacctttgaaaacacgcacacacattatccacggcactaaaaccccagtcttgaccgagaaagaccaacaacttgggggggaagaaaacaacttcagagccagagctcccaaagcagaaagcgctggcggctgaagggcacacgaggttccgctcccgggcgaacgggcggcgtcggacatcactaaccaggcctggggacgggcgaaggacttgcagctgcgggcgccggctctgcgggcgttaaggcaaacggggaagtgagaagcggcggggacacgaaaagagaaaagctccctcaagtttgcccgatgttaacgctccaaggatgaaaagagccgtttgtttcgtctggggaccgtcgcgtttggcccttcccccgcctccaacaattcccggcgaagccccgcggcaccaagccgggcctcccacccccccggcggccgccaacccgcccggccccaggacctcacctgcagggccggccccggaggcgcaggcgggcggcggggagcgcagccgcagccagaggtgcagcgcggccccgagcacacacgggcacagcagcaccagccagtttcgcattggccgcccccgccgcgagccgggctctcccgcgtcccggcggagagggaggggacctgcaagtgcggagactgaggggcggcggctgacgagcgaccactccgagcacgcccgccctcgcgctcggcgacgtctggagggctcctcgcagctcccggccccgctcctccggtccctcagaccgcgggtggccgcggcttagccggccgaagccccgccccctccgcctggccttcccaccggctccgcccaccttttctcccactcgccccgccctctcctcccgcgtttccacacgcgccagccagccggccgggagctgaagtcccgctctgggcccaggcagggggcgcccgcggtttagaaaccacatttcccatgagcctaagcacgcgcttccgtcactcggcggccgcgggggcgaagcgcgaggccccacacagagcatgcgcatcccccttgacgtttgctgccaccccacggcccaggggaggtagtgccggagacccggtgctcggaggctgcccggagccgcgaagggaaatgcgctttgcctcagatttgaaggaaatccgagtggctcttgtgtgaaatcacgcagagctcctctgttccgcgtgctctcttgctcgactgctgtgggaggtgggatcctgctgacgtctccttggcccgtagagtggggcgaggaagcccgagtgtccgcgcctggagcggtgactcatcagggattagctctggtgccgtgggttcccggctctttgcccggttctgtgctctgggaacgcagggtgacagacagcgagctggggactaggctgtggaacacgatgatgacgagccaatcagggtagaactgcacgtgctccgggttcatactggagctgggagcgaaacgggagccgggcgagctgggagaacgtgggctccggggacctggggaagggtggccgcagcgcgccttccagggagaacgccggccccgcgtcttgaggctttgccccgggtgggagccctcctggcccaccaggcccgcgccgaggcagccggaaagcggggacggggcggtgaaggcactggggtgaggatgggagagaaggatgagaacgagcggctgggctatggggcggtttttgtttctgcttttgtttttgagacggagtctcactctgtcacccaagctgtagtgcaatggcgcgatctcggctcgctgcaacctccgcctcctgggttcaagcgattctcctgcctcagcctcctgagtggctgggattacaggcgcccgccactgcgcccagctaatttttgtattttttttgtagagacgaggtttcgccatgttggccaggctggtctccagctcctgacctcaggtgatccgcccgcctcggcctcccaaaatgcttggattacaggcgtgagccaccgcgctcggccgcggttttttttttttttttttttttaagtttccacaagtgtggaaacagaaggtgactgtattattgaaaaaaagtcttggatgacagaagacccaactcaaacaggcttaagggaaaaaagtactttggctcgccgtggctc

SEQ ID NO: 36259 - DNA, 1959 bp, Homo sapiens
gattaagaatgctctacctatagtaagtagccattaaaaataatgtagaatgatacccaatgacttgaataaatttaagattatcttatttagggagaagataaggttaccaaatagcattattattattattatataaatggaatgatacatatgtatagatagaagtctaaaggtgctttcactatttatttctggatggtgatattaaagtggactttaaaatttctccctgttgctagtctgtattttatacatttttctaacaaagtacaagtactttttctgtaataagaaaacatggtgccattttaaagtagaacatgtatgtaggatagtgtgcggaaaagagttaacatagcaagattgactgctatctctggaaaggcctgcttgcaaagttggctcttggctgttgtctgggaacctggatttcaggagaggtcctaccattccctaactgataagagtggcttactgtgcctaaactgtacaaacaatgcagtttataccgaacacctgctttccttctgaggctggaatttcagtatgtgcgaggcagagggtgcctacgttgccaatctcaataaaagtcttgcacactgagcctctaatgagattccctggcagacaacatttcacatgtgtcattatgactcgttgctggaggaggctgagtatgctttttgtgctttaccaggggtagattcttggatgtttgtgcctgctttctcccagactttgccccatgctgattctactttgtatcatttactgtaataaacctgagctggaaggatgactatatgctgaatcctcaagtccacctagtgaatcatcaaacctggggattgttttggggcacctctgaaaaagatagtatcttgtttttaaagagaggaaatataaaacctgaaaaatcttaggtgacagtttaatgctactaccaattctctttgataacttgagtgttttaaaggaatggccgaacaactaaccttaaaatattcaggttctatcttatataaatacagattgttttaaaagagtcacttacagcaggatgaaaaacattgatcgcttgaacagaagccttccccttttgcttatacccaaacaccaagtcaatccactgacagatgttctgcgacacgtagtcagactctagagcctgccgatggatgaggataaaaagacgaggatcattacgcgcccaagggggaaggttgacgtgattaacccgttcaccattctgacgcacaccaaaatcaaaacctaaaagagaagattaatattaatatttaactcccccacagcaagtttcattcagctacagagcaggtcttaagagttcacaaaaatagctgtttgtgtgctacaaccaaaaaagggaatagcaaggaggatttacattttgaataagaaacaccactgctcatctacttatgtacctactaatagggctatgtgagctaatgctatcataattaaatttgagatctttcaactttatccttctaccactttacaacatattgaagaaaaggagaaaaccattgcctactaattccaatattctgactattcacatcttcaagggcattaagtacttaaatatctattcaattgtaaacctgattagaatcaaactaaggctttgtagaagcatttctaaactattggtattaacattttaataaatttaagattatatttagtaaatattagtattctatagtttaaaaactcaactaatataaagtatacacattgttagaatgaattgccatagtctattaattttataagtctatgggtctgttctgacttcctttctactaagcattcctgtagatagcaaaattatcccaacacaggaaataagagggttcttctgtgatgtaaatgagctaatatctaattgtctcatcagtataaacaaaaatctcagaagtgttt

SEQ ID NO: 36260 - DNA, 1396 bp, Homo sapiens
tacaaattcccattatctagaatatgcatatattaaacctgtggttctcaaccagtagcacttttgccctccaggggttatttggcaatgtctagcaacatttttgattctcacaactggggggatggggtgtgggtggtggtggtaccactggcactagtagggagagaacagggatacagctaaacgtcctacaatgcacagggcagctcccatgacaaacgaattatgcagctcgaaatgactacagtgccaaggtggagaatccctgcattaaaccaaagccaagaaataaattcaaaagccaacagatatcacttgaaactaatgagatgaaagtgaatggagactgaggtagtcctaggttttaaacaaaatatattcataaatacataatgaagaaaacataatatatgaatacattcataatagtaacatgaataaaaatattgataaattttagttgattggtagttttatattaatgggttcttgggctacattaaatgaaatgtagtcttggatggagggaggtaatagttctgttaaacactgtaggggcccaaaccacatctgaaatattcttttttattttgactgcctttttcttttcatcaagagcattcacaaatcagaacatgtccagaaagatcttcagaatagtgacaggcttggaaaccacagcaaacaaggatggcttaaacattggttttaaaaactctttatttagtacaaaactgtcctatttattttttggtattccttccagcagctgggataggaccatgcatccaggaggccctcaatctgccgtcaaattaaccaaggataattagccaggggaaaaacaagagagagagagaaagggaacaggccaacaattttcaaatatttgaacagctgtcatatagaacatttgttctgtttacttacagagagacaaacataggaaagccccttttatagaccaataagagtgaatacaaattcattcctccaataggttgtacatgagtaaaaagcatgaagtagttcaagaatggttgagtaaaagaatggataatgattcctcaaagtattctggattccatgagaaacagctatagaactaatatcaccgttctcattagaaactacaggtgagtatgtcccaatctccacaaaaatacaaattcactcctatctaagtcatgttcaggcctccagtctgtcacttaaaatgctgatgtagaagattattaactacaaagctaccacagtgaagttgccggtgtgcgtcttttattaactagttataataaacctcaataatgtacttgcctttataataaactgcaataatgtacataggctccaaaggtaacttactggatttgaaataagtattaggtagaat

SEQ ID NO: 36261 - DNA, 772 bp, Homo sapiens
agaaaaaaaagttaatgtaagtttggcaaaaatcttcataattcacaattgttgaaccagggtgataggtatgtggggtcttatataattcttctattttgtgcatgtttgaaatttttcataatgaaaactttaataaagaaatacaacatatggatggatgaaccctaaaggtgatgattcttttaacttacctgtatatcaacagatcattgaggtcaagtgtctcactaacgtagtcagcaagtataaatgggaacacaggatactgcatgagatcattgaaggatcggccagcatgtttgtttaagtgagtcaaatattcaaaattagtaatttgcccagtataccataaatttgtcagagcggtgatgttaccatattccagaagattagggaggttatttgtgagtatattgtggtatacatcatcacgaacctaaaagggaaggagaagaaaaaaacccagatattatttttagtcttattggcacttttctccaaagaacccatgacattatagacatgttacaaatctcatgtcctccaaaaaaagatttttttctcagtaacattaatgggtagagaactgagattcaagtccaggttgtcctccagaggctgggctcttcaccactatgctttactgctgcagaaatatgttaataaaaaccttctaagaaaaagtttgtatagaaaagtcacttaagacacagatactaaaagaaaaaaaaataaggaaaaaagaagagttttcttctaaataaatgca

SEQ ID NO: 36262 - DNA, 1135 bp, Homo sapiens
tggggcaagagaggagggctaattgtttgtctcttggtcaaaggtgctgcagaaagaggggagccaaagagagatacctgatgatcccacggcaggccatgggaaatgtgactaaacatttgctgcaagttttctttgccatttgacttctgtatatgcaccttcctggtttacagatataaaccaaccacctccccttaattttgccaagaagtctcccatcttgacaaacaattccaaaaactggaatccatgacattccaaaaatgttatgtcatctatgaggcctttgaaaactaatcagtaaaaacataacttcttcaaaatttctgtctagccattgaaatgccaatactttctgcattttctgttttcttaatgctaagtgattatgcagcttttgattagtctcttttgcttcatggataacggtgaaggaatgcttacaaaagacagtactggaaaaggcaaaataaggctttctcacagaaagacacacaaagcagggaggacttcatcaactagtgaaaccacagagctctacccctaatttaggaatgttttaaactccattttaagataatgagagtaatctatgaaggcaaagtctaaataaaatttgtaagatgaagacaggataagctaacacgggtagctcttaatgagaaattcaactttgtgtatatttattttaaaagttttgcctaaggctctctgtttcacatataacatataaacttaactattttaatgtttttttttttaataaaggaaagatgtgggatacattcaatgacatacttctccttgaccaaataaatggctgtgactgaaactctattgccatctagtggcattatgacttaaaatagttttaaattttttattttaaaaaatagtttttcaatgagaacatacggacacagggaggggaacatcacacaccggggcctgtcggcgggtgttggggcaaggggaggaagagtatcaggacaaatacctaatgcacgtggggcttaaaacctagatgacgggttgatgggtgcagcaaaccaccatggcacatgtatacctatgtaacaaacctgcacgttctgcacatgtatcccagaactaaagtaaaataaaaatataa

SEQ ID NO: 36263 - DNA, 2872 bp, Homo sapiens
atattttatttgtttattatctgaggtccccactagaatataagctccatgaaggagcagatatttatgttttcttagaaaagtatctgacacgcagtaggtgctcaataaatatttactaaatacatatatataattatatagtttgtgaagtatttttatgcaaattacagcaattcatttttccttatgccctctcttcttcaaattctccaatctttgtagtaacaatatggatgacagcaaagagctatcagaaaaagagttgttggccacttaacaaagctctttaaaacagataccccatattaatcaactacatctataaattgaaagcttaaagtcaacatctttattagcatagatgaatctaggcgtggaattttaaaataatagcgcagaagagccaagaatcatcaggaagaaaagtctaattcagtttgtcctatcaatctgttaaacaaacaataggaaaatgcaacctgcatttgatcttcaaggaaacactggcccaaattcaacacgaacgcattcaacacaagattcgactcccttaaaattttctatctgcttaaaacaaaccccattaactatcaagtgccgtcgctgggtgtgtatggtctgccgagcggatcggggatgttttgctatgttttgtttaaccagataagaattagcgttaaggaaacgtttcttaaagcctctgtatcccctggaccattaaacaaccccttcgttgggctttacactgtggtaccggggtcttctcgggtaatttcccagcttatttaactcatcagaagcgaaggggcatctcagtcaggctccagtgataccggagacagacggcagatgtctcaggggatcccctggaaagagaggctctcgcccagtcaaagggtgtcacggacaggaggaaagagcggaccgaggcgcacggtgtaggtgacaggtgggcgagcgccgcagggcaacagcgcggggagtgaccggctgggtggtggcgcggaaaccgtcaactcccatcgtcaacctgacagcttgggcccagctgggctgagtagtgcagcggcacaggatcaaaaaataaaataaaggtagcaacacaccgccgtcagcctgctcgacctcgccccccgcgcgctgcgaaataaagttagtgcccagtggccgctgcaatggcccagaggggcccagccgagctcccgcccgcggcccggcggctgtcaaaggcggcccggcgccgcgagaagtcccagagcccagaagccagagaggacgccccgagctggcgcgtcaggccgagtgccctcgcgccctcgcgccctcagcccggcggtcccggccctcaacccaggctgacagccaccagccccaaaccgcctcccctccaggccacgcagaggggccgggacccggaaccttctgccggcagcgtcggcgcccggcggccgcctttacctggtttgtggcagctgcggccgccgcgcactccccctctcccggagaaccccgagccgacgccgctgccgccgccgccgcgcactccccacccccgcccgcccaggtaacccaggaaaccgagaacaccaccccctccctcccctcgtccggacccagacccgctcgtctgcgcgtgcgcccttggctccgcctcgcgcgtgtaagccccgcctcctctgggagggcagcgccggcgtcgcaggcgtgacgcgtggaactgccgagccaatagggaaggcaggggggcgggccgacccgcggggctgcagccggggcccggtctgggtttctcagcggtcgggggtcgtaccctgggtccgcacctcctcccagggctctgcgtagtgggctgcgtcagaccctggggagtgcgagcaccgtttgagaagcaccaaacacaagcgcatcgtccgcctcttccattcaacacagactgtcaacctgtcccattgtgtaggtctagaggatgaagatagaagaaataacgggaaggagtcaggagagggagaaagggttacccacaaggcacccctagccttcctctgggacctggaaaaagccatattgtaatggttaccgtcggcttctttcaagaaacaaaaagagctttgcaaagccactgcagaagtaattcagtgcagtggtgtattttccaaccgactcctgttcaaacacggtttgtatacagtgcgcactgtcagtgtcatatgccctaatagaccagtccctccagagggtgggagctgtaggtaaaatccaggatgttttggctgcatccccggctctgggcccagcacgctgctggcagactgctgcggtaggcagtttggcatttcaagggccaccctcctcacctcctagtcactgagacagcaacgccagaggtactgggaaaaagcctgaactgtaatcgttcggtagttttcaagttctgccaaacaatacaaactattaataagcagataatctacaaattgacaggaattgctgtagaatcaacaactcccataattttttgcacaggaattatgaaatagaaataattcaggatattatgtcccaagcctatataccaaatgttactcccaattcctcaaactcccatctaacccaatgacaagcaaagtgcgttaagttgcccactgatgtggtttagagggtgctcttggggaaaattccccactttaaaatatgtcttctctgacgtctgatgtttaaccattagcagttcatatctttaggcgaagattgcccacttcctctggcaggtagtcttttatttttattttttatctttttttttttgagacagattctcgctctgtcgcccaggctggagggcagtggccggatatcggctcactgaacc

SEQ ID NO: 36264 - DNA, 1203 bp, Homo sapiens
tcccacatgagtccatctgcacacatgtattgagtgagtccttataactacgccatgacccagacaaataatctcaattttactggcacccgagaatcagattggaatctctccaatgaatgtctttggctcaccccactccagaaaagtatctgtattctccctcctcaaatactcttccctgcggtttctctacagtcctggccactctctgagcaagcagtctgcaggggccagctcctggaggcaacagcactgccagaaattcatccaccagtcacctttctcggtggtacttaaagctctcagtctgcacccagcctgccctcctaagctgcccatgctctcggctggcactgaaaagtctcagaaacactttaacctacctgaacggtgattgcctcttttagatgagcaaggaactctttgttgcaggctaattagcaaccgtcttcccaggtagctgcaacgaaactggtctcttccatgctgttaagcaagctgggtctcttgtttgcagttagatcctggcttctgttcagctgacttagggtaggattattcccctggcattgaggaacacacacggttgagtcaaacagcccaaaccccattagatggcaagggaaaatactgctgtactctgatgtcacccgaggaagacacgggaacagatggtgaaggcaaaagcttcatgcaccacagaaacctcggaatacaactttcccacgtaagaatgaataaacactgaaagaggccaaaaccccaaacactctggtatgaggactgctcttctcaaagccaaaaggtcattgggatggcttcttagaagcccttgcgttgctttttcgtttggtaacggggctaggaaatctctgtgtcaccaggaaggcgagtggccctctctccctctggctctttggcaggtggccacgcttgtatcacatggggaatttggcaaatcaagtccgattcttttgcagtgtagctgcagcaaggatttccagttagtgattttgtggtggctcctatgagtcataattccctgattcttctgcagagagggtggacctaagtttgtccttgtgaggaccatcattactcttggtttgagaagtctgcagtccttggaggacataaaactaaaccccaaaatctgagttcttttttcagagacaaggtttcgctctgtcatccaggcca

SEQ ID NO: 36265 - DNA, 2187 bp, Homo sapiens
cctgaagttctctgagcttgaggacaaaaaaagacctctgtgagttgtcaggctctgttacagtctgggtcagcagacaagagtcccagggctcggccgtcttctctaggagagaaaatattcgtgccatatagcgtgttctaagagttctcaccagaagcccagaaagttctgtatttactcagcattcaaggtgtgtacccagaccacaacgctaccctagggggcccagctctaggacaggggatggcccagagctctgaaatttgaggtattttctagtatctaacagtcattagaagggcaacagctctgagaccttattcaactatttattgaaatatttgtttttccccattgtctatttataaaggtaactgggaggacagaggttcatagaggctctcaaagaagaagcctagaaaacccaccagggagggtggggagggaagccctgggacctgatcagggctgtgcaagcccgacctgacccatgacctgaggctgacccacaacctgaggacaagggaagagaagacactagggcctggccaaggtctctgggaaaataaataggcctatctgttgtcctttgacctgcacatactgttcttttgcagggaaaacagaccctgtatttttgggattcctgaaaggtgaccaggtgagagcaaagcccaacttcctggggaaaagctctcagcgcagtgaatgctacattcggaggtaggaaggctctggatgtgagtcttcatgtttgttttttgttttttgtttttttttctctaaaattaccaaaaaagaggaatatccacagaagcagaagtaggaatggggaaggaggggacaagtttagaccaagctcttctgtgacctcacttctgcttttgaagtcccacagctctataaggtaaggttacttgtgttattagcgcttaagtcaatattggaggtgataagttcttgttttctcagctaatttacctaatttcttccgaaattcctatgaagtatactggattgtgaaattagttcctgcagagacacctgaatcatgtctcaaagaaggatcattatcttagggtacaatatcatgattttataacataaaactaagtcatgcagccctactgtcttgggaaaaaaaaaaacatttcacagttttaataacaattaggattatcattgtttatgtttccaagtagaaacaaagtttctcattttacgtagttatgtgcgctccaaagagtcacggactgggaggctgaagacctgaattttgctccagttccgccgtaaccatctatttgatagtgggcctcaatttcctcatctgtgaatgagaagtgacactcctttattgctaagaggctgcaatcattgatattcattaagctggagaggaaagtgggcatatgcaaatgtaaaatccacatgatatgtaagcatatactacataggcaatgtaatcatgaaggcattatgattaatagtattaaatgagaaatgttgatatcatagcattagcagaagaaattctctctggagataattaatattgaagctggatgaatatttatgggatatttgccttcccaatttttcgcaatgattttcaggaaagaagtttagacaactttccctggtaactttgtctcaatgtctaaatggcctaatggtgagcgaaacattcctttcatttaagccactgctacctttgctcttaattcaatggggtggggcagaaagggcatggatttagataagaggcagtcctggcttggccacctactagctttgtgcaaggcaaattaccctttcaatcccaggccccttttctattaaatgaggataataataatgcctagagctagtttagatgaaaaatgcttcatcaggtgacaaaatgcttatgattatcacagattctgcagtgttgtatttataaaagacaaggtgtgaccattctaagattttaatcaattgattaacttaatccaattaaatgcagctacatggaagaatcaatcacataaacgtgtatatatatatatatatatatatatatatttttttttttttttttttttttttgagacggagctttgctcttgttgcccaggctggagtgcaatggtgtgatctcagctccatgcaacctctgcctccctggttcaagcgattctc

SEQ ID NO: 36266 - DNA, 789 bp, Homo sapiens
aaacaaccacacaggggaaggatactgaacccagtctgaggaagaggaggaggaggaggacagcaggcttcctggagaggtgccatctgatctgagcgagccagataaagaggacaaaggcattagcagaagagggaacagtatcagtccaggcctggatggagagcagcattctgtgggcaaggcaacagtcagcagtttagtgtggttagaaaataaagtgcaagtcagaaagtgctgaaaaataagtcagtgagatgggctggtgcctgttcagggaagctgctgaaagttaaggtcagcagcttggacatttctgtagaaagagatcactgaacattttagccaggaatggggtgggaggtgttggatttggggaggacgcatttggaggcagggagatctggtgagatatgaccaggatctgccctgggtcagtggtaatgaagagggagagtcaggcaatatgtttaagaacctttaagaggtaaaactggtaggacttggtgattgattaaatgtggaacagattgcagagagagaaaaagagagagagagaagtcagtagcttgagtgacctcattatgatggaatcccatcgacaaagagaataccagggaagcggtttggtgacatgggggacgtgaggtgacactttggtttgggatatgttgagtctgaggtgctttgggggatgtagaaacagctttgattttgaattacttattgttacaatataatggcaagatgtatggtttggggattagcatctcccttcactgagctcac

SEQ ID NO: 36267 - DNA, 3625 bp, Homo sapiens
aggctggagtgcagtggcataatctccgctcactgcggcctccacctcctgggttccagcaattctcctgcctcagcctcctgggtagcaggaattacaggcacataccaccatacctggctaatttttgtgtttttagtagagatggggtttcaccatattggctaagctgctctcgaactcctgacctcagtgatctgcctgacttggcctcccaaaatgttaggattacaggtgtgagccactgtgcctgctcataaatgatatctctaattttatttgaataattgatctttagaacttgaaaactctgctagcacatcaatacattcctcttctctccaaataagcaaaaccaagcacctccacacaatccatccagtgatctctacttctgttagtggtgtcacctaccttcccgttttctagacctaagagtttgaaatcaacattgagcctctttcttttgcccccacatgtagtcaattgccaagtcctgcctctcagttcaaatccggtccctcctctccatactttcctcagtagcctaatttacattgctcacggtcacagttccctaaccagactcccttcctctcgcaatctattctgcacctcacagaaacattcatattggctgtaattgcacactccctggtcctaaacaaacttccactgactcacccttcttgttgaataaaatccaacccctcaatgtggcattcaagttctagcgcagtatgatggaggcttggctcagagtgtgtgttgaagggctgggcgggtggggactgccctctggatggcatgagtaggcatcagcttggagtgggagaaactatgagtcacttggttgttttcagtaagtggcagggagtttaaaaagagaacggatagctacattccaaatcgcaaaaaatgtaaaaaatcatatgggcatgaataacattcagccacaaatatttatgaagcttctgctgtgtgccagacaaaatggctgggtattaggactatgacagtgaagataacacagcccttgctctcaaggatttacagttgatgagaaaggcagacaaatccaggaggcattataatccaccatgacagctgctgagctcttctgtgggaatttgcagcagtggcacccacatatgtgggcatttggagaaagtggggaaagcttccaggaggaaatgatgtcttaactgggacagaagcaagaagagtcagccaggtaagggtggacaggtcagggtcgggagggggtgtttcaaggccaagcggatggcctgggaccaccaagagacagagagagcttggtgggatggtgccatttggctgagacttacctggggacagaggtgagtgatgttgaaagatatacttcaaaacatcatgctggcttgtaatcccagcactctgggaggctgaggcgggcagatcacgaggtcaggagatcgagaccatcctggctaacacggtgaaaccccgcctctactaaaaatacaaaaacatagcgggcgtggtggcgggcgcctgtagtcccagctactcgggaggctgaggcaggagaatggcgtgaacccgggaggcggagcttgcagtgagccgagatcgcgccactgcactccagcctgggcaacagagcaagaccctgtctcaaaacaaacaaacaaacaaagaaaaaaatcatgctgtacatgataaatacatccaatattatctgtcgatttaaaaaaataataaaaggtaaggttaaagaggtaggcagggaatggataatgaaggactattccatgagaaaaggatcggctttcaccctggagatgaagggactcacgggttttaagcaggggagtgaatcagattttctttattctcagaagctggggaaaaggttggcgttttagttgggaagaggctaaataccccaataattagaactcaaaagaatttaagttagtgacaagataattgttcttggctctgtatctctgacctttgtgaggtataagtaacaagagaagtcatcaattaatttatgttgttgtctaaataaatgtttctcaggatcgtaattataggatgtcaaagtcagaaacggcctcagttagtgtctgctttaaaataaaagcattggtgtattgaatggtgggtccttgctttttttttttctggtttgctgcgttaatttagcaccatccacattctgtggcccctgagtaattgtaaaacccagggtggaggctctgcctgggagggcactgagagggccctggcccagcccaacactcccatgctcagggcgatgaggtcatgctggctcccacaatacaggcacagcaggttcagtaagaaagagacaggaatgggccggagaggtcaggcatcctaggaggagggaaactagagcctcggtatattaatagataccaccccctttagcctaattttcaaagacagtgatacaatgactcctccagatccagactcgaaaaggctggcttaatagaatttagtcctgtgcagcaaatgtcatcaggaaaaaatccatcttgatggcttagtcattacagtggcttctgcggcagaatggaacagccctggcaatgggtattagtcacacacaagagatgactaagatttgattatctcctacaatggaggttgaaaaaatggctcccccaactcccaagtgtgttttaaggtccctggaaatttcagcatcatcaccactaccctaaaactggtatcaccaatctggggaacaactccagactttgagttaacactatagaatgggcttgcttttcagaaaatacctgcctttttatttcatctgcctgtgagagttcattggcaagcaatattgtacagtgcagtctcttgggagagatcgtcctgaatttatactctgcaaccattactcagctatgtgtctttgagcaagttacttaacctctctgtgcatctgggtcagcatttctaaaatgggaataataatatctaccttacagatgaatattaaaagaggtaactagtacgaggtgcttaacagtaaatgcatttcagaaaacaatttttttttcatttatgaatttctgttgttatagcgggataaagtcacaccaggggaaagaggttgacagggacagacaacactataaatgttagctattattataattccaaccacgatttcaaataatcttgttcacctgtcacaaaactgatgatgacagttacaacactgtctgggtgattggcgtcaatctagcattttacagcttctgggggcatttgtgtctcctgtgatttacctgctcttatcatttgtccaattttcgattggggcaagataccttttctaatcaatctcaattgaaacctatcttcacacattcatatgacagcaacgtcaagggtcttagaccttgaggtggccctggcttgcagatagacaccatgtagaatttataacccctttgcagttagctcattagggtcctgcagactttctctctacagtgtctgtgttttcataaggacatgtaacacttctttatctttttcttaatgctttagccatttcctatttttcctacttaggctccccaactaagga

SEQ ID NO: 36268 - DNA, 4656 bp, Homo sapiens
gtagctgggactacaggcacacaccaccacgcccagctaatttttgtatttttagtagagacggggtttcaccatgttggccaggaaggtctcgatctcttgacctcgtgatctgcctgcctcggcctcccaaagtgctgggattacaggcatgagccaccgcgcctggccaaaattttctaaataagaagttggaaagagtaaatagagtaaaatgatctgagagaaaaagaatccaaataataacatttatactattttatagtttacagtgtattttcacgtatattaatgtgatcctttcaaatatccacggaggtagacatatcgtgtgttttatccttattttgtagtcttcaaaaacatttcctcagtgcctaaccatgtgccaggcatggtacatacatcatctcttttactttctacaagaactccagaaggcagatatcggctctcccatccacggaggctctggtgggattccgaagctagcaatctgcagagctggcatctgaatgcagctttgtccgactctgaggcctgagctcatccctctgttggcatcctgtttgtgattcctgttttacagatgcaggaatggaaactcagagaagttaattaacctgtgcagtgtcacacagctactcggggcaaagccaaaattcaagccagaacttcagtctcctattccaaagctcggacctccttccaaagcgcctgtaatgagcactctggaaataggttcaggatctaagctagtggctcatgtgagaagaagtctcagcacacaagggccctcagcacaggaaattactcaagttattggagtggagccagggaaaggccccgaagctcagagcaggcctgactcgggagacagtttgtgaaaataaaagcaagcccacattgactcattcatttgatgctctgattaagaagcatgagttgccacaccatgtgatggagagctataaactccagccctggagacataatctggcacagattcccttggatgggcaaacggtattcaggcaggactaccatttccgggagggggagaccgggggaagcaggtcaggacttgaggctcataaccatgctgcactgatttgtttaaaagtaaatattatttggttttcatttaattttaaacaaaatttaaatttttaaatgaaaattaaaatgttcacttaatttgagttattagattaaaagatagtctgctttactgaaagtcttaggctggaaaacaacaaagtcgtttgtgaaaatatttaaataagaagagaacagcaatcataacaggaatctaaggggactgtgagtcttgcattggcacatctcagcgcggtggagacttctaaagagggctctatggatagagtccttcagggaccaccacccgcccccatgcccaacgctgaggaggacactccagcagggatccaccaggtggctgtaaagctaagaaggtgacctcctgggtgtccctcctgaaacacagagcaccgtttgaactgcccgagcgagcggaccagctggcgcacagatcacagagccctgcagtgatcagctgccatctggatctgcccgggtgcaagcaaacggcacagctctggaagcttcctcagggctccaagagagcatctgcgtgttgggaagcctcggatgtgctgcaagacctttgttctgactgtggcaaagcctatgtatgctaggtgtcacattgaattcttttctattaataataacttatctgagattctgcgcgactgtcgctctagaatctgcatttaggaatgatcagcatcagtgctgagtgcctcggagtgggacatagatttaggcagagatgtgggaagcagccatcagtgaaggacgatgctgtgattggtggctggaacccacaagtagacaccaaactgctaacagggtggtcctggaggtagatgtctaggcaagcagccaagatcagtcatttagagtccatgcaggtctgacttgagacagtgaattttgtagaactccatactcattctgaagtgattttgttataggcagtcagctctaccagaggcctttgtccagactatctgaaaggcacccaatgcaagggctgcaaacctcaacagcagaggacttgtgctgaaacccttccgaatgcattctctagactggccaactaatgtgtcttctttgctgtccagctccaatctccatcaggttgtctttttaaaaaaaaatccaagcctttgccctgccaagcaccaggaaaagcatgatttgcacatttgagagctaacgaaaacagtccatccgagtgtcctagtgaatctgcagcccagatgggctcacgtttccctgtgtaccccacatgcccactgagccccgaagtggttgcccagaccccttacccagaccccgggctgaaagaaccttgtgtggtttaatctcagagcagagtcctctgagctggagatgtttgattgagagactgccggaggggcctcccccagtcgacccaaagatataatgctggtgccacatcttgtgacttgcggtatcgaagactgctgctggcgaaaaggaagccacagagcttccacccctcataggaggtcagtggtcactgtaatcagaggagtgctctgttccatttcagtgactcaatggtcacattatcctttaaaaataaaaaaattcacatgccaggcctaataatattgcttctcttctctttctcatttttcctctcttccctctaccagactctcccttacccttttctctctctctttttattgatgcgcaattgacataacataccatgaactattataaagtgcacaattcagtggtatttagtgcactcgcaatgtcgtgcaatcaccacctctctagtttcaaaaccttttcatctcccagaataacatctggtacccattaagcagtcactcccatttccccctccccccgtccctgacaatcacaaatctgctttctacctctgtagatttgcctgttctggatatttcatataaaaggaatcacggaacatgtgttctttttgtgtcgggcttctttcacctagcacattttccaggtgcatccaagtcatagcatgtataatacttcatcccttttttgtggctacatgatattccatggtgtgcgtaaaccacaacttgcttatccattcctctgtcaatggttgcttcttccttttggccattgtgaataatgctgctataaacatgagtgtacaagtttctgtgtagatatgcgctttcatttctcttgagtaatagaactaggagtggaaatgctgggccacacctctgtatgtttaacattttgaggaattgccagaccgttttccctactagctgcaccactttacatttccaccagcaatgtattagggtctctctctctctctttatttctctctctcctttctctaacaaaactaaatcaacaaaacaatttgttcatcctagactgctgagtgtgccaagggcatttaaatgaccagtcattgtttcacagcagtgattcacagcgtggccatgttaaaaggtaagcctaagccaaacaggcccccagctggtctgcagacttaccctggaggccaggaacaagaccgtccctccctgctgtagacagaaaagactgcactgagggtgttctgctctgagctggttcccctggtctgctgctcttctccacacatgctgtcaaccgcagtgggcaggtcagcttggctggaaacccactgagtaaagaggcccccaaccctccagacgatgggaaaatatatggcaaaagatgtcagaggtagttcaaggagcttattataatgcagagaattccaaatccacaagcaaagaggtggcattttatggctcgaaaggacctggaaagctcaagactcaaaatcaggcacagggttaaaggtgaggaaatggaggcccctcccaggtccagtgactggaactggctgatgagccgcagaggaggcagggtgagaaatccggtcctactgtgatcagggcagccctgttccaggcttgtccaataagactcacgccaggagcttgctcaaatgcagatccctcgggccctacccagaccaaaggagcctgaatccctggggagggggatctgtgcttttaatgtgtctgtgataagtttaggaaacatgctgaactaaagataaggcctatttaacagcaacaacggtgcctaattcttgatttgagtgatgatatacccttcatgtgagtgaaaatttgaagtcagcatttgggaataatcatgtctgtttggtatgtggtttctgttagaatctgcctgaggctctgatgatccggacaatcacagtgtatggtacacacacacacacacgcacacacacacacacacgcactcacagggcgggagtgggtgttagtggatggagagttgccccacctcttttaacctcgattgtagtaactaacctcactgttctctaccttgctttgaaaaaacatttttgtgccttatctaatcttctaacagttattaagaaagaagcctgcacagtgggtatttttaaatccctgtttcacggatgaataaactgattctatgaggttcagtgacttgctc

SEQ ID NO: 36269 - DNA, 869 bp, Homo sapiens
ctaccagtttctgggagaacaagatgaattaggcatggtccctaattgcaaggggttcacaatttagcatcctatgcagatctccgtggggacagccccaggggttacccttgtttgcttgtgcttttgaggtaggcattcaagtgtagacacttgcagctgtgcgccctgctcttcctgggggcccgtccttccctcattccccaccacaccgcaggtggggcagttttggctgctctgcaatctcaaccgcaaagagttgctccaccctttgtcccggcaaaactctgaattgtcctgtaattattgccacactgcaatccggtgccatctgataagtacaggtttcaaaactgtgctcacaattcctgccaaagccatcctgccaacatcaggcacagacattggcaaacctactcggcctgggctgagttgagctaaaggtgccatgaaaatctggagatggaaactcagcaaccacctagaataagatcacctgcaacacacacatgtacacacaatcacacacacacgagtgagcacacaccctttctccctggggttttgactccgttccttatgtgattctatgtcaaatgtgtagaaaaaagaagctgtcctgagcacagcacattgaaaaataaacgccagcatttcaatagctttgcagagaagagatccacagaatagcgttgggtttcctcttgttcttgcatggaaacatgatcaggtgaggtttgtactagagcattctgtaacccctgatcctgggggctgatcaggaagagtcaggtgtggtgtgtttaaaaagtgaaagccggccaggtgcggtggctcatgcctgtaatcccagcactttgggaggccaa

SEQ ID NO: 36270 - DNA, 645 bp, Homo sapiens
tggctcacacacttgccttcctttaaataatatttttcattcctccaatcagtcatttgatcaacaaacatttagtgggcgggaactgtccctaggccctgggctgggccctgtatttaccgccctgtggttcatcagccctcagcctggtgcatccacgctggtatcaacctgatggccccagaagcttctgaaaactcatgagctttcctgatggtttatccctcaggccttctccaactcaaactaaggtctgcgtgtaccttggccccttcttttgtgcttgttgtacccagaagcaaaataattgtctagctgtcccaagaacggccaaccgttgagattgtgtcagcgagtctttgttcagttcctataaaggatggcctattaggtaatacatccattccagatggaaaacaggcctttcgaaagcccgaaataacctattgccacatccccctttgagcccacaaatggttctttcactatgaaagaacaaactaactagagcctcaaaaatgtctttcctagctttaataagtggggattctggcctcggggtcatacaaggatgatcacacatgaggaaagctcaaatgaacagagttatgccagagatggctggcctgggcaaagctggcattg

SEQ ID NO: 36271 - DNA, 1459 bp, Homo sapiens
gtttcaccatgttggccaggctggtctcaaactccggacctcatgatccacccaccttggcctcccagagtgctgggattacaggtgtgagccactgcacccggccagatttttgtctttttactgttgtatctccccacatagtaagtgcctaatcaattgagttgaataaatgaattcttgccccatctaccagattctacctcaggggcagcttcacacacacatacatacacacacacacacacatacctacacacacacacacacacacacacatacatacacacacacatatgcatgtgcactcaggcacacacgcatgtgctcactcacacatgtactcatgttctggggccggcacagaggctgggggagagtaaggaagtggggaggggcatctttggcaggggaagggtgctggtaggacaagagcaaagcgcagagggactgaggggtggtgagaacggatcttctcacagttgaggcctgtaaaaaaaaagaaaccacacggaggctgagggcaaagtgccctaaattggaagtctggcctaagatctgacgatgaatggttttcaaactctggaggcggtctgcttacgaaaactcttgtttgcactgagtatacagaaagggcactgagtggggcaaagatggccccacatgcttgaacttgcctgtgagtctggactcagacccagttgtagggtggacctgtgggcggggctaattttgtagtgtccagaagagcaccaagggagtttttgtgaattggacttccaccctaagcgatactaggtttagttccattttccgtctggagagaagtcctttgcagcatttcgtttggcggaagagttttgcataatatttcacacagtgttccttgcacaagctttcattaccccatgaccaggctagggactccccgccttctatgaccaggtgaagagtgagtctcctactccaagctccccctgttcgcctggttttgatgccctgtttcagtgcatcatctggtaatttcgtgacctgcaatcggcagagtgggctcgactcatcttctatttctatgctgcccactgtgtccttctgaaagggctgagccctgggtctggtaattttggactgtctgcaatttggaatgggtgtgtcactactgccctctagaaccaggtcttggttattgattgcagctcccagaaaggaaccctgcaaacacaacccttggttaaggcaggcagtctgtcttctccttttcaataataacttcatgtttgaggttaataagtggaggttctttaaagggcacacaattgaggccccacactccgctagctgctttcccgtgagaacttccaacagggctgtggtttgctgtttatagagaaggggtgaagagccagggctggaatgtgcattataaatgacaacgtaggccaagcatggtggttcacat

SEQ ID NO: 36272 - DNA, 544 bp, Homo sapiens
aggcaacaaagaagggaaaaaatgcttcgggagttgttccacaggcacaggaaatcttctagaatatcaattgtgagggaaacattccattgaaaatagaaaaaactacattcagtgccaagtaaaaagaaatacaaaatgaggctgctctattttaaagatgtatctttgatgtgaatattttgcagagaacgcaaggtgactccacagaacaaatatcatcagcatgacaatgccataggagcaaaaatattcccaagtcagttgatgagtcgctgaattaagcaacatgtaatacttgaccatttcagcacagtggaatttttagaggcctttggatttttgttgtaatggtctttcaactagataaatcatacccatgtaaaacagtcttgatttgttgaaggtaggcatgaaaaacaaagcacagagtcattggttgaaattggcatccttaatgaggaatttcctcaattgaggaattgaggttgaacactgaaaagtagattgtgcctgccgggcgccgtggctcacacctgtaatc

SEQ ID NO: 36273 - DNA, 1395 bp, Homo sapiens
cagacgaggaactgagccccagagaggttgtcttcctcaaaagtaaatgtctgaagcagacatttgcccagcacctgtcttgcatcccagcctgccccttcagtgagtgtggacatcaggaatgactggatccagaaacccaggtcaccatgctccacacaggtgtcccaggatggatctcagttactgtgcacatcagcacccaagggataaagtatccactgcccaagcttgagccgaagtgtaatgtaaatggtatggccattaaaattaaacgtttgaatctgcttagcctcaaaaagcagagaaagaaatcaggtcaaatacacagaaactgatgttccctactgaggaaaaaaaaaaaagaagtaacttcagcagagtgaaaatctcaactgtgcagaggggactggcctccctgagctcacagatgtttgggtcacactcaaaatatgagaactgcctgttccctcccaccctcaagacaccacctcaccccacgaccttggcaggcttacccaagctttgagacagagcaaaaagaaaacattctagggtttagcgaacagtgaggaagaggcaagaagatggtttgctgacatggtacaagaggaatctgttttaaattgggaagacatgttgagttcagatgcgcatttgacatggcaccctccagacctgggaacaagaatcttgaacgaccaggtcaaagtgcagcaggaggaaaaagaggaagaatttaaacaatctggctgttcgtggctgacccatcctcatcatcacccaaatcatcattcagcaagagcataattaacctaattaatagccgcaacttacttctataaggctaagaaattatgctgctgctcgtggttggtaaaattaaaatccataaatagaatgaccccagttggaattttaggtgtaactaaagtagaattcaatctaagataggtaatgatccaaaagtacctataaggtgctccctcaatgtgaaccccaaggctactaattactggaagaaacatgtctaatagcttatagttattaaaagcataatgaaaatgattaaaagaagtttataagaggcaaatgtaatgcaaaagctggcaacaggtgaggcgatggtattactagtgtaggcaataatgttgcttactcattacacttgtgactctccagatagttggagggcagaggctaagtctgattcatctttataaattgctcttcccagcaccttccaacttgaccagactcattttacctgggaccagaacttttgcataagagctaatgcacaccatgtgaatactgtttcgaaaagttacctggagaacttacccacacacgttccctcatctgaaaactggtagccctccacacactcgcagc

SEQ ID NO: 36274 - DNA, 1372 bp, Homo sapiens
actcatgagattgtaaatgaacaaagagagtgatgtccttttatatgacaatactacagccaccatcatggggtaacgtggagcaaacaaacataggctttggagttggacatagctaggttcaaatcctgcttcctttagctattaacttgtgtggtcttgggcaagttatccaactactcagcctcagttctccctttggtaaataagtatactactactcatcttgagggttcttctgcagattacggaaaatggatggaggtcagagaagcacccaacaatgttccagacacccagctatgattatactaactagagattcatccaacaccccagccatggtgatgaatttggctaactctgggaacacgcccctcagatggccgccaggctttgggggccaggctgtggctaccacttgtgtaaggctggtgggcccaggcaagaaactgagctaacctgtcattccccctggttatgtggccactgatgggttgaaatgaacagttacacaaggtccttcccacgtcaacctcatactcagagtgtagacagctacttctggcatttctaaaaccctgagatgtgcatgaggagggcctcccaaagtgctgggattacaggcgtgagccacagcccctagcctaaaacaaatttagacatgttttagacctaaaacaaataagacatgtttctcataatggccgagaccacacagctcttctccccctcataaatctcttccccagcgctttcatatgaatcgttgacatgtgggagtcaaagcctcctatgtccaccttcaatgtccagtctagccaggcctttattggtgagacaaatgtcctactggcctattggtcaacattgcacaagacaagcattcttgatcacatcagcctcatagtttgtcctgtacccaggcaaatacccaaaccaaatgctcttcaacttttagagattatactgatatgtgcgtgttctgtgacgtgtttaagacacaaggtctcaggactgaaccaggcactgccagaaggttctggaacaaagcccctcccaaagcaggctgttatgcaagctggagctggggaggctgtgggggaggagtgcacccagcacgtttggacttcacagctccatccatcagctgccgctgcaacatgggagaaaaaaggggcttcctgtgtccactgcctctgtgctgcaactctcagaggacactcccagcacagatgtctggaaacattgtacatattgcagggctcagtgacttagactgcattgccaaagcacgagagcacagagcagcagttttcaatcaagaagacagagcaaaatcacaggggatcttcttcaagctctgttcctc

SEQ ID NO: 36275 - DNA, 701 bp, Homo sapiens
accccaacatacacttttccctgaggaataatttggaagcacttatactcaaaagctgaacaaaaataatgccctagtcacacctgggctaaaaagcctttgacccaagaaagaaaaagaacatctccctattttaaatttccacattccaactttgttttattagaatcatgaactagctcattatatttaataatcccgagcaaattaatttggaatgaaattcaaaagcacaagaggggtaaactttcagagaagataatgatcccattcataattgactgttacgagtgaagagaaaagcaaagtttaaacccaggtagactctatgagtcctacatactcggaagggaatttctggctttataaagacagcgtttggagccgagcacacttgagccctgaactgaacacgtgatgccgctgattacttaaactccagctgtgggcagagctctcaggggtcattatggcctgtgtacatgtgaactattcaaataacaccaggaatgcactactggccacagaagactgacctttctcttcaacatagggaaataactggggtagagggacaggaaaacatctgttttagacacaatctgcgttcaaatctaggcttttttcagtcttaagtaatacactgccccaagttgttgggctggatatggtctcattcaaatgtgatggcttcacaaatg

SEQ ID NO: 36276 - DNA, 824 bp, Homo sapiens
gcttggcaaagtcttattttcccttgtgaaggctttctgacctcccaaccagggtttatcacatgtttctttctgtctgcccctctctctaagtttgcaattggcatcttgacccctcacttagggatcctgactcccaatggcagcagcacgttccttgctgtattgatcatatcgcaaaaccctcatggggtgaatgcatttctgagaaagcccatctgaatcactgagagtgctgctgatgataataatgtaatattatcatcttaaggtaacttaaggtaaccaaatattgcctaggtgaggttctttgtgaatttgcattaaggagtaaaaacttgtttactgaaaaacagctatttccagcatgttgagcaatgtaaatatttccctgaaatactgcttacaacatcagttcacactgagaaaaagttcctttagcaaagttaaacttcagctcactatgtggctagtaaaactaaatgcccctttacagaaccatgtcttcccactcaccccaagaaacacaacaaacaatacggcttttcatccagctgccctagggcagagcatgtcaattagatcacaaaaaaacccagggtgaaaatgccaagcaccacatgggtaacagctggaaccacttatgtacaattgtttcaacccaactgacaagaaggggatggacagagcacctaacttataatgggagggtgtttcccatcttagaaagcacttcctgtctcatttcatctttaacgtgaactttcagatagcatgaatcaccggagaaagtctatatgcagatgctcaataaatttaaaatt

SEQ ID NO: 36277 - DNA, 1040 bp, Homo sapiens
tcttatgtccaaatactccctgaaaaagtgaaacaacagccacttggccgggggcttagatgagcctagtaacaggctgctttctgcaatagtctagggggagccttctccaaaacatgtgtgtttagagaatacttgaggtagaaacaaataagaaacaaacagggtccttttacaaatacaaatcgctgtactgagaagacagtgagacttgcaaaagcaaactccatgggtgagaggcagcaggaacttaaaataatttaacataaagagtggaaatgcagcaaacatgggctgtcacctaatgttgaggtcctttactaaggctctttttatcttttaaaatttcatgtgacaggcatttagtacaaccatccctcttttcgcatacttgaaacagacaaggaaatgatgagagattttaatttagctttaatgtcacacagccagtaagtgatagaaccaagaacggaacacacatttgctggagtccgtaacccgtgctctttctgttacacttggctgcctagtttagagacactgggggcaaaagtcatgcaagttgcaatgttttttgggatggcttcaaagttagtgactgggtagctacaaaaagctggaaaacaaaatgagtccaaaaaaaagtaaaacacaaaaaggaagtccagaaaataggcaagtccgggacacaatcaaggtggagactgattaatttcagcctagagcccacaagtggacctggagcctaatccgtttgcaaggtgctttacagtttacaaagcatttttactttagttatctcattaaacctagtaaagattaataccattttcattcttcatttgagaaaaaatgagttttagtttatataacttgcctaagatcaaacactagaagtgccagaacagaactccaagtccaaattgcaagtgatccccattaaccccacagaagaaatgactctggcatgaaatagaaatagaaacaaaaggattagtaaataaagcttagggacaatctaaggattactggaaaggggt

SEQ ID NO: 36278 - DNA, 2599 bp, Homo sapiens
gctgaggcaggagaatcatttgaacccaggaggtggaggttgcagtgagctgagattgtgccactaaactccaggctgggggatagagagagactctgtctcaaaaaaaaaaataaataaataaataaataaataaagtaagcatataagcatatatagtacataagagcataagatgtgtgtttttttaatattttgatctgtatttcaacataattgccttccttggtcatcttgtggattttattttatgcatttaaaactttatactgcccagcatggtgacactcgcctgtggtcccagctactcaggaggctgaggccagaggacagcttgagccaaggagttggaggctgcagtgacccaagatcgcaccgctgcacccagcctgggcaacagagcaagacctcgtctctctaaaaactaaaataaaagcgttatactgaaaagggatccacaggcttcaccagtgtgcaaaggggccagggcagtcaaccaacatgggggagggctctttgtggatccagacttgaagggctcattcgttttaggcaaagcctacaagttccacgtgagtgttgtctaaggcgcagtgttcccaggccagaccgggagcacagccatttcacgggcaggacaggctgcagccgctgcgtttgcagttccaacccccttcccccggccaaccccccacacttctggaatgcacacaagccttatatgaaatccacatggtgggcggccgaggaaggcagcggcacgaaaggacttcaacaagttgacagcgaccccaggcccggccagtcacggggaggatccagggagctgtaggtcatctggtcccgctcctcgtttggggcctccgtggtgacaatgcctggccacaggaaatgggatcactgggagccctgtgtttcccgctctggactctggactctgaaacgagcccaactggaaagcagcatcactgccaagacacatccggagtccacacacaaatacaggaggctgccggcgaaactctcccgcagccacaagagtcccggggcccgcgcgcagactgcgatccagctccggctcttgccctgcggaggctccgcgcgagaacctggctccacccgggaccggccaggtcctagccccgaagggactggacagccgagggacgcggactgacctccctgcggcgatgcagcccacagccgccggggaggaagctccgcggggtccatgggtgccggggtcacggcccggggcgcgcggagccacccagaccccgcgacccgctcttcggatagcagggaccgggtcgggaagaccttcgcggaccctgcagaggcgggagaccctgcgccgtgcccggtgccccggcggccagcgggtccgggtccccgcctgctacgcccaagtccgtccggctccacgggcgcccccggcccgccgcgccctgcagcccctcgcccgccctcccggggctcactcacgtagactgcgtcgatgtcggatctgtcgtagaagcggagcgccccactcagctccagggcaggagagacgaagtcatccccgtcctccagctccaggtccccctgtccggggccgaagggaaagagctcctggcggctcaggcagcccacaggccccgccagcagcagcggcagcagcagcgcccgcgtccacgcagcccggatccggctgctcgaggccaacatgttcccgaactgcggtcccgcaaacccggtcccgcggccaggacagaggaaggcggggatgtaaccggacgcccctggcagccccctctcctcccgcctcccggcgttcccaccccgggaaataggggaggggagcggaggggagagcggagggccccgccccgtccagcgggcgcgccgcggggcagcccaatggccgcgagggggagggcgaggggcgaagccgaacctcccgccttgggcgccggtgcctgcgattctcgaaaccagcccgactcccagcgaacggcgcctccgggagggggagcagagcgcgggacccgcaccgtggtcctctgattagggttgggtcgtggagagccggcgacgtggaaacgctccggattcaggaacggcgcccaccccattgccgctcggccgcgtccggggtccaattcgcttgaccctggtaggaagacggggtgggagctgggaatcagccaagggacagagccaccaacacgttcatgggctcatccacccattcattgcgcgttttttgagtgcctgatcctgtgctccctattgtggaggttcgccaggaaacggggtctcaccctccgaggcaaagtcaccagtgtacaacacaagccagtgtcagatgggggccccaagtcatcaaagacattagggctggaaaaactggcggggaaagctgcaggtgggacggcgggaatcaacccgggtgctctggaaggaatgggatgtcatcaggcggcagagaagggaggtggaggaccgagctgggtttattcagggcaccatcccccagcagaggatgtggggagggaccggttgaagtacagccttgaatcacaaatttaggaatttgaattcgctctgtcactcg

SEQ ID NO: 36279 - DNA, 796 bp, Homo sapiens
aggatagggcgggccggggttcgcggggcgaaggcgcgcggtgcccgggggagggcgggccggggcgcgcgggccggggcgggggcgcgcgggccggggcgggggcgcgcggggccggtcggcgcgcgggggcggcgggcgcggcgctgccaatcgcagacaaaggccgtcccagtgaatcatgtggtgccgggggaggaagtgcggcttgttttctttcctccagtctcggggctgcaggctgagcgcgatgcgcggagacccccgcgggggcggcggcggccgtgagccccgatgaggcccgagcgtccccggccgcgcggcagcgcccccggcccgatggagaccccgccgtgggacccagcccgcaacgactcgctgccgcccacgctgaccccggccgtgcccccctacgtgaagcttggcctcaccgtcgtctacaccgtgttctacgcgctgctcttcgtgttcatctacgtgcagctctggctggtgctgcgttaccgccacaagcggctcagctaccagagcgtcttcctctttctctgcctcttctgggcctccctgcggaccgtcctcttctccttctacttcaaagacttcgtggcggccaattcgctcagccccttcgtcttctggctgctctactgcttccctgtgtgcctgcagtttttcaccctcacgctgatgaacttgtacttcacgcaggtgagtttcagagaggctcctggaggcgctcacctggcggggtggtccccgcggggcgcccgaggcaggggcgatggcagccgcgggg

SEQ ID NO: 36280 - DNA, 596 bp, Homo sapiens
aaataccggtaagtactgcagggcatctctttctgtggtagaaggggaaagtgccgacacatgaatctcatctctccattggggtttgcacacatcgctgttctgtgagccgccggaaacagtcctgcctgctggctggctgcccacattgtgcacatcatgtgcattgccggtaagggtcaggtcatcagatcatgacttcatgaatcatggggacttgcatcatacttacccagttcagaaacaagagcctggtgcctttcctaacaggaggaaatacatgggaataaaataggtgtatgttgcctctaaaccttcctgaggcacttgagaagagcctcagcagaaggaaacagggttccttgaagatgcagtgctttgccaggtgcttccccttccccatcccgcacctcccatgctcccactgcaggtgcaggtgcaggtgcaggtgcaggtgcaggtgcaggtacaggtacaggtacaggtgcaggtgcaggtgcaggtgcagctgtggcagggcctcgcccctgcagcctgccacctggtggccttacccgccttgtctcagctgctggtaggctccggctccttgtttt

SEQ ID NO: 36281 - DNA, 1067 bp, Homo sapiens
ggcgggtcccctcctgcatgtccgactcgctcatctctccgatgcaagtactttgtccctcctccagggcacacacgttccttactgtggcaccttcctgccccctgagctgcttgggggcccgggctgcctcatcttcatcccactctctcagcacgagcctgatgagcagccagcccccagcacagggctgtgcagggagaagcctgcagtcctttccgcctccccagaaagttgtttaattcccctgtgacgggtcgttttcccactagccaggggaagatctagcagctactgtgcttagagcattcataggaaataaaagggcagcccttgatagctgacgtcatgctttttggactgactccttccttcttccctccctccctcttaaaccttcttcgtggagaccctgccacctacagtgtggatggagagagtggaaatggagagtctcattttccacgggactttctgtctagggagacgcaggcattgatcagatggtcacccgtctgttttgttataaactgtgataagtctgtgaagttaaaatatgagggaccaggagagcagatgtcagagaaacctgactgcctgtgtacccatggtgtgtgtgcgtgtgaggaggtacagggagggtcaggggtgtgtttgctgcagtgctgtttgagctaagatctagaggatgagcaggagccgggtagacaaagttctttggtagaactgggttctgaaagttatgtgagagatttttgccagtgggtaaattattaattacaagacataaaatgccattcggattagcctgagtaagtggggggttgttatgtcacactggaatctgagggcaggaaataaaactgcagctgggcatggacctgggtgggctggaaccaaggtctctttgggccatatcccctgcccctctctgtctctttttctctgtctgcctctttctctctctaccccctccctctccctacccaccgacttatcatcagtggcatgtctagagctgggactagaatcccagtttccatgtcctagtctttccatagatttta

SEQ ID NO: 36282 - DNA, 1271 bp, Homo sapiens
aaaagcccagaaagctctagtccgacagttcgagtgaagtcttgccccctcccaatcccctgcgcctggcggggcctcgggggtctgcggagtgcccccaactctcagtctccctccctcactaactcctgaagggaaggacgtcaccgtttctctgggcgctcgctcccttcgcaagacagccgaggtggttcatgcccgtcccatctcccgccacactcccagccgcttaacacatccgagaggaaaaaacgaaaacagctcagggggaccgtcaccatcttcctcttttgactgccattacccggagtgtcgccgtccccccaccctgcgggcggttcgcagatgtttcccgcactggacggtcaggtctctgctccccgggttttctgctcgccagaaatcacctcttttctggcccggccctgcccggccctccccgcgtcacagccgcggcccgtgtgtagcggccgcgggtgttcggccgggggttcccggcccgctatcactcgggcttacctgcgcctcgacgacgctccgcaggaagctcagggtgaccagcagctgcaccgcggccgctaccccctgcccagcgcctgcccggcggaccccttggctcatgctgacctctacccacaccgcggccagccggacccctcggggccggggaacgacgggcggcccaggcgacgacccaaggggacggttcccagcggccgagcgactccagggtcagaggtctgcactccagtccggaggcaggcgactctttccccaacacccggcagctgcgagtgaggcaggaaaggcgagcgcccccacttcatcccccaggcggccccgcccccggctcgcttggctcctcggccacgcccccaagcgcggggccttgtgggagttgtggtcctgggcggtcgcctaggcgccgcggcaggaaggcggagccgctgaacgagaggactcgggaactacaactgcgaaggccgccccgcctccccgaggcctcgggctccgcggcggccaatgaggcgggaccacgcgggcctccaaaacaccggggggtgcgggcgggggaagcggggcgacctcttctccgggaaaccaggctgaggacctctctgcgtcggtccctgctgtcgctcctggagtcctcgcagacgccaggctctaggattcacccagtacgcgggcgagttaggaacggacggtgcgggatctttgactttcggtctgaagcgtattctttgtctcattcatttttctgtagcctc

SEQ ID NO: 36283 - DNA, 453 bp, Homo sapiens
gaacaggctacaggcttgtccctggtggtctttggaagattcagctttaatacctctgagaaatttcccgatagactggatcatgaaggggtgagccgcttctctgaggcctgttttgccaccttctaatcaggaggcacagccaagataaaccctcccaggtgccagtttctcacagggctccaggtgccagttcttaggacagctctgttttaatgagctcttgacgaaagagtccatcaatattgggtacaaagtgcactgataagttatcctaatatgagggaacattttttgggtgccaggcatttccgtgtatgtgcacacaccaagtttgtgataaatgcctgacaaaatctaaaacatgtgaaactcagaataaccctttgaagcaggtaccatttttttttttttttttgagatggagtctcactctgttgcccaggctggagt

SEQ ID NO: 36284 - DNA, 514 bp, Homo sapiens
gccctggccacaccctggccatgagttaattttaagtgactttttacattgagaaaattcacaagactgtcacagtcacatggaaggaaaacaatgatggtggttatagtgtagctatcaccctgtgtctctcccactgagaaacagtctcacaatggatgagccagatttgtctgtcaaatgtttgtaaaatctgtttgttcatgattgttcatacagatagattttacagacagaaacaaacaaccgggctttgaaggtctgggtcaaaggtggcacaattccttgcttcgttgcagtaaggcaagtgccgacggccacagagcattgcaaaagagcacattctccctttgttctgagactccacaccgcagggctgtttcctgggggaaccctgggcctgggccaccaactcaggacagccccagtggtggcattcacctctcactgcccctcctgtgggcttcaatgggtccaaggtggcaacctaccctcctgtggcattgggcgcagt

SEQ ID NO: 36285 - DNA, 1611 bp, Homo sapiens
ttccttggttgcaatagcaaattactacacacacagaaaggaaagccacactccccgacacatctacacacaggaggactcacacaggagggagactcaaagaaggcacgtgacttttacattgttagggcttacatggtcctgggatttcccaccagtactcaaaagatcaattgtatgaacaagtcacctatttttacggcactaaataattattattcaacaacatggaaaatatgtggtagcagacctggattttccttaagagttatttttatgtggtactgccccctgctggaatataacatctatacacatcctttctggctgggctgacatcctaaaaccagcccaggaccagccttttattaatattaattcttggccaggcgcggtggctcgcctgtaatcccagtactttgggagtccagggcgggcggatcacgaggtcaggagttcaagaccagcctggccaacatggtgaaactccggctctactaaaaatacaaaacttagctgggcatagtggcacattcctgtaatcccagttactcgagaggctgaggcaggagaattgcctgaaccgggacccgggaggtggaggttgcggtgagccgaaatcgtgccactgcactccagcctgggctacagagcgagactccgtctcaaaaataaataaataaaaattaaaattaaaaaataattcttggttgtatgctaaaagccttgcaagtagccccactggaagataggaagagtggggctgttttacaaatgagcacatataagcagaacgaggccgccataattgaaatgaaggtccccgtcccgtggatgtgttcatcgctacttcaccctgtcattcggatccaatgtgtgaccagccagctccaataacagttccatactctgggaattatttttaacactcggcaggatgctttcttcctgtagttttaggcttagccctttgtgcacttttggtctctttccctttcaatttagcatccaaggaagcggctgtgaccaaaggtagctgtcatgttaaaggacaaagttcatagttacagcaaatattgacccagagcactatccttgccccttcctctataatgtgcaatgcaaaaatatgttcttttaagtacaatattaataagtaaggtctaggagattttcttcccccttcctttctcttttagatgagtaaatgttttatctagttttgaggagactatccttcttatcacatctctttccacttctgctctccttgttttataattttcctctcctttgggtccgtgtcattatttcgtgtcgcttgttttcgagccatgcactcatttatcaaatcagatttcctccgtatgccgacggccttcctctccctgccacgggcttcctttttccctgactatgcagaagcaatttgttcgcttgtgtttctttttttttttgagacagagtctcgctctgtcacccaggctggagtgcagtggcgacatctcggctcactgcaacctccgcctgtcaggttcaagcaattctcatgcgtcagcctccagagtagctgggattacaggtgtttgccaccaaggctggctaattttt

SEQ ID NO: 36286 - DNA, 1316 bp, Homo sapiens
ttcctcgggagtaaaagtcatattcaaaccaaaaaggctgtgggatttccagaattttaaaagcaataatagttaatgttctcccatgggagttactccacatttttacatatgttccatatgttaactcatttagaccttacctttatgaggtaagtcctcttcttatccccactttagaggtgggaaaactgaggcacagaaagagtaagttgcttgcctaaggccctgttactagcaggtggtgaaaccagcattccaacccgggagtctggcaaatgtgtgtgaagagcacacgtttggaaatgacagtcatgaggacactgtaagacttctggaatgtttataatttcacctttgcttgttatttttcctgtctgtttccctagagtgagctgagtgaaaaaagaaagaagaaagaaagaagaaagagaaagagaaagaaaggagagaaaaagaaaaaagaaaagaaaaacagaaaaagggaaagaaagaagaaatgaaagaaagaaaagaaaagaagaaagaaaagaaagagagaaaggaaggaaggaaggtgggaggggaggaaaggaagaagaaagaaagaagggggacagagggagggaatgaaggagggagagagggagggaaggaggaagaaataaaaagatgaggatctgtatgcttgaggggtggaggtggggggcttgggtgggagtgtgggatgggcagaaagctggagggagccctggaccgactgcattccacagaggattgtgggtgcaacgtaggtggcagattgagaaaagcaaacaaacaagctcagcctttggagcttcggggaagaaaaaaagctgagcagtgaatgctggcttcccacggagaaggcaggctgcttcgccagctcacatccttccgcgcacccacttcctctttccggaggtcactttagattgctttatggcaggatctccaggtcacaggaatgttatgtttcgactggggtttccccctcccctgggatgcctgggccagctccccaagggctagtctctgtcccaggccccacactcccatagcactcagcaaaagcctagagagagcaccgcaaaatgccaaacgcaacaggaccgcgtaggaagaagacgcttggaatgacagggacactagaactgcccatggtcgtggtctcaaatttttgttccatggtctgaaatactaaaagttcttaaacagctacttgatttcatactattgttttgaagaaaacagtgtttgtttgttgttttgtttgtttgtttgtttgagacagagttttgctcttgttgccgagt

SEQ ID NO: 36287 - DNA, 530 bp, Homo sapiens
taaattgggcagatcctcaggcccagtgctgaattttggtttgatgaaataaaacattacatttcaaggttggcagagaggaatgaaggtggaagaggaatctagggccatttagggaagccatgaagcctcctgcccacactagtgggtagagtggagccaggcgttttgctagggcttgctatatctcttggcagggtgctctgctgccaaagccaagaattctaaattagattaaatagccagaaagaatgttaaacatttggacatgatatcctccctcacagattagctagagtgtagttctgctgtgctagatacttaaataaatacctccctagctgtgaagcctgcttatcacagtactatattttaggatgaggtcattattttcctatgcatacacatgcattgtataatcttgccaatgtaggtcagcccaaaagaagtgacaaatgtgtagaacacacattggactagcttgggacaaaattagtatacctaaagatgacagatttcttaactaattt

SEQ ID NO: 36288 - DNA, 2604 bp, Homo sapiens
tggaaaatgggtaaggaggagagaaaagcaacagtgaatcagaacatgagttcccagttatgggacttgtaatgaattcctcaattaaaacaaaaaataatgaaaacaaaagccagggaggagaaagcccacgttaatgacactaaaatatatctttccaaacaaatgtggataaaagccaagtagagaagatgagaactttgaggtccctaacagaaaataaacagtaagcagccagccattccaagtggctgacatgactttgtttaactttatttgtatttctggctggtgtgtttacagccaataggtcaaactatcagtcagtgtagggccctgagaagtcgggtatttaagagcatctaataggcacagaattgtgctccatactgcttaaactgttccctaagtgtccaatttggagaaaacacccacacgcaggataactggcgagtgacgcggagtggctgcgagtccaagttatcactaacggatggggagcttgggctgggcacagtccagcgtactgaacccttcccccaccgtttcacctgcatacagaggtgtgtactgtcaaaaagcagcgcctccaagtctcttctggcactgtctggacttggatccgaggcagacgaggaagctgagaaaaccctggcgttgaccccgtggacctgggcgccccgggaaggccagcgcttggtccaggcaggcggggcctgtgcggtgaccaccctggtcctgaaaagtcccagccccgagcgccctccctcctagacctggaggcctggaacagccaggtggacgtcggcccacctttcttttctttccttcccattttcctaccacctcccaccccactccgccttccgggcaaaggcagccagatccacccaggacacattctttgtccttatccctctgtgctcgtcccacagcaagccagtcgcggtccaaggctccagaggctgtgcaggaggccgagctgggtggcgatcagcggcgggtccctgtccaaaacccagcagagccgccagggacgccccagacacagaaggcggggcgcggggagggtggggagaccacagcagtgaggcgcgcgagccgggaagtgaacgaggactgactcctgtcgcttcccgtagccgcccacggacgccagagccgggaaccctgacggcacttagctgctgacaaacaacctgctccgtggagcgcctgaaacaccagtctttgggtgagtcgcgcgacccccggcctcgggtggcggggcagtcgctagaggcgtggctgctctgagggtctcgccagtggaggatggcattcggatgtcacggctcctaaatcaccatttgatgggtgggacagtgtccagtccaccccgacccgccggtcctcaccgcggcagagccggggctgggtggcggggacgctgcctctgcaggcgaggcgctccggggcataagggattatcaggagtcgcggcctttcttggacatccctggctggggtcaggctgtttgccctggggtgtctcctcgctgcaaacccaccccacctgggctgctttctcacctgttccctcctagcctgaggccgagcgccacctccaagtggaggaatctggggaagtttccttcccggaatttgtagtgacagtggagtgacctccattgcgttccctgcctctaacacgctctttaggatgccgagtcatttgactgcagtgttaaacattgcaaagcgcaagtcatgtgacttcctttgaccgtacgtgaaacttaagtgatggctgcttgtgatgcatacgaagtgttcatgctggcgggacctgtccctggggatacttcgggggttgcgtgatttaatgcaagcagatggcttaaattgggtcactggcttgttattatacatgtgtatggcaactcggcatccattctttttgctcttgttcttacttcctgaattgagtcacggagccagagttttgaggttttgactaacgaattaagttaatgacatggggctatatttaggtggtaaaccaagagggatacagttttttttcttaataaagaaaaagtgatagatttgatcggtgtgtattgttggtgtgcagtataatgacagaattgctggaagtaaaatacaggaagctctggtttcatttcccctttagttctgcttaaagtcgagtttttcctggagctattaaatgtagtgtagtgtccatgagtgcttttatcttaaaaaatgtggctgatgctttccaacactcccctgccctgtgattattatttttttaagcaacagagaaaaccgtatcttaatagtattaaaagtattggatttttccctactttgatttgtttaaattggaggaggaagagcaattctttctattcacaataataatagctaacatagcgcttactctttcgctgttttattaactcaatcctcagaacaaaccaatgatgtgaatactgtaattctcattttatggaaatgaaaatctaaatgaatacctctggtaattgtacgggactgtttgattagtatttaccattaattaattaaatttttttttttttttgagatggagtc

SEQ ID NO: 36289 - DNA, 1173 bp, Homo sapiens
cgcgcccggccccattttattatctttatttgcttggatccttcttagcttcttcaatgttaaagatattgacagttttcctcttactgaaatttataaatccattgactcccttgatattattgccctggcctgactgattcttctctctcctttctcttctcaccccatgttgaggtccccaaggtcacacccagttttgatgactcaccagcatagagttgtacttgtgcctatgatttattgcggtgaaaggatatagagcaaaattgcaaacggaaaggcacctggggtgaattccaggggaaatccagtgcaagttccaaggtcgcctcccagtggagtcacataggatgtgcttacatcctccagcaaggagttgtgacaacacttgtgaaatgtggactgccagggaagctcatcagagcctcagtgcctagggtttttactggaggctggtcacataagcaccctcacacatatcaaaaaattctggtcccccagaaggaaagcaggtgtttagcataaccatattatttgcatgaacagttcaggtacaggaaatccccgttaccagttaggttggtgggtgcccttcccaaatcccaagttcccagacaccagccaggggcctgcctcgtaaggaggcctttccaggacagcagtcaggcctgccaatgttaattcttttctgcatacctcctaattttagaaaccaccgagcctttgctgcctgacctgtcctgcttttcgatttctttatctactttgatatctttacaaatgatctttaccctgacttttaaatgtgtgctctggccattcacctagcgtgtggttctgagtctccaagtcttagcagatttgctctcagatgctctgccaacgcttcacaccaagtattacaaactaaactcgtcatcttcctcctgaaacctgtctcccaggccaggcgcggtggctcacacctgtaatcccagtactttgggaggccgaggtgggtggatcacctgaggtcaggagttcgagaccagcctggccaacttggtaaaaccccatctctacgaaaaatacaaaaaaattagccaggcgtggtggcaggcacctgtaatcccagctattcaggaggctgaggcaggagaatcgcttgaacccgggaggcggagattgcag

SEQ ID NO: 36290 - DNA, 1568 bp, Homo sapiens
caccccagtcactgcctccatcccccttttagctgttcttctctttgacatattagttgacctctctaattttgtttcttcatctgtgaaatccagatacctctactcataaacatttcaagcaccaagcacctgactgttatgttctctttcccttaaaaatatacatcaacatgctagaaactgctaaggaagaggacgggacagaagagaaaacaaggggaaaaaaaaaaaacagtaacatccagaaaacaaacgcttccaagagcttttctaagttaaaagatggctcaccaatggcgaaggcggtgtccctgtcgattgtggccgcttccttagggtcaaataacaaagaagcaacttcatctctagataagaggctggcatcactttgagggagggcgagtcgttgcagctgctgggctaaggacgtcatctttcacgccagcggagttttaatgacacgggctaaaaaaacgtaagcactttgataagtttctacgaaattataaggcgcctcgtaaacaaacaattctcttctgcactcagcaccgtcatggacacacaacgcgggtgtcctgagatttgtggaccccggagatgcaaagacgatggcagcagcgttaacaactaattacagtagcggcgaccgcgccaaggctttccttcaaccctgattccgcagatatccggaaaactcttaccctccctcgatatgccgcccccatccgcagccacatcaagcggctctgtgccgcttacctggaactgggaatttgggtatatcttggaaggcaacaactcttcacagcgcttcccacatggtaccaaggagcccaaccctcacccggaaacctaaggcatgctgtagagcaacttcctgctgcaggcgctacggcaagtgaagaggttcaagcttgccgggaatgcgacgagacagctccgcctcccgagacgaaagcccgcccctcagcccgccggactcaggctcaagtctgagcttcgcctctgtagctccggtttagcggtctgctctgcggcttgtgtctgaagctttcggtctctggatgggccttctgtgggctttaaggatccgtagccagaatcattcattcagtagtgatccagcctttactaggtgccagcagcaccgcgtagtgttgaaagctatgggttgtgaagtcacgtggtttgggttcaaatcctggcgctggcgcctgtcggccgggttaacgccaccaaattatttcatctctccgagcttgttactcactctacaaagtgggaagaggccgagattgtcgtgaaaggagcttctgctcctagtgcaaaccgatctataaatgctggactccaccgccccagagcttgggggagatcttgtcactcctctatgtttccattcccgaggggtaaatggcatatatttttttctttcaaaacgaatcatagtcaggcgcggcctgtaatccgagcactttgggaagctcaggcgagctgatcacctgaggtcaggagttcgggaccagcctggccaacatagcgaaaccccgtctctactaaaaata

SEQ ID NO: 36291 - DNA, 512 bp, Homo sapiens
gaagggacaagagtgtatttgtacttgcgtgtgtgtgtgtgtgtgtgtgtgtgtatgtgcgcgctactggttcgacccctgttttacattctaggttggtggatgtgactcagaaagaagaaactatgcaatttagatgttataaaactggtaccttctcctaaggatcaatgaccctgactttgtgcccagccatggagcaaagttaaatatagccgttcagtcagtaaaaaattggcaagcttttcattacatgtagcctagaccttcaggaggagtttaattgccagttcagaattgtaatattttaccccccaaacaataaaaacatctctatgtataaattcaatttgggacaggattattttaccctgttttctggctgagaggataatgaacattaccacaaggaggttagcatgctaaaacacagtaacagagccatatttattaccttaaaaatcagataagaccaactatttttaaaataatgttttctttaaaatgaatca

SEQ ID NO: 36292 - DNA, 2334 bp, Homo sapiens
tttgaatactctagctcttttaaaatgtatgtggttcttttttccctgttcaattattaatctaactaggttgtgagttcctcctccaaggacgtgagggtgcgatgtagcttgtctgattttgcattccaagtgtgtgccccaatgcctgacacatagtaggtgctcaatatatgtttactgtcaataagttacaattaacacccccatatggtaattcagagttttcatagcgcggtcaaacgatctcatttaacgcctactacaaccctaaaaaattctaattactaccatcctatcattcttgtttgtagagtgtggagactgagaggttaactgtcttgcccagcgcaagtcaacagcaaaacggaactaaaatttcaggctcgacaccacacagcgtgtcgagatcagcacgaacttggcgctgtgacttttccttagaggggccacttaggcttacacttccggatcctgggcacacagagacgcgaaaagctcccgcgggaaactggggagcgggactacatctcccagagagccccggggctaaacagcaggtgattggttgatattgacagccaatgcggctgcgaggagctcgggcagaccaatcacaggccggaaggggcgggacctcccacgccgaggatagattgagcgcagaactaaccgcgctctgaaaggttctaaatgtctgcggggctcagagccggatgtcacgtcgtcctcctctgccggttttctcttgggtccttttccgtgccgtcccgcgactccgcctctggccgcgcgtgtctggctgctaggccgacaccaaggactggccgggtacccgggaagaaagcacgtgctccagcagttgccgcgcccagccccgagagaggccctagggcgctgcgggctttcggggtccgcagtccccccgcgacgcgagccaacgggaggcgtcaaaagacccgggccttgtgtggcaggctcgcctggcgctggctggcgtggcccttggccgtcgtcacctgtggagagcacgtcttctctgccgcgccctctgcgcaaggaggagactcgacaacatgtcacccgcgctccaagacctgtcgcaacccggtaacgctgcgaccccgtctgcgtggttgggttgtgtttcttaactcgtgctgtggcctcctaatccctggggcgattcccttctgcggcgggagacgcccggcggtgtttccccgcgtgtgggcggcacctttagaacttagcgcaggagcccggagggctacgtgttttgctccactctttgtccgaccttcacctctttctccccaggcaagccatcaaaacctgcaaaaagcgtcctcccctcgcccccgaaacacattcttaacgtcacagtaactaaactttccagttccacgcagcataaaccagctgggccctctggaagtttttttttttgcatggtgtgacgcttattcgtaaatatgtattgcgcacctactgcgaaagaaagttcaggcgcggagagacagacgaggaaactcagagaactatttaaaactactacatggaactttttattttctgcttctacgcacgctgctgcaaaactgcaatatgcatagactcactatgttaaaatagatgagcagaccccacctccagataccgaaatgggaggtagtaatttcaagcgattctgatgttggtggccctgggatcaacagtgagaaaaagctagtttagcacgagaactgaacgtaatgttagctttataacgagctctagatctctaaggtcatgcctgattataatttgaggacaaatacacccgtaaaaacgggtgaggagatgtagaaacgagaattagtgataagtacaaaacagtaaatatcctatcacatagtggggatgtttagcttcaggaagagggggaatactaaattcgtaacgcacaaggaaatttatcagaggttaaccggtgactctcttgattcttgggttctgataacgggactgatataattgttcttgaaactagtggaactgtggctgagaaacacatcactgctgttattaaataagatataaacctccctatgagaggtttatatgttatttaatatattaaataagatgtaatgaggttacatcttatttatatttaatatttaattaataaatgtaaacctccctataagagatttatatcttattgaataaatgatcatagggagatcatatttatttggaaaacatcttttactcatgatttctggcctcccccttcccatttaatttaaacaagtaaagttatttccctttcatctgaatttaggtgtc

SEQ ID NO: 36293 - DNA, 1564 bp, Homo sapiens
aactcttactttgatttacagcagctgctaaccacatcagttaacacatacttgttgagcatgtaggttagtggctgtgcggcatttgagaaactaaaaggccttcatcttgccttaatgtaagactggattttaagtgagttttaaagctggggattgagaagagaaggctgggaatgagctcatggtggagaagctttggtcctgaaggatacatagaactcttggataaaagatagagggcctcctagacagaggaaaaaaaaacaagccaaagttcagaagacagaaattgcaacatttgatttccagccttgttttccttctgctgtaccttattattcactggctttccctctggggagcttatcctttgttctgcctactgtcaaaagactccagtgtagctgtcctgaagtcaaagcatgcattcctaatgtgtgcccaaatttcacaagtggccatcagcagttgttcctgtggtttgggaaagatacctgatctatgctttttttctcaggttataaagtcagcccgggttatgaagaaggctgttggccaccttatccctttcatggaaaaagaaagagaagaaaccagagtgcttaacggcacagtagaagaagaggcaagtcattttgttcaggcctatgggcctttagtgggttgacctggaagacttgaggtggtggtaggggcctaagcagtcagggttggctgtgttcgttattgaggataaaatagagaaatgatcccacatctctcccttttttaaccgagtatcagaatactctgggactttcttttgaatgtagctttataacatttttaatatagatacaatttttcaatcaaaacccatgttttcaagacaaagccagttcattcatttgtgccttcattacctgatcatttacgaagctgctgtgatgtgccaagtactgtgccaggcactgctcactcaaaggtctgtccccgcccttgaggtcattgagtcatgcttgtttttagaaaactcttaactgaatagtctttctgctggtgatgtccttggcaccacttctggattcaatttaattcttgttggctgcaccaccagagtaaatcattaagctttttgaccttgtttagctccctgtgaagctcagacagctttggcccctaggattctgaatttttaaattgatctgtttgtgaatggctcagacaaacacagagtttataaaaatccttcttgttttgctttttttctttttttggggcagtagtgggggatgctaactgtgcatagaacaacagtgctgaggaaagatactcacgtgccctctgtctgggctgttgtggtttttcagattcagatgggacatacacatacagttaacctgttccttcccctctcccctgcctctcccttaatggctaaccgtaaacatttgtcaaataagttcccccgcacccagagttaaggatgtggtcttcagctgtggtgctgttttgtgtgtgaacatcaactattctttgaaaggatgggacctcctgatcttggctgaagccccttgggcta

SEQ ID NO: 36294 - DNA, 863 bp, Homo sapiens
gacagggaggcatggtacccattctatttgctaaggcactcaaggaggaaagatcatcatatgcagtagataatgtcagaaccaaaaatctagcaattctgccaggcacatagtaggaacttaaatatttgttgaacagacgccaagatgccagctagtgccctccagagattttccaggcaagttcagagatgtgctgccactgtccaatgcaagggaacagacaactgcacagaagcaaatctggtccatccatcagcggcctttcaaaacctacaatccagtgatcgctgatactcataatgatgactcataagtgttgcaatattcctgcagtaccttctgaatcatcaaagactcatcaaaattcagtgtcacttcagtactaagtacactttaccatgtgaatcactgtatttgaaggttgaccacccaagtttgataaatgtgacccctgtcctttaactggaatatagattaagcaacatttttccttctcccaactatgccagatagcagagcatctgctgctgctataaccctgtgtcgaaagagccaagcctgactttatttaagctatagagaggggtgctgaagtgaagaagatggtttatcatggtgaatggaaaagatgctacagaacaagagagtgtgtcctgacaaggaggtcagctcaaaccctggaagctgaaggggctggtgtgaggcagagttgagtcatttaataccattggcattgaaggggaaggaaggcgctaattttggatggtttgtatcagattagcaggagcatctgacttaagaaaacagagtaattattgggttttgtcaagtgaaaagtgcggtttggctttggatgccac

SEQ ID NO: 36295 - DNA, 759 bp, Homo sapiens
taaccacaactatgggctgtcctcaatagctttttaaatttagatttgggtattaaacatccttttatttttaatgacactgccaaagtttgcctttatatttttggttggctttttacattcagtttagcgggataatacatttagcaatgctttctaacctttgcattatggatgaatatcttgcaatgtttccagtgcagcatttacctaaaaactcttcaaatctacagatggtggcagcagaggcaaaggagaacatttcccttatgaacaagaaatcaagttctttgcaaaagtacagtatacaatctatcttgtttttgcttcaatatgtttgtttacataccctactcattagatcgttgcccttttcagaacatacttgtctacaaatgtgtattttactgcacgtaaatattctgtggcatgaaaataactgcatgaatcatcttcccagcattcttggtcagactttaactctgcattccctaccgcattccttcttcaaatgacttcattctatctgaggtttaattaggtctgcattttttttgttttatcatatgatatggaataaaaaatatctatttcttaacatttggatattgttatgatttaaaatttctagttgagaatttcttttataaataggaaagtctgagttaattcataaataggcacattataagaacatttagtacagaatattgtgggaccttagtcctgctcattttatggaagatcagagaggataaa

SEQ ID NO: 36296 - DNA, 628 bp, Homo sapiens
agagcttctatagttgtgagttttcaaaattcaagtaatgagctgctgtgatccaatctatgatcaaagttattctgacttctcattttcccactaagtagtccaacactctggcgccctcatgacctaaccatagctttgtattcttagtggtcccaagttttcttcttgttcttattctctcttttgtcaggctatgccaggagagaaagaactgcatagtacttgctttctgtattccaggcagtatccagtgctttttaaggcttaaacaaataagtgggtaaatgaccgctgttttaaatcaatattgcatttagagataaactacattccctctaatgatgagtcaacttaactttgctaatttgatagcttctgattttagagtttctcattcttttctttccttgttataccttgttaattaagctttcagtggtatagtgtaaattgtgtcaactggaccctgaaatagaaaattatttcaacttagttgagttttattgcttttgcatagttttaaattagttctaaatatgctgtatccctgagaaataatattccacccaaaatgcaagtgtatataatattggaagaattaagctgtaaagtcacattacacagt

SEQ ID NO: 36297 - DNA, 737 bp, Homo sapiens
ttccatttttaccttcctagaagtacacaggaaatatttctttccaaaagctgttttgtaaagatagtgaccacaagatatgccagtaaatctaaactaattttaacgtatttatttttcctatgtaggtcccattggttatttttaagcgagaaaaggaagtggcacggaaattggaatttgatgggctttatattacagaacagccttcagaagatgatattaaaggccagtgggatagactcgtaatcaacacacagtgagtaaataattatatgagactttctgcactcaaaaatttcagacatgaaaatatttggttggagttcctgcagatttgtcaaaagtttagcagaggtgaataatagttatatattcagccaagaaaaatctaaagactcagtgctgtccaactcttaatggtggatgtcctcaatttttgccctctgagttctgaattccttaattaaaaatggcttagagttcatttccacagcactgatggaacttcacatccattactcagcgttcagggatgtgtgtagcaggaagtgcatgacctgcaggcagggttatctcatccaaaagcagaggcaaaaattattcattaacgaaaaagttgtagcattaaaggaaaatgcattgaattttacaccttgaatatatctgagttatcaactttcagtaccatcaagcaccctagcatgaaactaactaaatattaggacacggtgtaa

SEQ ID NO: 36298 - DNA, 1031 bp, Homo sapiens
acctcagttttaagatgaatctaactttttaacagggcttactaacctaatggggtttcgttaatagttaaaatccacattttacaggtgtttgcccctaagtgaataattcagggtctctgttttctgcaaaatatcctcccacccaaatatttctggggggccatggcgtgtctcctgcagggtatcgaggagagcttccccagatgctctgcctccaagcgccacgtgggggcgctgcctcaccactgcctgacctgcgcacgtgtccgggagagcgctgacctccgggccaaggccactgtgtactggccatttgccaaagcggagctggcctccgcgcggttcccaattaaccaaagccacgtggatttgtcatcagagcgttcaagtgacacggccgggccctgcgcgtgtggagtgcctggtgaaagctgctccttggtttctgcttccagccataaggttcagacaggaaccatgaacccaagggctggatcaaaaataaatgtgtcacacagacagctctctgtgagttcctctgagtctctgacaacctggggccacttcccacatcccgacctcttcctgttctccaatactgctttaagcacggtacagcttgtgtgccagccagtgctacttcaggtggaaagcttcccctccctcccctgcctcccacaggaggctgggcaccagtcgctggcccatgtttccacctctgatgcacttcttttggggccacactcctggtcctctccccatctcctgctgtctggggaaaaggagaggcttaccagatgagtgagttagagagaggggacagagcccgggggccagttccttcccctctgcagagctcatctctgccagaggcctctgttcctgcctccaacactcttgagctgagttgcacaggcctttgtaaagggggcctgcagttttccatctctgtccaggattgtgtgagcacatttaattctgggacgaaatcctaataatattatttttgagcctcctcaagttaaaac

SEQ ID NO: 36299 - DNA, 741 bp, Homo sapiens
ttatgagaaacaaaggctaagtatagctgcaactggatttgtgattttttgttatcacaaagcttttcatttctatgagccaagggtcccatcctggagacacaggagctagggtgcaaagaggttactgacagagatgggtaacctgctggcccgaagcggcctctctggtcacatattgctacattagggaacaaatacgaactgcttaaaatccagccattctctggcaactttctagactcctttaaatcgggttaaattatgtcatggtttgctatgattcactcagcaaatgttctgagctcctgctctgtgccaggccctttgccctaaacaaggacagcagcatttttaggaggaaagtctgacttcataaggtctgggtagcagagccttccgtgaaggtgactggcaacaaaaccagctttctcaacaatcccaccttgcctgtctcaggactgcgtcaggggcgttcgcctcccctctgtgagggaagggtggccagtggaaacatcttttctgctttaacatttttaaaagcatattttaattgacaagtatttgtattgatcatgtccattttttgtttttgacagtctcactctgtcacccaggctggagtgcagtggcatgatcttggctcactgcaacctctgcccctcgagttcaagtgattctcctgcctcagcctctcgagtagctgggattacaggcatgcaccaccacgaccagctaaaa

SEQ ID NO: 36300 - DNA, 1863 bp, Homo sapiens
atttggtagaattcatcagggaagccatcaaatcctgggcttttcttctttgggagatttttgagtactgattcaatctcctcaccagtgtaaatctttacagattttatatttcttcatgatttcatcttggtaggttttatgttgctaggaatttgttcatttcatctaggttattcaatctgctggtctacttgtttatagttctctcttataattcttttatttatgtagaattaataataatgcatgtcccactttcatttctgattttggtattaataatttgagtcttctttttttgcatggttcatctgaactatagtgttgccattttttacatcttttcaaagaagaaaactttgttttattgattttttatactgtgtattctctatttcattcgtctctctctagtctttgttatttcctttcttctacttgctttgggtttagtttgttctttttatagttcctcaagatgtaaagttaggttgttgacttgagagctttcttgttttttaatgtaagcatttatagctatagattatcccttccactgtgttccatatattttggtgtattttcttttcatgcctctctaaggacactgcaccaaaatagcagagttgaattcttgtgtcagagacattcttgctctcaaagccaaaagtatttatatatgaacattaacagaaagtttgccaatacttcccctagaagatttccactttatgaaatgtatgaggcagttgtgttgttcctaatccttaatatcacttgtgtttgctattggaggcatgctaagttaagtaaacatttaagaaactgatgatacatgagtgcaacaacaaaaactgatattaattatttgaacaaaatgagtagtgatttagaaaaatacaacataagcaattgcctaaaatattgatattaaattaggtataaaatcatgttaaaaagctacgattttaagattcctttacaactttctcctattttcactccataccatagatagaagctgaaaattgtaaacaatacattatagatgtaatttgttggcacacacaagaataatgtggaattgaattagtagaactatagtcaaggaacaacctttggcctgtgattatcgattgcctgggtcaatgtttaacatcaaaatatcgttggtttaggcattaggcgaagttcattgagcactaataagataataaaattatccacggaattacctgtgctcaagaataaaatttgaaggtgattaatctgcattgaatgttaaaatatgaacaaatgagaggttcttcgcttcctaaataataaaacaaaaatcagagcagaataaaaaaagtgtaaattataaatcatagtagccactggaagcaatgctgaactcacaagttatagatttgttttttttcttgttttgtattgttattgttttcagaaaaatcactaaatcttaaggcttttaaaactttttattgttcatctttaccaattttctgtccttacaaaaacaaggatgaattgagtctagattattcaaagataattgtatcagtcctgttttcacactgctataaggaactgcctgagactggaaaggaaagagatttaattgactcatagtccagcatggctggggaggcctcaggaaactgacaatcattggtggaaggggaagggaaagcagcacctgcttcacaaggcagcaggaaggagaagtgccaagcaaacggggaatagccccttataaaatcaacagattttgtgagaagtcatcactatcatgagaacatcatgggagaaaccacccccatgatctaattacctcgaccctgtctctcccttgac

SEQ ID NO: 36301 - DNA, 623 bp, Homo sapiens
aatgttttataatcttatgagtaatcttggtctttaaatgggcctgtgtctctggcctataaccttcacatatgtttctctggtgatttttgtttgtttgtttcatttttgggccctcattccctctactctcttcccatactgcagtcttcccagtctatttttttgaatttttgccttcccattgactatatttttatccttccataagagagacagaaaggctaaagtggacaggagtagaaggaataatggataatccttggccaaagccatttaccctagaaagaaggtctctgttaaggagaaaggtcagatatgtttcacaatgattactctttccctccctctgacagagccaggaggtgaactttgttcttcactatgagagcctggtgtggttcctagagttaaaacccatggaaacttggcctacaagcctatggtcctctggagactctcactttccacaccagtccacttccacaccagtccacttccacaccagtccacttccacgccagtccacttccacaccagtccacttccacgccagtccacttccacaccagtctacttccacaccagtccacttccagtgatttatcacacctgtccacttc

SEQ ID NO: 36302 - DNA, 728 bp, Homo sapiens
cgtggtgaacatcaccactcaggttgtgtgtaatcatgactttcaaggtagtatatttacttctgaaaatagtgtcataacacaacctacctaagaacataatcctcttcatcatcttagtcacagtgtagcacttagcatgcacaattattctcaaatcatattttcgatattgaaatgacctactaacatatgtcagctgaaaattcactttgtaattctcacaaccaaaaaaaaaaaaaatgaatccatagggaagatgatcaaaatggagaaaagcaattaatctgtatgtatgaaatgctcatctaaaagcatttggcaaagtataccctacatttccgggagtgaggaactttgaatcaaggcatagtaatagtttgggatagagtccaggtgtatctgactcattatgagaaaagtacgagtcattgaaaaaaatttttttcacctctattcacctacttatactggagaaaatattgatctcttgcttaggattattgtgtgtcttgatagtaaaaatgaaaagaaagtattttgaaaataaagggttatggacattttgacaattttcagggttgaatttgtaagacctgcagaagaattttaaaaaatagatttttaaatataaataaagctaatttatcttttaaaattggaaggacgtttaatagaaaaataaaatttcaaaatataaaaatttagcattcataaaaaagttttct

SEQ ID NO: 36303 - DNA, 767 bp, Homo sapiens
caacctaaaataaccaaaaggaacaaaatctaatttaaagaaagtgtattcaagcacaaagtgtgaaggtggccatctggggaacagagctgcaccaaagaatggtgctcagtgctcctgctgtgagaaaaaatgaggatcatttgtataggcaaaaatcgagttggtgaacaaaattacaacgtttttccaacacagacatgcagataataagatttggttggctagtactgattacactctaagaaggttatgtaacattttatcataaagaggtaacaatcacaaggatctctctaatatcgtttagtctaggtttgaataaagaatagggagtctggttaatgtttaacatcttaacacaaaggtcaggaagcaaaggccagacaccagagaagaaaaacagccatgtcaaatgagtctgtttctagggcatcattttttcccttggcataataaattggggtgatcctgaaattttcattctttttacatttccctctttctttcaaactctaagaggaagcattgcaggagaattatttagtcagatcgcatatttgatcgaatctcacattgctaggaagactcatttttaggaagtcatgtaccatggaggagagaaatattagaaaggaccaaggccgaattacaaagaaacaaaaggaaagtagtcttggaacctggttaggctacatgtctatctctgtaatcaaagcaaatttttgaacaatcattactttggttttttagttgtatattgactt

SEQ ID NO: 36304 - DNA, 922 bp, Homo sapiens
gattacaggagaagtataatcaaacaagcatttttatttctactatctattgaaactctcaaaaacgataaaaaagttttagttaaaaactcagtaggttgatatcatggtatgtgaattatatctcaaggaaacagttttcaaaggtataaacatgtcaaaattaagagaacagaagaaataatattggatgagttttgtcaacaaatttttgaaggttggaaatctggaaaatgactggcaactaagtcaacagaacaaagaaatttgaagtctaaaggtttgcagaagggaatgctaagataaatatgctgattcatgccacagatcataggaaatgatttgttaaaatgaaaacattccagttatctaaaaggcattgatgaactgtgacactgaatgtaggataatttgttagctgtcagtataaaggaccagttagagttttaagtagctgtccataccctagtagagaccagcatttattctctggagaaattgaactgagaagctctagacataagtcagtgaagagagtgagtgagaatgaggcactatgccaaaaacagggagataaagaaacattctacataatgaaaggtgacaacctcctgcctatccctaattttctgctcagctaccagattgctagaaggcttgctaaccatcctcaggcaaacaattaaaggatttctccttggaaaaccttctagaataagaaagaatgcctcctggtacttacatttaggtatcccttgtgatgattaattttatgtattaacctggctgggcctccatgcccagatattttgttaaacattattctggatgtttctgtgagggtgttttacatggactaacatttaaatctgtggactttgagtagagcagattgctttccatgttatcggtaggggcctca

SEQ ID NO: 36305 - DNA, 677 bp, Homo sapiens
tggggttcacaattataagaatttgtttttatgctgctttggtgatgggggtaaaattaatgagtttaatataaaattataatccttcagattgtataattcctctgtgatcaatttcatcttccttccaaacaaagcaccttgatgtaaaaactgtgaattgttaggtaaaggaagacagaagcacaagtgtaatttggatgtaaaataaacaaagcagtgaatttgccaagcaaagaaacgcagaaatgccctacagtagaatttcagactaacccagcttcaagggataatgacccttgagcaacccttaacaggaagtcacaaagtcagattgtgaaatccagagagctcagaggaattctagaattggcagccaattggatggcctcgtacctgccctggttatattctaagagctctgattctttagatgaaagaaagaaccagaaatctctggactgtgacaatccttcaagtaaagtgagtaacaatgggggtttgtttcagaacagagcccaccctgagccgagggctacaaagggaaagttggaaaagaatatacagaatatcagagtgtcagccatgttattcacagggatactatttaagacagtagccattagctataggtggctatttaaatttaaatgccttaaaaataaataaaattaaag

SEQ ID NO: 36306 - DNA, 655 bp, Homo sapiens
taaaatgaatttggaaaatataaacagtaggttaacagattatgggaagcttttttatttttaaggaagaatacaaaggtattcttatattttgccttactgtaaaactccccaaactctacatttgtgataactaagctttccttttaggttcaggatccattacacttcctgagtagtggaaattttggttcttcaaggatctcagtgtcaacatttttcaatatctgaccctggtttacactgatgtttatattttgcttatttgtctatggagcagtatgattcatcccttatcttgtaccctcagttgctaaaagattacccaatttataagtgactcaactgatattccctgcctggtcctcaaatttcatcaggactgaaattctttctccacagatcactcaaaaactgcttattagaagtttactatgtgccagacactatatggtaagcactgaatgtattgcagagatgaaggaacaaacactttctaattcttctgggaattagaattgtgcctttgaatacagtgagtgaatatctgtttgagtactttattatgcattagacacatgaaaaaatgcagtatgtcctaatggaaagaaaattgtaaaatcaaaattaacatttatttaaatatctctttaat

SEQ ID NO: 36307 - DNA, 1017 bp, Homo sapiens
tgcagaaacagactcactaaatgtcaaaaagtagatgcatcagactgttccttagagaaaggtttgccatggagtcgtatattgtaactgagctgaagttcactcatcgataagttgtgcccaaggaatcgaattccttccagtccttctaagcagtccagggaaaccaatttaaaagcgaacacaacaaaactaacagaccggcaaaatctatctttgaagcgccgcgggaggcacaatttgggaacaggtgaggccatgctgggtgggtgaggcccccctctctcctgcttggtgttccgctttcagccaacccaccccaggagtaccctgggatctcctcgccccctgccaggcggagaacgcggagcccagcgggcacgcgggaatggagctaggcgccggcagggcaactgggcatgctcagaagccgggcaggttttggtctcaagcacgcagcctgtgcattacaccagctctctcagtccggggaggaggaggagcaggaggaacgcgaggaggaaggagaggaggagcggccagcagtagccacgaccgccaccaccaggcagaggaagagttcgtggggaggaaaagacctctcctcccccttggagcgccttctctctgcttttggagaaagggaatacacgataaagaaggagacggaaagaagagaaaaagtgaggcgggagacagagggaaaagggcgtgaacagaaagggccggagcgtgcaggggagcacagggcgcgggggcggcactgccgagccgggagcgctgccgcttgggcaggtgccgcggccgctgcccggaggcggcatgtgacgcgcggccgcagctgcccgcgggcggagcgctctcagaccccggagcgcacaccgcggggccatcggtgccatcgcggatctccaggctcctcatcagtccgccggggccgcagcagcgcttctgggaagacgggcgatgaactgaagggcggctccgggcaggggggcacgatcttaaggacagtcg

SEQ ID NO: 36308 - DNA, 650 bp, Homo sapiens
cattttccctaattgcttactttcattcaagaatatttaattgaatgccaacaactgacagccggaacttgggcagcatcctccacagtcaaacgttctaagctcttttgtgtgactgggctggcccatgttctcttttcctagaatgcctttccctctctacctggaaactgtctactcatcctttaatatacaggtcaaaagtttttgccttatgtaagaattatgagtcacctgagtcaacttcttgctttatttactaagtatttagcaaataaaactgaaatcatctactttatgtttattctcctttccctaactggtctctgagctcctcttgcatatgtattgctgattttcctttgttaccctagatagaagctttcacaggaagggcacctggaggatactccataaatatggactaagtgaatttttgtgcccaaaaacatctagggtatctgccagtccttttccaccaatatgcacttccttaaccactgacataagcttttgctagacttgtaataagtataacacaaatgttttgcacaacagccatctcttatcactttccctttcacttcctttctgtaagtctatgagtcttataaactgtgaaaaggtcatactagcaaagcaggctgtct

SEQ ID NO: 36309 - DNA, 694 bp, Homo sapiens
gccaacaggtacatttgcacacacatgtatatttgtatatgtgcataccatttcaaatccagtaacattttatatgctaacattacattgtacaaaattattttggagactcctgttttgcagtggaatgtgaagaggagctggaatacccaaaatgtcctaatgctctctctacattactgccattgtaaaattgtccagttttaagtaaccttgttgaggaaaatgaaaacaatattcttaatactatttcactcagtttggaatgttccaggtaatttacctgaaactgagagagaccaaagaacaaaaactgagagaggccaaagaacaactaagtactctgccaaaatttttcccctgcagagcctggcattatgaagttgagctaacaaagaaggttcagcagttatgcgctttgatgactcaacacagaaaagtcagcaactaatatgaactcttccacaaggttgctacaagaacaggcatttgcaaagctttcttttttaattgcctttttatattctgacatttttccctccatcggaaatatcttaggcattaaatctcatggcaaaaccacttgaatacacattttgatcctgtgatttgaagtatggagaggaaaatctttgaacctgagaaaaatgttcacatttataggtgccctttatgacttagcaaaattacatta

SEQ ID NO: 36310 - DNA, 470 bp, Homo sapiens
attaaatacaaagttggatggtttaattttcaaagattttatttaaagtgattttgtataaaggtctgtgtaaggctgacttacactaattgtgtttttctacagtggcaaaacaaaaatttattttcaaacatatgcttctaatgagcaaactatccatttatcatgcaaaattaaacagtgatctagccaccatgggctgggtgcctacctgtgccagccctgtgccaagcacattactcaatttccaatccaatgacctgaaagtacaaagtattttaatctactgatgaggcacaaggctcagaggggttaaatgtccaaggtcacataggtgggaaatagcaaagttggagtctgccctccaatgcctctccctccaaaatgtgcacccttttcatcactgcaccatttcctgaacggtctcttgcagaaagctggttccatgaaacttcctttaaaaaatacat

SEQ ID NO: 36311 - DNA, 1250 bp, Homo sapiens
gggaggaggctgaaggcgttctcatattgggacctgtatttgatcttggagcacatggtgcctcggtctgaggctacatcttaggtccaggttttatgcatctttaaactgcactcttaattaactcttctccagatgaatgatgcgcagtgacagcacttcagcaaaatcaatatggtgcttctgtctcaataacaaattagatagtatttctgggtcagtgtagttcatcagatatcaatacatttcagtctggtttgtcttttttttttcttttgctaaaactttctcattctgggggggaaaaaagaacagacttccatgccagcttattgccctcacaccctcctcccaattgtcacatatccagaggattcacccacccaccagtttgctgccatctaggtggcctagtagctggcagagcttctgagctgcagagaagcatccagaatgcagagaaggcggtgctttgcgattgatggctgctgctgcccctcccatgaggctgattcaggccaagggaatgtgtttgcctttcttcaaagacgtggtctttcctaatacagtcttgcttcactactccaccggtgttgctcctttttttgttcctttttttaaatctacgtaatcctgttttgctgagaagctttattaataacttctgagcattccctcactaatccccacagagcatctatatgtaagatctatattgcatgacactgtttaaagcaaggcaaactgaggcacaggcagaagagggagggaatcaatcccagacctccagataacaagctcagaatgttgctccccaggcctgcttgcccttctcctggtccaggaagtaccaagcaaggtggatttcttcaggaagccactgggcagcataatctagtagactgcctgggctcaaagcctgactaagccctattctgcctgtgtgactgaagaaactgcagaaataatatccagcctgtctgtgcctcagtctttttttttttttttttgagagggagtctcactctgttgccaggctggtgtgcagtggcacgatctcagctcactgcaacctccacctcccgggttcaagcaattctcctgcctcagcctcctgagtagctgggattacatgtgcccaccattatgcccagctaatttttttatatttttagtagagacagggtttcaccatgttgaccaggctggtatccaactcctgactcccccacctcggcctcccaaagtgc

SEQ ID NO: 36312 - DNA, 683 bp, Homo sapiens
tccatatttatcaaatcaagtaaaaacccatgaaaagtggcaaccgagggaggaggcagcaagataaatcaactttctaaaaaaaaaattcccctttttaaatagaattttattccggttttggtgttcagagatgttttgttcacaataagagccattgctccatattaggtaacatcttttcccccttgcagcttcaaatgaatatcaagagccaggttcacaagttggattccctttaaagacacgtttgattgcaaagctttgttgactctgtttgatatcctccgcgaactgcatgactgagctaagctgaagttcctggtcaccagcatggggaacgggtagctgcttcagcgcctgctggcagagaggtcgttctccgagtctgctttgccacctagtggtttgatgtggtattgccattcaccaggtagttttaaaagtcattttagccgttgaatgctatagtgaattatgacagaaaacagagacactctaagcaaagaaggcagtcagagacccaaaacaagccctgaaaaatgacgcagactggattacaaatagggaagaggcactaaatagttggtctgagaaaaaacgcacggctgtatgttgcaaagatattttgggtttttcccatatcatcacttaaaaaaataattattattatagacgtagaa

SEQ ID NO: 36313 - DNA, 2932 bp, Homo sapiens
ctagaaggcatatcagttttctctgtcaggcttcctacgttgccctcgtgcagggctcattgctctgcagagcgctggaagccccttcatgtatcgagagagaagctggagcacagagctctgatgcacagttggctgtttcagctctgactcagggaggaaagaaggatgccaaggctctgtcacagcggagaagtctaataccagagtggcacagagaaggattccagggatcagtcagggtgtcctgtacctatctgagtagagatgattcaaggatggggacatattccaggaaattgcacaatcttcccctggcagcttcagaggacgagtgaaaatagtgcagtatagtcaaagaagcaatgaatttaggatgaggaacctgaagtttctggaccagtttggtcactgcttagttacatgtccttaggaatgcttgtcacttaacctaaactttctgggttttatcctcattgctcaaactaagcaacaacaccgaagcttctctaatttgccttctgatgccaaatcggtcaaaactgaggtcagcagctaccatgacgaaagtaaaatggtatattgggtgaatgtttgaaaatttcagattttatattctgtaaagttatttacttactctatttcaacaccacaaaatcttgaaatttggaaggtaaccaaggaagctttgaaatttgttggcaaacccggagtagtatggtttcaaataccactccaacccagcacctgaggtcgggcaaactcacaaaatagagtttctaggtagcaggtgtttgctttggttttgcaatagcatttctcataacagaactgaaactgtatagattacaacactccaaagttatttttttttaacctaaagaaccctacttctagcacctcctctgaaagaatattttgctccaataccacgtgcaacaaacttatttagacagtatcaactctagcccttaataggttcaaggacaagtttactgcttcctttctacacgcttaagttacactctcttctcctgttctgatgactctaaatcttcagcctctcccagcattaatgtgtgagtcaacattgcagacctgagaaaggtttctagaatggtaacccaatgttctttagaactggagaattccattttccttttctggctttagtgttaatgtctgggaagggaggctcatgataagaaaataaaaatgagaaaagaagatctagttcataaaatgactataccccacgtaagtttgtaactgcacagtgttttgttgtacggctcagaaatgagcaagtgttagtattattaggcacacatcacgttcacagcttcgcgcagagacggatagtgtatttggatatatggaagtcatccaaatgcgttgctagaatatcaggcctatgtttgttctggtagaaccacagagactcacacaaagttctgaccctaccactctggtctgggctgagaccaccccaaaaaatcatctagagaatcaaaggggctcacatctcagttgcattctatttaaaagataaaggggccatactctccactgcaaagaagcattagtaaaacttcccgcacccaaattataatccggcaaccctagcttcagctaaaaagattatccccagaatctaaaagcttactattgttctttcttggagtccaaaatgcttagcagttctgcagttcacatacaaaactcaaaactctttttatcctgtattctgtgagttccttgatgatagtaattgggtcttattcatcactctgtatcctgtggctcacacagaatctggcaaattgcatatattcaataaatgttgaatatctaataacctccttattaatataacaaatattatcaacattctgtgcacatcaatgtcccatgctgctactgtagtcaggagttatttggctgggaagtggaaagtgttcacaaacatgatgcttatctaataaaatatcactgagcaataaggagaaatattttaaatagatttgaagttgtgaacaaataatttagagtccaaagaggaaaaagaaaattaactctgttttttatccctagaactcagaaactttactggattggtcaacaaagacaaactttttattgtataaaacagtagaattcatggaagggataattcttttggaacaggcttctcggttacttgccttagtaaaagaagtatctggagggcctggagagttcataaacatagttttctgtgcaagtgaagatctgtagtttggcttaaaaatccttgcatgtagttttgcttggcgtggaaagttattaggagacaatcctttatcctgttctgcaagcaatcaaacacatgatctcccttctagccattcctcatccagtacatgggcatttccagcctcctacatgtaacacttcaaacttcctctgggcgtctgcttagagctatgtgatggccacagtttgggcaaagcccttctttcttttaaatataggaactgttaccaagtttggtgcaggcttgaggaataattacataaaaatgggcttccacgatggtgaatcagcatgctgatttctcttggcaggaagctctcagggaaatgtctgtgaatcatttaaagatgctctctggtggatagagaaaccgcagtccaaaaacagatgggtgtatatttgctttgtaagcaaagggcatgtatcatactcgcatctaaaacagtgtccacatctttgccaaaggcactgaattttacctttttttattacctcgtggccagcacttcctcagtaggcatttcaggtgtgtcacaaaccatgttcatttttaatcttgaaaaagtcaatcgtctgtagtctgtactataaaatgatgcctgcaactttgtggtgaatattatccccaagttaacag

SEQ ID NO: 36314 - DNA, 469 bp, Homo sapiens
actggtagacctttaaccttgtcccacagaatttgatccaaatgaaaaggtcttttttaggctactctaaattctttccatttttaaaagttctttctaactaaaacttttatctggtgtatttgttttcagaaagcaaagataagcatgaaaacttgaacaatgaaaagcagaatgaaaatgagtcattgcaacgactttcacaaaattcagctgacctgagagtgggagggaaactaccgtcattctgctcatgtttcttcttgacctcttgcataatctttttgttttctagacagttcactaattgttgaattttactgtatattcatataaaaatgcaaacgtactagaccagtggagaatttgacaccttttctttttgtaaaagtttatggtattataccgatagaccaaaacagcatgtgtaagaggcagtatctgcactaattctcaacatgctaaacat

SEQ ID NO: 36315 - DNA, 932 bp, Homo sapiens
ttcattttattctcacatcttgtatttggcttgtatcagaagaaactcataaataaatcctgttggttttattaaccatctttctggcctgaccatgttctcaatttacaaggggtgccaggactgtaaatgctgatggtctaagcagactgggttggccaaagttggttgtgcaaagagagaggtagtggaagtgctttccttttaagtgaacgccctcaggcctggcctctgtagataccagaataaggactgcacaggccaaagcaagctagtatttaggcagctaaggaatccatcacaggccccttctatcagccgttcctaaaagtggcaagacctgaacaggggttctacaacaggagcttgaacaataaaacttcctgatttctaggaaagaatacagtagtgctgagtcatccttcctgacaggcaaatgcaagtgaccaatggcaaagggtacagctaagctgatgaactcactccaagagtggccttcttgagttttagaagtcaaatcaagttagccctgggctgtgcaggaatggtgaatggcgtggggctgaaactttttctacaacctgaggattttatggcattcttggaaagttgaagggaagtccccagggctgaatagctgaatactgataggcacatctgggataaacttgctcccattacccaagtgaaaaccatggcagaaccaaacaaaactcccaacaagattacacttcagaggtcatttttatgaggtttagtactgccacagcctcagctactaaaggcacttcatcgatgacttggattcttaggctgggagggtggtggtctggctcttcagttaaacctttagagacagaggtcgatgtttcttggccctgggatcagggatcatcctcgcagccaaagattgcttgcttgctgaaaccact

SEQ ID NO: 36316 - DNA, 1516 bp, Homo sapiens
tttctgtgtttttaaaatataattttaaatgtaggccagggtcagtggctcatgcctatcatcccagcactctggaaggccgaggtgggcagattacttgagccatggattttgagaccagcctgaacaacatggtgaaaccccatctctaccaaaaaaaaaatttttttttaattagctcggcatggtggcacacacctgtagtcccagctactcgggaggctgatgtaggaggattgcttgagcccaggaggttgaggtttcagtgagccatgatcacaccaccacaccccagcctggatgacagagcaaaaccctgtctccaaaaaaaaaaaaaaacaaaaacaaacaaacaaaaaaaactaagacaataattgcaatttcaaagaaaatcctgaaacaaagagaaagagacgaaaaaagggattatactgaaatgaaagagcaaatatagagcacagacttttgaaacgtgaatgccagggaaagccgtgaataacactctgggcaaagtcctcccctgacaacaatgtatctggcttctggcacattcaagtccccattgaatgctttaccttggcaaagcaattttggaacagtggtaattaagacagagaagagatttaatggtaaatacaattttaccaccaacatctagtggtaaaatggagctggacccattaataatgaaaatttacagtagatttataaaatgattccagagaaatctttaaaggtccctagagaacgtcattgttgtcaggagtaaaaggcacctctatgttatcagttccttttatatgaatgtttgcccttgcccctgagaaaacattgacttacacatttgttaacttttagtaatttaggtgacaattttctctggtgtttgctaagactaaagcctgtttggtgagatacaatacattgcaacttcgtgctcctgtgtcactctattgtttggagttcctttccaggaaagaacacttcatctatctcgaaacaaccaatgtagatgtccttgagctttatttacaaagaacaagaggccacgaaggaagaaaaatcacaggtaaatcacaagcaaaatcaaagagttttcttcccatctccataaaacaccttcttaaaaaaagattcaacaatgactttaaccatgaaaaaagaagacagtgctatttatatatttttgaatggataatacatgtacatacaggtacataattcaacaattacaaaatggaaggcaatgaacactttcaacccatccctgacccttagctcaataggtatggaatataatcagtttcttttttttgagacagagttttcactcttgcccaggttggggtgcattggcacgatctcagctcactgcaacctctgcctcccatattcaagcaattctcccgcctcagcctcccgagtagctgggattacaggcatgtgtcaccaggcctggctagtaatataatcagtttctgatcatcactctggagcagggtttctcagcttcagc

SEQ ID NO: 36317 - DNA, 1431 bp, Homo sapiens
agaccttttggttccataaataagctacttcatattacagagctcttttaagaataataaaattaaatattcccagaatcaatcattttaatgcctcgataagaggctttcatggaaagaattatttgagacctttgctgaaaacttagggaattttgtcattagtcacacaaaataatcctgcatacacacacacacacacacacacacacacacacaaactgccataggaactgtgaaatggaaatatctattgtctacttattatttgccagatatatggataatatttatttaatcctcccaacaaatctccaccagaggtattatttctatttagagaaaaagtaactgatacttagaataagaagcttttccaaaattacagaatcttcaaattgagggttcagcgttgggaactactgtcatctgaatctgaaagccatactctttccttttcaccttgtaaaccacttcttgtttcaacaagatgtcaaataagtaggctgatgaagaattgactaattaaatgtattataataatcacaagctactatgtgaatattaaataaaataccatgcttcttctggctacttcaaagattctttacacaaaggggaaaaaaatgaaacattttcgggatgaagtgtgtgcttggggtgacagtggttatttggagggcagatgatgcaattgcctgcttgttgctgactcagaaatgtagagaaatggtcaatataaacagatggccccagggctcctttccttttgtgaactgtatgaccctgattcaacaaatctacagtcgtggcactggatgcccttttactaaagtccttttaccttgtcagcctagcaaaatgactgaaattaaaaactgacagggtcacttgtgaactttactagcagtcccgcctctgagccattttgtgctctcagcggttacgattcttacactaacaggtggtgtcagaaatcaaaacctaatcctccaggggctgccttggtgttcagtttcacctttcaccgaaggtgtaatccacgccattagtttaatatttctttgtgggaaagacaccaagaaacaccatcttggagaatgtcctgggatttccaatatctccagaggaaattatatttgacataggcttttctctttagcatttactatatagaaatgtggggcactacaggattgccgtgtgtgtgtgtgtgtgtatgtgtgtatatatgtgtgcacgcatatgtgtgtatgtatatgtgtgtgtatgagtgtgtatgtgtgtatgtgagtgtgtatgtgtgtattgtgtacacgtgagtgtgtgtatatgagtgtgtatgtgtgtatgtgtatatgtgagtgtgtatgtgtgtatgagtgtgtatgtgtgtatgtatgtctgtgagtgtatgtgtatgtgtgtgag

SEQ ID NO: 36318 - DNA, 1615 bp, Homo sapiens
cacctcagcctcccaaagtgctgggattacaggcgtgagccaccgtgcccagcacaagattcagtttttaacaaagcttacatagaaggagaatcaagaacaacatcagagctttggtgttgtgtgctctgctggaaaaaaaaaaaaaaaagatggagggggagggaagaacaaaatcttacttgttaaattacagaatgttatcaatggtaaaacccgagaaagaaaagaaatgtgcccaaaataagaagaaagatgaattaaattgctatgcgtcctgtgaaagtaactttaaaaatattttttccaactttcttctatggcaaacaaccacataccttgtagaaaatgaattctctggaggatacaggcaataaagaaaacctgtgagctccgtgatgtacaccagctgattcgtggagacagcatacaagcttaactaggaatttaaattcatagataattcagtttcatgaactagggccagcaatagaattgtctatgttttctttgcaccttggtttgctgctccacctccttcctctcaaatgtagtctcttactaatcttgtaaggggatcttccttccctctcttgacgaagcttcctggtttcgcttagagtgtgaggaagtttttgtgacagctggtcacgttactagcatcaccagtccatatttcctgttcagatttcaatcaagccacaaacccttgagaatcatagctttggtttggtttcgtttcgttacaaaactttttttttaagaaaccatgaaaccacacaaggagtccataatcccaaaggctgccaaacaaccctggttgacctagttagcactgtagtgggaagtgggggagggggcagtcagataacataattctaattaaaatattcagaaaactaaaaccttttaaacttaactctttgtttggaataaaaacaaccaaatattggggcctgacagacactatatcagaaattaaaacaatttattctttaaatttcagatactccaattagaatgaaattaaactcaatgagtttaaactgagtcgaggtttattaagctctgccagttccttttgcattcgtttactgtattttatttttaaaacaaccacataattaatactgcagaaagcagtatatgataagaacttacttgggaagattttttattttgtttccgatgtgtatttcttagtcaagtgctacatggtgtttcttaccattacttatttaaaaagcagatcaatgagattcatactggtaacatttacacaaattttccaaattattgtttgtctctacttacagtgggtgccaaaataaatcttggatctttatattttcctttaccaagtcatgcaaagcaaggatcttttctttaactgagctttaaaaccattgctggcagcgtcgagatcaaaataaatagaagttccattcctgaaaactgacatggaattgagtcggccataaaagtgatgttgtcgcaacttatttcaacaaagaaaaagtcctaaaattaaaaacatgtttcttctgtcatgtgtcatacaaggaaaaaaaaaatggaaaaaaaggaaatcttagtgtgttcctaatttagattc

SEQ ID NO: 36319 - DNA, 2295 bp, Homo sapiens
gggcctaccttttcctcaagggggagtgacttgatgatctggtttctggagaacgaggataacaatgcaattgtcacaggactgttgttaaggcttaaatgcactggaagatttacctgagtgcttggcatataacaaatcctaaataagttgtgacgactataatatcagttattatagtagaatactccaaataagtgttctgctattgtgtaggctgaatgatcggtaggcattatttttgttgtcattattattattgcatcatgaacattcttgaattaatttgggagatgaagatcctacttgcttaaatataacttagaatcctaagtctaatcaatcatcacatataataagtgttatgtaggtcttagtcagtgtttaagatatccattatattttcccacaggaaaagttaaggaaatgcgaaactatagaggaattactcaacttttctgtcctaatgactatggaccaaaggtcattcattggtgtatgcaatcaccctataaaacaaggtggcttgccgggcacggtagttcactcctgtaatcccagcactttgggaggctgaggcaggtggatcacctgagatcaggagtttgagaccagcctaaccaacatggtgaaaccccatctctactaaaaatacaaaaattagccggtcatagtgacacacaactgtaatcccagctactcaggaggctgaggcaggagaattgcttgaacccaggaggcagaggttgcggtgagctgagattgtgccattgcactccagcctgggcaacaagaaaaaactctgtcaaaaaaaaaaaaacacacaaggtgactcaatctatttctaatgccatctcaggctgttgagagcagtttagagcattccaggtaagtctttgacacaggatttcaattcagctgccgttagtcacgtagatgtacccaaacttacgctctgatagaaaaacaaacatttggttatctccttgtgcatacttcgggcagagagaaaaaaaggacctgaccttttgatagtcactttctccgtcctgcattctggccagtgcacaagtaaataaaagctggaaactactggcctgctctgtccttctttctcatgaactgaaattcagccagtgccagataggaaaccagaaacggagtattactactctactgtggcgcattcccttcctaggatcatatttttccaaagaactacacctgaatgtgtcttgcttggattccaagaatccattttaatgaccgtggttacgatcctttagaagaaagccaggaatgagaccgctgtctcgggtgtgcaacagagctcaggagccagggctctcagagcacagattgccaaagggcactcctgagctacaagcaagcaaatcagcggggtatttagatgccacaaactgtatgcctgtccttgtagttccaggagctaggaagaaactttcacagcagagctgctatgctgtcacgacaacaaaactaaactgctaagaaagtgatgtgagagctgggaactgctgagaataacaagcacataatctcttctagtacgatacgtgctccacagtccctgctgagcaaaaccagtgtttcaaacgtccctttccgccttgctcccgcctcattttactcaaaggtcacctttaatattgaatgtggctgtttgtttacatgtttgtttctcctagtgacctgggagctgctgagaggcaaggactaggtcttatgcttttttatattcccaatgcttggcacattgtagaaactcaataaatgtttgttgaatacacacaaatcagaactctgatgaaataggactaaagttctaagcggatggctgatttgttagcattatctgtgtctttgttagattttttaaattaacagagccttactttcaaatctccatgcccaagttgctcatcttttcatgcacccccgaaacattttctaagcaactaccctctgccagctactgaggggtttacacagatggaaaatatattttcccttccttcagtgagattactgagagtgtcataaactacactctatatattcagaagccaccctaataaatatttttggatttatttgatagttttggctgtcatctgaaacagaaaatcagttcaacaccactgcagttaatatcgactaaacagctccgaacctcaattggccaacgttttaatcatatggagacaatttgaattttactgccatcaagaaacaacaggaatatttaatgcaagaattaggaatgcatactgg

SEQ ID NO: 36320 - DNA, 2893 bp, Homo sapiens
tcttgcagtcccctctggcttttcccaggaaagactgaactcattaagcaatgctaatttaatcacaagtcatcaaggggtggggagttatataactatctttaaaatttcaaatcaaacatgataaaatctcaggaaatagatttttttaacaaaacccacacctcaaaataaaaaaaaaaaagaaatagaagtttatgagttttaggatcaaataaaataaaatcaaacatcaatattttcttacaactatcacatctactagatagttccaattcatgactttttaatgtagtaatatgtgagatcctggaactgaacgtgcctggcgtgcagaatacaaatgcatttttaaactcgtaagacaatgtagaaataagtcaggtacacaggaaggatcactgacaatcacgttaaaaaataactacctcccttctctcttctccttcaaccacagcgtagtgataatagtgatatttccctcatgaggcgggtgcaccttggccatatgctttaaaaaatcaaaactctgccgaagtccgctgtggttcctattcctgtagggaggatattaacctggtaggtaggtgggagaggttcgtagcccgctttctaacaattggatggtgtttgcctcgctatagtcatgattagaatggcggtcaccaagaggtatttattggtgggatgacaacatattggtattgacgttatttaaaagagaaagaaagagcgatcacggtcaagtttgaaggtccttatgttacacccacgcataattcaataggtgaataaaccttgtggcccccagacacacgccaacagcttgaattacccggggtgaaaccggcgagacgtccactcagggctttcggtcctgaccagccacggaacaaacaacgtcaattcattctaagtgcctggtgaaggtagaaatcagaaaccgtgtctgtgtcacgttagtcgtgacaagctgcgtacctgcaatgacgtgatggaagcctcctcctcgggtcccttctctctctctctctccctctccctctgccttctctgagttctctagtccacagcggggtctaagtttggtctcccgccgccgctttcagttcgaccgcagccagactgcagcagacgcccataagagaagcgcgccggctgagggtgcaggagaggcgagagcgcgccccgcgccgcgcggtcccaggctggctgctcctgcagatgtgaaaggagcccggagacttagctctgaatcctctcggcgctgcatggggatattatcagagtctgggatttctattggctctgaacaccaaacaaatcacaccagccaccccccttctctgtttcactcagcgcttgtttctcatctaacccacaaacattgcagccacaccacacacttcagtcgcttgcaatgtttctcttttcctccttccagtcagtggatttacaaccctgtggtcagctctaacattttttttagcagacttccaattctaaccttcttgtttatgtagagaaattctccctccatcccctaaaccagaaaaaaacaaaaaacaaaaaaaaaacactcattcccttcagatcttcttccttttgctgatgggtttccaatgtgaagaatgtagaaagcctgtgtgtgatatgtctgacattctcatacacgtgcgcttacacacacacacacacacacacacacacacacaccaggctccttttgtttgcagtaactgaggccagtgaaataaaaagcaagctgagcctaataacctaagtgagagcttaactaataaaatcttgaatgaattcagtgcaaaacacccattgcttgaatttgttttctgttccaaatagtactttggtcattattatcctgatttttgtttattgaatgcagaggtttctaatgcaaatcagactcttcaacatccagagaacataaaacaatgacgccagaccaattcttgtgctccatcggcttggtgcgttataccagaagcgtattgtgacgcctaagtgcttgctcttttcattattttttgaacttctcaccactgatcatctcaggactgagactcccttagtgtgattcaccagccaaagacgactattcagactctgctgatagaggttcctggatgaaaattttttatctgtatgtgtcaatagagataaacctttggccccttggcagggaaagggcccaagaaaaatctgagatcttacaaacttggctggggaaattcagaataaaataaagtttcagtgtgtcttataaaacagaccctcccttagacttttccccaaaatcaatttcactggtgcttatggaaattttaatgacagttattcttgacaagaagccattgcttctgaaatctctgagctctgttttgatttttgacttgaattttttttttgcagtgttatcccttttgtatgctatttggtatttgatattctagttccaactcaactcacagcacattgggttgcaaattcacaggaaataacaattagttcttgaaatatactatcaccaaacagactacctgccttctttcttacgtgggcacattacaggaattgtgaaatgcagccttattctcagaatgggcctgcctgaaatcagctgaaattgacaaaggaaatacaaaacaaaaccacgtttagcagttggttcctgctaaccacagtctaacctcaaatggcatatccttattgcttcaacaactccagttcattccctttctttaggtaggcagctaaaaacaaaatactgtcataaatctttgaaagtgtagaatgtatttcttctaaagatctcaacagtcttcgaaaaaaaaaggagttataggtatgatattccagattttccaggtgg

SEQ ID NO: 36321 - DNA, 774 bp, Homo sapiens
ctagtaagtaacagagattgtagtggtctccagggtgcattagaatggagccaagtgacaaccatataaaaagtgacaaagcctgagccaaggtaggacagagagggaagagaggaggtgacagattgggtacgtgagaggtaggtcatcatatcatgaaattacccaatagctctttcgtcagtgaaggtcccatgtattgcgtaagattactgcagcctttgctgaactccaaaatttgacctctgcactgagttgttttaggatccaaaacattatgtagcaaggaatggaaagtgttttatacaaatacttttttaaatgtccataaatgtctaatgtctaatgcagtgtacagattcatcatatgtcagcaaattagtgctgaccttgtagccacaacacccatctcctatccccatgccaggaataggcacaatcctggctggactttacccagcagcgtaagcgtaagctgaaattcaccacccctcggtatacccacaatcaaggattttgagttgtacttgagatgaggccaatatgatggtggaattgttagggaaacagggacataggagagccagggtgacatcattttcaaatcaattccatcttaaaactagtaagacgcattccttgccagtcacgacccacggccgtaagatgtttaccaccaaggaaacagcttaataacgcctgcaaggacaaactcctgtgacaacaaaatgcccagatgtcccaatattgcaaaacgatatgtgcttttaaggt

SEQ ID NO: 36322 - DNA, 661 bp, Homo sapiens
ttctcccatatcctcttaatggaataattacattattgtaatttacttgtatataattcaggcaagctaagcacaaccaataatatgtttcttcagaggaaaaaaacccaaacataataattaaagaataaattagttactgtaagtagcaagtattccaggtttggggagaaagtgtaggagatgatcccctcagaaatggacaccagtggatggtaacatgtgtgggaacaagagtgattccatcttggatgctaatctgccatgttggctcctgattaaccctgagtctgggaatgcctccaaggtgtctagttgatgatttactctctatgtagaaacacttatttactctgagttacacctttcctccacaacaacccttgatcttgttgcatacattacccgtagctgtaacacccatagcattctctcggccacccactcattccttccagagcaaatatacttttcctccaggatatataaaccctgggtctggaaggttgtagtgcgaaggcctacctttcttgtggccacccaagaccacgcttctgtctgtaagttccccaataaatcacccttttccaacacactggatttttctgctctgttctttggtttcttggctccttctgtatttggtggacacttcgcatat

SEQ ID NO: 36323 - DNA, 1295 bp, Homo sapiens
tagctggacatggtaacgcacacttgtgctcccagatactaggaaggctgaggcaagaggatcacaggagcccaggaggtcaaggctgcagtgagccatgattgtgccactgcactccagcctgggcaacagagagagactctgtctcaaaaaaaagaaaaaaaagaaagatagatgctagatagatgatagatggaaaggggaaggaaagggaaaggggagaggaggggaggggagacgaggggaggggaggggaggggaaatcccttcaccgaagacttgtaggtcaggtctcaaagagcagccagcagacagccttcagctgtcaactacatcagggattgacccagctgcagagaactgcctcacacaaggtcacaccccttcctgggtgactcacaatcaactgacacaatcaataaaacctgtctgtcttgagccaagttggcacaactctgaagatccattctgattgtggagttccctgtgaggtctgtgtggctgggcctgcattgtagctcaatttctccccctcctcactactgtctcctctcttcccttccagatgtcattaccaaggatcctttttaattagcatcctatattccaaactctaaccacagtctgcttcctgtacttgcatatattcattacatacatatgtgtgagtgtacatatatgttttaaaaatccctagcaagagtaagtacgttatttggtcagtcagctgttaaaacttccactttctccagttgtctggtggaattaaaaaaaaaaaaagactttcacttttattagtgcaattcatatcagtgtgccactggtagctcttggaagagaaggaagagagagctaatatggaacctggagacaagttccactctgctcctgctgaatgcccttctcctttgcttctacctacctccagaagtgctggccattgtcagctcctgaaaaggctgatgctctgacctgtttcagtgaacggggagaggacttgaggctgggaaacctttggaataggcaaggggtccccctacataggcttccctccatgactcatagtgtgttccttggttcgctccctgtggtcaaccacctgctgcaaaaagtcgttcactgctggtgtgagaatcattgtcacctacactcaagtaaaaatgtgtatcaaaggaacagatgcttctcttccatgcaacctgaatatagatctatcaggcaaattcagacagctgttctagatgcagagaccatcatatctgctaggggtcagcaaacactgaccatggctcaaa

SEQ ID NO: 36324 - DNA, 1000 bp, Homo sapiens
ttatatttaggagatacatcgctctttagtttccttttttgaactgcctttggttttggttcaaggtaatactacttcataaaatgatttgagaggtatcttctactcttttgtctggaagagattgtgaattggtgttaatttttctttaagcttttggttgaattctctggtgaaatcatctggacctagatatttctttttggggagttttagattataaatttaagttccttaatagtcatagggccattcaaattctcgatttcatgttggtttacttgtaatttgtttggaattggcctgcttcatctaagttgtcaaattcatgtgtatagagttgttcatatgcgggcaggggtgcctcactaccatctaacagagatgtaaattcaggctccttcctgggctgcctctgttatcacccaggtgagggtgtttggtctcaacagagcctcacaaaggtcaaagtctacgttttctactcaggctttgctaacatgagcagaggcggggccaaacttctttctgtggtgtttggctggaatagaaaggttattatctaaaagctccatatcttgccagcctggccctttcctgatcatttggctagagaaaacaggtgtgtgtgtgtgtgtgtgtgtgtgtgtgtgtgtgtgtgtgtgtgtgttttgctttgattttgatttggcttggttttattttctgtctgcacgtgtgtgtgtgtgtgtgtgtgtgtgtgtgtgtgtttggtttgctttgattttgatttggcttggttttattttctgtctgcacctgtccgcatttccaggattctagttctttagcattaagaactcactgccatgtggtttttcaggtcccaaaggccccagctcaaatgtttcttttctccacttttcagagtcctttatgtatattttatgtataatgttcagaatttttacttagtgggatgaaaaggcaaagaatgcctacttcagcttctagaaacaga

SEQ ID NO: 36325 - DNA, 2030 bp, Homo sapiens
tgtctcttttatcttttgaaccttaggcctaatggaaagccaaagacaaagtaaagactaaatactaattgttgaaagaatgtttgttaaatagcatagatattattcaccagtttctctgagtttgaatttgtttattagtaaaggagacaagtttacagcattgaccattcaggtcatctttcttacccattatcaaatcctcggccatcccagttctgtgaaatagtgaaaaaaacagtcagttctatgtgttgttccacctgtaattcgttgtcacactgaaaagtgaaagtcacagtattgtattatagtttgatgtgttgtaatatcactaggaaagctacctgctttaattcttacacaagaacttttgattatttatcgtatttcttacatatatcatttcttacctatcctatcttcttacacatgaactattttatttatttatatttgaaaacagatcttttatttagacttttcaacagtatgcaacgctttaccaatgcaaatgccttactaatcaacaaatattcagtgtctgtctcctccatatgaaagtttataagagcattattattatgagttttatacttcagctagggatttaaccacatagactgcagaggtgctctatctttatgtttctatggtacaacagagcacatctgggtttacatcaatggctgcactcagttcctgcagaataatactcctaatcctcattctccatgcttataaaaagaaaattcaattatgaaaccacagcatctaaactacttatccctgcagccccaagacttcattcatctggagacaggctaatgacagggcaatttagtattgggaaatttgaaaatttacttcaagataagtttgctttaaaaatgtgggtaataattgcaactgtaagattaagccaggtttgtctcattgtgtagatttcttcccatatcctgcccccccactttatgacagtaatgattttgtgactaagactggtgtcactataatgttcttgggacagaatgatagtccaatgactcatcagacagtagaaagggaaaatattcaagaaatttaacatcattggtatttgaaatatttcaatactgtgaatctattcctaaaaataaggacaactaaataactttattcactaataaaaagccacaatcaaaacaactgtgacagagtgtggaacaaattataattacttaaagaatcattgtgattactcataaaaaccttaacgtttgccaaccaatttttcttgtcaaaatacattgtttcttctggcgttcataccctcaatttgcccaattactctccataattttttttttttttttttttggtggctgagacacaaaatagtatgcaggttctgaagacttctatctgtaagtacaatatttgagaagtagatgagtacctttcaaagacaaatgttgagatttgtgagtaggaaagataggggaaaaaaaagtgtcatgaggattttggcctataccgagaagtttttgagtcgattaggagctctggaaacaaatgacatcaactctcagcattgcggatgtctcattttcctctttatctctcttttcactgcttctcttcttcttccctggatccatgtgtctgtcacttaccatcctctactccctctcctctgtcttccttttcctgtgctgctgtctgcacacagcagctgtccacagactgtccagccttcagagataactggcttgtggagtctgcaaaaatgggtgtctatccctttctcattttttttttttcctttgagacggagtctggctctgtcgcccagactggagtgcagtggcacgatctcggctcactgcaagctccgcctcccgggttcacgccattctcctgcctcagcctcccatgtagctgggattacaggcgcctgccaccacgcccagctaattttttgtatttttttagtagagacgggctttcaccatgttagccaggatggtctcgatctcctgacctcgtga

SEQ ID NO: 36326 - DNA, 2273 bp, Homo sapiens
tcaaattatcttgaagtttagagtccagaaaaagtactggccctttgaaataccctagatggggcacttatttaatgagcactcgctacatggtattttcacatgtgcagttttgctgagtagctgtaagtatttcaactttgcatacggatttgaaatcacatctcttagattgcaaacctcatgctacaccagtgcagaactgtaactcttcaactatcatttctcaaacgtttcctaacaatatacatatgtatttaaagctttttaaaagcctgcattcctaaagatgacactctaaagagcaaaatgacttacgtaagcatgtcataacctgaacttggatctttaagttcttagctggctttctgaataaaaagtaccgattcagctcctagccaatctgctcaaacatgcttcagaacactatgcccgcggtattcggaattgaagagttttacaacaattacgggggaaaccatagtcagcctaacaaactgagcatgcaatttcaaaggaagtaaaatcttcgaagaaccttctaccccacctggagggcctgaaagcagtgcagtgccccttggcgaaacaaaccacagttcagaaaccactagatgcacaggcggccagtgtccggccagcaaggcccagctatggggcaggacggtgcgggagctgcccctctcccagcaccctccgcccacgccggcactgtccttgagggcagcgccccggggctgggggcctgcgcgccagcagcagcgaagttacctcaaaacgccccggcctcggcccgccacggacggctccgaggaggcgccgggagcgggcccagtaggaccctctctgacagcccccgtccctccccaagcgctctcccgggctgcggctccatccctgcgccggaagaggcgtcccgaggccgggaggcccgccacgccggcacgggcgctaagcccagagtctggcgcggcccggacgcccggggaatctctcccgccaagtcgcgggcgcccaggccggcaggcaggagggctgaaggtcactgcggggaggccgggggatggcggcctgcgctcaccattcgagccgcgttcggaggccaaaacgagggcacggccgcgccacccaagccgggagccgaagctaaggctgcggctggagcccgcacgaggggacgcgagcgcgcgaggagccgaagtgctcggtacatggtgctgagggagcttgggtagaatttctgggcggctgtggccacgcctccacgccggttgtcagaaaccgttccgcccaccggcctccgctcttatccaatcaacagcctcacaccgacaggtggggcaggaccaatcgtgaatgaccagtaaagaatgagggggcgggttaactttctagtagtagtgtggggtgtaaggccttcggattcatgggaaactagaaagaagggaattatgggaaaggaggctcaggttattcttggagccggtctgatttttacgtgtggctgttagaaggcgggagtattagttggtgaatcaggtcgtgtttggttggtgaaatatcctagaaagaaatatttattgttttatttatcatgtaatcactcattacacgttcttactactgaaatctttcttcatttcttccagattgtatcttctgtgtagaaattttgggaagtgcagcaaagtgtagataatgaaatagtaattattcataatcccacaactgaaaaataagctacttacttatttcttttaacttatcattttgagatcgctaccgtttcctttctcttcttagcctataccctcagaactctttttttttttttaatgtattgtggaagacgtacacaattatagggaacctcggaatttttattatttgtatatcgttctcccagttttttgcatagctaatttatacattttcaaattaaaggcatattgttttaatataatagttgattacagaaaagcaggaattgatataaaattgcatctgaaccacagttttatcttttctcttttctattgcttggaaccagatgacagtaaagagagagcgatcggatgttcttaaaatcaaaagtccagaacctgcaaagccaaatttatgagtcaaacttacaaacttgccaaaccttttggtaacattatgttattttgtgacttataaatttgacacatatttaaaatataaaaattcaaatgagattgtaatagttgaactacaatcaaaacacactagaaaactgaatgcaaattctt

SEQ ID NO: 36327 - DNA, 2856 bp, Homo sapiens
attttttaacaatgatacatattgatactgaggaattgatacatattctctacatattgatattgaagaattctcaagctatatgttgtaaagtgagaaatatgatgtggaaaaagtttttaaatgtatgtttaaaaagaaaggaaggaagggaatgagagagtgagagaaagagagagagaaaaggagagagaggaagaacaagaaagacataatcaacgtgtagaagaatacggtaacccacacaccaaaacagttgttgtctttgggcaggaggaataggtggccaagggtcaaggttagcaggattactattcaccgtgtactcttttgtgtctttaatttcatgccatgttaatgtattacctattcaaaataaataaaatacctaatcatgcttatccacaaggggtcactattgaatgccatttaactctagttcctaaccagggaaaaaaacgttctgaattctttatgtgcttaacaggaagtgaagaaacaacttcatttatgttcttattttacattacaccacatcatgttccagaaaacaattgccattcgcaaatcatgcacaaaagtataacatttaaaacggagtgaaaaagacaaaaaagtgaatagataatatgaagtcgggaatgagtttacagaagcgttgtgtcagtcatctcccctagtggtaattagactctaaattttcgattctaaaattagattctaaattttctagcatctgggctgaaaaaaaaaaggggaagtatggtcagttacacaattcaaaatgttgatcgggagaatattaagaccttgcagagaattttccctggtagagcctgttaaaaacaatccatgaggaccctttagatgaaatttttgattggtcttaaccacaaaaatgatccacagatgaattatgaaaccatgtcatcttactctctaagggaggtataagatgtttttggacttcagatgagaagggctccattcatggttaatcatgaatgaaaacgaaactaagaatatatgctgtagaaaaagaagaagaaaagccacaagactgcttaaaaatttctgtgtcttacacagaagatagaaaaaatagagtgtctccaattggatggattttttaaaaaatttggttattgtaatggatttattttttcttagagctgagctgattgtactttggccaactaatgggttaatactgtcaagggaaattagccctgactaaacattgccgctggctcatgaatgcactaggcttggggcagtataaaaactcagagaaatcagtgtgtaggagacacagaaatcagtgtcactcagtgacagaagcaacaataattgtgaaaaatacttcagcagttatggactcatctgtcattcaaaggaaaaaagtagctgtcattggtggtggcttggtaagaattttcagatggattactattgttggtggtattatattaactattattactcgtaatgattattattcgtcacttctgcaaattgttaattttcttgtgaaaactctgatatttaaatacagctattttgtttatttttttaatatttttattttcatagatttaatatagtatgagttttaatctgttctttttcaggaaaggtattttatagccattaaatacaaaggtttctgttttccctcatcattttggtttaggatttgttaaaaagcaaaaataatgcaaattgaatttgattttatccccaaattggctatgtttttaggaacaggaattagtctcaatattcattttaataaaaacatttgttccgctttgtttaataactcagttaatgctgtctaatgagaataaaagggtcaagaaacatgaagctaacgtcaaagtatcatgttgaatgttcactagttatatgagtaattgggaataagatttatgtggtcgcctgacttacttgactcttccagtggagcacctaagacagtggagtgaggtgttcacctctcactgagcacgtgacgtaaaggtgctggggcttcccccatacctaacaagacggaaggagaggtcactctctgctttcatagttatggtgccaaaggtagttctgtttaacatgggtctgctccgattcaactttgctttttcccatctcagcagaatttctgtttcagaatacaaacatcccagttagtcaaggttaaatcatttccctatcacctttggtcaaatcatttggagacttttcattaattattcatatatccactcaacaaaaaatttattgagggcgtaacactgttctaggctgaatatagatggtatattttatgccacacatgtatttatacagtatatgctgtcttttgttctgccttccttagtgtcttttccccaaagtgctagaacagttcttttaatatttctgattctaaattttcatttagaaatgctatcacatgatgtgttggtcactggttgggacatgtgtcgtcactgcttcatactaggcttgtgtccaatctgtcctatcaaaatgttgcacaaaatgagaattcatgtgttcaacaaaatctgattactatgtaccaatattgttttaggtagtagggatgcgagggtgagaattccagagaagaaaaagacaaggaagaagaaaacaaataagacaatttcagttaaagagaagcactatgaaagaaacgaaaacagggtagtgctgtagagagtatctttgggagtacctgtttagaatgtggtcagggacagctgctctgctgaagggacatgtgaccagagacctgaatgatcagatagaactaactacgtgaagatcttgagaaagagcatttcaggcaga

SEQ ID NO: 36328 - DNA, 687 bp, Homo sapiens
attgtctttcactaggaatgtgctgcatggcacacaatttcataaatgccataaatacatcaataaaatgaacgctgaatctcttcactcttaaactttgttgggcatataaagttcattctttctttacgaggcatcaaatgtgggaggttttcattccacacatttaatcaattgtaaattctcatttctccctaactgcacaaactcctctctgaaaacattgttgctacatgatttccctacgtcggcatttcatgcgggattgtttcacggttcatctgctattctgtgagatgttaataattattaagccaaagcaaacagacaaaggatgtgtggccaaataagtctgacaaaccttgcatcaaacaagttttcagtcttttttcttatagtacttctcagggcttttattatattcttggtctgcattgtggatcttccagagcagcacagtccaacatgtggccacaaataccaggcacgtgtatacttttccaatttatgctaaccatgttaaaaaaaaaaaaaagcagcaggtggtgttatgtttaataagatattttaacctaggccaggcgcagtggctcacacctgtaatcccagcactttgggaggccgaagggggtggatcacctgaggccaggagttggagaccagcctggtgaacatggtgaaacccta

SEQ ID NO: 36329 - DNA, 943 bp, Homo sapiens
atttaaaatcaacaatctctatttgtgacaacttcaatcagaattccagaaaactagctaaaaagagatatagagacatgcgtaatatgaggaaaggagtttgactgaatatttccagtcacaacaaagcctcggattagaggcgacttctgaaatatgtgatgcttgcttctttcccagggtgctaataattacagcaatgcaagagtttgcacaatggaatcagttggatgttttctttttgagatgaggataattgatttttattcatctgttttactaccaaattatactgaaatagttaccaaacagttgtcaaattaccatttaagtgaacttatttttacattgttatgaataaaattctctaccatactgttcccagaaaacaattactatttcaatttgattaagtgaagtaagaattgagatttcatttctgtttgcctctttctccatttcctcagctgctgagaaataccccaatgtgaaaatgcactttaaccacaggctgttgaaatgtaatccagaggaaggaatgatcacagtgcttgggtaactacgggtcaggttttggacttcagaggtgaaagctgggagtggagaattgtatctgcaaactttgttctttggctcttttgaaagagttaaaagattattgaaaggatcatccaaatagtttctagattcaaggaattttagattgcaaataggccctgatggccatctgaacaccaatgccaataattcttaattctcacacttgctcaccttcctactgtactgtattccacactggtgactctaatgtgcttcaaactctctcctctctcaaatatacgtgaccctccactgctctcctcctgttctctttccaggtgctatttctctgcctttccttggatgattctatttcctctaaggttccaagcctcatatccca

SEQ ID NO: 36330 - DNA, 707 bp, Homo sapiens
tttgtctattttgtcttcacattcttggcttgtttgtacctgtccttcttgaaatagctttccaggtattccaaggggaatgagtgttgcggtctaagtttatggtcactgcagctgtatcagtactaggaggtgccctaagcccaggaatgctacaactcttgccaagtcctagaggcacaatggtgcttctaaatgaagcattgtcctaaagggagaattccttgggttactaggcaaagtatctcagtctcttctcttttgttccttgaaccacaaggagtttttctccccatgctaggctgcctggagttgggggaggagtgacacaagcactcctgtggccaccacagctggcactgtgctgggtcatacctgaagctaacacagtactgtgtcttgcctaatgcccatggtgactactgcctggctaccactgatgtttattcaaggcccaagggctctttagttagcaggtggtgaaccctgccaggactcagtcattgccttcaaggcagaaaattcccttctgccccagggtgggtatagaaatgccatccaggagctaagacctggaatcaggggcttcaggaaactacttggtgctttattttattgtggcttagctggtacctaactaactagtaagacaaagacctctatactttttcttctcctttccccaagtgaagggagtttttccccaa

SEQ ID NO: 36331 - DNA, 3768 bp, Homo sapiens
agagagggaacagtgcttactgaaaaacattacaaggaggtggcaaagagagcttttgaagggaagaatctcaagatagaaactgatgctaatatttctcaactttttactttattttagcaagatgtactgttcttgatttttgcttcatgcaatattcttatgagtttaatttgtaaaattagacagaactgaatcacttttaaaagatctattccaatggaatgctataatacatccattttgggcagttggcctagagaagccattaaatggaaggaattctgattccctagtcttccactttggggattttacaacgtcatttattcaacagacagttttatttggtacatagatagcactgagctggcatggtgatgaacatgaccagttcacacctttcacaaagctcagaggctagtaggggatacagacagtggcactggagagagataaactgcccccgaggagaacaggaggggccaggacaggggaaggcggaagacacatgagaaacatatttcagtggagctggaaggcagcacagtgtgtgagaatggtcagagggtggaggcggggctttaaacacctggagtattatcttgagagaaacagggagcccagggaggccagcagactcaggtatggattttagaaagatgtctatatggagaatggattggaagaaatcaaggtttatctgtgcaagatgaataaaacagggcccccacccttaaggagctgaaagtctaaaaggggaaaagataccagcaggcagttagaatgcaggacagtaagtgcggggatagaaataggccaggcaaatccttcaaggagggataaaagtcaatcttcaaacattaacttaagcagaccaaaaattctgatgaccacatctagattattttttataaaaatgattttcactatagctatgttagttatgctaagctactgtccaatctcttgtgatgtgtaacttttacatgtgagtattcaagtagatttctctgtcaaaaaaaaaaaaagaaaagaaataggccaggatgccatgggaaagcacctgactcaggctggaatgagcctcaggccactgtttacagctggtgtttagtctccacataagtcttagtcacagaggccaccaggccaccactcttctcctggagacttttgggaagcttctgagaaggaatgaatgatgtgtggccccagcacagcagtactcttctaagaattcacagctctttttctaaactgcaaaggttttttaatggctggacaaaagctgactgctaaatttttttcatacagaagacctggattcatgagtttcctgggagagagggagaagggaggctcccaatccttgactttatcttgatcttatcagttcctgatctggtggtcatgcaagtaaattgttgtttcaggttaaagaacaaagaggacattgtttacccctttgttgttaaaaaatgaagtctattttcagattttaatctctggacaaatgaaatgagagttcttgctgtcttacaggtgataaacaaaggactctttttcttgggatcactgatagccatcagcagtacctacctacttatacactacatgtcaccacgatctttcctccgcttgagaagaccatggaactggatagctcacttccggaatacaacatgtttccccgcaaaggccgtggactccctagaacaaatttccaatctcattagcaggtgatagaaaggttttgtggtagcaaatgcatgatttctctgtgaccaaaattaagcatgaaaaaaatgtttccattgccatatttgattcactagtggaagatagtgttctgcttataattaaactgaatgtagagtatctctgtatgttaattgcaattactggttggggggtgcattttaaaagatgaaacatgcagcttccctacattacacacactcaggttgagtcattctaactataaaagtgcaatgactaagatccttcacttctctgaaagtaaggccctagatgcctcagggaagacagtaatcatgccttttctttaaaagacacaataggactcgcaacagcattgactcaacacctaggactaaaaatcacaacttaactagcatgttaactgcacttttcattacgtgaatggaacttacctaaccacagggctcagacttactagataaaaccagaaatggaaataaggaattcaggggagttccagagacttacaaaatgaactcattttattttcccaccttcaaatataagtattatcatctatctgtttatcgtctatctatctatcatctatctatctatctatcatctatctatctatctatctatctatctatctatctatctatctctatttatttatgtatttagagatcaggtctcactctgttgaccaggctggagtgcagtggtgagatctgggttcactgcaacctctgcctcctgggctcaagcaatcctcccacttcagcctcccaaatagctggggctaccatggtatttttcagtagagaccgggtcttgccatgctgcccaggccagtctcaaactcctggcctcatgtgatctgcccacctcagcctcccaaagtacagggattagagttgtgagccaccgctgccagcccagagttaccctctaaagataagaaaaaggctattaatatcatactaagtgaaggacaggaaagggttttattcataaattaaatgtctacatgtgccagaatggaaaggaaacaaggggagacaacttttatagaaatacaaagccattactttattcaatttcagaccctcagaagcaatttactaatttattcttcgactacatactgcagcagaaccagcaatacacttgatttttaaaagcacatttagtgaaatgttttctttggttcatccttctttaacaggctgctgagtcactcagaaatccttcaaacatgattaattatgaagatgaaacactagagtcatataagaaataaaaattgggcaataaaataaaatgattcagtgtttcttttctatattgtcaatgaaaaccttgagttctaataatccatgttcagtttgtagggaaagaaaaaataatttttccttctacccactttaggttccttggctggggcccctataacaaaagacagattgacaagagaaaaacaaacataaatttattagcgggtatatgtaatatatatgtgggaaatacaggggaatgagcaaatctcaaagagctggcgtcttagaactccctggcttatatagcatcgacaaagaacagtaaatttttagagaaacaacaaaacaaagaaaaagagctttgagtctgtaggggcagcaatttgggggaagcaaatatatgggagtttgccttgtagattcctctggtgctggtctccaggctgacaaggattcaaagttgtctctgaaactcctctttgtcatactgcacatataaaacgtcttttgtttccaacaagaggattttctttttcattctagaattatctccttgataacttgatcagatataggacatgacactgaatagagtccaacagtacaaaaaaaattcagtatgttctagctacttcacacatgtgtacgcgacagttatttttacagtaaggtattttcgagaaaaatgcattacgtgttttggaaaatagagtaatttaaaaaatatatttgaaatgaaaatctccaacacattagaaga

SEQ ID NO: 36332 - DNA, 1050 bp, Homo sapiens
tgtagctaagtccgattttttaaaaaggtgaaagttagaagggtttgacggagtgagcaagagactagagacagaagcagagaatagagttggaagaatcagtgaatgaggaaggaaacatccatggccaaagctagagactgggaagtggagcctgttccacactgggtttgagttcaaactggaaagttcttgttggcacccaacgtgaaattgtttgtggtcagttcttaccctttatgactctggtgtgatcgccaaacaaaacatctgtgctgttctctagtcaaattcatatgacctctgaataaacaaagttatgggaagtgtggagttccctcttttaaattcttaaattttaagagtgttggataatgtagggttttttggttgctgattttgtcagtcagaagatttttctttccttcttttggttgagagagggatgtagagagagtaaatgctattccgcattgatctttccagagagtgactcatagcataaaattcaaccagatgggaagtcccctagaactgctctacctctgggcaactactgatgacataggaagactttcattattttccagacaaaattttctaccctggatgtggtttgggaggggggcatctgtagtcttcaactcaccattcgaatggaatatagaatatggccatagcaatgggctatgacacccaggggcaccaccaggcagccaagaaataagaaaagcacaaaggaggaatcgttggcatccttggatttccagtccacagtgcagcctagtccgtgtacgtccaggatgtacctgttccatcccaggagaggtgctcctgcccacgccagtgagtagagccagatgtaggtaatggccctccaggcccaggaaaaattgatcactctggcatggaccacgcgaatgtaacgttcataggccagcacggttagggtggcaatggaaacaatccctgcaagaagagaaagtggaaaagtatagcatggtgcagggggaaaccgggcataagagacgtgatacattctccactgga

SEQ ID NO: 36333 - DNA, 620 bp, Homo sapiens
tttaaactgtgacatctacattttttgtcttaagtttaaagaattgtgtaatataaacatttcaaaattggaaccattggaaagggcttatgtaccccccagcggttttgaagacagcggtctgtaaaatcaaatctcgttggcatatcattaggctttgcctaagcttgctgcaacgggatacacaccatgcccaggctgcaaactgcccggcatgttcactcagagctggcagctttgatactgctgttccttctgcctgaattgctgccaaagatctcacagtctggagaagacagatgtgtaaacaaacaattacaggaatgtgataagagttaaacaaagctgtgtcggggagctggagaatgcaatggaggaagtacttatctctgcctggggaaacactggggaaggttttaagggaaagcaacatttgaattgatgaacaggagaattttatcaagttgacaagagtgaggatatttcaaggccaaggatacagtatgtataaaagcacagaagtgaaaatatatatttaaatgtctactctgtgcatcagtttgagtcaaatagttctttccggtataacttaatgattatacactcatttgcaatattta

SEQ ID NO: 36334 - DNA, 3001 bp, Homo sapiens
aaattaattaacatcccagaatctcaatttgctcaccagtaaaactgagataatagtaccaaaatgctgtctcatcgtgtgggtgtgtggctgtattaaatgagaatatacatgtttagtaaagtggtaatgcgtaaggtattattattattactgaatagttgaatatcttggagctaaattgctttaagtagtagaaagtgggtggaaggcatgggagtggacagggctctggaggttaaatatcaatacaactctggagcttaaatattaatacaaggtgtgtttatcaatatacaactacccaataatacagttattttctcactttggccactagatggccacattgaatagcttatttatagttcaagtatctagactggggtaagcaagttcacactaaacagaagagcgtgcttcaaaaaaggccatgaccgagacctgtcaatccttatctgttgtatgaaaaggttactatgacgaaacccatgccttcaaggagcacataatccagagaaggaggtagaaggagaaactctgcctatagtgggaggaggaacacccaactcagggtattttctgtgggaagcaggtaccacctgagtgagtcttaaagattaagcacactttaacaaggccaaaaaaaaaaaaaaaaaaatgatggggaagtgaagtgacagccaatcctcttatcctattccaggaagagaaaacagcttatgtaaatacatggagatctgacagagcttgcaccatttaggtgcctgcaaataattcaaaatggtaggacggagttctaaacagagaatgaaaagactaaggactctcctagaaaacccttaaatgccatgcgtggagcttggaatgtgtcccgagggctctgaggagccattaagctgtttttgttcacttccattacaatacaattctagagaattttattttcttttgattttgcttttggaggttttccttatgggaagttcccttgggctgcaatgaggaaaatggattgtgagccaagcctggttctagggaaacctagtggagaaatatggttactgtgataaggaatgaaactgatgcagtggcactagggaaggagagacgaggaaggtccaccatatttaaggaagttaatctttgttggctgtgggaatgaatgaagaagaatcaaagcaagtcttgggttactggtttgttataattaatagctgatgttgcattgacttagaaaagaaatgggagagaagtaaatttggaagtgaagatgattaggggataacttatgtcatcatagattctctggatcattttgaacaatatctggatggactgtgtttcaaattctctacctataaaatggggcaactgtaaatacctgtcttgtggtcttcagagttggctgggtgaatgagcacacagtaaaatcttccaaactaagtggatgcatttttctcaaattaatgaaaattttgctcactcaaaaatatatcaatttgtagaaatttaaaaagatgcagtttaactatttttgttcacagatagtaatggaaacaaaactctacgaagattgcttaataaagatactactttactaagtagtggtctttatgagaccatccctagaagctttataaaattaatcaaggaaaaaaggacaaggggaatgtaaaataaaccaagcctgtggtacattcagcatggattatgaggtcagcttgctctctgacctgcttcctcatagctgtttgcctcttgtcccagaatcacgtagaccctgtgacaaaattatagttccccttaactgctctatggataacagcttgaacattatataatgttaagttttccatttgagatattctttcaggtcctacgtaccagtgaaactactgacatcagcttgcctgaaggatcccacgagaagctgactcaccaaagaatgcagtttccacatcctgatgatttcatcctccgtaacccaaccaatcaatgaccccaattcccatcctctttctcctcatggtccccttaaaaatcccaacccagatctcctcagggagatgaattttagggtctcctccatctcatcgctcagcacccactcaatcatggctgttaccgtgcagcgggcataccatcctgttgctcctataatatctagtcatatgaaacaatattaaagaaaaccagtacatttaatatgcttgaaaaagtttgttcttttaagcaagtaaccaattcttctttgaaatcttgtttatattgcttatttgttgagaaagtttccttcctcctttttatttaattaacaatagtaatttcagcccactaacacttatagagagtacttactatgagtcagggactgttctaagcagtttgcctgtgttatctcacttaatcttcataacaactctgtgagacatgtaggaattataattacgattcccattttacagatgaagaaactgaggcaataatggtttagtcatttgccaaggtcacaagctaaaaaataaaagagccaagactcgaatcacacagtctgcttccaaagtccatgctgtgctatacttgttttctaattcttctttgagaattatcaaaaattttatattagtgatgtagagtctctatagaaagcatatttaatccattgtctgctacgtatgttctgtaaccatgtctaactttgatatcagaagaagtcatttttttaaactcaatattcttaaattgaagaattttagagaaaatgaaagactaccttcatttgaataatatctctcagctgttagaatgagtgatttccatttgaccaataaaagcagtttgctagaacaaccaaagtggtagttggtttttattatacatgttttccacatcaggatgtggaaactgcattctattaaattttcatgttcagtagtcttcatatttcgtgcacaatgactcagtttcaaaggaaacccagcacaacatcaaaattaaa

SEQ ID NO: 36335 - DNA, 2467 bp, Homo sapiens
aatgcactccagcctgggcaacagagtgagactccgtctcaaaattaaaaaaaaaaattatgatttcaggtaatcaacttatatagaaatgtatttctgaccattgtgtgtcatagctacccaaatgcttgcagtgcatttaaaactgagaggccccttaagagagggccagtgaactaccagaagagaacgattgaatgaggcaggccacatgctgtggtctgtggctagctgctcacagtttaaaatgctgcactgttgtttccattgtgctcactcatgctatccttcactggtatttcacatgcattgcattttttttctattaaatttagtgactttttaaaaaatagggtacacggggcaaatagttgccatagttgttaaaacatacggacatttttcaccataagcatctcctcctaggctacgctgggcacctgtgcagtagcttggaaatcgtgccaggcttacctcccctctgttatctttggttcttttaatatcagctccccttgttctctgaccattctggcttcaaacttggcttcttttctgcctatagtcccatttggacagatatcctagccttaggcttttctgcctacagtcccattcggacagatatcctagccttaggcttttctgcccatagtcccatttggacagatatcctagccttaggcttttctgcctatagtcccgtttggacagatatcctagccttagactttttgacttgcctctgatttgacaaagctttaggcgtttgtttccccccagtaattgcttaaactccacaaaccataaccaaggaaaaggagagccctatcttggaataggacctcattagaactttttccacacttatgcctctgctcgtcaggaaaggatattgaacaagatggttaacaatgcaaaaaaggatcattattacactaagagacccaagaaatatccagtatgaccagagtctatgggctgagtgggaaaaaagtttgaatataaagtaacttctctgtggaattaattaaggttcagaagaataacaaacataagcacagtggggccaaagtctaaaaaaaaaaaaaaaaaaacagttggatgaaagcacttaacaggaactgagaattctaaattctaatcctaaatcaactgcactcatagaataaaagtgtgaagtgtggtaccacagataaaatgggaggcatacgctttgtttccaacacttaaaattatttcgtgaacacagcaatctaggttttatgataacctaccacagtatgctcaagaaaactgcatcagactctgatccactttaggaacacattgttttgcttagttttcccattcctctatcccctatctcgtatttgcttttaaaaccaacagaaagcctttcttaggaaacatttctaaattcatttctgtgcctcataccattcccactattctagtgcaggttcatattccgtaaatgactgctgtcagccatctatgactaaatttcttttgtttgtacagcctttgtcatcctcctgggcaccacataccagattaatcattgactggactctattcgtgtgccatcccagatctccgtgactccactcacaagctcctactcccaactgtgtgccctatttgccttgcttcccagcagcggtggctctatgactatagttacaaagcttcagctgctgccactgtcaccaccattgcatacctgcatgcagatagtgccttgctgcactggacccatggaggctctggcttccctagtggctgcctgaagctggctgatccaacctagaggcaaacggacattaacatctcatggagcagagttggaccaatggccaagagacaggaagaagccagagattagattgcttgcactctcctgtcatgccatgggttgtttcaagctgcgttagtatcaggtggtctctctgaagatgtcctgcaagacccagtgaccaatcgtggccaactcggtggtgcatcctctctctaagatttggcctcctcctttccctgcctcttcctctattcccttacttttgattccctgggattatgatccccaataaagcattagcatatatgctttgccttaggctttatatgcggggaacgtgtgctaagataatcatcttattactttcacaaagccctttctggaataatgacctgcaaagctcccttcgcatagcatgctggctattaagaaactctgtgtatttcttgcactacctagtcaaccttctctttcaccatttataacttccttagtgcatacctcactctgtccgtccacaacacaaacagactatcttcatggctgctatttcctacttactatattttggtacaattctgtgtacttatgtcttacctctccaattaaattgtaaacttaagtatgacatacttaagtatgtctttgtattttgacatcattttg

SEQ ID NO: 36336 - DNA, 3813 bp, Homo sapiens
atctcacccaagattctggtgtgctggaacccatctataagacggaaaatagtaaaaacagcttacagggcacatgccaatttgcattctgaggacctgaatgaaactgtctcattccctagaaagcattcaaaggtttacaagtactaatgagaatttttttttacacattgttattttggttttctactctcattttaggaaacaaatagtagtacatgaatctaatctcatcactccctccaactttcacgagttaatcactttttttcttgaatctcttgactctacaggccctcgtctctttcctcaaagtgtaaaaagccgtggtttcgtgccttgttgagtgatcttaggaggtaaaaacaaataagaaaggaggcgggccggggtttggggtcaacgtggggggcagatgagagaccacaggaatggagtcctggacagcgtggggcgggaggggacggaggaagaggaaggcacccgccatgcggctggggtcgggcagcgttgaggaggcgagcggggagcggggcggtgtagggcggggggcgcggggccgagcgggaagcggtgcggggcgggctggggggcggacgcacggagcgggcagcggggtggggagtggaagtttgcagaggggaggctgccttctcccagtccaactcaccgaagaggctgccgctaaacccgtcccacacgcagcccacggtgtcccacacccagccgttcctcaggcaggacacgaaggtaaaggtgaccccgaagagggacaccagcaggtcgctgaggctgatgttgaccaggaggaggtgagtgggagtgcggagccgctggaacttgtagtagaggacgagcaccagcaggttgttgccgacgcccagcagcccaatggagcccagcagcagcgccaggcgctcgtaggtgccggggctgaagaggggcgcggggctcagtgtccccgccggcgccggcccctcagcgcccgcggccccgccgccgtcccagtagccgtggccgccgctgcggttccccgagtacatggcccggcgccggcgcgcctggcgggcggaggcgctcagcttgcggcggggctcgcggcgcgctccgcactgggtggggttggggctccgccgcctgctctagccattgtgcactgaggggcccgcgctaccgcgcgccgggcccgccctcttcccgccccttccgcccggcgcaccccccgtggccccgcccctccccgcggcctgtcctcgtcgctccgctgctcccggcgcgtcctcttagccccgcccccccgcgggcgcgtcctcgcggctagctcgccccgcccccactggctgggcaccttccgctggtcggcgtggacgcgcgtcgcgggatagcctgggggccagggccgcagggtagcctcgatggctcttcacacccccacctccctgcacccaccttgaaagcttcgtgtccactcacccattcatgcactcacttatacattcatttattcctaagtatttatgagcgcctgcgcccaccacgtgctggcaagaattgggtttctccccttcctgggaagctgtaataacccacaaccagcctacgaagcccatcccgcgtcatacactcaatgtaaacaaaagcaaagaaaacattgaagagctcggggtagtcttaccggaaaactgagaagaaaaacaacaaattgatagacaggtgcctgcctaactacctgactgctagaggacacatgtcccagggctgatacaagagcctgccacccttggagagtctgggatgaaaactctctgaaaatggcattccaatggaactgactttaagccctgggctggaccccaaggccttccaataccgtccttcctgtgcttgaaagcgtgggtagatctttccggtcactgaggcctgctaaagtccttcacaggcagtgaaagattcaacctaaatctagcaggtataggaggcaggtgctatatttagaacagcacacatttcccattgggcctcttctcctgtagtgatgagaatatagtacaagtcaaatataggttgtgaacgtcatcacactctgcaagagctgcttctgcctttgtggttgcacaatccctaaggaggccctacaagaagatcacagtccccagccacacctgcagcctgtcctggacactggtgacgaacacagggtttgtgcaagctaaagaaactgctctccatacgggcgtgcctcacctctgtttgaaagatcagtagggaatgactagcttggatcaatccacattctgaattccctggagagaggatctaataggctggcagcagctctccaccctggtgcactgagcaatagctaaggggcagtgtgctctgcctttgacaccttgattttccttcaaggcttctgctctggactcgccatctgtgagacttcctacccacccaccccttaaaaaacacacacacacttttaattgttaattttagatttgtacaaccactgaacaaaacataactatttaacaagttctatatgtttaatgtcgaaagtgttttctgtgtctagtctacagtaagttctcaataaatagtaatttgaatgaatgaataaagaactcgctatattttttcctattcattcttcattgctgagtcattgcccttataaagctcacattccagtcgtgttgggagaacaaacaaaaattagataaatacgtagggtgtcagccactgacaaatgccatgaagaaataggggtcaggcgtggtggctcattcctgtaaccccagcactttgggaggccgaggcagtaggatttcttaagcccaggagttcaagaccagcctgggcaacaaagtgagaactgccccctaactcttcaaaaaatagaaaattagccaggcaagatggtacatgtctgtggtcccagctactcaggaggttgagccaggagctatgggagatggggcaaggagtttgtaagagttaaagaaagaggaaagaaacactaatagcagctcaacagtcagacagtgttatttggaagaataaacctaagaggggcttctggccgatttcggtcaggagcactctcttacagactaagagtatttaaggattttagagtgagagagcttatcacaggcgtggaatgtttctgtttggagaagaagtttattgccaagttggaatgtctctgtcggaggggaggttatctcggggctcgcatgtctctggtcagggaggggtttatcttagggttggaatgtttctggtcggagatgtcatttgtggtgtatggtcatgctgaccttagccattaggctgatgctgtttggatttaggtggtttttgatcaaggggaactttaaaatggcagtgcttgtccatgatggtgatgcacctgctctgtcaaggttgttatttagacaaggtggttatgggcaggagtactgtattggtatgttggaggaacaataaggaagcaagaatgagaatcgggaaatgcagccagtcaggtgggtgtgcagtgaatggccagaatatgcaggaccttggccatttcaataaaaggactttggcttttactcaatcagagtaaagtccagggcaatgcctactagcagtgaatgcaaaggaggagtaagaggcctttgacaaatgcttaagcatttttgacacagtaattttacaatactatgaaccattaaggacatttattgagcttgacagaaacaggcaatgataaggatatatgtttcttttttaattttagaattatgtaatgacaggataatggca

SEQ ID NO: 36337 - DNA, 913 bp, Homo sapiens
gaaagtccaaaatgcctctaaagtctttgtctctaaggcccattttcaaggtcttgttatatagctaatttttccccgacttatgtcaaaaataaacgaagctgggttctaggtaaaatggtaggggcagattttaatcactactactactgcaatggggaaaagaacccagcgtgaactgaattcaatttcgatttgtagaggcaaccgggcgttttaaagagaatgaaggaattaggatgggactgatgacgccgagggggactgagcaactttttcaggtttgaaaagcctcaacatcaacgcgcgacggcgctctttcaacatcagcctccagaactggggctgcagccaggagggaactacaacgcccagcagccccggcgggtgtaaacactcccaacttccgaggcggtgctcaccatcggccatcagcgccagtgccactcgcgccctcaagaagccgcacggagttcgggccggcagcagcggctgcagtcgtatggcagtgagccgctgtctacccagcgagacggagagctcaggacgcaaccctatgagttggaagccgcaggaggcggaaccgggttgcgggatacgcgttgacgtcacatcctctgggcggggccgcaaggaacccgcgcaaattgaaaggtcagcctttcgcgcgctgtgtaggcaagttacccgtgttctgcgttgccggccgtgggtgctctggccacagtgagttaggggcgtcggagcgggtttctccaaccgcaatcggctccgctcaaggggaggaggagagtcccttctcggaaggtgagaggagcgggctgtgcggaggctaatgggtgggttcccttgggggtcgacctgcgcgtcacctccgaccctcctctcgggattcgggtcttccaggaaggga

SEQ ID NO: 36338 - DNA, 658 bp, Homo sapiens
aaaatagagtaattctaagagcatcttttcagggtactagtgaatctaaaaggtgacttcaaaaaaatctctttcctctcttcccctgacgtgcccccatccccaaaataaaactgccaaacgaagaaagcccaacagccccggcgcacccagcgcaccttcctccggggcacgctctgcgccacctaccggatgatgctgaggaactgggtcatggtcagctcctgcgggaccaggaacttggttttgtccagcgggggcaggaacgtctccctggggtagcgctccactaccacctgtcaagagtgtcagtccttaagaatgtgactcagcgtgagtgttaggaacttggaacagacagagggaagctgttggctgctcttggtttttcagagaacaggatcggaaccccacccccacgccccccagcggaagtccagtggtgtcttaccgggattttgttggggaactttgcccggattccagcaacttcctcttgtctgattgctgtgaatatttcaagcacaagagaagaagcaaagatcaagaaaagaagcaaagatcaagagaaggccagatccgctcctctctttagataacccagaaagctaccccaagaaatttacccaagcttttcctctgcttgaagggtctgacg

SEQ ID NO: 36339 - DNA, 1367 bp, Homo sapiens
ccaaaagtcttataaaataggagcagagtttatgaaatgatgcccaaagaaaatgcaaaacatgctattggcacaaatcctttctgaaatggaacgtcaagcaaagaaatggcctctaatggggaggaacagtcccatatgtgtgtgcaagaaaataatttgctttggccgggtgctgtagctcacacctgtaatcccagcactttgggaggccgaggtgggtggactgcttaaggtcaggagttcaagaccagcctgaccaacatggtgaaaccctgtctgtactaaaaataccaataaaacattagccaacccggttggcgcatgcctgtaattccagctacttgggaggctgaggcaggagaattgcttgaacctgggaggcagaggttgcagtcagccgagatcgtgccagcacattccagcctgggtgacagagcgagactccatctcaagaaaaagaaaatagtttgctttgtgaatgatgcacaaagcatgaatcacacttggcaaatgtacagtacacataagagggatacttctatctatttattactaaaaaatcaatactatttaaaaatagcagcaattattcattggcctgatttttagactggaaagatgtgtgttggtgtcattactaacacagcaccaatctccagcatggaaaagtgagcttcctaaatgggaacccctaaataccaatctttatacttctttattcacaggtgatagttgggggtcaatgatgtgcctctggaccttgattcagtgttgaagaaaatagtgaaaactgttgaagcacttgtttttccttagtgtacatgtttgaacatgctgggcaaagaaatggacagcaaggataagaccctgccatctgcagaagaaaaaaactcacatgagcaatatgagtttctgaagttagcagagaaataagaaaacatttcattatgacatagcaattgtagtaaagactatttctctgatttcaagtgacttaattgaagagattaactcagcaatacatgcatggtcataaataacctgcatgtatcccacgaggactcaagtgtcatgattttaatcaagatttatggctgggagcagtggctcacgcctgtaagcccagcactttgggaggctgagtcctgcaggtcacttgaggtcaggagttggagaccagcctggccaacgtggtgaaaccccgtctgtactaaaaatacaaaaattagctgggcatgatggcaggcacctgtgaccccagctactccagaggctgaggcaggaaaattgcttgaacccaggaggtggaggttgcagtgagccaagatcgcgccgctgcaccccagcctggcaaacagtgagac

SEQ ID NO: 36340 - DNA, 3893 bp, Homo sapiens
gtagctaccattaggtagtagggaaaacactgcaacacttcgtttttatgaaaagcacatgttaggacatctttcctcatgtagtaagttactttatgaaagtaaaggtccattttaggaggattactacttttacatcacaaaggcaagaactagattaatcacggtgagaatcaagttcagtgatagtcacagcctactcagggagcacatagagaagctttccatacattttcacaaggtaaaagggctagggggacacaggaaagatcactctgcagaatggaccttgagtttcgtttggctctgccttcgattaactgtctggcttgggcagacaagtcagttaactttctgagttttagtgtcttcctctgtcaagtgcacttgggctcttccgtgttatctacaaagttaggaagagctaaaggcagccctagttttactttttaaaaaataataacagaaaaatacataagttgctattcatcagtgtactgtttccagagctgaattcctaagtctctgaagcatacccagttagggttataccagtgaagatccagatactatagtcataatgtcactctctcctctcccattattcctccacctgctcctccccatcctgctttattctctcttctggtgtgttttaagaagcaacgccagcaaacggctgcatacattgtaagcttaaggattaaatcattttaaaatatgcattttcaatcaaatgtatcatctgcttcgccaaattcctcccaaatggctgaattttcattaagagaataaaaatgagttaacaacttcggtaacagaaatgtactgggccagttgttttgtttgttttacttgcttaaaaaataaacggaaagatgtatccattccctcaggaacataaatgcattacctgcccaatgaaaaaacaattctgcttgttcatttccctgacacaacagcttcgttgtcaggccctctctagcccaggctccaacgtcacctagtaattttatattgatcaccttggcagtgcttggactccagcaggcatagtccctgtcttccttacattcctcaaaataaataaataaataaataaataaataaataaaactctacgaaacaccaccgaacagagattctgtgacttagtatacaaatcccacgtcttcccgccctgtgttaggcagctgcaaatgttattttttcatcgcttgcataaaatggaagcgaaacgtaccaaaaccctacatctgaatcctaggacaatgaagccgacaggaagccactctctcctcccccgggtttactacagagccagagcctccacggggtgcagtcgccaggcagggtgcatgacaccgcgtcttccacgccctcccaacgcgtccaaaaggttgctcgcctgacctcgccaaccgcctcacaccccaaaaccaatcacacaaaagggattggcccggggagctgctccaatgggggaaaaatcccttccccagcggcagcgcagccattccctccaatgctccgcccgcacccctcgcaaactgctacggcggaggggggagggctgcacaaagccagtcgaaagctgaaaatgattcaatgcacttaggggatgcggaggcggcagcaaggggctcgggaaagccggggggccgcaggactggagctccggggggcggcgggtgggggatgggaagggtggtcccgtcaagccccgggtcccaggcgggcagagggtgggggtggcggcgccgcgcggagcacccgggaagcgcccccttcgcggtccagccccgcacccccgccccgcggcgggcggcgcccgagtcctcgccgcaaacccgaggagcaggatgtggaaagcagccgcggcggtggctgcggctgcggcgcctacaccgagcagccgatcgcatcacttaccccttaccgtggagagagggaccggacgggggaggcggggcgcgtcgcgtcccgtgagtctctcgcacgccgtcctccccccacctcgtcgtcgtcgtcgtcgccgctgttgtcgtcgctgccgctgcggtcgagctccggggccctcagctccgctgggcaataacgttattccacacacgccccacacatagcggtaacggcaaagaccgactgcctagtgcgcaggcgcctcgggaaagggcgaggagccggaccctatcccctcctgcccagttccaacgatcccttactgcgcaggcgccacacacagacaatgaaaaggggttgtgcgagggtctcacccacacgcttttccagcttgcccactgcgcaggcgtgccccgaaagaccagcttgaacaatgaagaggacctcggcgttaggtgggaccgcaaccaacaaggactacagttcccagcgggcagagcgccaactccaagtgaaggtccggttgctgggcatgctaggagttgtagtgtcggccgcctttacaatctaggctgtttggaagatttagagcttctatttcttgaagatttattcgaccgttttaaaaaatctcgcaactgaagcagggttcagagtttactatctgcgtccttgagtagcctggggatcaactgctgcatattagcaaatttcgaagcgtcaaggccttcagtgagccctttctgtcatttgggtggtccaggcagctgaagagtgggatggaggcgggactaaaccaggctgggctggaggaaaagggcggggcctgcaagcctgtctcttggcagcaggctctggcagccaaaccgtccaagctagcgcctggagcgcagtggtttctgggaattgtagtgtaactggaaggccctgaggattgtcgagcttgcaggttctgaacgtgaggactacaactcccgacgtgcaaagcgagggccagtgggtgggaagagcccccaagagctctgtgcgggattctaggctcccctgtgacagccgcggcaggaagcaggcgggcgctccccggccacaggcctgttgttctcggaagggagaaagctggacatttccccacgtaactcccagctctgggcctagagtgcgtgcatggcgaagtccccggagaactctaccctggaggagattctggggcagtatcaacggagtctccggggtgagttgctccaaacctctgtccctagccccgaggtgcccagggcctagtgggcgggagcagaccaggtgcgtttcctaacacctgggttctgccccgtccacgctacagaggagcaagatggatgttgctgtggtcttgaggaggatgaaatagtttgatttagtttttacagttaagcaacgatgtttcctcagattcccgtagttacctcaatcaactccttgatcttaacttggcatctttctcaaccggcgacagcagaaactcttggatagctctatgccatttttgttcagttcccatacgttgctatttaatccaataaaagtctgattcacagtttttacacatttaaattatggcacagtggattgaatgtgatttatgggatcagtggggggaaacactaataattattttaatcacaagagcccccttttaattgatttaggctatttacatacagtaaatcatctgcagcttacaccaatcgtgtgaatattttacacatggggaaagcgaagctcagagaggttgaattacaggccagagcccacacagctggttagttgcagagccaggtattatcaggcttgccttcaaagcctatgtttgtatttactaatcaagccataattactattatcaaaaccttattaatttagattttcttaccacattaccatatgagcaagtatctgtacaaataatgtctgtatttattttcctttaagctctgttggacttaatgtctgta

SEQ ID NO: 36341 - DNA, 805 bp, Homo sapiens
ctgatcttagtatatgatagaatctaattgatattttctctttttttcttaacctgtatatagtcttatcaattttattcatcttttcaaagacccaacttttggttttgttgtttttctctgttgattttctatttttaatttcattgatttttactctaatttttattatatgttcttttctgcttactctggaattaatttgctattggttttgcaacttctaaagtagaagcttagattatttatttgaaatctttcttcttttctaatttttttacactccttttgctgcatccttttaataagtatatagctttttatcagttgtattttaatttttacttagttgaaaatatttctaaatggctcttgatacttctttgattcatgtgtgtcatttagaagagtgttgtgtcatcatcaagtatttggggagtttcccagctatcgttctgttattgatttctggtttaattccattgttgtctgacagcatactttcctattcttttaaatttgttaaggtttgtacattgtagtctgtcttggtgaatgttctgtgtgagcctgaagaaaacgtgtgtactgctgttcttggatgaagtagtctataaatgtcagttagatccagttgattgatgctgttgttcatttcaattgtgccctttgtgatttttataatttttgacaggggatgttgaaatttccaactgtaatagtggattcatgtgttttcctttgcctcatacattttgatacacttttattaggcacatatacattaagacttgtaacgtcttct

SEQ ID NO: 36342 - DNA, 706 bp, Homo sapiens
ttataaaaatgaattttgactgtcatctgcaattttagacattttcgttatgattggtaatagaacaataaaatgtctagccttgtaaagagttaagtttacttacaagacagacatcatctaatttgcaacaaggattaaagccccactctgaattaaaatttctactggaaagatttgaggcactggcaaactgtcaaaggtagtattgtgcgagagtaaccagcttttgcaagacctgtgaaagtaaatctcttcggccagagtttcttaggtgtgtgaacttatgatgatcaggaatacattggtggattcccactagagaaacgcaccattaatagttaatgctttcactttctgttttcacttgttgccctcataaatgcaagcatggaatgaaaagctgtggtagttctggacacagatgacctagaatatgatcatcttaagattttgctctgggagttctttttaaaatcaatcaaaatgaaaccaaaaacaattttgcaattgtcttagaggttttacagatccctggcatgtttttctgaccctcactggagttcagtatgagacagaccacgctacaaagagattcctgatctaactctaggctgttcatgagtgttagacacacagtgtgagacagatcaccctacacagagattcctgatctaactctaggctgctcctgagtgttaatgag

SEQ ID NO: 36343 - DNA, 1664 bp, Homo sapiens
ttctggatgtaagaaaatcctgttaagaatgatcaggttatctcattttgccatcaatcgtattttgaaatgttcggttgatagaataactgctcttcctggctaaatagattctctcaactccagcaaaatatttttaaaatcaggtaattcagccagtaatccaaattttatttggtttattttcttcagactgtatatataataccaggactgagtgtttaaagttcagctcagtgtgtagtattcctgtgataatttcagcacataaaataagatgtttacaaaagccaacctgagacctatattctccagcagtttagcagcaaattcctactctgggtatataacaataattgggatctttctattggctttacataaactcagattagtagtaaaatctaagtaccatcccatttggcaaactcttaacttcaagcagtcacaaatttgcttctgattgtgcttttcattcgcacctagctcagatttttgcctgatgcttttttaaatcctctaatttacatactgtggtaaatttaaaatgagaacagatgaatgctgctaaacttttctatttcactgatgaatatggtattttgctttaactatctagctgttatatattcaatgacctttaaaacatgaaaaagatacttcttttcatatataccgtgcaagatgaattattagtattgtcttcctttgaaactatgaaactgagacacagaggccaagcagagcatctgggaactgatttccacaggcctaaaatcagagtttcctcttcccgggactcataccccttcagccaggcagagaggcctggttcgctcacgtttggttatcttggaactgtgggaggtaatgcatccactcggaatgcacttctttccttaccccacagcccccgtgcaccacagcctacatcactgtacccgtttgggcatgtcggaacaagcacgagtaagggaagaggtcgccgtttttgagtggctaataggaatctgctccagctaagcatatgttatctcacatattgtggttaataataataataaccgtgttctccaaaggagccaaaggagagttggagaagttacattattcaacaactgagatgtctaaagcctgtgctcctgtactatcttctgtttgtccctgttatcttgtttagtgagcagcatagcattttgcaagagtggaccgttcacctggtcaggatttcagtcagcatgacagatgcaccctccactgtggtcggtgtctggggtaaccagagaaaacttcccagatacggtagaaataaacttcccagatacggtgggaataagcttcccagatacggtggaaataaactgcttgacaaaatgaatagatccaccatgacgtaattttctaactgttcatttgttttcaataaccaaaagcaatattaattttgaaattatatacactacttatgattaaaatgctgtaattcataagacaaggaaaatctagggcacattttaaaagaaaagtttaattttgaaaggaggaaatctatttcagaatgaagaaatgaaaacttttgaaagctttaacaaaaaattcctagggaattttgaagttttattttgccctaacatgaaaaagtaggccagttgctaaacgttaat

SEQ ID NO: 36344 - DNA, 1364 bp, Homo sapiens
aggctggtctcgatctcctcaccccaagtgatctgcctgccttggcctcccaaagtgcagggattacaggcgagagccaccgcacctagcctatttccatctatcttgatcacacttgatcatgttgagagactagaggctctgaaatttaataaatgacctaattcaaaatatcttactccaaatccagcttgatagaaagccaaactgttgtcagtatatctcactttaagcaaacccaacatattaaatccatatttacaaaatggattagttaagtagtcattcttcacttagcaacataattcattatagtaagttccccttgtaatgcatataaacgtgatttactttattagaaccctctgtgtgtgccacatttcaagtgcaaagtacatttgataatgttactcaacaaattattttctcatttgtccaaatatttggttgggcatcgctgtggcccctaaggaaacaaacaagtgggtcagaatggcctctggaccgaagggatgcgtgttgcaggagcaaggactgttggcgtgggctgatcgctggtctacaggctgtgggagctcagagcatggacccagtcagttcagtctccatcatcctagttttctggatcttccaactccttattcatcgaatgaaccgggagcatgcagaatttatcttggtggaaagcctttctcctcagttttctctccctgttttggtttactgaacaggaaagcctgacataattaggtctgagaagagtcatcgggttctgctctcatccttgagcctgccctggttggtagggaaattcacttattaattctgtggctggctttgggtcatgcagatgacccagggtcactgggcttttcaggttatcaaaagctaaatgacgtgggacacttctggggattagtttaacgaagctgtacaaatatagtcagatgacaaatttggagatgtagtggcagagtaaatagtatttttaaaaaatgcatgcctctgaatgtaatagtaaacctgtatgagaggctctgcttagagagaaattagagtgagctattagctgtgcctatatgtttattttcatataaatacatcaagaaagctagattttttgcttttatttttataccaatatgcctaggttaaagtgggtcattcccagcatttaaaaagggggtagagggagggcaattggcttggttttggtaaaggggtaggggattattttttattttattgtatttagggggcaatcttccatctttatctcttcgttcttgtgcttttcctggaccatgtattctgatcatatttaactttctattgtagaattgggatggaagacctagagttca

SEQ ID NO: 36345 - DNA, 1492 bp, Homo sapiens
cgccccgttcatgacttaatgcctcctagaagaaaaggctaaaaacaagacacacagaacaagaaattgcactctctcaaaacgacagtcgccctgaaacggacgctggaagaggtttccaggcccgtggcgacggtgaggggggtgaaggtcgcaggtggagggcacggggcggcggctgcggagcccggggaggaggcggcgggcgcccgggtcttcctcggagcgcgccccctgggctgggcggcgtgtccctgcctcccgccggcgccctcgtccccgcagcagcgtccccgccgccaccccgctgcctcgtcgcctttctcgcaaacagcggtgccctctacgtgggggatcctggaggctgctgagcacgagcgccctccgcgacccgcccctgctcccgcctccactcttgcctcggggggagggtctcagtcttctgcctaaggcgccctcctcccttgggaagtccgccgtcctctgccgtgaagattgcccctctctcctccagtgcctcctccccagcggcttcggtggctcccaccctccgcaccccgtctcgcgacctccccgccagcccagcccctcaccagaagaggctttctcttccagcccctgaaatctggcttctgccccagccaggaggctccgcagggcgctccgccaccaggtggcatttcccacaaaccggccactccgccctgacccctctcctccctggacctccgtctcccagttttcctccctccaggatcccactctcagtgtcttgccggattccagtccactgccagccattgaaggcggaggttccttaacccctatcctggggcgagcccttccctctcactgcagaagagcttctcagctaggggggtcgtgcgggcccggagagctgcatttttaacaaactccccacactgacaatctttgccaacccttcccaggcaaatcttgcccccacgttcatggtctcgcctcccagcaggtttggcccacccagctagagctccagctcggcccttcctaagccccaagttgcatagctgcctggtgggtgcgtgttccacaggtacctcggactcgccctgaccccagaacgtctcttctacgccaggccgatccctcctgccatcctctgtctgttaaatggcactgccattgcctgcaggacgaagtccatatttgctggtttggctacagagtccagcgtcgccttcctctgagcagcctgcagcctctggtgcagccacactgcacagcttgcagtttccagacacgcattggcctttgcagtgcggccccgaagtgggaaggccccgcccctggccctggccagaaaagcacccactcatcctttcccatcccagcttgcccgctgagtgactttgaatcaatgattcatgttgtctgtgcctcagtttccttaaccttaaagtggcataataattagttcctgcctcatggaattgtgagtgctaaataaaca

SEQ ID NO: 36346 - DNA, 832 bp, Homo sapiens
tagaattcatcatcgaatgtcttcaagtgcttatattttttctttgtgatgctttaagtgcaactgcaaaataaagcttcttatgaaatttcattcaacatctagcatctggcttaactcacctttcccaatttccctatgataaaactttagcatgaagggactaagtgaaagaaaaagagggaaggatgtcaacatctgagtcctagctcatcaggaaacaatggaagagacttgaaaggcatcaaaacaggccgctgacaatcacagtgttcctcctgtcagctttcctggtttcctgtatttcaaagatcacagatgatcagcaccctgttctcataaatgtcctgtgatgacagtcctgtgctgttggaagctcttcctggtatgtggccacgtggtcagccactcagtcaacatgcgctcccacgcatctgctctgggctgagcacccgtcaggcccaaggaccgcagaactttgaacaaagtcccaagggccccctggcctcacagtctcctgggggaggtgctccattttaaatcccccgtgcttgcctctaagcttgtttaatcatatgctgtcctgcaatggaaatcagtgaatctttccaatactcaacccttttctcttcaagcaaaataattcgatgtcctcaaacccatataggaagtacattaccaatttttttgaatattctaacctctccagggagcatccgctggatgtgggtgtaaacaaagaaagcatacaggccagatcccactgcactgaggctctgactctgtcactccgaagaggagggggctctgcctttgtctgaagaataaacac

SEQ ID NO: 36347 - DNA, 741 bp, Homo sapiens
agcaaaaaatatatataatagcctgctgtagatatatattatgttgttgtagcagctcatgttttctaccatccatacgtttaagataaatggcatgcaatatcaccaataataaggcaatagagaacaaagagtctgcaagaatttagaaaacacttgctttgatatacagcaagaactaaggggcaagaagaggtaatgggcaagctctgagtcactcttactggatggtctcagtacagcaacagtaactaggataagccaaggcgtcctctacacacatagtgaggccagcttgaaacaaggaagtacatagttgcagacttggaagctagccaccgcagctatttaaaaatcaatagagagattattttttaaaccctctttatccaaaaagagtgttctgtgaagagaaatagaaggcactagaagtgacgcactgaaagatctcagttcatggaatgatcacatttgtaaactaatagtttgtgcctctttttagagtcaaaagtcagtaagctcaagtcagtaagctctgggttggaattccagctcctgtttattagctgtgcaaccatggaccaatgtacttcactaaccctcagaatcttcatttataatttcaggattatgatattgtacttatagagctttgaagaggataaaatgaaataaaatgggaaaacactcagtgaaatgcctcatatgtaattaccatgtaacggtttttcctttcttcct

SEQ ID NO: 36348 - DNA, 990 bp, Homo sapiens
aacaaaaatgtaaaactcactcctcatcacactagttacctttcaagtgctcaacagccactttggcccatggctactttgttgaacagtacaaatgtaggtcttcaatttttgcctcttctaacctagactgaacatattcaaaaacagagatcattcacatcatcttatggctttaaagcccctcaaccacgtcctgctgatctgacaaaacccaagtgcttacacaggttttgcaacctaggctccctcctccttttccagcctcagctatctatctccattttccccttacactctgttccccagataaacaatgctttccccaaatcccggaacatgctgaactttgtcccctttggcatgtgctgctagtccctcaggtttcaaattagaaatcactttttctttttagagccctttctgttacacagcacaagctcttgtgagggtaagaactggatcactattgctcattattgtatccccagcatttatcaaaatgcctcatattttgtaggcactcaaaaaatatgaatcaatccacagagtaatcttagctgcccaaaataggccaaaggcatgtcctcatgtcaacacatgtggccggaagagaagggtcttcctgggagctcattacatggttttactatcactaaccaaaaaatgagagaaactacgccaaaattagcaccaaaacacttagactctcaagtttggaaaatgcagtacaaagtaatactttgtgttttataggttcttttgagtccactggaaaggcagtatacctgagtaacagagtaaattctagtgtcaagggacttgtgagaaaagcgtttgccccccttcttacaaggagagctcattagtattatttcaggtttctttctctccctttactccctctaattctggtaagatggagtattttaatctggtgaaaaactggtgaggaaaaatccttggtatgcaggattctgctgggcccct

SEQ ID NO: 36349 - DNA, 1130 bp, Homo sapiens
gtagaatgataaaacaaacgtttgtcctttttcattttcccatcataaaccgatttctcctcataagaatattctccaaaccctagtcttttttaaaagcagcactctcctcacaaaaaattatgggcataaaaatacttcaggggctccagggtatctttttttttttttaatgtgtagaccatttacgaaaatgaaactctgttaggttacttaacattgactgcaacaacaaacactagcttattacataaactttagaacatgtacatgttcaccactgcaacagaagaggtcagaaggaggtagctcttaactgactcaggccaaagtgacacatactattttcactcccaattcactggccagaaattagtcacatagatccaaaggaagtgcacggaaggctcgaaaatgtaggagcacatagaaaagttggtctccatctcaaaaacagctctaaaatactgctcaagaatcttccaaactctgtgttcaatgataaggttgtaattggccggtaaacctaaaattaggcagatcaacttttaattataccctctacaatgcctaataattttaccctggaagaaaaactttgtatataagggacttgaccatcctggcaaagaaatttcctggagaagacttccctggaaggaaaaaccactgtttgtttaaaacacttcattttttctagtcttgttttcaaaaatactatgaataaatagtcttaataacactcagaaggtagcatttgaaatcaattccatggtttgaaatacatagttttattaaggaaaaaaatattttcaaagaatttcacaacttatcaaatacagagatagactgaatgattatgccaaatgttttagaaaataactaatttacaacagcccttcttaacataggaaagtttaatattttaaaatgcaagtgtcataaaatttttttagtactccaaatgaatagtaaatatatgaaaaagagttctacttcattagttatcaggggaatacaaattaaaaccacattactggccaaggttgatgctacacctgtcatgcctgtaatcccagcactttggaaggattgcttacacccaggagtttaagaccagcctcagcaac

SEQ ID NO: 36350 - DNA, 904 bp, Homo sapiens
atattttgcaagtgatactcaagttctgaagactaatcttcatttcctacaccatctttattagactcttccaccttcgttttcctaagtaaatacataacctaaaccaatgagtttcactcatttgtcagcttcaaccactgacaaaacccagtggttgcctagtgatgtatagttctactaaaagacatatatgaccatgctttaccaaatacggaacacatgtctaaactgttgagacaactgccaatgtattaactacaaaaagccattattttttactttagcctcaactaaaatcaaagtgtgaacactttattatggctagaaattacccaatatagatgcataggtttcactgttgactttctatttggaaacttcatcaattgcaaactaccaggctttcaaccaaaatgccacattggtgaaatgagttggttttattttcataacaacattattttgatggaagaaatgtgagcatcccagctttgacttgtgggtaagcatttcctctgctttcagaacataaacagtaaataccggtattggaaaaacctggccccaacgagattctttatctctaggctaactgtagattcccgggaaatcccaaacaagggatggtgaccccgcctcggcgtcagggtcaacacagcaaccagctaggcttcaactttgggctctgaagggccccaccggcatcatggctgatgcggaccgatgcgccggaggaggtggacaaggaagaggctggtctgtttacttgcagccagagctgccgccgccgccagcagcgacagcatcactggatcagccaaacccagcatcttccgcacatttctattcttagcacacaactcccaagcggatcaaaaccccactactattaaaaacacag

SEQ ID NO: 36351 - DNA, 1484 bp, Homo sapiens
cccccggcgcggtgacaacccagaagcccccgcctcaccccaccccgccgccatcccccgcctgagggaggcagggagggcggaccggggcccggggcccggagggagtggaggccaggcggggagggggctagagttgggggcggtggctgttacctgcaacggcggcggcggcggtggcggccccgcagctgctcgggcggcggcggaggatggagccgggggggggcggggggaggagagggggcgactcgggggtcccccctccctcctcctcccctcctgtcctccccccaccccacagagcctctggcctcctggagcccggtgcggccggcgggagggcaagcgaagggctgcaggggagggagggagggagccggccgggccgggccgcggagctggagcgggaggcggcggcggcggcggcggcggcgggagggggagggaggagagagggcggcggcggggagaggaggaggcggagactctacatgggaatcggatatcggctacaaattcatcaccagaaaacaccgctcgggcgggggccgggtcacgccggcggggcggcggctctgggccccggggcgcgcccggcgcggggaggggttctgcggcctcctcccgggctgcgcctcgctgaggggaccccccgccgcctccccgccccctccttcctcccgctcggggccgccgccgatcggttctcgccgtcgccgcggggcttgttgttgactttgaggaaaactcctgacgtcaggggctggctctcggcgactggcgggagcggcttccccgcgtccccggccctgcccgccgcctctgctcccctccctgcccggccctcgtcctcaggcttccccgcgcccccaaaccagcggtgccccgcgccccctctcctctcgcgagaacatccccctagccagccagagccgggagcgggggcagtcgctcccgggcgggaagttctgggtttccccctcgcccgcgtggcccttggcgggcacccgaggcccgggagcggaggctcctcgcccagccgcttcctcggcgcatccgcccacccgccctggccgcggacgcgcgcgccgccaggccccgggcgtctcctccagtccgccgcggccccttggggagatgggcccggcgcgagggctcgcacctggaagcccacgaagtgggcggtgcccaatgaggtagggaccggagagcgcggagcagtccagaagccgaccccaccccctgcacctcggggaagagggaacccgggtcagcccgtagcaagaatcattcctgactatcccaggagaccacggcagaccaaaaacacctctctgaacagccttccgcaccgctcgctgcaagcattcgtccacacacggtacacagattgcgggcggatcgtaattcactcttgaaatcacaccctttttagggatattcgttttcaatgactttgggaaagccacgaggtactacat

SEQ ID NO: 36352 - DNA, 414 bp, Homo sapiens
gaggggcgagcgcgcgggctcgcacggattagccgtgctttcccatgagccacaaaagaatgcccgaatctgggacatctgtcatcaaggggcaggctgctcaggatgcaaggtaaccagagctttcctcggactgcttcagtctttggggacgtggggtcaccctaatccttcctgtttatattgtgaacgcgtaggcagcgagacttaagctctgcgtcggtcaataagcatcacgacgcaggcattcctgagcggctacgtcctccggttgctttctcggttttttggaagaggcagcgttgcctcccatttattcagtcccctcacagcagcgcggctgtagcgcgccgcagaagagcgccccaacgctgccggcccctgttttgtttcttctttctgcattcatccact

SEQ ID NO: 36353 - DNA, 739 bp, Homo sapiens
gcttcccaagacatatgaggaccctacttttttcccattaatcttagacgcaagctctagcttctgagatatctgagccagcattcacgtaaacaccccattctgtaggaatgaacagaaggaaaaggcagccggaacaaataacttccaagttaatattttgccaagactaacccagactggaccagactgtaaattcctgatggaagaagctgggattcccctcctccaccccatccccctaggccccgcctatactccattctccgtgtcctcaggtataagtcggagatacagcattccaagggagagcccctgagctcagggctgagtgaaacctggccttgaacccagtataaccttctagtggccctctgaacctctgaggctatgacagaggaagaggggcccagaaccctaacagaggagggagtggggcacagggccgagtccgtttccttgcctccgtttcagaagagctgtccttggtgttgaagcaaacctcggctgcttgtctcctctgcaggggagagttatgtaaataacgcctgcgtctctgggaactccactgtctcaggtagtggagggagccctcggtggaacttggtgagaccattcagtcggaacgctgtgcatctgccctggcctgcccttgctgagtcagtacgcaggccagcttgttggggaaggtgtgtgtaggagagaaaacagaggccttggagatgccacactaacacca

SEQ ID NO: 36354 - DNA, 1862 bp, Homo sapiens
gtctactcatgtagagatctgtcactctccttaattttaacttttagtagatgagaaacagctttgataacgcaaacatttctttttccctgaattagttggtgaaacatatacttttcacatctcattttgtgtgcctgtatatttcattcgtgaataacatttattccttaccttgaaacaggtcagactgaaattgggccttctaccactagactgaaaagacctagaattcatcgacagcacagatacaacaaaagccttcatggaatacaaaaactccaattttcataggatatccttgacctcagtgatgaatcatgagggcgtagagggttgagaaaaaagtaggcacatcactactgtttctaaccagatatctcgaagctatttcagttccaggaattctgtctgctcctgtttttacttcattagcaattcaacatgtctgatttgcccacacaatactttccagctactttacccatttgacctggaacaaagtgaaagcacattttgcccagttgaaaggtctcctggcaggttggttagcaacaggcttgccagtctgggttctgttagcaaagaataaacacatttcattagacaatgactagtggactgacttcctcactatgaagttgtttttttttttctattttattttcttcagccattccccctcccccaccacttgttattcaactttttacttgtaattcttgcctcgatacgatttccaatttcttgacggcagacatttccacgtctttgtggctgtgattaacgcagtctaattgccaagaacaggtaccgagtaaaagtttatttgaaggaaagaaaagcgacacagcagtcttacatcgtccctcggtagtttaaagttgtggctagatacgtatcaattaaggaatcaagctgaggcatctgcaagtaccaattttactgtaatgctctaaaatttggtcacttggggaagtctttacttgtaacagtgtaagtacacaagggacaggagggttttgcgagaaaggcgggcgctctgccctgttctgcccgtgacatgatgacgtaagaacgactcccagaaactgcctgagtcgcctgcgtccccagctccccgatgtgcacctgggcgcgggacgccgcaggacggagcgagagcgctcctcggtcccgctcccctgcgcacgggccggcgaggacccgggcgtcttcacccccacaggaaggagcagagagagccacccgaagtcggcctcgagtcatccgtgtccccgggtgccctgcctctccaggatacctgcgtaactcgcagcagccaagccccactacgttcaaaagtgtgtttgtggttgtcacagtgcacaccgaaaagctcgctccgcacccgcagagtgcgcggggcctctgagcctggaaacaagcccctcccagcgcagctgtcgccgccgcctgcgggctcctttcactttctcacggccaagtcacccagaggggcgccgctgctgccaccgccgctgcgcccgaggactccgccccgcgccgcttcgctccggatccccgcccgcccgagccccgcccaccccaacagttgctgcctgcgattggaacgcgcgggagggcagctacggctcgccacccccattggctgggcccccttgtcagtccgacgactgcccaccaccccctccgccttcccgaagagccgccttcccattggaggagtctgagggctgggggcgggcggggagcgccggtccagccgctttcggtcaatcgcagaagcccaacgcccggagggagggaggcaggggaaggagaggggcggactgagggtggggggaacatctggccggcgc

SEQ ID NO: 36355 - DNA, 2014 bp, Homo sapiens
tgccatggggagccgttgagagtggggccctcttcgctccgccgcgctcctccggctgccagcgggggtgggcgggagggaggggcgggggggagcgggcgacggagccgggattggggggtgggggggccgggagggaggggggcaagagccggaggaagcccaccaagtccggcggcggcggcggcggccgggaggaggaggaggaggaggcggaggacgcggcggcggcggggacgcggtgacttagggccgctccgtgtgagtcccggcgccggcccctggcccctgacctggcgccccctccgcgccccggcaccccggcgggcggggggcgccagctgtgcggccccggccggctgggcggcgcgggcggagggcgggccgggtcgggggcgcccccgcgagtggagttagtttgtgtggttggagctgttggggcggcggggggcggcgcagctgcgggaggcccgggcgcggggacggggccgctgcagctgcggggtcgggcggggtgcgggttcccggctccgcgccgcgcccccgcgggccggtgcagctgcggcgcggggcgggctcccggccggtgcagctgcggtggcgcctctcgggtgcggagggcggcgggctgggggagggggcttgggagcagccgcagctgcagtggcgcccgggacggccgcggctccggggaccggtgcagctgcagtggcgcccgggggagggggccggcgggggagggggccctcccgggctggtgcagttgcccggaggccccgggggctcgcgcgtcgcggcatcggggaagcggtagcaaccactctcctcccgctggctgcttcttacgacttttcttttgttgttgccgtgacccgggtctgttttctcctctgttgtttaaggtgttttcctgctgcaccggctctgcgccctccacctccttccctgtggttttaaccttcctctttccccgtgtgttttatgcacggcgaactacgtaaagatttgcattgcttccccactcggcacccccgcccccacctctctgaaaaacaaaaccccaacctcacaaaacctctatggatccgcggtagcgagacgtgaaggggttgatttgtggagtgggagttgctggcccattgcggtgcccgggactcattaaactgtcactcaccccccaccccactgggtaaatggggtgattaatgtctgatatattggaatgggtcgagggcatttgtggagaataggtggtgtggctgggaagaaattgatctcccgaggatgtctcctggactaagtgttcataattatgtcactcaccgcgaagttggagaaagttaggtttgtgactttgggaaagcgagaaggacaggacggagtcgtcgggttttgttactctttaactctccgccacggctttctaatgggaacgaagtggttatcaccagggctgggacgctggcgcctcaggccccagttccttttctacccctcgccctcccaagagtctgaggagatgtatttgacattcagagatgtcgcagcaccctgcccggtaccggtcagcccagcccgggtcgcgttacagtttcatcagctattagaaaagacccacaaactggctgaaaagttctcaaacttactagacctggcttccccccacacaaagattttcttgtgatcataaacattagagtgacccccccccaaagaaaaaaaagattgttaagggacacagatcaaggggaaggcaaggttctgctttttctgagcagaaagatcagatatgcaggtgcagcattcattttaagtgactggagcaggttgtatcagtttattaattggtctcgttgaactgaagtactttccaggatttcagaaagtgcagtttcagcttgttggtaccgagaattgaaatttgcattgactgtggcagtgtaagaaatttttctgagaaggtagttgtagataagtaattacataagagtgaaataataaggtgaaccagtct

SEQ ID NO: 36356 - DNA, 1898 bp, Homo sapiens
gatttaaatgatttactccactctcaccaggagaaggtggcccatgccagagcccacctcagagcatctcaatctcaggccttgcctcatctatgtgctcttttatgtgcaggtgcagcccacgttgtggtgtaatgcaaatctatggctatactgtatcacagcgaataaatccatttggagaaaaaggcacctggtgaaaggccacagtgcaatggaatgcaatgctgctatgtgcaatgctgcttacaagaaaactttgggtaaatattgcacgggtcaaacttacgatccaactttttcacgtaacagggccgcgtattggatgccttcagaattcccattcagcgtgtccactttgctctttgatgcaatgccacctcacaaaagcattcaagccacagtcatctatttttttccttctttctccccttgctataatgacccaaatctccgtttttactttgtaatttttgtaagttttttaaggcaatgactataataattcatgtttagtgaaataattcttttggttgatatatttcacagtttggtctctaaaaaaagttaaaaaacaacaacaagaaccaaaaacaaacaaccccccgccccaagcttccctctgcttgatgccatagacaagagtccaaaggacattagctgctccattgcacacattggaagggagagtttgctgtgagctcagtccttctaatagactggcaattttgtaaaagatttagagaattttgtttaaccatttctgcatgtgtttttaatgagctcatgatggtttctaacaaaggccaggttgtgtgttttccagcactttctgacctgattcctccctgctgacttggggagtgggcacctgtgcttctctcctggctcacctatgggagtcggggtggtggggccatctccgggcctgtcttcacgccagggatgaatcatgtagtaggcagagtggaaggagtctctttgttgacagctttccatctggactttggatacggctgatcgttcatgtagagccgtggttagctggaaggggctacgcgagtcagctcctccttaagggatcaagggtgtgtaaaacatcaggaaagaactgcctgggatttcatttgcaaagcttagagaagcattttatcctctgagtttcaggtagccagggttgtgaatgtgtatgactgcagctttgacaggtcggtctttaatagtcaataggatcatttatagcctcgttcagataatccaactggagtacacctgaataaatacatcaagttcaggtggctaaaagctaaccccttttgagtttaataattaaaataaacagagctatgaagatgaatttcagtttgtcatgcataaatgtaagaagctccataaaggatggtgttctgtgattcatataggagtatgatggatgtatgatacgttttccacagctatttaagaaaaaacgattatcttagtcatggggtaaagttatgtgaagcattgcaccatccaggctgtgtctgggccagtacagattttttttctttttctttttctttctttcttttttttttttttgtgaaagattacttcttggcaaactagatatgcaaacgccagaatacagtaaaaccacatttaattggacctacttgccaacttcttgaacacagcttggattattccactggaggctgcttctgttaaaagctgggggaggaggaagtggcatattgacaagacttcagataatttttttttcactcgaagtacaattatgcaatgagccaagtttggaagtattttactatgtttaataattattattaaagatattgtaaaacatatgcatttgttaagtggaatgtaatgggagtaaaatcatgtcatca

SEQ ID NO: 36357 - DNA, 732 bp, Homo sapiens
ccttgatttcttagacatctacagcttcgacacgtgcagggttatccaggagcagtgaggtttggggtgagggcctgagcactttctgaaaagtgcttgtttctaagaacctggaactatgagtgaggagtgacatgagttctgccctcaagtcctctgataaccagctgtgcagtcttgaacaagtgacttcatctcttcatctttaaaataaaccttttgggccaaatgactcgaatgtttttccaacttcattttttttttttttactgtttaacagaaatgctgattgaacttgggctgggaacaaagaaatcttttctaattagagtagaaatgatgactaatatactgctcaagcttctgaggctcattgggatcaaagacacactcactctgataagggagggcactgaccgggctgctgactgtttccaccagccttcgggttttaatatctaactacagttatgcccatgcatgctggccatgtgctagacacacgcttccttgtctttgctcaagtctagtggcttttgggttatttgtattttttaacaggagaaacctgagagatcctaagtagatatcaggcaagagcttgtctagttccatgttttgttttgtatgttttgttttgagatagggtcttgctctgtcacctaggttggagctcagtggtgcaattgtggcccactgtagcctcgaactcccggcccaagtcatcctccc

SEQ ID NO: 36358 - DNA, 1183 bp, Homo sapiens
agttggagtggttttagatacttcacatgcattagctaatgcttacctgagagacagaccccagtaccagacaagacagacaagacagccgaggctcaccatcaagaacttgccctgtgtcgcaaaggcagtctgaggaatcagaattttaaactagtttgtttaattccaaagcctgctctgttaatcattatcccctccttttttttttcactaaaagctttaaattttttacagtttcaaatttcttcctttattttactattttattttatttctttattttactaatttcattttaaaattgggagctgggtgtttctcttggcttccccagccctttctccttggtggcccagaggtcctgttaacacctcataaccaacctccatttcagtgccgggtggtaattttgacttaaaaagttagcttgtgggacaaccaacagccacacacctaaaatcactgctcttgacagctcagcaaaattgaaggccaacatttcactcaagaaggcaataaatccagcccccaaggcagctgctgagaggcgctgaaacagcgctgttatcttatctctcataccattcaggccgtacatgagggaatccatggatcaaaatcaaaaaagtctccagagaacatagtcttcgaaatgaccattgtttattcagagttcaataattaatcaaccccacaaacctttcttcagcacttacggtattccaggcattatgctactcacaatgggagaacataagtgaacaagagcccctgccgtcgagatgctcgtctaaacagacaatgatttggcaatgtattgagtgttctggtggagacgtgcccaaagagtacacaaggggggcggtgagctcggtttgggtgagctcggtttgggtgggaagctgaagaggagaataggaaagtctcttatacaaccttgggaatctaattcaggttcaaacaaggttgggcttccaaaatggtacaatggagtaatcaagctcatggactgagatgtctatttgcagatttgttatttctgccacttgttatttgtgcaattttggaagagatgacttctctaagccttagtttactcattcatgaaatgggtgaaaatattatctgcttcagaaggtttttgaggattaaatttaaaaatatatatatatatatgtct

SEQ ID NO: 36359 - DNA, 1810 bp, Homo sapiens
ttgattatatttattaacttatttaatcttcataaaaccctacaaagtaattattattacgcccattttataaataagaaaactgacgcaccaggacatttgattgaagtgttcacaatgaataagcaggagagcaaaactttgagcccagctcatctggctccagggcactagaatccatgcctaaccactaggtcacttcgcctctaatgcctcccagcttagtgttcattgcatggcaggtgctcaatccagccaaccattggagtccccaccagattgtaggctcttttgaagacagtgtggtgtcttgtttacctctgtatctatcctttaccattgctagcactgagctttgagtaacagaaactcaactctgtgtgtgtgtgtgtgtgtgtgtgtgtgtgtgtgtgtgtgtgtaattggaaaggtaagattgagggagggaggtagcaaaaagagtaagataaagattttactaattccaaaagtagcctgaagtctaaacatgttacaatctctactcagaatctttgggggtaaacatctttaacacatacgagtgtatcagagccaggctaaaccatgactagatgaccccaggtctgagaaatcagggcctggacatactctgagaaatgttaataggtaacaaagaaagtcggaacggttggtgagttaatatttgaaatgcaattcagatgaagtcatatccagactctgccaactttcaattgcttccagcatcttcaaacaccacatgccaaaatcttccctctacctcactcaccaacacttcttcttcccagtcactgcggcgcaaaatcccgcctttgaatcctccttctccctgtgcctctctcccctacctccatctacccagtctccaagaccacagactcaaccttctccttatcatgcccacaggtccccaactcctccttccctgccaagtctcctgaccagcctctctgcctgttctcatctttcctctatcatctatgcaccactgttgctgttatctttttctaattgcagttttagtatatccttctcctcctggaagatatatagtaaacccccactcctgctggagtacatagtcctttaccttgaattcatggggcttttatcatatcactcaattgagtaatgtaggttttattcctgcctcccatcccacattcaagttcacactctccactctaacccaagtgtactatttctagacccgcacatgttacctgctcttccctcctgccaggtctttatggactgccgctccttcagccgaaacctcctatttcctgcctgcctttcaattcacataagcttattgctttttaccagccaaacccaaagagacacgtcattgagggtggtgaggctcttttaatttctcttctcaaaagacacattgtctagcagattatattcatcagccgtcaggacacatgcctagcttctttattacctgctgtgcttttatgtcggcctcgtcaatgggttgtctgtcaaatctgaactttgtctttctcaggggcaggtctctctcagccttacttgtttacctcatagtctgtgccgattatttctaaagacggccactttggaagaaacctacctagctatgggagatgcctccatagagggaaggcagagccagcagccaggaccatgaacctggaggtggatgacctgagatgggatgggaggagcaattgtgtccaggtgccgggtgctcattcctttgactccgtttgacacacctgttattcctcaaatgccttgaataaaacaaccaagtcaa

SEQ ID NO: 36360 - DNA, 1516 bp, Homo sapiens
gtgacgatgggaaggtgagaaaataaataaaatgggtcatcaaccttaaaggagttacaggcaattcctgttattcatggtagtaatgttctataaagtctctgtgaacactgaatcaagtgaatactgaactactcttcctaggggaaacacagggttatgttcctgtgagcctctggtcccaacatttttgtccattgatcaatacataccttgtcttcgtgtgtgtgtctgtttacagacacgacatttaacacatattgttaactcattaacattgagctcatggccaacagcatcagaactcatgggtgaacgaagcatatctacacacgtattttctcctcaaggcacatcacagagttcgtgcacctagaaatgctagacgcactgcagcactacccttgggggccattttaaacagcaatagcatcgaaaaaagcacaaaggtgcaaaaaatgtgtcattaaatgtaccacaaaaaggacacttgtttacaggttgaaaattaaaataagcaggcagagcgtccccttgtttgacctcacgtggggacgtgtgtggagagcgattcgtttttctccactctgcacacatctgcgcttgtttgtgaaagtgccacggtattgatttgggggttacataaattcagcaagtgggcaaagtcacagttctggaattcatgaataatgaggacaaattgtgtattctaaaatgcatgtgaacaacaaattacacaatttctaagacagaattggggcaaaaatgaaatattgtaacctggaccagctacataatttgcagggcccagtgccaagtgaaaatacaaggtctcttgatccaaaagacagcagagcaggaagccagatgtgggcctttgtgagtgagggccctttaccactgcagttcctgtaccaaggaagctggccccgacctaacagtgacatgagtacagtgtggggagcagacttggggactggaccaagtgacatgagtacagtgtggggagcagacttggggactggaccaagtgacatgagtacagtgtggggagcagacctggggactggaccaagaaaggttttctggaggtggtagcatttgaacaaagccttggatggcttgagaaagtggctgaaatgaatggctgaacaccaccaattcacgtaatgcccaccatatttacaaacaagtctggaggcctgctgtgaactccatggtacacaggttgcataacacttactgacttgaccacgagccaggtcctgggacaaatggttaacatgcgttctctcatttaatcattacaataaccctaagaaggccaatgtcatggccacccccattttacagttgaggaaatggaggcttattgaggttaagcaacttgcccaatgtcacacagccaggggcagaggaacggtttaaaccctgaccctctggcccccaaacttacttagaaccttcatcagaccatatttccctttttaataggcaactcatattgccctgtttt

SEQ ID NO: 36361 - DNA, 1617 bp, Homo sapiens
gaaaccctgtctctactaaaaatacaaaagttagctgggtgtggtggtgcacgcctgtaattccagctacgtgggagactgagggaggagaatcgcttgaaccaggcaggcggagattgcagtgagccgagatcgcaccactgcactccagcctgggcaacagagtgagactccacctcaaaaaaaaggataaagaatataagacatttagggacccccacctgtagtcccagctactcaggaaggctgaggcagaagcatcacctgaggccaggagctctgggctgtaagtgcggttggcccatggggagtctgccctaagttcagcatcattatggtgacctcactggagcagggaccacaggctgcctaaggaggggtgaaccagcccagatgggaaatgcagcaggtcaaaactcttgtgctgatctccagtggggctgcaactgtgaataggcactgtgctccagcctgggcaacatagtgagaccctgtcttttaaaaaccaaatacatatattaaaaaccaaatatatatatatatatagtatttttacactaacaagagccccttgatgacctttggaaatgctttctgtctctacaatggcctcaaggccccacaccccactcgtcaccttgcacaggctgccttgtgactgctgcccggcgactgtcccccagcttcagctgtcccagtcacactgactcactgtgccttgatcttgcaaagctgctcctgcctcaggactttgcactggttccctctggctggaatgccagtccctgatcaatctccaagtggctcactgcttctctccctccagggaggtcttctctgaccacagtcatcccaaccctccacgctctgagtcacccacggctgcttcatttttctccctaaccctttcactttcttaactattatgccaaaggcactcattttatttattgttgatctctcccaccagcaggcagaacccccatgggcaggaattttgtccatgttattccctgctcattcttggtacctagaacagtgcccaacacaaagtcaatgcccaggacatctttgtcagatgaatgtgatgattaaaaagatactttagtgaccactttgcagcagtggcctcagacttcagaagcccagctgtgtgactgtgagcaaacggctcaccccaagtctatttactcacctgggaagcatgctttctccgttcacctcacagcactgctgccatgagcaaacgcagccctgcttgtaaagtgatttgacacgttccctctctaagccgtggttttcatctgtaaattcagagtgctgtattagctatactttaagatcatttcgccctcttacagtccacggtaatgatggagacaaaaatctgagcctctttcgtgttgcctggtactggctgtgatgactccttacacctgacggcagatgcgctgcccgccacttccatccggaagcccccagctcttgtgcctgatggcaacataattccgacccatgttgcctgtcttcctttgggggatccctgctgcccacccagagcttcctgggtatgcaggacactccctgctacccatccagagcttcctgggtatgcgg

SEQ ID NO: 36362 - DNA, 712 bp, Homo sapiens
cctaagctaaatgttcagtaatagatttctctaggccaggcatggtggctcatgcctttaatcccagcactttgggaggccaaggcaggagaatcacttaaggtgaggacttcagaccagccttggcaacatagcaagaccctatctctaaaaaaaaaaagaaagaaagaaaagttctctctaaacagataactgacaaaaatctgttatgacaaaaaggctagagaaacttaaaactggaagtaaaagagactttgaagtctttgaaggtgaatcaaaaaggaaaaatgctgtaaacacagggagagtttgccaactgagaccaaagtgcaggaaggtcagctggaaagctgtacagaggagtcaggcgttcaacaaacaattggattagatgatttctaaggaccttcctaaaccctcagaagccattattcagggggtaattccatatatattactttaagttctagggtacatgtgcacaacgtgcaggtttgttacatatgtatacgtgtgccatgttggtgtgctgcacccattaactcgtcataaaacacttggacacaggaaggggaacatcacacaccggggcctgttgtggggtgaggggagtggggagggatggcattaggagatatacctagcgtaattccattttttaaactcccagcctcaatgctttcagtttcatgaactaagtcgcagcaggtca

SEQ ID NO: 36363 - DNA, 1624 bp, Homo sapiens
aagggaaaggagaggggcttccagcgggcacgggctggagagtccacccccagtctcccctgctgccacctttcttcggtgacttcactgtcctgaatggccaggcctcttcctccctgaggagggaaaaagagcagaaaaccaatgatctgtgtgatatctggacactggtgatatctgggcctcagacccagaacagctgggccaggcttcaatgacaggggtccagggatatggcccaggagcccggtgagtttctgccccgtcccaccttccccaggtgggaataacaaaagtaacgctgcttccctgagtgcttcatggagtcctcacagacgagggctggtggatcaggagttacatactccatttcatagattaggaaactaagaccagacagggcaagaaacctggccaaggtttcacaattgctcagaggtgaagttggaagctgactcaacagcccagtggcctcctatccccgggtgcgctgcctccggacctggcttcctggggccctggccagtttgcttggaggtttcccagacgccctgttcgccctcccagccagccacagccgagtcctgggtgagcccatgagaagaggccccaggaccctctaaagcaggcactgggggagacccaagcagagtcaaatgctgagctcttggccggggggcaggaatctccagctccctcctcccttttggcagcaacaagtgtgagggttcccctccccccgacccctatccattgtagcagggcgctgcagagcagctggcaaacacagaaccaaacacctgtgtgccagatattacagctgcatgtgtgaaacgcgatccgtctgcagcgcctgtcacatggcgggtccagttgttgcactcggggcgggttggaaaaggaaccatgggagagaactttcagtggcagaatttcaaagctcaggcacccaccgtccccttcctcccacccccagcattttattcgctcctcttttttggcactcggcatttccggctgagtttgcctttcactaattccccagcggtgacagtgctgggagttgaatcctccgcagggtgacacacactgcacgacaataatacagctacttagcgtgctccgagggctcttcatcttcaaagcagttgtttcacgacttgctccaagggctgcacatctggcggaaacgtttgtggatcccgggttggtggggtgccttcaaagctggggtgcctggaggacacccagagacatcctgcagttgggcttagcacctcctccctggtgaggtctcatccccgtcgctgccagtgtgtctattccaaagtctcgggctcttcacctgcttcgcagagacatgttcgttttctgccagaatcactttcagggctttggttgatgtcaccaattagcctgcatatggaaaagggggaaaaataggacatttcacaggtgctaaagagggtgggaaggggaaggagacaagaagaaaggaaccagttgtttccggatattaactcacagaaggtctttccccagaaggtggctttccccagaagtgggataaaagattttcacccactaccagctaggaggcatttaccatggtggaacagaaaag

SEQ ID NO: 36364 - DNA, 2939 bp, Homo sapiens
agtgtaagtccagtccatcaagcaagcttcttccatctgcgagggaggaggcagcccccggacagctgtggttgggaccttcaccttgaattatgtaacagtagcaggggatgggcagattggccttctgaattatgcttccttagactggcatttacatgagttcgcggaccctaaacactcaccagcagacacagcgaggatggctttatccctggagtaattaatccatgtagcaaagggatctccaaggtgctgccaacagtcttgggataattgagaccttacagcaaataaatcccccagaatcacgaccgctttcaccatcccaaagccccaaagtgagaaccaccttccaaaaactcagaatccaaagcctgttaatccccttttgtggcaagcccatcctcctggcctgcctgccctgctctcctcccccataatacccattcagggcagtgaccccagttggcaacccggagccgcgtgggctgtggtcaaacgacacccagatgaaaactgcagctgatggcctggcctttcgggtcagtagctgctgtgcacagctctctccctgcctcctgaagttcaaatgccagcctgatttctatctggaagcatcccagcccaaacatggaacaaaagttccctctgacaagcccatttgggttccaaagtatgtttttatgtttgttggcaaatagaactgtcaccagcaacaataacaacactgttttccctccactgaagctacttcatttcttcacatttgttccagggctggaactggacagatgaataatgtaggctaggcggctggcccaagtcctgacctcgtgcctccaaaagcaaacacagaggtgaaaatggagacttgtttgtttgaactctcactgcctaatttaaaaaagaaaaggcaaaaagaaaaacaaacctcccaccatcctatttcatcaatgtagacactgatgggttttgttttgttttgttttgtttttcttttcttttcttttcttttttttttttttttttttccatgtcttactttttgaaacatggaactacagccctctactggtgcaaggaatgaagccaatttctcaatcatcgaggctaccctgccatcttgtggccatgtgagggatgcacacgtgtagatcaatttctcagcatcacaaaacagtctaggtaagacgttggaagggttcttcaaaatattcacatggactttcatttaagacatttcttgtatcgtttggggaaaacatcaatgggatttggagtcagaatgttggttcctgcgtttaagctctgtcagtgatttgtgacatcatccctgagcaaataatttcatttttaggaacctgttttctcatctgtaaaatggaggtcataataaatgtttgattcttggagttttgtagtgtttacataagatcatgcatatgaagagtgccttgtccactttaaaatcatatgcacatgaatatattaaaaatccctagagaagtagtttctatcatcatacttggtaaaactttagaaacttgaaatcggtttcaatgactaaccttactatagtctaaagccctggcctcagaataaagagaaggactttacactgtctcatgctttcctaaagatacatactgccaagtcctctccgttttcatttttctgatttaagtcaagtcagtttcttcggccttgcttcacggggccagccaatgaataatgaggagtgtagatgcgtcttgggaggtgaaataactttgcttacatggaatcgcaaagtgctcattagtgtgggggcttaggtatttggctccctcgtcttttggaaaaagcccaaaccagacacagcagctaaaggagccctcataggatgtctgtgctgcacgatgctgacgcaagatgactcatcacacactagctgggtttggccactgcttctgtgcagctgtttgcagaaagccaaaaatttctggtgccaagctgggggcttggtgaacaaacccaaatgttactgtcctcatctcctgctaaatttcagtcctgctcgggccgtggcccaaccagtgttaagtctactgatgaaagtccaagtcactgtcctctgtgccctctcgttactgtgtcctcaggttactgaatttatcattcatctcactgatgcataaggtaggcttagggtacatttggcagcaggatcaatagttttgcaaagagaaaatagatgccagccaaaggaacatcgaatccttgggcgaatgatgaggacggatgactcatgtccaggccatcttccctccgggctgggctccgctgtctccatactcaccttctgtctccaagtttggttcactaggcccatcctcaggaagcctcccttaggatccaggatgagtcaccagcaccccaagtgtgctcgctggtgaggattataggagggggaggtaggctgtgtctacaggagatcctggggcacatctgggggatggaggtgaaaggttatccctctgtcctacagaatgagggtcccccttcaatcccctagaggtgacatgccagaacgcctgaatcagagaaggcactcattcctcccacctaactctttttattttttttaatactgagtcttgctctgtcactcaggctggagggcagtggtgggctcccagatcactgcaacctccgcctctcaggttcaagtgattctcctgcctcagcctcccgagtagctgggattataagtgcacaccaccatgcccagctaacttttgtatttttggtagagatggggtttcatcatgttggccaggctggtctcgaactcctgacctcaagcaatccacctgtcttggcctcccaaagtgctgggattacaggcgtgagccattgcacccggcctcttccaccaaactcttacagggttatcc

SEQ ID NO: 36365 - DNA, 1138 bp, Homo sapiens
gtgcatatatatatgtgtgtgtgtgtatatatatatgcatacatacaaacaaatcctagctctaccagccaagcaagcctagaagcaatatcatcccagcagcaatgagcacgtggagcatctatctatcttggtttctaaatgtcattctgcactgaaaggaaccaggaaatagctgattcctgggatggtgcaggaactaggtgagcctagaatatctgctggtactagaaagggaagacattcctcaaggatgatgtggactgagctgggagtggtgtgttacgggaggcagtaagtctgacataagcaggatggagagggcacgcccccaccatggccccatgacctggaatgtcaggccaccatcaggtgatggtcaggcagttgtcacactgtctctctaagataacaactggtcacagccggctcaccagggaaaggcagtctcccaagagacagaaaaaacctgaaactggtgaccagcagcttcccagtaagatctcaggagttgagtgggtgagctcaagcttgtgcactgagaggcaggtggtggggtttaactggtatgtgaccttcttctaggaacactcgattggtaagggaagagctcctcaagtgagcatgcacacaacgtcagtaaacactgtgcacgcggccctcccaggtgctggcaggccactgtgcatgcagacagcccacgccaaggggagaatcaggggagaagggatgcagcccccgtcggaagcatgccagcataaaaaacccaagtcaaaggttacactgtgcactcacatctctctagttgcctgcttggccctcttccaagcatactttatttccttttgttcctgctttaaaactttttaattttaattaacgtttactcctgctctaaaacttgccttgagcgctctctctctctgccttatgtccctcagttgaattctttcttctaaggaaatcaaggaagcaagaattgaggttgctccagacccatgcggatttgctgctgctgacatactttggtgctgtgacttggatatgttccctagtggtaagacgcctctatgccttgccttctttggctggaggtgttcaacccctaaatgcagttttcttcgccctcttgctctcc

SEQ ID NO: 36366 - DNA, 866 bp, Homo sapiens
tgtgtgggaaaatagaaacataaagtaaaacaccttaaaagaaatgactttcaactctctctctaccttctctagattttctctgttcctaggtttggttggactctggggtttttaggagagacccactaagactggaagcagtatttgtacaaaaccatagctcttaataatccacaccagcataatttctcacttgaattcttttcctttttcctcttgcacttaggccagttgaaccggtttgcccagcttggaattattcataaatttttgattagcttttgagaaggcatttaaaaagcagtagcaagacggacggtggaaagactggacaagaccacctttaagtgtggagaatatccactgtccaaactctgcggcaatcagaggaacattggtagtgaaccattcaaaaaactcatgaatcagagatgatggctacagaagcacatttatttattcaaacatttctttagtggttttaaaaacaaagtttgttttctagttggagaacataccacaactatgactcagtcctgactcagagcttcctgaccagtcgacttttaggagagaaaaaaacaattcaggctggtgaaggcggagtcacattgatttggcttccacaaacctgattaaagcagccttcttccaacagaaagtgtgacttttcttcatcatttccttgtttactttctttcttttatttttttaaaaagtacatcccttttggaggaatttcaagaaagtttcaaagttgagccaagtatgctccttgtgcccccattcccacatctataaaatgatgaggattaaataatcaaatccatgaggtgctgagaacagtacctgggataaaacaa

SEQ ID NO: 36367 - DNA, 2081 bp, Homo sapiens
tggagagagttatctgagagcctttacaaaggccttaccctgtatgctgcgtcaaaggaaacgacaaataggaagaaaggttacactgaaaaccacgtgtctcccgttagaagtacattaccacctcgttttccgaaagttcactttcgatgtcaccttaacaatgcaaatatttatttccaaatactcaatttgacatccatgtatttacttccctcactttttttgaacagagaagggattccttcctctgggaccaactagtaaaagtaatttctccttaactttcatgtatggagcacactgtaaaaacaaaaacaaaaacaagaaactcagggccctaaaacaacagtccaaagcccagaggtgggtgggtttggatgtcaacaaagtggaccagaggaagcaaagcactgcatgccacggtcctgcagatgggggatcggtgagtctgatttcaggacgtttcgaaacaatccactcccactccgccgccctgggcggggcgggggggcggtgatggggggttctgccgtcgcgccgggtctccgcccgcagtcggaagagttgggagcaggcctcgggcggtagctcctcaaactcggaccgcatcccacctccaccccggcctcagtcccggcgctgagcaccactcgccagacgcaaaactgcaactgccaggcatcgcgcatctctcaaaggctccccgccagcccacctcttcctccagggccaccccaagtttcacccgacgctccaggtcaggggtccccgacctcccgccatttctccacgtagccgcagctcaggacaggaggagagagcctcaaggtgacacctcattttggccagtggatccgggttctgggtccgagttcccgggcaccaggagccaggcagcccgagctcccgggcccggcttcccatgagaggccccgtcgcctcacctggcagcggcacacgatgtcggcgtcctgcgccagcaggtccaccaccttccctttgccttcgtcgccccactgcgcaccgagcaccaccgtcacccggtttcctccgggccgcgccctggggcggccgcaatcgccgttgggcagggaggatgccgccgggtaggtctcggcgaacgccatggctccagtgacgcgaggagagcccgaaggagaggcggccggcgaggagtgagcgaactgaactgctctgcggccgccagccacatgcagaggaagaaggagccagaggccggccccgcccccgccccgccgggccgccaccctccagccagtccccgccccgctctccgccacagcccgctcaagggggtaccatgactgccccgcgcaggccggcctcggcagcaccgcccgcaggaagaggccctggtggcggcaacggccgccaccccggaccgaggccacgccccttccgcggcctggcgcgccactcccgtgcaaacctcgcgagcggaaaaggtcaggggcggggcttcgagagcgcttctccttcagcaccccgcctacccgctctacctctcgctttcaaactggagaggcgcggaagcgcgtgtggagcgtcggactacaaatcccagcatgcaacgctctgggctgcggcggtgtattctggggccactgtgtctgccatctgcaggtttgtctggatttgtctttattaaggaatgaatgtgtacaaaatacaaactgtggaatttcgcagtacaaacagcataaaatcggaacgtgtaagtgtagaattggaaattaaaagtccggaagtaacagagatggggacagggatcaaaaaagacaaaattcaaaagtaaggcaataagataaaggacatgagacctgaaatcaatagatcaaataaagtcctaatcctcattttacatagtagtaacaaaggctcagagaggaggagtggattacctatgtcgcatatagtacatatatgcagataccgtcatgcacttctttattttttaatccccacaaccatataaggtaggtgatcctctattatccttattttacaggatttaaaagctgggtaacttgccctagtgaggcttgaattggtacttc

SEQ ID NO: 36368 - DNA, 1680 bp, Homo sapiens
aggtcaggagttggagaccagcctgggcaagatggtgaaaccccgtctctactcaaaatacaaaaattagcagggccttgtggcgcacgcctgtaatcccagctactctggaggctgaagcaggagaatcgcttgaacgccggaggcggaggttgcagtgagccgagccagatcgcgccactgcactccagcctgggggacagagtgtgactctctcaaaaacaaacaacaacaaaaatcacttatggcgtgcctgctccctggaaagcactgccagatatgtatttgctattgcagtgtctatacgcagtcacatgaagatttgggctaaaagacacactaccttaaaagtttcacattctttctggcaaattggatttttctttttctttccttcctccttccttccttctttttttcttttaattggcaactcagatttttcgaagtgtttttgctatctcactgctggaaagcctggttctgcctttcctaaaatctcgtgtgcaggttcgcactccggctactttcaggcctctagggagcccaggtagcggcgcgcacgcgcacgcgcacacttctccctcgctggtcttcaggcccggcccgccctgtccagaggcgccgggacccaggcgcctgcagccgcccgccgggccgacgtcccacgggaatgcgcgaggcctggacgggagtggccgaggcggttgggcggaggcggagcaggcgccatgtcagcccgggaagtggccgtgctgctgctgtggctgagctgctatggctccgccctttggaggtagagagacgccagtcgcaggcgagcgactaggcggggattacccccggcggggcaggcgggagggtcctgctctccaccccatgcgcctcgggaccgctcgccctggccgaccactgcctcgtctcctggctccccaacaccagccccagtgtcccaccgctcccacccgagagttttccatgagcgagaggggacgcagttagcactttgctaccctgctccagctcctgcagtaaggtcgcagtaccttcatgctgctgtcctcagaacatctgagccccaatgaaatcttacttttttgtttgtttagggcgggggttgtctgtttgttttagagacggcctcttgctccgttgcccaggctgcaatgcagtggcgccatcatagctccctgaagcctgaaactcctgggcccaagcgctcctcgcacctcggcctcctaaatagctgtgacaacaggcacgcgccaccacgcttggctaaattaaaaaaaaaaattggtagagacagggtctcacaatattgcccaggctggtctcgaactcctggccttaagtgatcctcctgccggggcctcccaaagtgctgtaattacagactatgagctctgagccatgagctatcgcgccccggcccctgtgaattcttacattcctctcaccttgtgcagccttcttttgccagaggagaggatcgttgtggtccaagagtgagatataacagtgcccttttcattaaaaaatagcacatgtccatctgcacaccccacacacctatgggcctcttagatctgtttccaacaagaatacattaaatataagacataattaataaagcaaggatgaaaaggtattatcgttgttatctgggactaaattaat

SEQ ID NO: 36369 - DNA, 1868 bp, Homo sapiens
acgttacacctcatcccacaccagtaactcgtcttcctctatttccccaccactccccttgccaaataaaaggtgaggaagcatttggaaaacttagggtcatcactctggtcttttgccacatttcgctggcttcatcgagctcaacgcaacatgaactactaacagcagcagcacctgagatgagagggtgaatgaaggtaggagatttcaccgcccgcgggcggcaagggatctgccgcagctctaaagcactgcatgctgggagttgtagtctcccggggaggcctggtctggtaggaccggggcccccgcggcatgcagggagttgtagtcgaagggctgttgagactccgcctctgcacttatagtagcaagggggaatcctcactgcatgctgggaactgtagtcttcctgggtccccgttcctccaggacgcggaggcgccggagttgccgccattttaggtcccgaggtgcgccggccgagaaccagagcgcaggcgggctcagtcctggcgccgggccggccccgcccccggggcgcctggcgcccgccccttgctcaagccccgcctttccccacgtgtctgccgcctaggggaggtgcctcatccggagcgggccgccaacggtccggccccgtccgcacagacgctcctgtcggcggcgcccgggagcggctcggctgcccgatgcttccgccccggctgccgcgggccgggctgtacgcttagtgcccggctcaggccccctgaagcgcccgcgggggtgagagcggcctccggccccgcggagacggagcggcttgaggacgaggcggcggccgcggggaggaggatgggggctaaccagttagtggtgctcaacgtgtacgacatggtgagtgcggcccctggcggccccgagccctggcccaggccggcttcctctcgcccgtggggctcggaccccggccccaggcgcttcctgcctggcgtctccgcctccagcctagttctcgggggaagccgggggtgaaggagggagtattgttattttttaatcctcgcactcgtcgacgctccggtgaacccagtcagcccgagggttttggccaaagctcgggtgggcttgaacctctcccatccgctcagcttggacccgaccccggctctgggcccgaccccttggccgacgtgcagtgtcctttcggcaaagcttccgttgcgtttccaaccccacttgccggcccccggggctgccccgggacccccgtcccgaccgcctgcgctcccagctcctctgcttctgccgaactgtccgtctctctccatggctacgtcttcagaaactcccaagcccctctaagtccagaaggtcacagctttcgggtgcctgtgctagaatctcttcaaaggtgaacaggagccaacacaccctttccttgtgtgttaaaggcaacctcgttaaaatatgaatgaggctaacatttctcaagaaaatagcccagctgaattatttagagatcctggtggtgctcctttcctacactctgaagaccactttccaggtgatgcaacaggtgacgtgaccacgggagagggaagggaagaagttgtttattgtatcatctaactttggagtatggcaagcacgcagaatcgagtccaagaactggtttgcctgatttttgcagtgaaatgcccccagaaaaaagcacccggtagagaattgtcgttgcagttagatgcatgtttgggtgtgtttgcttgctttgttctgtagaatgggtttttgttctgtagactggattagtacctctgactgcagtgcttaaaattccttgtaagttgactgacaaatgaaaaattgcccgtcgttatttt

SEQ ID NO: 36370 - DNA, 433 bp, Homo sapiens
tctgtttttaagaggccaggtaattgagacccacccagatattccaggataatttcctgatattgaggtccataatttcaatgacatctgcaaagtctctttgctatgtaacatgttcacaggttctgggaacattctggggagtcattctgccacagtgccatctatgaaaggtgttttgtaaacccaaaaatgttcagttaaaaattgtttcatcatagcagtcactcgacttggcatagaataaatattgacctagtaacttaagctggaaaatttgaagtatttgaaaaatacaactcagatgccagtagggtccaagcgtattggtgactaaaaccccttcagacttgcagtggcataccgttccagtgtatatcagttccatggtcacatttataatggtggataaagttaacaaaacatttgaaac

SEQ ID NO: 36371 - DNA, 1074 bp, Homo sapiens
gcttaggatcgcttgaccccaggagtttgagtccagcccgggcaacatagttggttttttttttttttctcctgtctcaaaaaaaaggcattgcagagattgaaaaccgtttcccaccttctcccctgcagtgtttaggaagagacaatccgcccccgattcagcgcttcccagcccgcagcaactgcgcagcggggggaacccagggctccgcggcacccgcaggctttagttactgctccgaggccctcggaccaaagagaggctgcgaggaggacgcggctcgtttagctcgctgcgaacctcaagataacccttggtttccatgcacatccccccaacattgcatgtgctttcattcctacggtgctggggttactttcatttattgcttttgttgaccaaaaagaaaaaaacaatcctgagcgtgcacagggggcgcaacgggggaccggctcctcgtggctgaccggcggcggggctggcgcgcgggggcggcctgcgcgggccgcccggggacgctgctctggggtccggccgcggcctcgtggccgccctgcgcgcggtccagcaccagcagcgggatctcctccagccggtccggccgctccttgcgccgcaggtagcgccgcctccacgtcgccagcctctgaagcagcctctgcaggctcgaggggccccacaggccgcgctccggggcctccttgcctgcgcgcgcgtgagcttgcctgagcttcttcctgcgcgggccgcggaacagccgccgccagcaccagcacccagagcaggagccgccgtcgccggccaccgcgcgccgcccgaccgcctccggatccccgcgcggaggggggccccgctccaggcgcgccgccttctccagcagctcgtgctgcgcgccgccgcgccgggggccaccaaaccggggggccgccatggcccgcgcaggcctcttctcggagcgcggggcccacatctcgggaaccgtcgggctggacaacaacgctgccgcctccaggactccaaagggcccctcgcgtcctctcccgggaatgtacccacaggccccctctacgc

SEQ ID NO: 36372 - DNA, 666 bp, Homo sapiens
ggcgggcgcctgtaatcccagctattcaggaggctgagagaggagaatctcttgaaccctggaaggggaggttgcagtgaaccgagatggtgccactgtactccagcctggtcaacagaatgagacaccatcttgataaaaaaaattaaaaaagaaaaaattgtgataacctaaaaggatttggcactcagattgtttagcatctgtctaaattcttgttccacttacgtaaccaagactggatactgtccatgatgaattatcagtgtgtttacacaagaaaggacacagaattccactcaactgatccatactcaaagagaagaccttggccttgcattcagagatcagcaaaaacaatattcactttatgttttaggttagaatatttgatattctaacctaatatggctaataggttttaatatctaatggctaatttgatattctaacctaataaggctggtcttgaactccagacctcaggttatctgcctgccttggcctcccaaagtactggattacaggcgtgagccacggcacccagccaggatctcttttaaagtaagtacaactacaatagaagccctcttctcaatgtgaccagcatcgatgattggtgagtgaatgaagtcaaagtgggaatttaaacagacagagtctcac

SEQ ID NO: 36373 - DNA, 777 bp, Homo sapiens
tgttgctgtcactccaatccacccacatagctcccttcccgcgatgatgacaacttcttgtatccaatgggcaacactgtgatgcccccacctgaccacccttcaaaggaggatttgtcgtcccagctgcttgagaaccatggaactctgggttctgccagcccaaggtgaaaattccccaagggaaggatggatgctggacacggtcaccatatgtccaccagttagaatcaactcctagagatgggatttccggtcaaatggttagatatgcatggaaatcggactttagtttcagcatttggccccagtctgctaactgggcttggtttagtcttgacctttggaaggccaaagagcctacttccatgttatttatgtttatggcctccacgaactgtgactgatcaatgattctgtgatcactcttctctcttactagcataaaaatgtgggccaggcacggtgactcattcctgtaatcccatcactttgggaggccgagatgggtggatcacctgaggtcaggagttaaagatcagcctgaccaacttggtgaaaccccgtctctactaaaaatacaaacattagctgggcatggtggcacatgcctgtaatcccagctactcaggaggctgagacaagagaattgcttgaacctgggaggcagaggttgcagtgagccaagatcgcaccactgcactccaggctgggtgacagagcgagactccatctcaaaaaaaataaaaaattttaaaaagtcagtaatactcaaag

SEQ ID NO: 36374 - DNA, 513 bp, Homo sapiens
tacattcatttttgtatgattttctgtatttatgttttattttccaaaaaaaaaaagctttaaaagagtataaagaaagtagatggcagaaatttgtggaatcttcccccagcaacataaaaacgcggtgggtttttgtaacttggtttttacactttacaattaatattgtaatgagaaatactcgtgtggaccactagggcgcacaatttgttgcccgcagcatctgcggcactggcactgatgaaagggggatgctaaatgcttcagtaacgccacctgagtctcgggatgaagcaacattattcatcgccctttgatcatgagctacatatgtgagtgccaatgctggcgaatcgtatttggaaagtcgggtccaacatgtgatgtgtacatacagggtatacactgaaaataccgtagttttatcctcttttaagataagcttcaatttatttgagttattagaacaaagcctcataaaccacggtaaaaagaaccttaaaacttttt

SEQ ID NO: 36375 - DNA, 3658 bp, Homo sapiens
accctttctctactaaaaatacaaaaattagccgggtgtggtggcaggcgcctgtaatcccagctgctactcaggaagctgaggcaggagaatcacttgaacccgggaggcagaggttgcagtgagctgagattgcgccactgcactccagcctgagcgacaaagtgagactctgtctcaaaaaaaataaaaaataaaaaataaatcatccttatgaaaatacttttcaaagacaaatgaaatagaccccaacaatgtctactctagcaaattttcaaagtcataataaaaataaaataggatgactcggtggtgttttagctggtacttttccagttttccttttacaacataatcaacaatgacttcaaaaggatttccccctccttcatggaatattactaccttcaacacggcctttcagatccggagttcaaagcatagttagcattataatttcagcagagaatccagaattggcaggatatcaccagtagggtgactttttttcttttccctagcaaacagtagagcagtatgtagtttctccccccgcccagacggagtttcgctctttctcccaggctggagtacagtggcacgatctcggctccctgcaacctccgccttccgttttcaagctattctccttcctcaggctgccgagtagctgggattacaggcgccccccaccacgccaggctaatttttgtatttttagtagaggcgaggtttcaccaagttgaccaggctggtcccgaactcctgacctcgtgatccgcccgcctcagcccccaaagtgttgggattacaggcgtgagcctccgcgcccggcacagtatgtagtttctaactacaatttcaaaaacaaaaacaaaaaaaccccccccgcccccgcaaaaaaaaacctcaaaaaaaaaaatgtgacacataaatacacaaccttaactgtgtattttactgggattgtagaaaggtatcaaatgggcatgcaagtaaggtccttacggagtaagaaaacgcccaatgaacagtacttaatatgaattcgacatcgttaacactgagcgcttgctgtgtgccagcgcgcagcataattcgaagcagcatgactttgcacaatgacatattctacaagtccagtttcctaaggagtgcccttaggttacatataacctaaacgtgaaatgtagaagtacataaaggaggcataaagttaaaggggaaaaattataaatactagaaaaaattgcattgtattattttgatggctgaaaaatgggctcgaccctgcatgcacgcgttctccattgagctcgacaatatgcagtattttgtttcacgttatgtcgcagtcttagggaggagtgaaacgtggaacacgacttcacatcaaaaatgcacgttgcagaggcatttttccttcggggacgccggaagacttcgccacacgcgcgccctctccgcggacaccaacgtgctgacgcatgttcattagcgagctgctccctccattttgtccccagtctcctttaggcgaactgcgcggttctatgttaaagccacttagtaatgaaactataaaagggaggaagtggggtgggcgtgggagccccgtttgcgcaaggcaggcgcgggggactaaatggctgctggtgcagagtggggctgccccggcaccaagggctcgtcccgtggccggaaggacaaaggacacttaggggacgagggccgccgagccagcgcggagcgccttccgggtcggtgggctggggcgggctgggggctggggccgggccgacccccgcggtggggcccaccccgcaggacaaagcagcggccccgcccctcggcgcgcgcccgaggctcgtgcgtgtgagcacgcgcgccggagacggttagaaatggcggttggggcggagcagggggctggcgcgggaagcggggctgtctggctcggttacgcccccacctcgccaggaatctaggagtcggtttgttttccgaacccatctccttccgctctcccgcccctgcaggctgtgtgccgagcttggaagaaagtgtgacccgttcgacggaacaaaggacatgacagcccggccccgtgcggccactgcggagcgttaggaacattccctaaaatggcggccggcgcgtcggaacagggcgggaggcggcggcgcgtgggggcgggacggggaggggcgcggccagccgggcttctgcttccgcgaccccggcggtgcagggcgggtggagtcgcggagtagtcctcatggccgccccgccggagcccggtgagcccgaggagaggaaggtaacctgggggtcggcggggcgcgcgccgcgggtgggcggtgggtaaggacgttctccgcggagctcctaggcccggagcacgtgtcactggcttctctgccacccatgggcttgaaactattttaactgttcctagtccttatcccaagcctccaacattttaatctaagtggccgggacaaaattgaccaaaactagggggaggaggggaccagtagtactaatgacttactacaggtcattatgaaataagctaacaatactgaatctttggcgagaaaattttgctgctaagggcactgcactgtaatttgttagtaaaggctaatagtagagattaaagctccgttgaggacaggtgccttgtctttaacacgttgtattcatcacatttaacataggagtaattgctgagggatgacttgattgtactacgatgagatgaagggttaagatttcttccccatcaccagtagcctccctagctggtgtccctgtctccatactctcctgaatccaccttccactattgtccgctggccctttccagcctgtaaactggacagttttcattcctctgcctaacatccagtcgtagcagcccatcctatctctttaaggataaaacccaaattcttggtatagtaaagctaaaccaagcgctctccctggaagggctcctgtgtttcaccaaagctgacttacgtactttccccatcttcccaggcatcttgtacgtcgttacatttatcatattggaaggtaataaatgatcttgttttcctcttttcctgggctccttattaagagcagggaacctaatttatatcctcagggcagaacaggtattcagaaaagaataatgcaagaggaaaaaagtttaatataaactagggagatcgtaacattggctaatcacgagcaaatatttatagaagacccactgtgtgctaaatggctcctaatatatacttaagatattctcccagcttggaaattctgctcacttcttgctcttgcttgcttctctggtgggcttccatccaaatttggccatgacatcagatcatatggttaatattaacaaatattgtataaattgttttcatacttaatatccaacaggttgtcagtttacgtactactggtgccttatctgtttttactgtcccatacactgcccatctggaataagcttagtgtttaaaaaaaaaaaaagatctttgcatacacacagtaaatcctagattcagttttgtgataaacactggaatcctgaatgggacttttggtaggagataactgctgtttttaaaggtcataaaggtggtttaat

SEQ ID NO: 36376 - DNA, 3659 bp, Homo sapiens
cagttattgaaaaagtaatattacaatcttttaaaatagggaatatacttgtgtgctaatgggagaagtcattagtaaatatttaactagcccaaatagctcacttaatataattccacaaaaaaatgaattactttattgtagaagcctgtaaggctaaattataggtagtgttacaagtttccgttagctagtcaaaaactggcattaattttacatttcctaagaatgagaactttcaagtcataaaaatacgaaactcctagagcctgtaaaataatccacttaatacaactgatgacgtgctaaatattaaactactaggttctgaatgtaaaccattatcttcctgcttttaaaaaaactaacccaagttttgctgcacttaagcattaagacttctaaaaaaaaaaaaaaaaaaaccaccatcaccgcatttcataattggggagaaacagcttcacttacaagtatcaagacaaaccactgtgtcatcgaagtgttcatcttcttcttcaacaggtggctgaggagatttggctctgaaagacagaattgtctcctgatacagctttccgatcaacgaacgaataagggatgagtaaaactaggtgagcatcctatacctgctatacttgttctcttcaatgtactcaaaatatccacggccatgatcttctcgtggtcttttaacacccctctttttatctccgcctttctgttctgttttgccgtcccctaaaacacacacgagccccataaaggccaagcctctaaacaacaaaaaaacgcttttccgttccgagaaccaaagcagctcgactttatcctgctttttaactgaggttttaaccgaggactcaaatgtgaattcaaagaacaatcaactacgaattcgattggcgctagtgacgcagtctaaagacattactaattttgccagtctcctcgatgattcgagaaagccaaagaaaaactgcgcggcccaggcccgaagcccacgtgtatcccgaagagagcgcagagagggggaggggccgagcccggcgcggcggcgctcccctcccccgcgggcccgcgctccccgcggccgcattgtactgatcttccgccccccgccccgccccgcccggctcctcccgccggaagtgacgtcacgccgagcccctgcgctccttgcacaatacagcggcgaggagccgccaaagcgcgcccgccccgggacctggggcctctcccctccccccgagacatgtgcccgcaccgcgcgcacgcagcgcgacggcgccaccgcgggccgaccgggctccctcccgccgcccgcccgcggctcctccccctacagcggcagctgcagctccccccggctctcgagccacataatggaggcgctgccaccgccgacacacacacacacacacacacacacgcgcgcgcgcacacacacgccccgagcccgaggcctctcggctaatctgggattccccgcgccccctcccccaccctcaccgcggcgccctcccgcccggggctccctccccctgcggggctccggcaggcctggggcacggtccccaccccgcgcgggcctcccgccgcgcgcaacgtacaacgcagcactcacccgccgccggagccccggggcgaccgccgcctccgccgccttccgccttcttcttacctcccgcctgctgctggccctgcctcgccccgggcggcgccaccgtcaccgcgaacagcgaggtggggccgctgctcttccccgcggcctccttggcggccccgcgctgctgttggggctgttgctgctgcgtcgccggcggttgaggctgctgctccccgtgcccgttctcgtcgcccgcgccttcctcttcgtccccgagctcatcttccccttcctggaaaccctgatcgtcgccgttctcgtcttccgaggcggcctcctcctcctccatcgggcccgagtcggccgcccccgcggccccgttctcctctcctagctccatctggtcgccgtccagagcggagattccttcctcctcctcttcctcttcctcctcctcttcatcgccgccggccgcggcctcctgctcgaggcctgctcccgagcgcccagcggaatccccgcccaggtctaggctgccgttcccgggctccatggcggggcggcccccggcctcctcgtcgtccagcgcagcctggagtcgctccatgagctcggccttgagacccttgtcagaaaggcgtcgcttcttgagctcctctttcagctccgacaccttcagcttttttacattaacaggcgaggaactcatggtgagggccccgattcaccgctaggcgctgcctcaaactcggctccgctcactcggccactggtggcggctgctgcggctgctcctcggcccgggcggcggctgcggctgcggctggagatgggttcgtgctgcagagcggatccgcctggtgtcgaacggcgccaattcctttcaccgagttcgcgagggagacgcggagactcgcctggcgcgagcgagcacgcaacgtcctctcgcaggagcggcgccgcgcacgtaatataggcgccccgccccctgcgctgacgggagcactgcgcaggaggaaagccggagcgcgcccgcgctcggccccgcccattaccgtacttacctccccgcccccacgccgaacccgggccgagagcgcggtggaggccgcgcagtgcgcttccaattgggactgagcaaatggaggaaaaggaaaccgcctttcagttcaaccgactcactgcatgatatattggcctttctgggtctttggtggctatactcgtttggcttttctccttcccagcttggaggctgctttatccaaatgctttcttcagtcctcaacttggcgtttcaacccgaatccgccttttcttccatcttagatctgccttcttatgtgtttctccagctcttcgtttaaaactccttcaaatcgtatttcagttttgactggtatagcatacattggcaactgttacacgcagcggctcttttcctcataataccgtatttggtttaatttgtgtaagtcctgccttgcgaattggattttaagttcgagaagggcaagggcagaaccgttcttttgtctgttccacaccccgggtgcggggcctgggaagtagaggctttgcttactactccatactgcaaaccttagtgtacctgcctttgcagggcagctattctcatgctcttaataaccctgaataaacctcagaattgcatttccaagttttctgtagctaccacaaagacggacctccagtaacacttgttctgtccactttaggacctggtcatcagctacgaagtcccagtagctaaccgtgagggtgagacccaactaggtctttgattataggcccacttgattctcttcctattcctgtagaaatactcttgaccaaattattctgaaacttaaagtttacgaaaaatcaagggctgtgattttgtaaaaagaaaaatggactatcgctcttgaaatccgttattttatatgttagaagtttactttttctctttaaagaaaagatgtgatgtctcgaagttttagatagggaagtcagaatttagattcgtgatagaagttaacattttaaa

SEQ ID NO: 36377 - DNA, 3566 bp, Homo sapiens
ggaaactgtaaacagcacacgaaaaagcatagtgaatgaataggaagcctgagaccaaacttagggtttcctacacttatttcaaagcccttcattatctatatggaaagggggagtctttaaacacaaatatttagatcatattgactgagatttagatataaatgaatgctaataattacttttcgttattttggggtgttaaacatttactgtacaagattgtattcgttttaagtatcttctaacatgagccattttgtaatgattcagttgtttatattcaatttcaagtagaatgctgatcacagcgccaaatgggtatcttctacagaaaaagttattttaataaagaaaaatatagtcagttttaggatttcctgagagattatagaaacaataaaagcattaaaactgttaagtcattaaatacgagtaccttgtattttgaaggctcttaaaatttagtttataaattgcttttacataacatatgcactgaaataccacttaagattagttttgaaaataggtgttcgtttcaaccacatcattaggtattttattcaaagctctttataaaaagagctttactatgttccagtatagtaaacttatccagaaaataagacaaaaatttaacttcatgctatagctgcaaagttttcggaaagcgggatttaaaacttccattgtaactttaactagcggtcatgtcaaatttcacaactaagaacattttaacgcatgtaatactgagcacaacatgggcacgtttttgttgctatgagaaccttctattttgtattagacattgcagccttgacgacgcaatgtttgtgctattttgcgcatgttttcctgcagctattcctctcctctagcaatagtcgaatggctctggtttcctcttgcgcccggcccagtttttccgttttagcttcggttgtcataggctgtgctgtcgctttctctgggaaaggacggtgaagactggacgggagaaaccgggagggcaggcgcggccgttctgcagcagccgggccgcttcccggcgggaggcgggctgcgaatgggaagcgggaggaggaggccgggccgcgggctggttctatcacccccttgggagcccagctcttcacctagctctccggcgcttttcaaaatctgcagttaacaacaaaaatcgagcaacgccacgtcgcacaaacaggacaggagggggcgaggggtgtgtgcgcgcgcgtgctgtccccaaatggatgagaaataagggaaaggaggggttggggaccgtgtgatgaagcaacatgctaggcccgggacaagtccggctccggcctcgggtctggagggacaaggccgggggccgggtggcagacggggcctctggtcttcccccagcgcgagggtcgtggcgcgaaacggggacagggcgcgcgctcggagcctcctccccgccccgccccgcccaagggtcttcctcccccgggattcagagcggcccctcctccaggccaggctcgccgcggggcgctgagcaggccgggacaccgcggccgaggttatcgttaggcatctcccaggcgaccggctccgcagcaagatggcggacgagaaggacagggaaggtaaggtaggggagccggggagccgctgccctcgccgcccgccgcgaccccgggctgcacggggaagcgccgggtggggtgggccctcgtccatctggagttcccacccgcagggaaagggcggcctgaggagggggccacccggcagcagcagtcgccctgcccccgtccccgtagcccgcccggcccgccgctccgccccgccccgccccgcctctctcccccgccccgccccgcctctctcccctcttccctccctcttctctctcccctcctcccgccttcttctttctcctcccgccctcttcaccctcttcccctcctcccgccccgtcctccttccccctccctcggaggccgggccttgcatcctgcgcgggctgcgccggaggcgccggcagggggtgctgataatggcgtcgttgttcacggtcgcggggaagccgccgccgcctccacactctcgcctggggtctcggtgccgcaggcgccacgcccgtagctgtccaggctgtgggccccggggggtggcctgggtgaggaggagttctggccgcctgaatctgacgggatcctctgtttgcgccgaaaccccgcgctggcgcagcctgatggcgttcgcggccaccattttgcctccttaatgaggacgcaggaggacggtctggaggtcacagccgctgcctccgagcttcccggtcctccgaaatgcctgccccgccgccggctagcgccgcgcaattggcctagtgtcttgtcttaaaaaaaaaaaaagacacacacccaaacagcaattttaataacgacgaaaaaccaaaacctggttgagatcttggaaccgctgtgcgccggccgggcctctcccaggggaccacccagccccgcgcggtggccgcctgcagaggcgggactgcgcttcgaggcttaaggtcgccagttcggaggcatcgatgtgttgtctgtgcggagaagccaaaaagtgattacgtttatttgcaagaccgttcatgttgttttcagttcatggtatgattaaaacccgatcctttgttaccatgcccttaggtactaaaaaataattgtgtttgatagttggcagtcacccaaaaatatccaaaaagccatgaaacagtaaaggtaaacaagtaggaagtgaaaataatattcgtcctttgttttctttctggagtgctcaaaacaccctctcaaaccatttttctcagcatagaaccaagtgtggtcaggttaacagctaatatttacaagggaagaaacgaaccctgagatatttagtcacttgttccggtgatcacagaaaatcggcgaagaaacacatgaaactgccaacgatctctctattgataacaaggataccgtgatttttatgtaatattaatctgagaagccaggattattttgtaggtattagctttacgaagatgcccttacatacaaagaaaaggataattttaaaactttcccagaaaaatggatggcttatttttgttctttaccaaaaaaaaaaaaaaaaaagccattaggagataaactagcaaggtaattatggatatttattttcttaaaaaagacttggttaggtcagcatgagaaaaaacgcactggagtatggtacaaatacagtatttctcgttttttaaaaactgagagctttcctgatttttcagcttttgaacaatttttttccatttaaagtaaattcagagaaacaattttgtcgataactcatagaagtaatgactgttaaaagctggatgccattcattcagaatacatatattcaatgccattatgtagataaggcattctacttagaactttgaaagatacgaaaatgaaagacattgtctttgcttccaaggaaggtgagatgagtaagggagatgagaaatttacaaatgggaggaaatagttaac

SEQ ID NO: 36378 - DNA, 696 bp, Homo sapiens
tgcgatcatagctcactgtaaccttgaactccttgggctcaagcgattttcccacctcaccttcccgagtagcaagaactacaggtatgtgccactgtgcctcactatttttaaatttttttgtagagatgaggtctctctgtgttgctcaggctggccttaagtgattgtgatcctaccacctcagtctcccaaagtgtggatgacaggcatgagacaccgagcccacccatctcttgtattttattatgcgcaactggaaggaaccaggaagcaccttcagtgcttttcctggaaatccccttatctagattacccagtttattttctactttccatgttgatacaggtgacaatgttgcaaaatttctgctattgcataaaaaggatctctctttgcagtttccaatgtgattttcctcactttcccttaagctctaacctagagcctacggaagggccagtactgcttggctgcaaagcctctcccacatttttaggcatgtgttacgccagctccccgttttcccgtaccatacctctagatgttatctagtactattacctattagtcatctattttgtggtaacaaattacccccaaaacttagtggcttaagacaataaacatttattttttcacacagtttcttagggtcaggaatctagaagttgtttaattgggtggttctggct

SEQ ID NO: 36379 - DNA, 874 bp, Homo sapiens
tcaggaagcatatcttagcagtggagacacgatctcttgattagagggaccttggataaaagaggccttttttgaacagaatagctctgctgaagaaagagatttcgtcattattttaccttcatttcatggcttttccaaaataaggtacatgtgtgaaaaatgccctccgtaagggcgaggtctttattttgttctctgctgttctgtaaacgataccagcacatcatagggttcaaatatttgttaaatgaatgaaaacattttcagatcctgctttgtccttagacatttttggattgctttaaatgttctcttatccttagcataatattagctatttaatagagcaggtaaaatgttttgcctatttttttttgtctcttataattgtgtgaaatattctgaatctggtcttcactttggtgtttttgaccttaggctgcccttaaactgaagtcacagcctagctcaatggcactggctcccccttgtgtcaggaacttgatactacacccactaaatgccagcctgccaagaaccaagcttccccgggtcaaacattttaagtggtccaaatgctatacataattaaatgatgacaccacgattgggccaccttattggggctcatttgctccaaatagtcttactcctatgcccactactatatatatagcacaggtacagaaaaacatttttaatacttgtaaccataaaggcttttggagttagtttgtacttcttatcaatataagacatctacgttgacaaaagaaatcgaatgttgactgagtgcggtggctcacgcctgcaataccagcactttgggagacctaggcgggcggatcacttgaagtcaggagtttgagat

SEQ ID NO: 36380 - DNA, 764 bp, Homo sapiens
agtaagaggaaaagcttgtttttcctgaattgatgctcacattaaaaaaagatactgattactgccttaaagtgtttctgcacaaagctggaattagtgttagggaaaagcaagctggaagtgtggaagaggtaagaactagaggacgaatttacagcgaaatcatcatcatcacatgctcaggatagtaagtgaagcaataatgaaaaatacctccgaaggtcagaaaaggaggatctctagagtctagtccctttatggtttgtttgtatgttttaatctctatcaggagttagcaaatcatggcccctggccaaatcctgcccaccgcctgtgcatgtaaataaagtttcactgaaacacagctaaactcatttatttgtatattatctatggttgtttcctgactacaagggcagagttcagtagttgccacagagacctacagcttggaaagcttaagatatttaccatctggcctttgcagaaaaaggttgccaactcctgatctatgggcttctgtgccaaagtagaacaaataccacatctagtactagaagatctgagttcaaactccacagctaccacttatagccatgtggccttcaatgagccacttaatccttcaaagcttcgtttcacatctgcaaaaggagtataataacatgaaaatgtttttatgaggattaaatttaataaccgaggaatcaactgttacttggtgggcatgcagtacatacttgagtttgcttgcactgctggtg

SEQ ID NO: 36381 - DNA, 955 bp, Homo sapiens
aatacaaaaattagctgggtgtggtggcgggtgcctgtaatcccagccactcgggaggctgaggcaggagaatcgctggaacccgggaggcggaggttgcagtgagccaagattgcgccattgcactccagcctgggtgacaagagtgaaactctgtctcaacacaaacaaaacaaaaaacaaacaaaaaggaattcatatgacatgggaactagaactatttccaaacagttgtaatccgattccaaagaaaccctgcacttctggtttcctgatgatgtcacccacataaatggctacgtcaaggagtcggtcctgagagcagcgaggcaggagtgaggtcgagtgggcaggcgtgagagccgagcacaggggcagaaaggaagactctgcacccagaaagcggaaaggaggcaagtgggggacaggggtggggtcactggcccaggcactatgggactgcacatcgcacacaacactaacttcccttaataaacactaagttaatctttacaactcttcagcaaggccgtgcaccccgggtccttctgttctgatcggaggacctcgcctcttattcagcagagagcgtagaacctttggcctctaacaccgccaaatctccctttcacagaccaactggcatctaagagctctaggggcagaagtgccgctgtggggcactgatggggcagggactgtggcgcaggtcacctcctgcctttgctgtctgacgcagcctcccagggctgcttgcatttggcaggggctcctcctccacgctgccctctcctggttctcagtcctgctcggtttccaggcaatcacagccccctgtgcaccactccaggcaccgggctcctaaagcagcccctttttcagagctaccctttagttggtgacactctccactaccaaccccagcccagcccagattccctccaagcacagttgt

SEQ ID NO: 36382 - DNA, 2159 bp, Homo sapiens
ctaacccatgctgatagaaatcagaacagtagtttcttatgagaggtggggattgcctgggaaaaggtagataaccttcaagagggacaggaatttatagatgttgatcgaggtggtggcctacgcagagtacacgtttgtcaaaattcatagaacttaacaattaaaatgtgtgcgtttcatcttatgtatatacattttacataaacatcaatttttgaaagcttcttaaaaactcttgcagagcctccggttataaactttaatcaacagagggcgctcggagcccaccaaacacgctttgggcccccagctacttagaaatgcaaatcagagcagctctgggctcccccgtctccgaggtggatcgcgcagctccccaacactccccctcgacaccccaccttccccacccgcggcctcgccggctcgtttcaccacacgctgctttttggctgataagcggctcgtggccaatggcgatgatgtgtttcgcggcacctacgcgaaatacagatgcgggtgggagctggcgcgtgctgcctggaggtgtacctgccccctaaggtcccctattgataggatcgcttttaaattggaagtgggaacgtaacggaaacgtccactctgttcttgccatcttccttttgacctttttacctcgctttggtggctgtgaaatattcccgcgcaggagctggagcggggaggagtggggcagagcacgggaggcacagaagaaattgtccccgaggaaggcagagtgggggcgtggccccaggcttccagaaccccgaacctttgtcttcttgccccctcctgcgtcgtccacagctcagaaggaagtcagcgaccagaaagccctgaacgtccttcgcgccctcgcccacccccgggctgggtctccccgcgggcgcggagatgccgttacaccccacgtgatccctgcgcccggccagtccttccagaggcgtctcgcggggtgttaattaaaggtcacaacaaaacagacctgctggctcaccagaagaaatgtcctcccgtgaaatgaaaaatgacaccccagagcagccacgtgtggagcctggcatacgccggcttcctgcgctcctgggcgctgcgccgggggactggggcggggggcgatcggagagggagcgatgacggggtgctccggagaccccgcggggcccaggcgcaggaagaaacgggcggcggggggcgaggggcccgatcccacgcaaggagaggccaaggccagctcgcgccacaccccctctccaggccagagtcgtccgcgtgcagcgcggcgaagccctcagtttcccctgcccggcagcggcccgctgggtcaccaggctcacctgtcccagccccgggcggcttagtccatcacagaccggggctcgggcgggcgggggaccaagggccctagtcctgcggctgcggtcggggagggtggccccccggccggcccggggtcggtagggcaattccagaaaaggtttgcccggcagctctccgagaacaaagggcggggggaggacccggcatgtttgtggacttgtttgtgactcaatcccttttgcacggcgtttcacagacagacctgcaagccttgtcaggaagagaaagaacttgggggcgggggaggctggggcaccgcatttccgtccagccacgctcgctcgcgcggcccccgggctccaggctcgcgcagcggcgtttcattagagccccgggcccgggccgcgcgccaggaacttccccgcacgcggcgagatcgacgatcccccgcccccagccccagcccggctccaggcctcgcaatgtcaggcacgagcgccgccacataaaatggatcccggccggcgcggcgagggcggcaggttcccgaggctcctccgcgctgcgcccgggcgcacacgcgcgctgtgaccgccgaccgctcccgggccacgcggagccgcccctctcccggccctcgcgcaactgtcaggcgaaacgggccggcggatattggctcggcgacacgccgaggctcctccccgagtctggatctttatattttgggagaatttctttgaactcagttaccaagctcggtgaaggagacaagttcccacagctgactcggctcggctctcccaccttcccgg

SEQ ID NO: 36383 - DNA, 728 bp, Homo sapiens
gtacatgaagccccagcgtccagaggtgtaagacagagccccttctaggagctgctgtccatcccactgaaaggcaggtctgacacagaagagacaaacaaccatactgggcctctggggccccgtgagatgtgaacttcaggtaccagagtgcatgcgggaggaggcctgggtgccctggggacccaaagcaggagctcatttctgacctgcctctctcaccaagcttcctttgctgaatgccgtgggcaaacagtggtgttggtattggagcaggatcaaagctcattcctggctaacctgcaaaaatgagcaggtaaacaaatgggatccataaaatagagactaaaatgaaagtttgtcttactgtgattagcaactggcccctttccaaattccacctgctctgcgtggagctgtggcgtctcattccaagagccttctcacagcatctgacccgggcctggggtaacagtacactggggtttgccaaggataaccatagcaaggcagctacaggagcacagcatggtgggggggcatgaaatcagaacaagcaggacccacgggcgggggtgagagcaagtggctgggaggcagaggcagaagtgatggctgctgactcaccgtgtgtctgccaggttgcttaacccatctccgctccggttttcccatgcgtgagccctctgcagtgtgtggcatgctgatcggcctctggcatgaagagt

SEQ ID NO: 36384 - DNA, 1526 bp, Homo sapiens
cattttttaggatgtaactctgaaaaaaataaaaagtgagaaaaagcaaacataaagtaaactggcttaaaagtagggttcagtttgttttgttttgtttttgagacagagtctcgctctgtcacccaggctggagtgcagtggtgtgatctcggctcactgcaagctccgcctcctgggttcaagcaattctctgcctcagcatcctgagtagctgggattataggcgcctgacaccacgtctggctaattttttgtatttttagtacagacagggtttcaccatcttggccaggctgatcttgaactcctgacctcatgatacaccagccttgtcctcccaaagtgccgggatcacaggcatgagccaccgtgcctggccaagtagggttcagtttttaaaaataaacagcagcaacaacaaaaaccccacatgtactttcaaaagtatgttctgtgattactcttgtgcctggttcttcaaacaaacacaggacttttcacaaatgaagcctgcatgttcaatgctgaataagattaaaacgtgtttagctcattgtacctacagaaacacaacagaacttcagcaagattttcaacaatgattattttaattttaaaaaggattttgtgtaactttgtttaaatctgataatcctctttacttcaaaaaattaaagaagaaagtgaaagtaatacttggaagcaaaatgaaactaacacgaagtgtatcaggtacttttccacattaactcactgatgtaattaaattacaaatgctcagcgtcctaaggggtcaacactgtaattaggaaaagtgtatttctccttagtccttataccatttgccctggtataaatgcttgtagtaaacattgttactctttctcagacaagcgttttaaagatgctagttaaaatgtagttggtagctagtttcctgagtcaatatggcaattataccaataaaattgcagatcaagatgagccagaggcagtaaggaacaggccaaagaaaaacaggaagaaaaggggacgataaagaaagtggtaggccaggtgtggtggctcacacacctgtaatcttagcactttgggagactgaggcgggcagattacttgagcctagatgtttgagaccagcctgggcaacatggtgaaaccctgtctctacagaaaatgctaaaacattagccgagcatgctggcaggcaccagcagtcacagctactcaggaagctgaggtggaaggctcgcttgagcccccaggaagcaggggttgcagtgagccaatatagcaccactgcagccactgtccagccttggtgacacagcaagactgtcgcaaattaaattttaaaacagtggtagtttattccaaattcatgtgctaatcaaatcatatctctgtgccactctcacattcagccctttcttcccgtttccactgcaggtatttgtctcctgtattcattatctcttacttgcaactttccaagtcaatctctctggtccctgtctttttcc

SEQ ID NO: 36385 - DNA, 2178 bp, Homo sapiens
caaaaatttatttttaaaaaaagtttaaatactttgcacagtacctaaatttctttgtaccgctctctataaacaaatcatgtggaaaatattttctaaatgctcaggtctgtcaagtttgctagacataatctaatcccttttgtatcttctctcagtaactcaagactttgtaaagctgcaggacagttaagacaacagggacccaggggacagagccttcacaatcagtcacagcagccaccaaacccctggcctgagctatacagaggaaggggtttttatcttcttccttcacaatgcctgaatactctcaaggaatcctccataaataattcattagcagcaaaaagaatacagtctaatcaataaggagtaatggcgaaactcacagcaggttcaggggactgattgagtgttacattaatgtctgattaagcttcctgggaaattttaattgttcatagaccaaagacctaaaattaaccttttaaccttctgttataaagggtctttctcaatggaccaaaaaatgtttataaaatatatctaatgaaaatgggaggctaacatgagtatttcaatacatagattttctcaagaccacacagaaaaacagaacttggttgacttcattctacctaaaacattcctaatccaatcatattgtctaatatttaatgattattttccagtgggtgttataagagctttataacacactttcatttctcaactatcaattccctattttccaggaaaggaatttagcaaactctgcactctttttctctttttctagtaattccctttgtcaattcacagcaaaacaaactgcatgccataagcattcaagaagctgagtttgaaacacatttctttaacaaaaatgaaaaattctgattttatagttacacatgtagaattttaaattaaaaattgttgatatgtgctaatattacacagaaaatccaagatggttaacaatggtgggttatagaaggccttaatgacaggctatttctccaattttgttttgttcaagctaatgttaaaagaattgaatatttcatcacactctgagaagacagcaaagaatcctgctggaaaggaaagagcagctgatctaagcttttaaatatgccatggatagtccgcacaaagatatgaatcacctgtgtttcactctacaatgacacagctctccctttcattaagatatgaatcacccatatttcactctgcaatgacacagttctccctttcatcaagatattcttttcatcatgtattggttgatcgaagacaaaacataagaatggacaaatcattctttagttacataagaatattatctaaaccaagatctctttcaaaaggatcatgaagaatgcacatatatacaaatgagaagacttgccagtaatggtcaatgaggtacaagtgccaggtttctgctgaaatgcttggtaaaacaggtaaaaggatgatgggttctggggatcaggacctttcgcttcaaattccagctccaccgctttggatgtgcattattttggcccagacacttttctctaagcctatttcctcctctggaaaattattagtggtattcatcttgtacacgtattctttgggactaagaaaaaatgaaagacttacactttctagcaacaatataaggtcaacaaatgttagctttagtattagtactagcaccagtagtattagtaccgctagcagttactgcagctgtgcaacagagaacggaagtgtccaccatcttcattgaaggaactgctccgtggtggattattttcctattaaagtttatactttaaagcatcaaacctttttatcccgcccatttggaaggaaatgctatttatttatttattattttttagagataggggtctcaatctgtcacccaggctggggtacagtggcacaatcacagcttactgcagcctcaaactcttgtgttaaagtgatcctcctgcctcagcctcccaagtagtagggactataagcacatgccatcatgccccgttagagatggagtctcactatgttgcccaggctgctcttgaactcctggccttaagccatcctcccctctccgcctcctgagttgctgggatcacagaactgagccaccaagcccagctggaagga

SEQ ID NO: 36386 - DNA, 826 bp, Homo sapiens
ctgcaggggagcctgatttatactcatcccagctcccacccagccccacgcccgccacgtgtgatttccacagccgcaccaaggaagactgtccagcacacagacttttcgtctcccagcaaaattatccccggcacaacgcttccccctcaagtctgcccaatggctttcccatttccaccgcagcccaggttggggggcagtggctgagcctgggccccctcccagccccgctgcggcaacctaggggggtgtccgggcggggcctgtcagcagcgacccgcccccgggcacacgcgcgtcaggggcagcaccgccaagctgcctgtgcagccccatccagcaggagtcccgcggctgccggccgcccgacgcccccccctccccagcaccccacacagctcgcgactcaggtaggcgagggcgctccttacgcacccgagaaggcagcggtcgcagacgacgccacgactccccttgcacaccgtgtacgccaagggatccgagcggaagagtagctctccggggcgcagcggggtcacggcgcgcagcccgtttcccctcttggcggttgcgaacttttccaccttcagcggctccatcctcccgcagctccggcacctcagacggctacccgcgtccagcagcgggcgtctcacgggctgccgggacccgcgcgcctgcgccctgcgcgcacacgtacgcccgaggggcggggcgggcgcggtggggcaagagcatgcgcagatggagtctggagggacggctggagtggagtgtgtgggacctgaaggtggtcgtaaggctccgcgtgcggctcgtgccc

SEQ ID NO: 36387 - DNA, 2232 bp, Homo sapiens
aagagcatgttttatcaaaatattgtgtaaagtgcaagctgctacagaaatactttgtggtgtcattaacgatacagactctacgcttatgtagtgggcaatctctccaactaaggagcttcaaacaaagacccgtatctggacgggcgcagtggctcacgcctctaatcccagcattttgggagacctaggggggaggatcacgaggtcaagagatcgagaccatcctggccaacacggcgaaatcccgtctctagtaaaaataagaaaattagctgggcgtggtggcgcgcgcctgtagttcttgctactcgggaggctgaggcaggagaatcgcctgaacccggtacgcggaggttgcagggagccgagatcgccccactgcactccagcctggcaacacagcgagactccgtctcaaagcaaaagaacaacaaaaaagaccccccagtatctaaaatagcaccccgaggagggtcaatacgtttgaataaatgatgaacatccaagaaaatgcaattcagctggactcacctggattgcactccagcagtaggtgtggaggtctacttggttttcccaaatagatttgcgccagggtctcagccaatctccgatcggttacgtaacgcttaaagtctaagctggccttagacgccttccttggcggattcctgaaatccggttcgggccacagctgcggagaggagtcagagagcccacagtggttcctcgccggcaaatgctttcgcgtcgccgcttcagaccctaaaatgcaaaagcgaccagcgcccgccaaggcggagagcctcagccgccgaggaagcccgaccactgggatccacatgtccttgtctctcaggcccgctccaagaatcacctagtgcagctactacagtgaaccccacgcagggtatcccacgtggaacattttctggcgtccgggccaggtcaagcggaagtaaacactagagcctgcgcatgcgaacagcggagccttcctgcttttctccctcacttccgcttccgcctcggctcagccgcccgaggattgtgagtggaccgttgaggagagcgaccgaccatccggctggtgtccggactcgtactctatggttgtccgcgctctgcgcttcctctctagccgccagtgctctatgctccgcggtcgcgggccgccagcctccagccggccagccgcgaggggtgcgcagagggaggcggggcggaaaggcgagaggtgtctcctccaccggagccaggggagacccgagcaagctccgtgacagcacgtcggccgccatgtcgccgagtggggctggaaacagacccggcgcccagcggtagccctccttgcgcctccgattcccaggtgaggagaggaggagcgggatgcaggggacccgccggctcgcggccgggatggaaagcctttcggaagcctctcgctcctccccctgcgctgtcctcctccagccgcgcagcctctgccctccgggtgaggtgtagcccggtccccttacctcctccgcctctcaggtcgcctgttttcctctcctttctcagctactgtgggtctcctattgctgcgcgtcgcgccaatttctccctccctaggggactagcgccagaagtcgttcctcacccggctcctggaggagcctgcggcttccacggtctccgttcctttctgttgtgtggcccacagcccgctctccccaccctcgtggatggttttcatttcccccccacacctggtcccccccatcactaccactttggttgtcaagaaccgcgtggtgtctcccttccattcctctctctgggccaatattttccttaattttttcagtttgtgtgtttaaaagacttaaagttaagattaaaaatgaagatgtaaaagcttacaattcctttctaagcttaaaaagattaagactttaggatgcttactgtattccttatgtaaacttagtcaaacacatcgtactgtggaatgcgatttaaaagacccaattttgaagactaaaaataggatgctgtaatggaaattttggcagtctttttttttttacctattgggcaatgttagaagacacggttctttgagagtgttttccgtgtttcaggatcaaacttagagcttttacccattatccttaccaccaaggcaagaaacggcagccaatcaactccgtgtcttagaatacgtacaatcctttctgcttactc

SEQ ID NO: 36388 - DNA, 1761 bp, Homo sapiens
tgtctcccagcctggagtgcagtggtgtgatcccggctccctgcaacctccgcctcccaggttcaagtgattttcctgcctcagcctccctagtagctggaattacaggcacgagccactgagcctggccgggcttacgttttgtatccttctcccctttaccccctagtaattggttcatggcccactaggggaagaaaagatggtctttcacaacagatagtctgaaaagcgctggtctcaattcctgtactgggctctggccccgcctccgtttatcaggctcgtcactactttacttcagcactcttattccaaagtctaactattcgctgttcattctgtacttcctcacctttttatttggtcctgtttatttcttctcttgagattacctctccatgcacctcaggtacgagtagaatggagggaacacaccatctcagagctgggttacaatgtcctcttgtccagtgttatctgctatatcaacatttcctccagaccgtggctgaagatgaacaaggcagctcagcagattgaaggtgcctggggccagcactcattcgccctgtctgagaaacgcagggacctccctgaccctgttgtccgcccgttagcgtgatgagcagctgtggatttcatctgtgtttcttgggcaggggggcctgtaggtatagaaatggatactaccaattggattggctgatttaatacctcatgaatatcagtaccttcatgagtattttgtgtctcctctggtcttgtgaatatttggtggttatgagtgctttcattccttcctgtgtttaccatacagatgccctgtttactttctctgtgtctaacttctcacgctgtttgctctgcacttattttcatctcttttatttgtatctttgattttctgtaatggaattggatattctcaaatattcacgcattacacctttccacagtaaaagtaaccttcattcctctgactctcaaagaaattgcctgtcattgatcacattcttctttgtagcaaagtttttttgagagaagaggaatgttagggcagggtttatagacatagcgtataattcattacctgctagagtatcagctcttgtatttttattagctacttttagaatatatagtcctcagggcatgttgtgtctcatctgtctctctcttgcctcattgtatttagtatgtggatcttgtttgttgtagacactcaaaattgattaccctgaaggctggtgaagtttagttaaagctctgaggtcagagttcagtctcatgtggagacttatttgctttgtttcatgtcctcatagtaaccttgaatgctggccaagtggcttttggttacaaagagcactgggtaagacaaagaattagcacttgtattgcataagcagtttaaaaccagtgttcctctgaatgtggggcaggagcatcgtgttcccattcaaagggcaacattatatcataatttttcaagataagaaaaagtagacaatgaggatggcagaagaaaatatatgtgaatttgcctgtaactgtactttttttttctttttaagaggcaaggtcttgctgtgtttcccaggctggagtgaagggatggtcatagctcactgctgccttgaactgctgggctttaagcagtcctcctgccgcagcttcctgagtagctagaaccacaggcacacgccaccaagctcacctaatattttagagtgtctgtagagatggggtctcgcttca

SEQ ID NO: 36389 - DNA, 705 bp, Homo sapiens
cttgcgggagtcacataaatgctgtgtgatcaacaggatttaagcccgtgggttacctgcttttacaacctaagcaccaagggatggggagccttggccgttagcagcctaagggagctcttgttcccacgcatttttcaaattccactggagtttcatgaggttcgttttaagactgccacctgaaatcaagtccagtggctgttcctgtcttcccgtccctgtattgacattaaaaccacttagtcaacactcaagtgcaagaatagtgtcgccatgttgtatgcctagtaaattctggatgtacgttgtacgtcaccttatttaaccttttgccattagtttacaagaagacgggttgagcgagtcaggttgcttactttaggttaacagggcagctggactccagcctaagctcttcagtgaagccctgcatcactccctctgcaggcagagggtgcaacccgggggtgtgggagggagcatggcacactcagcacgtggtaattatgtcataatcacataatacattcttttggcccgaggtcaggtcagaaggaagttgactaatttccagatttatttcagtcataatacccgtgtctagtgttgaggaaaaggaagggatgtttcctgtttgctgcttcggtatggttagccaatgactggaggtatttaaaaggtgagcactggccaggcacggca

SEQ ID NO: 36390 - DNA, 1286 bp, Homo sapiens
taatttttcaaaattttttcatagagatggggtctcactgtattgcccaagctggtctcagactcctggccttgagggattctcctgcctcagtgtctcaaagtgctgggatgacagacataagccaccatgcccagcccatcaatctcattttctacaagaggaagcaggaggtcagcgaggtaagggacttgtcagaggcacggaaatagtagcgggctgagctggggtttgggtgcaggcctgtccatctcatgatctcatgatcgaggatgcctcttacagcctgtcatgggtacccttccttctaccaggcgagggacctggcagtgctgcattgagtctctggagctcatttgacagataaagaaactgaggcctccagagaggctttttctagtctagcctcctcactgtcagtcacacccatttgccttggcttggctgccccacacctgccaggctccctctgcacccgcgccccctatattcaagctcacctacaaaacccacctgttcctcaagacctgggctgtcgcagcctctccagctccacttggggacctgggagctcctgaaaacgtgttttcttggttttgtttttgtcttattttgttttgctttgagatagagtctcgctctgtcgcccaggctggagtgcagtggcgcgatctcggctcactgcagcctccacctcccgggttgaagcgattctcctgcctcagcctcctcagtaggtctcagtagctgggattacaggcgtgcgtcacccgcccgggagcgtgtttttaagtgttcaggtactatagcaatgaacatggatcattgtccatttcttggctcctggtagcactcagtcaatgtttgctgaagtgatgggaaaatcaatgaataagccacagcaccggcagccaggacaggatcctgctgaggactcagaccaggggcgccgcctcttgctcgcagcgcaggggaacgagcctcacctttgaccttgtctcagcagcgccacctcgtggtttccaaaaggaacagcatcatgctgggcgcaggggccctgccctgcggtgactgaaaggcgtgtgtgtgtgtgtgtgtgtgtgtgtgtgtgtgtgtgtgtgtaggcgtgtgtgtgtgtgtgtgtgtgtgtgtgtgtgtgtctgtgtgtgtgtggtgaggagggccctgcgccttgcctgtcagctttatggaggtgccccagctcgctggaggaaaagaatgctgaccagtggcccgaaaggattttcccgaatccactgggaatg

SEQ ID NO: 36391 - DNA, 1047 bp, Homo sapiens
cccagcttccctcccacagccttctgtgtttcatttgccttggacccacagatacctcagggaggagcaccacgaaggcaaaccaacctctttcatatcaacatccattgccacctgttagtaagtgtcaaatggtgttctgcatgctagaagatctccctcccacggggtgcctgtgagcctcctgctataggagacagaattctgtatggcccatccagggaggagcaaccgaaggaaaaacagcaactgtggttctctgtgcctatattggattatgtcccatagatgccccttacatcttctaatgagggagtggctagtggggctcctatttgctagatgtttctgctgctgggctaaaaaccgcttaggtggccgggcggggtggctcacgcctctaatccctgcactttgggagccgaagtgggaggattacttgagtttaggagtttgagaccagcctgggcaacatagtgagacccccatctctacaaaatgaataagtagagtttaaattaaaaagagaaaaagaaacatgcttaatctacttctgagaatgatctcaggaagagagtgaaacagatgggctcggtctcctgagggagacaaacagggcttcaagcagggcttaggctggggacgctgtgtggagcagagtcactggctatttatagcccaaacagtaagaagagtcgttatgaaaatgcccagaggtgctttgatccgggaagtacacaagccaatcaaaatacgccgccttcgggcaagaggagccggagagcgccatctagtgaccccacaagttcccttcctgaaggaagtattcagtccggagaaaccaagacccacctcacagcgaggaccagagagacaccttggtaagaggccctggaaacgaaacacaaagcgaggaaggacagtgcacgggcctcagacgcgaaaaacaggggtcggagtgcccatcctacaggttgtttgataattaaatgagatatttcctttttatatgaaatgttttatgttcataaagatgacaactaaata

SEQ ID NO: 36392 - DNA, 826 bp, Homo sapiens
atgtttatttaagaaatgagtggagaaatgaatgaatgtatgaataagatgttttaaaattaaataacattttttaaaggagattttcttttctttctttcttttttttttttttttggagatgcaatctcgctctgtcacccaggctggagtgcagcggtgtgatcttggctcactgcaacctccacctcccgggttcaagcgattctcctgcctcagcctcccaagtagctgggattactgtgagtccattggaaatgcacaatgaatattgtgtctgactgcccatcctaccaggaaactgatagtgtgatgtggtttcgagtttcctcataggcaagtgtttcaaaatttggtctttgtaacacaggcccaaaggttgattgaagagcttgctttcactatagcttaataaaatgaatcctctacctctggccaaaatagcagtgtctaaaatgaatttgcttcctaacatagtaggcactgagtgtcacacaaggttaatttgtgtgtgtgtgtttcaaaactatcatgctcgttgaaaattaaacacagcagcataaaaacatcaatacaatactctgtggatgggtgctggcctcccttgggcattggcaggaaggttcacattgtttggtgaagacagtcttttgagaaatttctggtaaatttttgtgcatattggaagattaaattaaattttgcttcataggatcctgtccttacatttttttaaaatttagaaagagctaaattgggaaagatgatcatgattcttcaggtcattatttgaagatggtattgcttgaccaaattataccactta

SEQ ID NO: 36393 - DNA, 1260 bp, Homo sapiens
agtagctgcttaattgacaataaaagcacttagtttctgctgcatacctaaaaggtcagcctggactaactccttttcgctgtgccattccagcatgatgcgcagagcttggtagaaggaccaggtattgggaggtaggcctgtgttgtactattgtgcaactttcagtatgctgagacaaaaacatgttctaaaatggggcagctggccaagcatggtggctcacacctgtaatcccagcagtttgggaggctgaggtaggcatatcatttggggccaagaggtcgagaccagcctgggcaacatagtgaggcctcgtctctacaaataatttgaaatttaaccaggcatgatggtgtgcacctgaggtttcagctactcgggaggcagaggtggaggatcacttgagccctgatgttgaggctgcagtgagctgtgacagtgccactgcactccagcttgggtgacagagtgagactctgtctcaaaaaataatggtaataataaaataaaatgtggcagtacatgatggaatttctgaattggattagctactttccttgctttttgtttctttctcttatctactagagatcagcaaataattcaggtaatcaaaagttgcaaaaaaaaaaaaaaaccatgatttttcatagatgactccccatgacttcttcccttcacatttagccacagctgccataccacttcctaagtgtggcaagttcagcttccttctcactttcagcttcaaatggacttttggactacctgggcgttcctttatttgtctctttctgatttcctatgtcaaagataaacaaggtggaaggacagattttaatcagtaatatactattgcaaagtgaaaacgagtctagcatgagctgaactcaacttctgaacccagtcagaggtgactaggcattttaaagggaggatgagggaagagggaagggtaagtgagggctcaggagagtcagggaaatgaaaaattacaaaaagtagaaggggggtggtaaattagtccattctgtgttgctataaaggaatacctgagaccaggtaatttatcaagaaaagaggtttatttgactcatggttgatgaggacctcgggaagtttaccctcatggtagaaggtgaagagggggcaggcatgtcacatggcgggaagcttaccatcatggtggaaggcaaagagggagcaggcacatcacatggtgagagtgggggcaagagagagaggaggcaatacttg

SEQ ID NO: 36394 - DNA, 3899 bp, Homo sapiens
ctgaggtcaggagttcgagaccagcctggccaacaaggtgaaaacccatctctactaaaaacacaaaaattagcagggcgtgggggcgctcccctgtaatcccagctactcgggaggctgaggcagaatcgcttgaacccaggaggcgaaggttgcagtaaatcgagatcgcgccactgcgctgcagcctgggcgacagagtgagactccatctcaaaaacagaaaagagaaaagaaagggaaaaaagggaagaaagaaaggaagaaagcaagcaagctcaagggttctcggggtgggccatccccgaggccatccgcagattttctcgcactctttgctccacccccacgtgcaacaaggacaaccggctgccgcctccagcttccagcagggctagaagatgcgctgcccggggcggccagagccctgcagaacaaaccgccgcacggaattaggggccgccgtccgcgcctgccaggcttggaagcggactcgcccccagggccaccgccctaggaaacctcccgtcggaagcctcccaagcaagccgctcacccgcggctcccgcgcgaggcggcgtgggcgtgggcgcggccctggcgcggcggcgcgcgcggggtgaagggagcccggcgcgctggctgcggcgacggcggccgttgctgcgccgggtactggggtcgctgcctgaggcgcaggcgccgtggactccacccgccccggggcctgggctcgctgtggactcgtcatggcgaccgagcagaggcctttccacctggtggtgttcggcgcgtctggcttcaccggccagttcgtgaccgaggaggtggcccgggagcaggtggacccggagcggagctcccgcctgccctgggccgtggcgggccgctcccgggagaagctgcagcgggtgctggagaaggcggccctgaagctgggtacagcggcggggcgggacggggctgcgcgggcggctgggccggggaccccgcatcgccccaaacgagcgtttctcccgcagggatgcgccctacgtgtccccgagccctgcgtgaggacaagaagaggagagggagagatgtttcaaatactgccatagctttgtcccacctccttaactatatgtgtgtgtgcgcgtgcgtgtataatatacacacacatttttttttctttccttctcctctttcccgctttttgcatttctgcctcagtttggggagctcccctggcgaaatggtcaagaacttgagttgtccctctctctgcttcatcctgccccgcagcgggggcacctgttgaatctgcgggtttctagatgtttggtcggagaggagaggagggctttggtctcttggagatcggagtctccctttgcctcgtgttttgaggacgggagagcaagcttacgagttgtactgacagtgtctttgtggctattctgttttagtttcttgttttgtgtgtaagaatactccagcagtcttcctcttcagagaataaaaagtgtgtatttctggtttagacgcttacgtattctctaagcattcaggtagcatgtatttattgataatctaagcattcaggtagcatatatttattgataatctaagcattcaggtagcatatatttattgattctctaagcattgaaggagcatatatttattgagtgacgttgtccatgctaagacctgtcccgagtctggggtgcaggatgggacagagaggagacagacacacggatcctgctgccttcatggctggggagacatctgacttacgactccgtagcctttaaatttggctattaactcccgtagatttcccttatacagacacccattagagttctggaaatactacattctttctgtttaatctactttcatacaatgccctgctcggagtgcttttgttcgtggttatgtacagaagacaccacgtaggctggactctcctacagcttttggtgctgacactaccaacacgtaattctgaccaaagagctttttggtcgttatttttccaacagaagtaattttactatgaaaatatatgcttccatttcttttttcggctcagcaagatcgtaccggtacagcctagtcacttatcatatataatgcccaaatcaagtttcattgtggggggatataccttcacctattgaaacctgcatcacttagttgagccagttaattccaattattttcttatgagcctgtgtgtgtttatatagcgtgtgcttttcacctcagagttctaattttttgttttttgtttgtttgtttgccattctcctgcctcagcctcctgagtagctgggactagaggcgcccgccaccacgccctgctaatttttttagtagagacggggtttcaccgtgttagtgaggatggtctcgatctgctgacctcgtgatccacccttctcggctttccaaagtgctgggattacaggcgtgagccactgcacccagccctgatggttttgatgttaacagtcagtccgaaactctccatcacctacaattggatcatagtaattgtttagtggttgatgagaaactttatttttttaaagacaagttctcattctgccacccaggctggagtacagtggcgtgatcacagctcactgcagccttgacctctgtgtctaagtgattctaccgcctcagcctcctgagtagctggtactacaggctatgccaccatgtcagataattttttttttttttttagtagagacaaggtcttgctatgttgcccaagctggtctggaactcctgaggtcaagagatccttgcaccttgaccttccaaagtgctgagccactgcccctggccaagaaactattttatgacataaatttcttgttggagaggaagtctggatagttatctgctcagcatttaaacttgattgtgaaattgtcatgttacacagggttgttatttacacaacgctttgattcgattttttttaaaaggtcagttttttagtaactcttagtgttaactcagttttcctcataattttttccttttgtattacctgattaaaaacagttttatcttttgtctaagcaggagagctagctttcagcatatcagtgtatttagtaatttgctgtcactgattactgtaaaaagaagataaggaagatataatcctctactgggatttactttccttcatttgtttcttattttaggaagaccaacactgtcatctgaagttggaatcatcatctgtgatattgctaatccagcctcgcttgatgaaatggctaaacaggcaacagttgtcctcaattgcgtaggaccagtaagtaatcaacccttctttgtatcagaacaaacaatccattcatttctagcaaaatattccagaggaacataaggacagaggacagaattgttggttgaaggccttaaccccatatggggagttttttcttcttgcgaggagcagctggagatgaccaaagtctcctgagagagtgagtgacaggctctccatgacgttctccttagggcatgtgtgctggcttgttgattggttacatctgtgattgtcagaattttctttcctttttactatataccccttcggtaaaaaatgtttgagtgtgtctccctagtatattttttatttataaattatattcttgtactactgggtaaatatattttttaaatgcacaaaaagaagactaaaaaacgactcatttattgaataaatatttattgatgcttaccacatgtgaaatgcactattgtaggcacctgggacacaatggtgaacaaaacagaaaatccctcgtggacattacgttcttggggaagacagaaaaataggattgtaataggaggtaatgaaaagtgctttgaag

SEQ ID NO: 36395 - DNA, 830 bp, Homo sapiens
tgatgcctttgctggccctgtcctggctgtcaccacgaggtgctccacgcttgggttccagggttacagcagtttttttagttcacttgtgtatgtggtcaggacctgagctgcaagcaaaacccatgcctcccttacgaatccttggaccctgctcttaagctgaaatcactagcccagattcctttgtctttctagaggttcctttttggagcccttgacagcctctcctgccagtgcagcttcggcgtcatcctatttgaccttccttaacttcatattttagggagcaaggattgaggttgtcgccccttattttctccttcctgattttttctgcatgtcagccaggactcccagggacagtcctgcaccgtcaggcagcaggccatcacagttaggaatgcaggctctggcatcagcctctgtgcttacagtggcctgggcatgttactcaacttcatcgaattattgtgagaattaaatgagctaacatgtttagcacttggattagtgcctggcacatggtgtaagcacttactaagtttcaacgtcatcactactgttgttattagaagtctgtctttgggctgggcacggtggctcatgcctgtaatcctaggactttgggaggccgagacgggtggatcacttgaggtcaggagtttgagaccagcctggccaacatggtgaaacctcgtctctactaaaaatacaaaatttagctgggcctggtggcggatgccttgtaatcccagctactcagggaggctgaggcagaggaattgcttgaacccagaaggtagaggttgcagtgtgctgagatcaca

SEQ ID NO: 36396 - DNA, 825 bp, Homo sapiens
atcctgtgatacagaagcacttaaaccacccccaacccacacacacattttgtagacagatatagttggatcctgctttttctatcttatctgatgatctttgctttttaattggtcatgtttagactatttatgttttacataataattgatataaattattggcattaaatctactgtcttgctatttgtattctacttatcccatctcctctgtgtctaaatcccaaacatggcaggataagaggggtaaagaatgttttatagttccgtttccccacacttgactcattagttagttatacttgttttatttatttattttgtattgattgctctagggcatcagttcacacagtgcattccagggtctgtgagatcttttcagggtgtttgtaaagtgacacttccttttgtgatcgtactaatgtttgcttttttcattctcatcctctcatgagcgtagagtggagtaacgtgtgcagtgggatttgccagaggctatgtaacgtgattttatagatgacatgcagggcagagaatcaagctctttcatgaagtcagacattacagagatttcaaaaaatggaaagcagtgccattctcttcagtgtcggctcgagtactattttttggcctgacatggtgtttcacacttaagatcccatcactttgggaggcagaggcagaaggatcatttgagcctaggagttcgagaccaggctgggcaacagagcaagagctcatctctaaagaaaaataaaaatagatcgggcgtgatggctcacacctgtaatcccagctcttttgggagctgaggcgggc

SEQ ID NO: 36397 - DNA, 1754 bp, Homo sapiens
gctcacaaaaaaacagtttaaaaaaaaaaaagggggggtctcgccatgttgctcaggctggtctcaaactcctgggttcaagcgatcctcccgcctcagcctctcaaagtgctgggattacagacaggagccactgcgcccagccaaagacagttcttaaaatctacaggttctttaggatattctgagaataaatatcgtttaggatttccccaaaggatttacgttttgttctatgaagaacccagttcttccaaaaatttctacaactgacgatttggaaataaaaataacgctcatctcataaaactttgcacacagatagtatgaacctcgtaagctttgagaacaaaatttccccatctctcaaaacaaaacacccaaaccaaaacagtcaaccagtggcaaaagaaaccgtcctgtttcccaggtaggaaaaaggaaggcaaagcaccccaagatgtgcttttattttaaatctccttgatctgaccaatcgggtgagctggaacctcacggctgagccccgagtccaacttcttccccgccaggactactcactgtggccaggcccaagcgcatgtggaacacacgccaacacaggacaggctcagcacgccggccgcttccctcggggaaaggcccgccaacgagtccatcgcgtgggagaacagtgggaaagggtcgcggccccggccgtccgtaaagggacccgactgccggcgcaggacgcgaaccaccagcgccgctccgccgccatgtgccgccgctcctccggtccgagattatgtaacgaagcccggcgcccgcgagcctgccgtacccgccaccgccaccgctcgccccctcgagccccatccgttggccccgcgcacgcccggcctaggcccggcgctcgcggggcagaagccccgccgccgccgccgccgccgccgccgccgccgcgggtccaggccgcgcgacccgccctccgccgcgcgggcccaaccccctccctcccttccccctacctgaacggggcgggtgagcgcgccgccgcgggccgagtccaccgggtcgccaggccaggcgcgagctcctcccgtgcgggtccgtcacagcatctcccgggagacgtggccgccacgggccgggctcacacccctccgcccggctgaagccgctcctctgcgctccggccgccgcctgcgacctccccggccacctcagagccacacgcccccgagagtgccttcgcgggctgtaggcctgcagaccgctcagcggctaaaacgcagtcgctgctcccgccgcgcttctgggtccttccccttgcaacgctgcctgctcgcctcggacagcgccggccccgctctgcgcattaccctgcgccgacaaaaccgagttccacacgccccggaagggagggagcagaggaaagggcggagagggaggggagaaccggcgggagatcgcggctgcagggaccagagttctcgcgatggttccgcgctctagcgccggctccgcgggaattttcaaactctcggtgaaagaaggaggtgggagggaaagggaggaaagagaagcagggcctggaagggcggatcatttacaaaaaaatcgggtctctccgcctccgaggagctggtggggagaaagactacgagtcccacagtgccttgcgcgtgaagccgccctggcggccccggcggcgcgccccgtgcgcagttgggagtggtagtcttcgctgggggtcgcgccgggctctgcca

SEQ ID NO: 36398 - DNA, 1681 bp, Homo sapiens
ctgaaaaaaataacacacttcatctgtatgaaatgtacaataaaagacaaatacttgataatgttgcatttgaatataggaaaagaattggaaatttagggttttactacaagccccagaagagttaggctgtgggaacagggtcgttgatgtgagatcctgttgccatacacttagaaatgtggagtgttatgtgaaaataattaaacacaggcactagggagactgaggtggggggatcgcttgagcccgagtccaagactccatcatacacatgtacatacacacatgaatgaataaacaaccaaccaaaacgtaactcatgcttgtcttgtaaattaataacttaaagggaaacaaaacagccttaaacaaccacgaacccaccaattaacctctggttacataaccaggagatatctggctgcacagtctatatggggtgactacataactgtacacgatcaattatttaattgggtttgcttcctcgggttccttacaaaaaaccctttccttccccaaaccacaaaccacgctggtggcttcctaactcacgactctctgctcaaataaactccttaatattttaacggcgcctcagttttctttctaacaggagaaaggaggatttggagacttcacagaccacagctcctcccacgcaggaaccccgaaccccaagtcgggactctcccctgaggaccctcccgtcggcaccgcacgatccgagggagatgcgggtctacagaggcagagctgcccagaaagggttccgggcctggccgaagcggcggggcagggacaagccaggcggcccggggtctggctgcgggtccagccccgcatcctgtgccactaaggccgcgaggcgccggcggaaactcgggtcggcaccgcggggaggtccgggttcgccacaaccgcttcctggcggttcccttttccccttcccgagacacctggccggcacactcaccatttcccagtctccggtgtctggggtcctccctaaggaccttccgggacctgcaggtcccagagcaacagaagctgccgcgggaccacttggacctcccagggataaggggaaggagcagcggagacgcaccgagctcgccacattcgcgctgcccaacacaaaagccgcgccaggtcccggaagctgctccctcctttcgcggcgcgcttgagagtacagtccccttcccagcgcccgattggacagggccttaggccccgccccttcagtcctgagtgacgggagatgcaatcagacacggcgctgagtgaggccaggttctttccctgcagtccttttctaaggcatggattctgccctgtgctgagacctggcgccccccgggggactttcccattcaagctcatacacaggattatgtccatttatgagtaatatttgtgatatttacaattggaaacactatgatgacaattattctaaaatttcagatttcacaaccttcctggcctctggtcttttgaggaggcagcctgaatttttttttttttcttgcttctagtgggattagaggcagcttgaattttgaaaagacaatgtcctctcaggtagcaacgccccatagaaataaaatgtgagccgcgtgtgttccagtagcaatagaaaagaaaacaacacgtgaaattgattacaatgatt

SEQ ID NO: 36399 - DNA, 1326 bp, Homo sapiens
ttaaggtcaggagttcgagaccaacctagccaacatggcgaaaccctgtctctaccaaaaatacaaaaattagctgggcgtggtggcgggcgcctgtaatcccaactactcgggaggctgaggcaggagaatcgcttgaacccgggagtcagaggttgcaatgagtgagactgcatcattgcactccagcctggcgacagggcgagattccgtctccaaaaaaaaaaaaaaaaaaaaaaaaaaagaatatggtttgcttcctcattaaccttatcaaagcctctcatttacgccccttctgtggaccccaaaccacaaaccatgactgcggtacctggtttatgaatcgccgtttgctcaaacacacggtttaacgttttaacaaagcctcggcttaattttaggggaagaaaggtgggactggaagccccatgaaccacagctcctcccatgctggaaccccgcacaccgagacaccgagtcggggctctcccgcatcaccctcccgtggtcaccacactacctggataggggaggcgaggggttcccgacagggctccggccggcggaagtggcgcccgcaggtacagacaggatgcaggggttccgctgcccgccccgcccggcccggccctgaacagaagaggactgagccccggctacgccacggcgactcggtccgcaggttccggagccgatggcgtggaggcccgagtcgcgccacagcaggtttcaaccagccctcttctccacttcgggaagccaggcgcagtccactcaccattcctcggcttcccgggtgtcctggcgtcagctagggatgtcccaatactcgcaggtcacagggtggcagaggctgctgcagagccacctgggcctcccagagccaagaactagcagcggagactaacaggaagagccggctccggcgaaggagagacaaagcaaccgccaggcagatcccggaagccgccctctcctttccggcggcgcgcctgattgaacggtccccaccccagcgcccctgattggatggggcttcaggccccgcccctcaggccctgagtgacaggagattgcgatctcacgtgaggctggatgaggtcagaatgaccgcttttggcctagcggtttgtaggcggtgcgtccttcctgcgctgggatccgaccatgcaagaaggacattcacatttaacctgtatacaagttatagctatttgtgccttttatatatatatatatatataaaattggaagcaatataatgacagttctgtaactgcccagggagttcaccttgcccgctacctagacagagccgatttc

SEQ ID NO: 36400 - DNA, 1836 bp, Homo sapiens
agatcttaaatagtttagacacacgcctttgctagaggaaattcacagaaaccgccacggctacacatcttattaaatgagtcacgagttctccttcattgattaatccttttcctcatcccttctcacccctcccatttgccctaagaacgaagagctggtaaaccaataaattgggtggaggccgagagctcggggccgcgagcaagcctccgacgccctggtcccctggacccgccggttaaactgtgattctctttctaaatcctttgtctgcgccggactcggggtacccgccgggtggtgtggggctggtttccccaccagctctcgaactcctgcactgaagcgctcctcccgcttcagtctccccagtggttgggattacaggcgtgagcccccgcgcccggccaaagggccccctaggaccggctgtctcccccgactacgcaccctcggcccccagcctcgcgccagacacggcgccgcagccccagcgcgcgggggtggagagagccgcggggcaggggcgccctgtgggtcccgcggtcacgccggatcgctcggccgcagtagtggggcccgggcgggcgcagggccgggctacggggaccggcaggcgcgcgaagggcccggggcgccgggaggactcgggttcacagtcgctcccgctccggaaagtttgcggcggctgccccgggagggacttcggcggggaggaggcggcggcgccaggtggccgaagtcggaggggtccgtccgctcccgcagcctaggagcgcgccctccccgccggtgccggggcccgtggtgggggtcgcacccaccgccgcttggccgggaccgtcttggctggcgccgccttggagctcgtaggcaccgcgcgcggtgcggggagcggccggggcggagggacccagcgagcccggggagggccggggtcctgcaggcggaggcgccggggagggtgtggggtcagggcccgcgcggcgctgcttctgctcccgaagactgcggtcggagctggcgcagcggagggtgcggctcccggagcgcgaggccgcagcggggagtgaccggaagtggcctctgcagccgcgtccctgggcccatgtcagggacggctctggctgaagcaggaggacggcgtttggagggtggggtgggcgcgtcctctcggcggcccgcgtggactgacagccaccactgcccccacgctgccctcgtgcccgcggttctaagaagtcgaatgccaggcggaggcgacggggcaaatggcccaggcttgggaggccgctggcggtccaggtcccgcaggatgtggaggattttcgaggagggcccaggggctggagggtgcacaggcccatcttgcacaggagccacggccccggccttagctgggcggagcaattccggtgccgccgccccttccccgcccggccatgctcgggctccaggcgggctgctgcagggggcctgatccggtggacgatcggctcctcaccccggcaagggcccccacctcggccgctgacagcctcgcagggaggccccagcgatgagcaagggggctggcgggaggacgggaggccccgccggcctgagtcctggacaggtgattggcaggtgaatgagctggagtgtgcagcgtgcctggctgggggccagggaagatctgccgggacctcaggggctgcaggctgccaactgcccgccccagctctggatgccctactcgaacctcagtttcctcacctgccaggaaggacccgtatgtcaggggtgttttgacgattaaactggacaatccaaataaactcgcattagccctcc

SEQ ID NO: 36401 - DNA, 1239 bp, Homo sapiens
ttgtacgaaactctggaatgcctgtaggtggggaggcaggcaggccagaccttggcccctggctgcattgtcccttctgggcgcccccactcctcctgggcccttttaaagcacatacctagcgaaacatctggacctcagagagcctcagagaactttgtgcatttccaaaaccaaaatgctttcttccctgaccccatgttctcatcttactccaaaacgcaaattccttgggcagccagcttcagaaaagggcctcaatttgatgtttgttctctgggacccaccccagggcccttttgatggagcatcattccacctccatccccaccccctccccccggggcttcccccagtacactgggggctcttaactgtaacaacctggatctggccactagactcccaaggcaggggacagggaacacagttcccccagcagactggcctagccatggcctgatgaacagtgatctctgggcaggagacccaggacaggaaatatctccgccctctactgtcagaccctcctgccttcggggtgagatcaccttttgccacagtgggaaaaacaggcacagggccagtgaccagcaaagtcagggagactgtgaccgggaaacatgcccaggcgctgaacagcacttccaggttgccacagcctttgggcggttcttggcatgtggcaccctggttgggtcagcaccttgtggggtgggggtgctggcaggagcaggtgctgtgggacccacagcaggaggggaacattttcaccctatcctggcacagcagttttgttctctgatgtgtgtgatgggaaaaaaaaaaatcaaaagaagaagaacactttatgacactttccaattagaagtttccatgtccatagtaaagttttctgggagtgtagccttgcctgttcattcacatgttgtctgtggaaggctgcggtcacgctgcaactgcagggccccgtccttgagacggatgcattgacaaagttgaaaatattgaccctcggctctttagggagtttccagcccatgcctggttttgagcactgtctgctgagaccccaggctctgggctggctccttcctcactcagggctccagtggcctctgctggtgtgcctgtaaagtgggggtgccatggggcctccctatgggggtgttgagtcctggagtgccaggttttggggtccctgcatcacagttgaccatctccctggcagagatccca

SEQ ID NO: 36402 - DNA, 1070 bp, Homo sapiens
catcggttcctaaggaaaaaaatctaactgaaatacatgtcttgtaaattactaccttaggaagaaacgattttcagcctgaaccaaccacaaacctccaattaacctctcattaaataaccaggaaatttccacctggacagtccacataaggcgactccacaactgtaactgtaaccaagttctgaatttggttcgcttccttatgccccttacaaaagcctttgctccaagcacccacaaaccatgactgggcgctctgcattgatgaacagctctttgctcaaataatctctttaacgtttaaaccttgattcccttttcatttttaccaggagaaaggagggcctgggaccccacagcccacagctcctcccacgcagtggctcctcctgggtcggggctctcccccaggcccctgccgtcgccaccgcacagctgccagcgaggggacgcgccgggcggaagtcgagcgcagaagcggaccggacgccgggtgaggctggcggcccagcccacatcctgaggccaggggaagctgagggccgggcgggtccagcggggtctcgggtctgcagactccggaggcagctgtggggaggcctggggccgccacagccagttccagcccgtttccatcagccccctgcccacctcgggaccccgcccacatactcaccatttcccagcttcccgggtgtccaggctgcttagctatggatctcctgatacctgcaggtcagagggcaagaggctgtggcggccacctgagcttccccgagcaaagcacgccgagcacagaagacgacccagctgaggctggcaggagagacgaaggccccgccagatcccggaagccgcgcccttctgtccggctgcacgcccgattggacggttcctacgtcagcgcccctgattggatagggctccaggccccgccccctcagtccctgagtgacggaggatgtgatcggacgctgggctgagggcgacaaagtgacaggttcttggctgcagccttttcatgcagggcttcctgcttgcgctgggcctggcccagcccagggggc

SEQ ID NO: 36403 - DNA, 2254 bp, Homo sapiens
cctggtgtttatgattcccactttagaacgctgggcccgtgaaagggcacatggggacactcacagtccccttctctgccatcaggcctctgtgatccttaggaccggcagtgcctgccactcccccatctgcacgaggttgtccagcgtggccgcgtcttaacctccaacagctcacaaggtgggaagggggactcgggcctcactcccatttcacagaaagacaagtgatgccagaaaagctacggaacaactgagtggttccagaaacacccactgctctgaatctctttgctttccaaagtaacaacatacacagaaacccatatgggggccgtggcggcgtcgggctggacgcattacagcgctccccaccaccggatcgcttccagggcggctccggcatctggagcccggggtgggccccgcccgccctgctcggcggccccctgcggcgcccatcacacacctgcagcgcccaggactactcaggcccgcccccccgagcaccggcgcccacccgggctgccactcggatcgtctccaaccagacggccgcgtccgtctttgtcacggcggcacctggcgcgtcggaggctcggaggagatgcctgatgaatgaactaacgtgagtgaggcggaggagggccccgcaggggcggagcgagctcccagcctttcgcggaggagggaccgagctggatcggcagaaagggaaggagaaggtcgctgtgggccagggaagggggagcccgccctccgcgccctcggtctccctcacacgcgcgtctcccgtctcgccggctccgggctcctcacctcacagcctggagctccctcccggcgtccggccgaaaaccctcctgtggcggcggaagtccagggcagccgtcctcatcctcccagcccgcccggccgggcgtactcgctgaggcggggtctccgcaggcgcccggctcctttcccggcccgtccagaccgcgtctcccgatcatccggaaagccacggctcggctcgggggcaaatggaggcgcctgaaaaacaatggtgttgctttctcccccgcccgcaccttcctgagcgctgggctctgggctgggaggcggcgccgcggaggccgggcgcgggccgaggagggcggggcggggccggccgcgggagccggggtgcactcaccgccgcggcgcgtccctgttggcgggcggcgcaggcctggccgccgcgggagcccgccggacgccgaggaaaggaaaggccggagccctccggctccctcccctgggacacttcctgctccgctctaggactggggaggtctccgcatctcagtggttcgctcccccgccccccggccgaggtgtgcgctgggggtgacatccgacacccccggcccgccccgctccgcgcgcgcctgggcctggccgccgggccgggggctttgtgggtcagccacgtcgccgcgcccgggcttccccgcgggcccgccggtccggaaggtcggcccggggctcttttctccgctgttctccttctctggcgcccccaggacacgcggccagtggacgcccggaacggccgaccgggagtcgcggctggggatggaagctggaattgggggtgcgggatggagcggagagaggaggccccgcgcgccgtcggccgcctcatttcagactcccctgcgaccccccccccgccgccagccgaagcccgggccgcccagcccctcctgccgctgcgggacgccgaaggtagcgctcacatccgcgccttccgggcctggcgcccacgtgcggagtccccgggttaggaaaggccgcgcatccggaggccacgcagagcctcggggcttgcgcagaggggctgcggtgagtcctgaccctgagtgggggtcacggggctcgttgctcgctgaagtgaacacggttgcagctgtgcacagtggcggagggagaggatgagggactctgacccaaggttatgtggcagtgaggggcaagcagaaatgggggcctccggaccccaccccgagacagggctgctggccgctgcactatgctgaatatagcccaaattcttacatgggtcgtccccggggaatgctcatttttcaggctccagagcttgagagaaagtgcgaacccggtccctgagcaggtctgattcccatggccccttcgccatctgctctgcaccgaaattggattctcctacgcagaggagaaggtggagaagattctccgtcttccggag

SEQ ID NO: 36404 - DNA, 9689 bp, Homo sapiens
acaggccacgggttggaaaagcttgctctaaattttctcgaagagacttattcaacagaaacgtaacaggagctgcacatggaatttttaattctagaagccacattttttaaaagtaaaaaaatttaaaaaaagagtgaaattataaaaatacatttaacccaatatatacaaaatatatttcaacatgtgatcaacataaaataatattattatccatacttttacttttttaaactaagtcttcacaatccgtatgcacttgactcttgtgacacatctcaacctagacagtggcatgtggctcctgtgttgggtggcgaaggtctagaagttgttgtatttgggtagatgcatctacagtgtcccacaacccagtgtccataaaataacaaccattctggaagaacaggcagccaacacagctcagggccccagaggaggcatagggtcagcatcaacactaccagacacatggaactccaagtttcacagtgccttccgaacagagacatcaccagcaactgacacgatcaccccaacaggccctaaaaaggcaatgtctgtcaagctgaaaggcaacctacctccctgggggcccagcttcctggggcttgacgaggcctacaggggcttttaggctatctgggagacgagtgaccagttctttcagcacctcctgctggaatattctttctcagcaactttgcatttgatagatgagaaacaaccaggcggaaaattagtgacagacttgggtctggatccaggaccgacctttgatctcactttccttccactgtgaccaccctcctgggaatgaggacaccactggaaggacatctcagtaaagaaagaagtgctgtaatctaggaaaaccacagcccacgtaggaaaaggacagggattggaaatgcaacaaacattgattgtggggggtcagttggtaaaggccaccctgcaatgttcatgtggcaaatcaaagtccaagacgggatccccactggattccatggcctcaaatgcttccagtcatcaacttccagctcctgacaagatcatcaatggattggatggctcagcataagttgttactactgttaaaaggacaagaagagctgttgctattggcaagtggcaggagtgggcattatctttctatatgggaactagcttcccagtggcacctccagcaatttacagaaagccatctgctgatgggatctgtcccctcagagtcacaaagctctccctaacaggacaagaagatgcctggggagcaaagcagcctggagggcaaggtcaccacaggagggagggggatagcccacctaggcgacacccagggaaaggctgagcaggaatccactgaggacctgggacagttttgggcagtcagcaacacattccatttggcctgcttcaccagggactcctggcactcagctgaaacggaatttggggaggacaaagtctgaatcaacgtgcatcatccatcagtgagccagcagccagcagggagggtgaccttcccagggcacagcagtcagattcccaggatgccaggacactgaatcaaaggcatggggactcaggctgcagatgctcccaccccacctagtgcagaccatcaaaagactcaaactaatggtaactggggccagggtgatgactgtcctgtgaaagctaaacccatacttctagatgaggtcacagaggttgcaaagtcaccctagagagtttggaaaggagcaggtaaacgagagcactcacatctgaggaaagaatgcaaccactaagagggggctgagaaagtcacagaacagacccaggtccatcctagatccacgctcctttcctcttccctccactggaaccctctcggaaagctgaggatgagcctggaggactcaaaagaactccactaagatcatgacaaggagacacagccagcagccttccctggagggacagcacgctccaggtaggcaccagctgacttccttctaacttccagaggaatcccaccataaatggccatggagctgcctgcctgcaaaggagccccagccccaggtcagacagggcctcatccgaaggacagccatttccgggagcctcagaaaataccgaaacaggcgctctacctttgggatatacctggcccagtggatttggctctgactgtaacatcagaatcccttctcaccccacccagactaagagaatccacatgtctggaaaggctcaggtaagggtatttttgaagctccctggtggctttttatggacggtggatggaaacccagtaaatgcactgagaatccagagaaatgaacacccacctaaagcactgaaacacatgatcagagcaatgtgcatggtctagtgaactgtcaacactcaaagggacctcgaaagacaaacaccccaatctcctcctcatcttgaaagcccaagcacagaagggcaaaatgccaccggcctcctccgtgaagggtgcccctcaagccaggctgcctctctcacacagcaagaagacactgactccctgctgaggtcagagcactggcgtacccacacctgtgtcatcaaatgagggaagctattactagacctttcctccctatacaacccacaacattccacaacgtgttgtgcagtttagcaagagagacgagggtctgctttacctttcctgcaccagcgacatcacaagttcactggaggcaaagtaagtcttacgctacctcagtgtactccaactctcatagagctcatctgatagaagagtcagtgatgacagaatattctatttatgcactgtcagtataacattgaggaactgcttttttttttttttctgagacggagtttcgctcttgtcacccaggctagagtgcagtggcagatctcagctcactgcaacctccgcctcctgggttcaagcaattctcctgcctcaaccccccaagtagctgggattacaggcacccgccacaacacctggctagctttttttatttttagtagagacgggttttcaccatgttggccaggctggtctcaaactcctgacctcaggtgatccacctgcctcggcctcccaacatgctgggattacaggtgtgagccaccatgcctggccgaggaactgcatttttacatgttaattttaattgattgtgtttaaatagccacatgcagctagtccaccctattagacagcacaatgcaagcatgactcttcctactactaccatgtgcctatgcagacactggaaaaatacataggagtagtagaggccaagtaaagagaccacagtggattctcctctgcagaagccttctctggagcagggcaaggaaggctgtagggaggcatataatgcacattacacagccctcctccacaagcaacagagagacagctctttcccaaagtgctatctacaaactatcaccaaggaacaagcaaaaagagtttgagaaagaactgtagacttgtgtcagagcagagcaagaatgagttgtgcaaatcagctagaccaactgctcactttacagatgaagaaactgaggctcagaaacgtaaagaaacttccataaaaatcataaatcatggggttggaggtagcgtgaaactcagcccaagacttttttcactacaactgatttcctcagaggatgataaatctgtagaaatagcaagaaaaattggctgttttcaatgcaatgtcaggcagagcagaaataaattactgactcatgccagaaacaaatggctcaccactgctccattataagcatggacacagtagaagaggaacccacacacacacacatatcccaggaacccacacagagagtgaaggaagaatgccaggactggctttgatttcttcccaactcactggagtaatccaataaaggtttgctgacagataagcctaggaatttgagccttcatatgttcttgctcacctacagaagagtcacttccacaacatcagagtcttggagatgtgaccggaacaaatggcagactcaagccccaaacatgcaggagcatcctggtcgtcacctgcccaagaagcttcctcaggaagtcattctcagccaattccctgaaacactgcaacccagctttgattggccaggcatctcttccacatggagttggtcttcctcactgactacccccaggtctcctacacaaagatctgcctgtcctaccaactagattgtagacactccaaggcaataaactgctcttccattcctttaggagacccactatcctgagggccaggtatgtatgttactaaggattggccacaacaaaagttacaaatccttgaacatatggggtttctttatagatctaaagttgatgctacctttataacactggaaaggtctcactgtttacaagggtgaaacacattatcagagcaatgtgggccgcacatccctggaaggtaccgctgagaaggtgagaaaggggaaaagattctctcactcagcctcaaaactgtcccccagtatcaaagtcatctcctctcacacagcatccctaactaaggtggcagcccctctgcttatctggaaagaagtacaacacacctaccctccactgacctaaagtgtgcctcctccatctactgccaagtgacactttgctccttcagtgaagctttcagcaatgcctcccaagcactaaggccaggcctttctctgcactccatcagcacttcagacacacaactcttttggaacttgttacattaccctgcaatgatttgttgacaaacttgttctcctttcctgccccagcagactggggacagagtaagtctaagccctcattcatccaacactcttcagggaggctggaatctgggctctccttctctccctgctctcagtgctctcacctgtattctaggatccagttcttcctcctctcttggggacaatttggcctcactgctgctgcttccacctcctccaggctcttctgcgactgggctcctagggacttcatcctctacaacttcaggccgcagctccccctgtggggtctcccgccctcctggaacctgtctgagctcagccatgctgacagggggagggcagagccctatgcacaagagaggactgacatgctgggaccagggccccagcttggggcttcctgggctctagatggccaggagaagagtttctcttctcaaaaggcagaaaaggtgggcacaggaagaacctcacactaggttagaggttgagattcaagttgtcagtggggttcctagagctgaagccttgtctgtgcaaaagttcttcccttcccgccacagggagtccactgtgacaaacccggagcaacagctccaaggcagggggcaaagggggcttggatcctggaccgaggcctgctaggaggagcaccattcgggagggtggaggcaggcgcctccaggctgtggtggcagctggagagagaaggctgggcccgagctgaggctgtaggatgagcgtctctggggagctgcagagaaacaaaggccaagtatatggtcatgtcagcatcaaaaccgcagccaccagccccttccaactctacagcctcccaaaaactacactctcaccacgcccccacccatgtattccgaccagtccctacctcaacttctctccttagccctcaaggactttagattctactcttcccccgtcccagctcctctcgacccaggccctcctcaaccagcgccttcgagactttcctctgcacccctaggctctcctccatctcctgtggtctcccgctcgtcccactccaccccagcccggctttgcgattcaccttgtaaccccgagccccaccccaccttctctgtccaacccgagacatctaagcctcccgtctccaattccacactcttccgcaatcccaaggaccctactcccgtccattctacccagccatgcgcaaaagccccccgcacagccttacctcagtttaccttcccgtccgcggagcttctatgctgcaaacaatctccccccctccctccccgcaacaagccgatccaaccaaaaacgaccaggcagaccagaagcggaaatacatcatcggtgaacaacgctctccctcccacgctctctctcaagccgggcctcctcgggaggcctcacactcccccgccctgccttcagtttccgtacaaaatggtgccccacgttgctcaggctagccgtaggttgcctccagaccatactccaccaaggctgaatgaaagaaaaacatgagaatgtggtgctgaagaaaattagggcgcgggacggaaatcgagagtaactggtgagaagaggaatactagatataaaacggagataatagcctcagagtgagtagtgccatcttgctttacggagctgcggcggcggctgccggaaagccacttccggcctgctccacggaggcgggcgcgacgccgaaagtgagctggtaaacttccggcagtggctccgggggcaactcgagtccggacgctggcgggcttcgcgggcgaaggcaaagtcgatttccaaaagtgactttcctcactcccgtgaagtcggcggaaccctccactaacggcgtctgagcggacggctccgatgtgtaaatcccactcctcgaggcctctggaccttgcaccttgaacgacgttttggtggggtcaccaattgctccgtgaatactaaccaggaacttagtcaacattaactcagttaattcactcgtgcacccagggtcagatgccctcgatgagcaggagtttgttacatggcattgtgtatcgttacctaggtccctgagcgagcgcctgcttgtcacctctaggtgtcgcttggtgaggggagggcctaggcctaaggggaagggcttcattcagggttggatgttttgtttttacaaaaggcgtaacttcctcagagtcaactcaaaactttgccctgcagatggaaaaggcaaatgggctgaattcccctcctttttggatcctgtcaaagacaacccagctagacattgaagcagtgaaaaagacttttttcagtaactacttacagaaaggaaaagaactgacctctgttccgatttgtacagaagtgactgggcatttcaaagggagaatgaaggaaggaaggtgatcagggctcaatagtgttggagaagtgaaaaattacagatttgattggcatagatgcgattcggccagatgtgtctgctagctagcagctatagaagttagagtgcttttttatgtatttatttattttgagacggagtttaactcttgttgcccaggctggagtgcaatggcgcgatcttggctcactgcaacctccgccccacccccacccccgagtacaagagattctcctgcctcagcctcccgagtagctgggattacaggtgcatgccaacacatctggctaatttttctatttttagtagagacggggtttcgccacgttggccaggctggtctcgaactcctgacctcaggtgatccacccgcctgggcatcccaaagtgctaggattagaggcgtgagccaccacgcccagcctagcttgctattcttgcactgagattgggaggtagaggctctgcccttcttgacgatcaatttcaaaggaatggctctcaggtcctttagaaggacctcttgagttgtagcagacgcataaacaccttaaagagaagaaggaaggattcataatggtaagcccttaataaacgccctgagaaagggaggtcaggagcctatcatcaggtgttggctagaacaaatagtaaattctcctggtagcattgagctttctcaggcaggcattttcatgggggagctggggttctcctagggacatgatctgacactgctagaaggcatgctaaagtttgtctcttagtaactcagaggtttggatggagtcatgtgccaagagttctacagttctcagtccatttcttctatcccttcatcccatgaataacgatttttttaaattgagcagagcaaaatatattcctttaaaagaggtgattgaaaacagatttttccattaaattggaggttttgtttttaaaattacaaaagtgatttttctaatttcaataagtcagcaggaccttgagtaacattgtctaagtggacagctttgatggataataatgcctcagtcttctaccacagtcctttttattattaaggtgccatacaaaaaccataaaaattaaatataaggtgataaacatgatttatttgttgtctaccagtcactttacttttgtagaactagaatttcactgtaataacctcattttacccaggatgttctgtctaccctagcctgaattatctaacctttcttattcagcactgctccaatacctgtcattcttataccccatcccatagctccttttctctgtgtaatgcttagcaatcacaaactgctgctacgtgtcacagatctttggtgggaaaacattatgaatacatataatggccagacccctagatcacatcctgagatttagcagctcctttaaagtctccactggcctcttccaaggttaactctcacccactgagaccacatgtgaatctatcatgtatagattgtgatataatcccacaatagtttttctgctgggtttggataatgttttgggtaggaagagattgggcgatgctgtgcattgatttaacctgaacttgtttattgaagccagcacaaacatgatgaattaaaacttttgtctacagcagcactgtctgaaagacctttctgcaaagaaggaaatgttaatcagctctgcacagtatggtagtctgtagacacatgtggccatttagaacttgaaatggagctactgtgattaagaagttgtattttttattttaatttaaatagctctgtgtagctagtttctcctttcctggacagcacgtttttagaacctgccttttctatataatttctccagaatacatactgaactttcacatcttcaatacaaaacaaacagcctctcagtctccactatcatttgtcttttctccacttcctcccttcccattcacccctacagtctggctccggatgctgccaattcataggaattacaaagataaggtcatccatgctctcaatattgccacatcactgacatctgacactgggttatttctctcttttttcttatcatttagcttctgagtcaccctggtactgggtttcctcttctctggcttgttgattcattcctttatgcaatatgtctttacggagtgcctattacgtgccagaatttcaggcaatgatgagaaaaaggacactatctcacttcccatgtaggtgatagtctatggtgctcattttattttatttttgtttatttatttatttacttatttttacttatttatttgagatggagtctcacgctgtcgccaggctggagtgcaatggcacgatctcagttcactgcaacctccgcctcccaggttcaagtgattctcctgccttagcctcctgagcagctgagactacaggcacatgccaccacgcccagctaatttttttgtatttttagtatagacagggtttcaccatgttggtgaggccgg

SEQ ID NO: 36405 - DNA, 2294 bp, Homo sapiens
ggggaccccctgagcagagctcagaagagtggtactaagtgacctccaaaggaagattacagcagtaaaggaccttgagggccatccctgggcgtctgttctgatgatataggcacactaaaggatggccaggttcccaaaatgcatttccggaaaggaatactagtagcatttcctagtagaagacattagggtcaacatttggacaggcagttcaaccaggaagctcatggagaggcagctggcaagccgaccaggagtaacccctatccctggcattgcgactttgggcgtatcattaacttgtggggtccttacctaaaatacaggataaatgctcatatttcccctggcagggttgtggtgagggttgagagataatagctatccagtctggcctcacttaataagaaggcgctaacttaactacggggatggctgccgcggccccgtccgcgccgggcaccggctaccgcgccggaagcaccgaagggtacacctgtctgtgtcccgccagcggccgcgggaagagctgctggaagactagacggtggaccgcctagctcccgggactccgcggctgggggctgaggcgcgcgcagggatcggcgccctttcctctgattgggcgggacgaggcccaggggtgggccaacagacaaagcgggaggcaggaattggttaagccagaagagagggcggggccttggcccgcgcgggaggcgggagtggagtccccccgcaggctttctcttttagccccgcctgcttcccggctccagctggggccggagaggctgagtggttggtacgctgctcgctggcctcccagtcttcccagcaaccggtgacactgcccgcgccagactgaccactagccgacgcgggcgagagggacaggagcgtgacctccccatcccgaggggccggacgctcgggcgcctccccgctccccccactcggaggccgcgcgcgccgttagccccttcctcgctcccccgccccagtcccgcagtccgggaggcgggggtcggcagccggctgagtgggaaccgcgcggtgtctgaggaggcagtcggcgaccggtgaggggactgaagggcaggggagggcaagggtggctcggggcagcagtcctcagctgtggctagtcttctcccatctgcctcgggcgactggtgtctgcggcggtcgggagcgccgcccgggctgcgagtgacgcggggatactgcggggcgagcgattggccggacacgtccgcgcggcctgctcctcccaggccttcccctccgcctgtcctcgctggtccgcctcgggtgaccttttcggggctggcgtcaccacgacaaacgtcgccaggctgagccgacttaagggggcaacggccgccaccgggttctggcagcgttaaacgttccccactacgtttttggtgcccggtctcgccctccaagtcggctggcgccacgggcaaggggctagggtaggctcggggttgggaaggggctcgctcaaagaaagtttgcccagcaacttgtgacgcgcgccgactgaggcgccccaggattggctgcgctgctgtgggccacggaaagcgacctgttcaggtgccgtgttccgcattcggcgaatagttgtgcttcgctcttaagtaccaggcaccaagtccccagatgagtagccagcttcccttctttcatcttggagcccacagttcgcgcaagtggagctatggaaggcccatgctgtgctgttctaatcatgtgagggattcttaggggttgagggggaaggactgaaaacggctgcagaccgtttaggatgcctggagtggagacaggagttaagccccttactcagagtcgctcttaagaactgcccagggccgggcacagtggctcatgcctgttatcctagcactttgggaggccaaagtgggaggctctcttgagctcgggagttcaagaccagcctgggcaacatggtgagaaccctcgtctctacaaaaaaaataatgataataataattagccgggtgtggtagcacctgctcatagtcccagctccgcaggaggctgaggctggagggttgcttgagtccaggagggcgaggctgcagtgagacagtgatcaaatcactgcattccaagctgggtgacagcaagaccctgtctcaaaaaacaaacaaacaacaacaacaagaaggactgtcctaggcagagtaaatcctaagcaccgggcaaccgcaattctcagtgttagcaattttttttttttttttttttttttgaga

SEQ ID NO: 36406 - DNA, 627 bp, Homo sapiens
gaggtgggtgggaaagctcacttccatgaaggatgtctccatgctaggagctgcctgcaccctggcagaggtggccagtcacgtgaaggtgggcagggcccttagcatggccacacatgtccccagggcagatcaaggggcctctcagaaccatgttccccagccaggtgaggaccattttcactgggacccaggccaaaaccatgtgggtgcacaaagccaggcactgccaagtggaacatgaggttatttccaaatcatgggagccaccagcagggagagggcaggatggaaaatcccctggagccggtcaactttttgctcatggctagtgaaataaagttgtttgagtactagatgccaagtgccgcctttatcaaacctaaggctgctgaccagagtttggaagtgatctaagaacaggtccattcagttccaaggtctcttgtaccttcccagggcagctcagtgatcttgcatggaggaccacttgattccacactaaaaggtaagacttcaaggcctacatattgggttttctctgttaatggcaagtacaagatggctcaggatcatatgcctctatttctgctccagccagtcggccaggagtgacccggcagtctc

SEQ ID NO: 36407 - DNA, 2552 bp, Homo sapiens
tagtatgtggaagggaggctggcttgggtgcctctgaaggtgtagggctcaaagagggtccccaggagaaggtatggcctgctgagcactcccacacaagccccccatcttggccgccaggcccccgaagcccgggcaccaggctgcactctcggctgtgggcatgagacaagagcaccagatactgcagaccttttggaggcaaaggctcaggacctggaggggtgggggaagcagtcaggctgaactgggaagtctcctcctcttaccctggagagccatacccagggagccctgttccctcaaaccccagggcaacctcagccccagtccaatttatcattcttcagaacctagacacactagatcctgagacattgctcccttccccacccagaggttgcctccatcaaactaccctgtgctccccaactcaccccacccttcccaaacttactcagggctccctttgaaaggagggtgtttctgggtcaccctgtggtccctcttccctctggctctcaccccctgccatcccctacctacctgcacagaggacacagcctgaagaagtgtacctgccagcaggagaagaggcaggtcaggactcaggtggccagccaccctcagccctgggcactcacacatgtaaggggccagccctaagggccgctattcgctgagaccatgaggaggggagcaggaccctcggaggccacaagtcacacaggccgtcctggtaaagtgagaaacctgagggtggaaaagagcagcaggacaggccctggagaggaggctaggggctgctgcctgggtaccctcccccaagcccttctcccggcccctaaccggtccaacaggaacttggcgagctgcgagtgcagggagaagcccagccgctccttgaggaggcaccactgctccatgtggccgcccaggcggatgcggcacttgctgcggcgcgcgtccagctgccgccgcttctcccgccgcctgcaggacacgtccaccgccggggaggaagccatgtgcaccagaggctggagggtggaagggacgtcttcagcgccctgccgatctcgggggtcggggacccggctccacctgccgttagggcctcagtttcctcatcagtgaactggggcaagactaaactatttcaatagcagtggcaggtgtggagccaaaccccgtccttctatgatacagggtgttgaagctcagcgctaccatgtgagtgtcgtcgggtgggaggcaggcagacagaagcagtcagaacaaaggcctgcgccctccagtccactgaagtggagctgtggggaaggggcgagagactttcacgggaaatttcaactgggctgggggcggtccacacatttcatcttgaatagggcagcggcctttactggtttctaggggaaggaaaggtcgtgtcctggcgtgcagctgggggcgctcttcatagttgggtcgagtggcggtgaggccgtggtcagaggtctggagggcgccccccatccaccccgtcttgggcacccccacttaatgctgacagtgagtggagcggactaatcccaatggcagttcccaggctgcccagagcccccgtcgcgacccacccccaccccggccttacctgtgcgcccccacgcgccctcacccccactgcgcctgcgcctgcgcctcccgggcctagcgagcaggcccggagctgctggaagacaggggcccacctcgcgcgcgcagcgtttctcttttaagaagaaacggtgcctctcggcgtcggctgctgtagcccggaactgaggcccgcgccccagagggaggggcgagtcggaggccgacgccgtgcgcctgcgcactgggtgccccgcgcaacgcccgccgggaatcgtggttgcccgactcaagtcgcccgcgcgtgtcgcggagccccgcggcagttgtggttgggtggcttctgtggtgagcgtctgcgcttggtgaccaaaggtttgagggaaagtggaagagacagggtcaggcctcctgtgctccaaccccagcccacccggcctgtatggggacgttgcctcttcacttgttcccgttttgtattcaccttcgatttccccctcacagttgccacccgcaaacatgatgcagaatcagtcactttgaaagacccacagagggtccagctagagccctctgtggaccgcagagtcccaccagctacagcccacttctattaccatcagaattcctcctaaaagttgcctgcattctctgtgtacgctcacttcccatcctcttctcttcaaatggctctgatggagctttcctccccacccagccactgcagtggcgcttcacaaggtcacttgagacggtcatattgctacatagcagctgtcagttccgtccgcctctctgccctagaaagagcgcgactatgtagctctcgtcctcctcatctttatggctccctctacattttgggccccagttttacttctgtgacttcatatgctccaggttttccaccctcctcactggctccttctatcctt

SEQ ID NO: 36408 - DNA, 2166 bp, Homo sapiens
accacaacctccgcctcccaggttcaagcgattctcctgcctcaggctcccgagtagctgggattacaggcatgtgccaccatgcccggctaattttgtatttttagtagagacggggtttctccatgttggtcaggctggtctcgaactcccgacctcaggtgatccgcccacctcccaacgtggtggcgggattacaggcatgagccaccgcgcccggctgcatgacatatattttagtttttgaaaaatattttagcaaaagtcactttagtgaggccttacttaactgcacagtctaaaaatagaacttctccaccacttcattgcttttggtttttcctcacactctgtacatgtgattgtgctggtcatctccttcactagcaaatcagctcaccaagttggggctttgtctatttaccgttgtgttcccagtggacactcgatgttaagattcaacgaatgaatgcctggacgagtggtatctgggctcacaggtaacctcacagcccaccgggaggacactgccagagctgctctgcactgcgagtcccgggccttcccattggacgctaaggcactcgttaactgctgtgtaaacgcagcctgacttccctcacctcaggcgaggcccgcatcaggcccctctgacctaggacctcccgatccggccgttatcgccaaccgtatctgtgtggtttcgtggaggaagcgcggtggaccttgaggggagggtacgcgcaggcacaataaagcagaaagccgctataataatgatgataatgaagaaaaacaaaagcatccattcgtcacttagtggcaagcgtttttccaactactttccgagtagtaactgcttgccagagtttccccagcttgggccggaaggtgaggcggtagctcgagctttgcctttctcaggcattgtcctgcgtttgcggggccaggcgctggcacacggtcactaacccctggtcgttagcttcgattcccggcctgggagagcgctatcggccactcctggctgcattgcagtcgcggctttctccagagctccgccgggaacgggaagcgctgaaacgtcgcgaccagtcagtagggttcccacggccgcaactcgggtgtgacgcggcaggctggcaccagcggacacaagtatgaggctaagtgagaagcgctctgcttccgagtgtcaggatggccgagtggtctaaggcgccagactcaaggtaagcaccttgcctgcgggctttctggtctccggatggaggcgtgggttcgaatcccacttctgacacattcgttttattagcattttattccccggaagaaaccccagaattttcccggagtccgttggtattttattgtcttctccaggaagaaggttacaactagactactcatctttgctgcccggttttccctgtctgccgcagcaagggggctacctaccaaggggagggaagcagtctgcatattcccaaatgttgcgagaaaaccgcatccaatcatgtttctataggagatacgtcacaggatatttatttagtatagcatattgctaaatgacgcatcatgtcttccctggtggtctagtggttaggattcggcgctctcaccgccgcggcccgggttcgattcccggtcaggaaagtaagccgttttaaaaactgttgccgcagggctaaccataggtgatgttcccagagtcagctatgacttgacttctaaacaaagggcaaaacgcacctggtgtcctcattttgcagagtagttacctgaaatggactctactgcagtttatgcgcgccgtatatgtagtcagtgtctttactcatgatatcttaagaacggagaaaaaatgccagcagcacaaaatgatccaaaaagatagctctgggtatgccaaaaatggctggtcttaaaattatgtcacagatttcaaaaagtctccctaggtgtccaaaggccattagaatggcacctgttgcctagaggggcgggtcagggccggtcctagctccttaacgacgcttgagtaattgtcgctatggaaagagatcaggtacttctccctcaccccagcatctatcttttcattttttaaataagtagagataattgaaataatgccacaaccaaccctggtttctctttacc

SEQ ID NO: 36409 - DNA, 1746 bp, Homo sapiens
tcataactagagtggagagagtgtggtgtgctactggcatttagttgctagggatgctcaatatcctacaattaaggttctatttttaccaagtaaaaatataggtaggcaaggtagccagatgaaatacagggacttccagttaaatgtgaatcttagatgaacaacactgttacctgaaactcaaatttaactgtattttatccgtgaccctgcctcctataatgcacaggacagcctccttccctctcaacaaagaattatccaggcccaaaatgtcaagagtggaggttgagaaaccctgccatacagcagtggttctcaagccctagtttgtaccacaattaccttcagggttggtaaggccgattattgggcacaccctcagagtttcttactcagaaggcctgtagtggggtcccaagatttgcatttccatcgatttcccaggtgaagctgctgttagattgggggcacatttgagaaccactaccctagaaagtccccatgctctcctgattaggaaggagcgaggaaggtttccaaagtaggacaggggtgggagggtaagggagagtggcgggaagagctggcccgctggggtgggttatttcggccgttctggcctcgcaggcgttttcgggatccctctaggcgccgcggaggtcctggagtctcgatggtcgctcgggccggggcgtggcctggcccgggggcgtggcatggaaggccggccgaggtgcagcgagccctctggtgccggacgttgcgcggccgcgacgcccgacgccaacgcaggcgcagcgctccgattcggcgcggctcatggtccggttcgggctcgcgagtctccgtctggggtagggcaggtaggcctcagtgtgctcgcgctgcaggcagggcttcgcttgagtacaggagtggttggcgttgatgttgcgttttctcaacggcggcatccgaggagttcgtcctcaccactgcgcgccgacggtgggctggcgggaccaggacaggaacaatgggattccgagggccgcaagggggcgctccttctgcgggttggggtgcgaggccggaggccgggccggctgagcgggaggcggagcggggtgggtggggaccagggcggggtcgggctaaagagggatggattcagggcggggtgggagggaccagggcaggctcgggcggggtgggcgggacgaaggaggcgggcggcctgaggctggcggcgggactgcgaatgccacgtcacatcctggggcggggtggctctgtgccggggcgcgctgggggcgggtcgtttttaactgcgtctgcctgggaagctgctgaggtttctgagggtctttgtttgcccttctttctcttttgctagtgaggtgaagagaagggagggttcttccgtatcccacaaaagccattctgagctgttgggtgaaggggtggcctgcccttccacacctgtgggatatcttgtcaggtgggaggagagactgagaaaagaaataagacacagagacaaagtatagagaaaccacagtgggcccaggggaccggcactcagcataccaaggacttgcaccagcaccggtctctgagttccctcagtttttattgattattgttttcattatctcagcaagaggaatgcggtaggagagcagggtgataaggaggtcagcaaagaaacatgtgagcaaaagaatttatgtcataagttcaagtggaggtactatgcct

SEQ ID NO: 36410 - DNA, 548 bp, Homo sapiens
tcgaagaattggctgggtaacaaattttctttgggttatttctcagaaggttctgaatctgaatctattcactctgggtgtcataagcaagttcagaattagggacccagtaacccccatgaacattctcattatagccgccctcaggctgtcccttgtttcaaaatatgccctttgcagaaaagagtgaattggtgtcaaatttgggttgattacgtcatatgtggaggtgtgagtcagatcaaagggcagggaagaggtcctgcctcagatgcccgtgttctgtgtaaaccaaagttttctgttctttttggaagttgggaacaagagaaccatggagtacattctaaatagtgctgcaaaagtgaaatgttgtattcatctgaccaaaggaaactccaagattcttccgctaactctccagaaactgtccagttgcaataaaaggttttgtttatcagtatttaaactctaacttatcttttaatgggtacttccacatgcctacaacccgaatggagaatgacattaatagaatgaccttgtag

SEQ ID NO: 36411 - DNA, 3722 bp, Homo sapiens
aaaaaagatgtcgcaaagtttaaattgttcgttctcaaagacagccctgaaaaggttctttctcttcactactttccaagacgcccatagggaagagcaggtaacagtgaagaccagcactcctcagttccccagtgaaaagcaaaaagagctcgaggtcaatccggcactactggttgtccaaagggaggttacttcctgtagtgtcatcagaggcaaataaactatagactctagttacaatctagtccaatttccccagtttaaaaacctgaagctctcaaaacaatttaaataaaatttagccaaataaagatctttgttgctaagtgaatgccaaagtgctacaagatcctgtggagaagttctcaccacttcagcacaggcctccaggaaagtgcagggagtcttcctttctgttccagtaacacagcagcgcctacctagggctgcaggtggactggtcagctccaatcaaacatcaggaccgcccacagcacaggtcaatgaactcaggaactagggctctcaagctgttttcagctcaggaaagaatactaggggtgtaaaactgctttctggcagcattttggatttctcctgttttcacaataataagccaaatgggacatattaatttgcagaattgcctttccaggcagccagacgcagcagactcctaagggcctggaccagcaggtgcctggattggtaccttctgctcttcagcagcgggggctcaactcacaagcctctgcgtcagtctcttgggtccctttcacactgtagctcaaaatcgcactcaattctaagcagctgtaactggccatcgcccagctcggtcacactcaccaagattcacagccccgcacacggccagccccgcccccagccttctgggcacacacctcgggtccggctctgctcctggctgggggtctccttggccttcttacaggtgtacagccacttgatgatgcgggcgttcctctcgatgaccgaagtggtgctgggcacctgctctatcagctcctcctcctgcagcccctcgtcgtcgccgccgctgtgccgggagaagccgctgccggaggtggcgacgctcacgctgcgcaccttgagggtcacacagtccgaccccgcggtgaagttctccctccccagggcctccaccacctcggggtccaggccgcagtactggaagaaggtgtcagactcggccaaggcagcggaatagcgggagctgaggtccgactgtgagcgctgcagcccccgacgcctcaccacccgcggctctggcccagggggcgcggccgggacactggagggcgccgcggaccgcgcggctggggctggggtctcggggattgcggggtccgccgcggggccaggagtggtcgggaccgtctccgggttcccggccttgccctcgtctcccgtccggggcaccggcgccttgtccttacccggcccctggaagagcttcttcaccaggcttgccctggggccgtcggcgcccgatcctcgcacgaattcgcatttctgccggtagatgatcagcgagtccggtctcaacggcttccgcgcaatagccctgcgcgccaccggggccggggcgcgggccgggggcccagggtcgttccccgggcacttgatcgcccccgggccgctgccctcggaagcgacgccccggccagtccccggccgaccccgcacatacttggcgcgatccgccgccagcctctccactgcgctcctgcgcgccggccgcgcggcgtcggggtcccgggtagccgcggggtcccggggaaggagccgctcgttcgggggcgcgctcagggccgccagggcgcgcatcttcgcggggaatggaccgaccggggttccgggtccagcggagacgcgctcgagtggtagagccagtcagtcccagggccggttccgaagtccgcgccgggtggggaacggcgccccagtgcccagctgcccaggcccggggttggggagaaccggagtctgcaccgattggcgaaactccccagttcccgcccctcccgacctcatcgcccacaccgactggcaccgcccccgcccccgcccggtgccccggccctggccgcgtccccgcatccccgctcgtccccgcccgtccccgcctcctcactcccgcccgggcccgcctccctggccgctctccgggtgccagcgcccgccctcacctcgcgtccggggtcccggccctcacctcctgcccggtgccgtccccgccccccctcaccttccggcggcgctgccaaccgcctggaggacgctggggcgagcaggctctgaacccccactcgctcagccccagatccccgaggtcactgctggacgcaggcatttccggggagggggagcagaggggacgtccccccacctcccccgggcaggtgcctcacatcctttgaattcttaaagtgacctcatcgtgtttggaaacttgactgtttaattttgtctacctgagctcatattcttattaacagaaaggaataggacataagaggaaagaacacgcagcgcacgccaggatcagcctacgtgttgggtggcaagaacgcagggcctcggattgggtccgactcggtcgctggccggcagcgggcgtggccgggcccgaggaccgagctaggactctcagtggggcaggctggggccccaggcgcggctcagtggatttggaagaagcccagccaagtgtccagaatcattgctatttttacggtaaccgaggcaacggggaaaccacgagttcaccaggcagtggatcagcctaggaatgctaagagtctaagataaaatacttcccaaactccattatttcaaaaatttggacaaaatactaaagttatctctcagacatgtgaaatgttcacgttatcgcgttgtgaagacaactccgtaacaggctgtgctttcagccttgtggttgaacgctccgagcagcagcagcccggaaggcagggagggcgacaggtgcagatgggcccccaaagtgggcacgaacacctcaccaacgaggaagaggaccgcagcagggtggtgctgagtgggccttgggggtctttaatctccttgagccccagcgaagcaaaatttcatagggatagtagcacaacaataaatcgcctcctgaaagccagaccgcccagacagcctcgttggaacatgtaagactcataggaaaaggagtctaggccaataaagtagagagtgggagaagagaaggaaggatgcgggggtggggagtgaaagagagggacagagatggagaaagggggagctcctgggttgccacagatggtttcctacaggatgcgggaggatggggccttgaggtctaaagtccagcctgctctctgcttggcaagcctgttccctaagtcagaggaaaaaacctttttaattgtgtagcccaaagtgtcttcttttcctaatttgcactacttcatgggcaacagcagcacttctaagacagagaactgcaaagtacaggacctctggaatttgaccctgggtccacaatttacctttggacaggtaacaaacgttccaggttgttttgtcacctgtaaaaatttctgttttaaatttacaagaaaagacaatcccattaaaaagcggacaaaggacatgaacagacacttctcaaaggaagacatttatgtggccaacaaacatat

SEQ ID NO: 36412 - DNA, 849 bp, Homo sapiens
ttctgtttccacttgctgtgggatttttgtctccacaaggggagagtctgagagcaaagccttcataggggaacctggcagaaggtggagagagcacctgggctctgcaaagccagactgaagtcacaagccgctctggacttcttcgtcaaatggaccagcaacatctttttctgttaaagcaatttagactagattttctgatacatgcaactgaagcactgtaaataatacatgaatcttatcccctcagaagactttctactttgaactctctcaaccaagcagtattagagcaaataagcaaattcctcagttgagagttaatcttgcaaacatcctgctgtagggaaaggtcatggcctgatctgtaaacacgggaagagagccattggacttgggaatcagatgcagcctcacacggctgcagaccgcaagactcatcctagacacagcttatgtcactgtgatccagctgttgacaaggctggtcacagtgaggacatcttcagtgtgtcagctgaactacagaaaatgttacagattctaatcaacttctgataaaatcatgcgtggtcatagttacatgcagtgaatttctctgtcagaacaaaaagaatatgcaaataaaaatttagacataagcctcaaatcccatcctcagcatcaaatgatggctcacccatttttcctctgctgtaccataaggcatatagagcatgacctgatcagagtgctgatgtcccattctatcatactgatgaagacacaggtcattactaatgaagcctcttaaacctcacatcatggttagcatctgcactctcataaacgtcttaagtcccttga

SEQ ID NO: 36413 - DNA, 1974 bp, Homo sapiens
ggaaaagacggtggctaaacttcaatcaaaatcgctgtggtcaagaaagtcctggaagctgctctatcttaactttgggcggtttgcggttaacagacgcgcgacctagaaaccccagaggcatcgccggttttcccgtcctcctcctcccaccaccgcccagctcttgagaggggagggtgctgccggacaggtgggtccccgggtactcactgctgcccgcccggccgcggcgccccgtcccgaggctgcccaggaagaggaaggcgcgctgccccgccccgcggacaaggaggccccagcgagggcgtacctgcggcaggtgacgaaggaggcggcgcaaaacacccgccgtgtacgtttcgcgggacaaaaaccacgcgcccgccgggccgcgctcaggccttcgccctcagggacttcggaaccgccccgtcctcaagatcgaaaagcccagagccccgcggcggctccaagcacggtgttgggggtgggggtctcagggagcgcccaggcccaaggccgccctggtccggcgtggaccccgcggggctcaaggcaggttccccgcgtgacccgcccagcccctctatgcgaactcgaacgacaggcaccacagcccgccacgtgcgcgagactcgcgctgtgccccaacccaggtgggcggcccgcggagccgcgaggcctgagcccgccctgcaggtgacccgcggcccttcctcctccaggtacccctctcctgcggccccgtcccctataggtaacctttacctcccgcggctccttcccctccaagcgacccgcagccccgccccctccaggtgactcccccccgccaacccccgccaccacacacacacaccccctcgccttccgcggccctactccctccaggtgaccccacccccgcagctcctcctcctccggacaacctgcagccccgcccctgcaggtgaacggcggcccagtccctgcaggtgacccgcggaccctccccgcccgtcctactaccgtcataggaccgcctccgcaggcgcactggagccgattgcgcaggcgtggctctcacacgcgctgccctgttggcgttggtgcgggactgcgcaggcgcgcggggcaagagggtggcagtgcgcctgcgccgcgtcggcgtgcggaacgccgcggtgtctcggcgcctctgcgcgcgggaagatggcggaacaggctaccaagtccgtgctgtttgtgtgtctgggtaagagggcgccgacttactcatgttctgacgtcctctggagagttggatcgggcttgtgcgctgtaggttgtgccgccggcctaggaaccatgagggggaggaggccagggactgggaggcctagggtgttctaggagtgtgccgcagcgcccctgttccccatccgccccgtgcacccgcccagcctgcccgctaaacctgggtcccctcgcgcctgccatatatccggggctcttggcatctgcagccacagcccctacaagccaaggtactttctttgcgactactagaatccctctcgttcccctccaatgggcccaggtaggcctggaggttgtcggactgatgtggtctcttaggggcctcctgagtcctatgacaacattgttttgtttgctagtttccttagcccatgcttagatagggatctgagttaaagggagatgaagttttacggtttcgggtttcttgattgtaaaagccaagcaaaggagacctggaggtccctatataactttggcccatgaaaaatgaaagtgtattttattaatggcttttcaggaactttccagcttaaattattttcactcctagaatttcaacacttagcttgccttacttcaaacataatttattttccgtttggtcttcagggatcttcctttggtgtagcactacaaggttatattcctcggtgcctccaccctgagaggaaggcctaaattgtcagtagt

SEQ ID NO: 36414 - DNA, 408 bp, Homo sapiens
aacaggagagtactagtgtgccaggtgcacatggaagggtggggcccagcaccaagaatataaaaactcttcaggaagtgtgtgctgctggccttggcgtgaggatgatgttgctaaaggtatggtcagaggggccgaggctgcgttccatgcatctttgtgcggtgatgtgaatgctaaaagtgcatgtgccttagccttgtccaaaacgcgctggtgacgctacttcagtgggccaaggttcattggcatgcacccggcacacagaagcagctctataaatgatggttattattatttgaagtaattttgctgcctaaacaaagaaaagcacttatacttcgtgtacattggcttttcgtttgtttgtttttggagagggaaggcaggacagcaagtccggaacgc

SEQ ID NO: 36415 - DNA, 1302 bp, Homo sapiens
cgctccgcccacacaactcagccacgcccgcacggtgcaggacgccagcccagcccaagcccgggccacagagcgccggagccagctcactgcgcacgctcctccacaaggccccgcccggccccgcccctccccgcccaacggcccaggaccccgcctagcgctcgcgccccgacgcccggccccggccccctcccacagggcccaggaccccgcccacagcgcgcgcccccgacgccggccccgagccactcccacaggtctcaggaccctgcccagcgcgcgcgctccgccacaaggccccgcccacggccggggccttcttggccacaggccgggtgctctgtggggcctaccctacgcctctccgccgtcctcccccgaactggtggttacgcgggccgcgagttaccgtgagcacggctgggatgctgacggggaaagagctgacagagaaggcggacggcatggtgttgggaagcccgctctcacagcaaccgccgaacccggcctggccagaatccacagaggagggcgccaaatcctctctcgtgagatctgcccttctcacgaaacttgcgcttgcttcctctcgcggtaatttcatggcattgctaggtccagatatcgcgatatttcctggtggtcgctgtaatacggaaaacttactacgctgctgtgggacttgtgctcgctccgccaggaggccgagggcgtctttagttcgttaacagaggagcaggcggaggcgggtggaatttaggaggtttgtttcaaaggctcagggcgctgtaccgccacgccagccctgtcccacctgggactccctagaagggtcagagcatcaatgaggacggtgtccgccccgagaccctgcaggagccggggacattgcccactcctcggaccctgcaggacttgggaaggtgtctgctctcgcgaccctaagggcagtgcactcttagtctgggtcagcttagggttatctgtcttcactttggagatttaccagatgttcttacgcttcacttcgttgttcaacgacagatacaaaaatataaagttaattttcttccagcgaattttttccctttattttaacatctataccccaactttgacattttcaaattaaacattctgttattttaacatcatgaattattaagtgtatatactttaattgcatatgttagctcttgaactagtttaatgtttctaaaaatagttctagtggtggacttttttttttttttaatagctttaacccctcccagatctttcttaaaatctttccacagt

SEQ ID NO: 36416 - DNA, 839 bp, Homo sapiens
agccttggcccagagggaggcagagaacaggcatatggtgcagaacaggcatagtgcagaggtggatgcacattttccagattggttcgaatttttcaggacatccattttgtgctgtggccccaccccagccacgtaaatagggacaagttccacctgccataggacaccgcccgccccctctccagacacctgcctcttctcttctgcagctgacagcagggcttctcctgctgggtctgcaggcctccatcaggccctggctttgggggctcaccccagcccatctcatgcagcactgttggtgcaaaggtgtccctgctccagggctgggctcctgtagaccagcagaggctgactgagctggacccgtgggctgggggactttgacctggttctgttgagtcaactgacctgcctgagggtactgctactgctgtcacccagagtgcaatcaatcacaggccctgtgcccgcatttcacagctaaggaatggcagatcctgtgcggggagggaaggaaggaagggagaaatggagggagggaggcagggaggaaagtgtacagggagagacagagcgcagggctgctggatggagagacctggaccgggccaggcttggccgtgtgaggagcgcctgtccttctagggaccttggagatcagggagcaggctgctgacaaacgacttatttctcctccctctgaactcccaaattcccagaaatctgcctcgaaagtggggagagcagagaggctgtgaggttggaccgagggggcccacggcctcaccctccttcccacgtgggccacccctggacgcttcgttcgcaagcct

SEQ ID NO: 36417 - DNA, 623 bp, Homo sapiens
accggtgcagggaggcaagtcccccatgggtggggggataggggcgccacacggccggaaactgcagagtccacattcctggacccacactgcggttcagcaccggctttgcccacagtctcacgctgcttctcttcactctcagttaataaaactgcctgctgggaatgacaaataatggtgttatttaaggagcaggagccttcagcaagagtttgggaaactaaattaggaaacaaagacgggcctgaagaatgatgcattctgtccaaacgcggctgtgtcggtgctgccaattccaatccggtgactgcactgccagctcaggtccaatttggaagagaaccctgggagcaggcccagcgcggccctggggggtggtggcggccctggtgcggtgacagtgccatctagcggtggcctgggggcggtgctggtcccgggctctcgggaaagtccacacacctggctcagccaaggaggtcagcccacggctggtcccgggtgtaaattataaagagggtgcttactattttactcacacgttagttctgaacctgagacccagcggcctgttacagaaacgcttctccaattaaagtcaagtgctgctgagtgtaggt

SEQ ID NO: 36418 - DNA, 862 bp, Homo sapiens
agtgtagacgggccgcctttacctagtgagggccaccctgcttcagtgtgggctgcacagaaccgagtgtagacgggccgcctttaccttacaggaagtcttctctcctaggaacggaggcagcgtgactcctggcaggacgcaggcccagagtcaggggctcgctctaagctctactcctggtcctctccagcttgtgactgtggcaaagtcacttaatctctctatgccttgatttctccatctgtaaaatataaaaagcaatatacagcacctcatgaattcatcgccaccttagggagagacatacacagggcgtcctctttgcaaccgtcaacatgcacacagcagcttcctccaggaaccaaatgttctctttcatgtccatgagcaacgcattcccctttagagtttattctcctaggcttgacgcctgctgttcggactctgacccttgcccaggctcctgttgggagcaagccccagctgggacagcttgttctctgccagctacgtcagctctgtgctctgcctgatatggttccatgagctcccagttcctgtggaccagaagccctgcacacagccttatcctccctccttcccagactcggggtagactcagcccgtgtggcagcatcatggaggagctccacaccaggattcgtgctgtcacccttatttattctgtgatgtctccagggacttctggggtgagaggaccagcctagtctccttaaaattcatagaactaaaaaccttacaaaacactttcttacccattatgtcatttggccatcaattgaactttatgtgaattttatgaataaagatactgatactcagagagtatcagagagtg

SEQ ID NO: 36419 - DNA, 1392 bp, Homo sapiens
gttcttttctgttggctgcttctccttctgctgctgggctttagcaagctgatcctgagtgcagttggtggatggcgacaggccggatgaagacagcgatggcagtgacgtgacgtcgcggaaccagaggttgtgccccattgcagtggccattgccagaagcccaggcccgctgcggatccacagccctccctgcatcctggaacccccgccaccttgtcactgtcactctgggtgaactgcttgctttgtgtctgtcttcccatcagacgacaggctcccaaaggccaggccagccgtgtctgcatggctgagctcggggcgctccagcagggcgtctggcatgcagcagagagggatcaatactgagaacagaacagaggaaaagggcagaagctccagggccaaggtcagcaggagggagggcctgggcagccacagcagggacacgaaatctgactccgtttttttcatctgtaaaactgaaattgtgactcaagagttgtggagattaaatatgaagaccgctgaaaagtgacagtggcgctggctcacagctgcactcagttgtggtgacagccagtgcccttgtgtccacctatgtaaccatccccagcctggggacttacacagcccaacgtcacgtgtatttgctgcacttttagttgcaattcacaaaagctggctccggctgattaagcagaaaaggagatcaacgtgaggggctgggtggaaggggaggggtgccaggcagctcactctcaccagccatgccgagggccaggctaaggggagcctctgggggccaagctcggagcctcaccagggccatggcccagcaggggagtctctgcggcccccatccagcacaaaggaagccaccccacagctctgctgctgccttaggctgctgcgtgccagggaccgaccaccacctggaagtcaccggcactgctgccacctcgaccgccactcacagcagcagtggcagcccccactgtcccctcacgctgccacgtctgaatcagtctcacccaaatgctcaggccagcagagtcgggtcacagcgaaactggaaaatagatttcttattttcatattgggaaatgcgactaataacctaggaaatttccccaagcacaggaagactactccaaagataaggagcagccacaaacccgccagacgccggcaacctgacttctgagtgtttcccggcaccgtgaacacaatagacgacacgtgatacggtgcggcctctgcgcccgggaagcttcgccctctgctggcagacggcgggatccatcgggtgctgggaggaccgggaatcacagcaggctgaccagccataacagacagagtataaccccaaagagtcaatcgctgtcaaag

SEQ ID NO: 36420 - DNA, 827 bp, Homo sapiens
ctgtcctggggggattctcccatgatgctaactcaggcttagggcagcccctggccacccacccgctcaaggcggcaccttctgaaagccgaccctgcccagggcaccacttgtttgtgaagcatttcgtgaccactcgtcactctaataatcagtctctcaggacgtcctcaactctggtcagtgggatgatgcagtaggcaggaggcccgctggaagatccccaggatccagcctcgtgggccccggtcacgccggggggagtgcaggcggcctgcgcgctcagacttccgaagtggccgctgccgcgcctccagcacctcggggggagggcctgaccctcaccaggctggggtcagtggcgccttggttttagggcctcacgcctcacaggagctgtaacaacctgaaaagcagcgcttccaggttcccacaatctggcaggaccgccaccctcagcaaggccaaagaacggcctccaggggtttagggtcagagtcctaagtccagacacaactgcctgatcagttctgtcttttatcataagcaaccctgcctagtgacctgctagagcactgcccctctctggttcccagggagacagagctacaactgggcccaaaaaggaaagttgacgagaaggccaagctctgggctccctgcaagggccggcggtcaggaccaccccaaatatcatcctgcatcactgagcagccccaagaggtgtccccagcgtggggccctgtgcagcgagcctgtgcagagcacgcctgatgctcacaggtacagtgggaggtgcatctccaggttgtgagaatgggaattct

SEQ ID NO: 36421 - DNA, 1652 bp, Homo sapiens
ggtaaagaagaactttctatgtatttttacaactcttctaaatactttaaattgtttcaaaatcaaacatttttattttaaacaacatacagttcctaccttcaggaactcaaattctagaggaaaaggtgggcgtgtaaataaatgagtccaccaaagtgagtgataacttccaggtcagaagtcatgttcgggacaggatgtgaaggggaaggaggcaggccggctgtggccaaccctgttatccagtacaaccgtttaacctcctaaagcctcagtttacttctctgcaaaatgggaactagggaacagacacgggtccttgcagggctggtgggagatctgcaaaccgaagtcaccatgggaccgcgcatgctatcaacagccaggccgagcagcacctgccgccctcccagtgacccacctggaactccagcccgtagatcactggtgcatcgtcctccatgctgcggggaagcgacccgaccccggccactcacacgctaaggacctcgctacggccggcgcgtccccacctcgcgggcgtgttcccagcgcccattcattccctccccgcagcaaacgactccaaactggaagtctttctggcccagaacagcttccgtagtggccacttcctatttttcggatgtgtcatcaatctgttcctcaccagcgaccaatggcagcggcgctggcttgtgcgcatggccacttgggctcacatccgggctctcagcgcggggactcctggaggtgagaacccggcccagaggaaataagttggtgggcggagcgggccgcggaggccggctgtgggtggaggccggctccgagcgcaggccgtcgggagcaagcggcgattagccttagctagccatcgcatctaagaatcgctcacgccgtagttgggcgccgccatgtattgtcatttgtatgtacttggcgttcctgagcgctgggccagcgcttcacacgcactgccataaggagcttcatccaaccctatgaataagctgttacacttccattttaccgatgagacgctgcaaagttgagtaacacagtcgcagcgctcattggtccattgggtagccaggatgggcacctgagctgactcccttaggttcggcccaaggtgccctaagtcagggccatgcctaatgcatttctgcaggtgcccagcactgtgtggcaaagaaagcactaccaaggatggggttatgaaagccggcaccgcaccactggtggtcctggactgcatatgcctccgaatgggagtcggaagggaaggccctggggttcctagaggtctccaaagactaaagacttgtggtggagagactgcccctctttcgcatcctgctcaaagtgcctgccctggccttgggccagcagaaatggcatcgcaaggactccaaaatacatcatagctgaaccacgccgctagcctggttccaccggggcttccaggaccacgcacctttcctccatttctgtgattagctttcccctctaccctttattgatctccgtgacggaaatggttgggtctcgttttgctcagttgggcaaggcgcgtggtattgagttaaggctggatgagtatctgttgagtgtatgaaattttagagattacatgagaaatcaaa

SEQ ID NO: 36422 - DNA, 2282 bp, Homo sapiens
atcgcttgaacccgggaggcggaggttgcagtgaaccgagatcgcgccactgcactccagcctgggcgacagagccagagtcggtcaaaaaaaaagaaaagaaaagaaagaaatcaagtaagcaaaaacaagaaagaaagaaatcaagtaagcaatggcccagacatgagaatcatcctattcaaccactctgtttgccgatattaacttgcggagctaagagggccttcatacttcgggattaaacccacccatctatcactgatatctttatcattaattttattatacaagtactgcaggtgcatggtaagaaacttacaaaatacagataaacacaaagacaaatccatagaaacactgatttctaggatatgctggtcaataaaaatagcctaagcgactccctttcacccgccccatctgccacaggcttgcctattgcctctgagtgacagaatcaggctaggtggagtggagtctccgttcccatttccaagtacagggtccgctcccctcaactaccggctcctggttgcctgtgcgcgttcacacctagggctccaggccccgcccacagcagacgaaccggaaacgaaccccatttccggcctgggggcagggcctcgggttcctgcatcgggcctgagcagaactaggcgcgccgcggcccggcacgcgcaggcgtacagagctccccgggggtgccagttcctctccgattcccggcttctgtcaccttcctcacggaccttggtcacggccgcaggtgaccccttagcccagctccagtgggcgggtggcaggtgaggatcagggcctcggcagtccagaggggatgggaccgtgtagcgccacctcggggagggagcacactggctttggcctcagcccggagggaccttctctgggaccgatgctagagtgggcgtggggtccgggcgcggggtcgcctgccacccaagggcgtgtgtgctccgcgggccttgtgccaggctccacgtcgccgcggcccttgctctccacgtctgcagagggctggaagcgtctctgcagcccgcggagtttgcgggaaggggaagctgctgcgaagcgtgtgggaaactacccgctggcgcgcgcccaggcgtccccgagacccccagttccaggcttggtgccagccaggcccccagcaagccccttaacttcccttagacttaattcaccctcccgcggaaagaggttactaatgacctgccctgccaaactcagcattgtgaggctgcaatgcagtgtaaaagcatttgagtcactgtgtaaacgtccgctgttgctacacatactaattgtagagtatatttactgtgaagaccgaaaaagcgtttattcaacagaaagcgttagggtcaaagatgtgttttaacgtgtcattttttcactcttcactacgaaacagtgtagccccaaggaaaaattttcttggacctacggtttgtactttttaatggctacttgaagatatggtgtctttggattcagtcactgttcgcaaattcagaagatagtggcggataatgagccagtcccgtcttgggattggggtgggagagggacaggggaaaagcaaatgaaatattacacagtgttactcattcagttcttacattttgtgatatctgatgggatcttcttcacagttactaaactgggtgttgccactctgctttatcattaaaatgataattactatgcttgtgtctgtgcagctcttcacactttaaaagatgcctatgcaggggtgccactatttaatcctctttattctgatgtaccatctaaaagatcaagattttcagaggttacttcacttggtcgggaagctaagactcaacacagttattgagacactgccttcagagctctttctgcccacccctgcctggcaaccttgcaagaggagctgagaggtgaccagcacaaagaaaagagtattggcagaaagcgctgtgtgggtagcctgtcaccatcaggtactgtcagtgtgatgttaggcaaatcacttggccttctctgctgtatgatggaggtaataataatgcttcaaaagtttaggatgagtattaaataataaggtaaaatgcttgatctgtagtgagtgttcattacatggagacttctgttaatacgtgccacctagatttccactacacaccctcgtgcccttatggaaggaaattttacatgactgcaatttggtaaaagatatgtttacagagtgtctgtgtccaggaaatgaacct

SEQ ID NO: 36423 - DNA, 1363 bp, Homo sapiens
gcaggtacctgtgcacggtcagacatgagccagaaaggccttatgatagttctttgctcagatgggcgactgtttgcttttaatcattttaatataagaaagactgcagaaaatattccaattcaaatgtatgtgaccatgaaaagggtgggttctttccaggagttctggtttgactgtgggaggccctgctggcttttgtgcctgttgctaaatgtgaacccacagaaagtgtcatcacagccacactgaaatgagttactctagacattgtcctgctgcagttacgaaagcactgactaaaccgtgaggaatctcagttcagcttatcccgtaatagtcactcgctgatattttgcctgaaataacccttgaatcatgtttgctggacagacaaagtccagactgaacagtggtctcagtaatgcacaaagctcggcaggaccccctttgctaagaatgtccttgaagctggaatgcattttcctggaatatttggtgacagggaggtcacagggagtgatgagtcccgcccacatccctgtcaatcccacccttgcaggcggagcacagggcagcttctgcccctctcaccctcagtcttaggtcacgtcccaaacctgggccagggaaaggaggcacgagcaagggatggctgagcggggagaagcagcacagaccttccacaggcacccactcacggtgagccaggccctgcgctgagcatttcacctcacggtgtgactggcttgttttacagatcagcaaactgaggtctcctggttaagtgatatccagctacaggaggccacatagataatggggaagctagaatttgaacagggcctctgtgaactcagggcctgcactctcagctaacagctggtcctctccccctccacacagttgctcacacatgcactgacacacgtaggcacacgtgcacacaccatctcctgcacgccgcctgcttgtggaagtccacatgggacaccagatagtgttggaggacagccctgtccatgggcccctgtggtggggcacagcagatgactgtcactgaataaccccaggcaggcacagatgcgtgacgcgtgagctgccaccatgggcatcggctcctgcctgcactgggatgcttgcagcaaccctcgttacctgtgtgagaaagctctgtgtggccaggatctccaggctgcctcatgtgtaacattatcccctggttatcatagtaaaatagtacgctgggcctgctcagattcctcactaccctggagacaatctcggaaattttatttcagagtcatattttgcacaatttgagaagtagatgctgaattgcttttgcgtctggaagtgcttc

SEQ ID NO: 36424 - DNA, 3805 bp, Homo sapiens
gccgtctatgaggacaggatcctcatcagacactaaatctgctggcaccttaatcttggacttcttagcctctagaactataagaattctataaattgctgttgtttataaattgcccagtttaagctatttttgtcattttgttatagcagcaggtatttagtttattccaagctaaaataatcttccaattgtttgtatgtatgacaaaaggttttttagaactctatgtcactaataacagattgattaaacagatacacaaacatgtccacatgtgttacctctgttaaaaattatgggagatgttacatatatataatgttaatatggggtgtgtgtgtggcttttttgttttttgggtttttttagagatgaggtctcaaacttctggcttcaggcaatctgccgcctcagcctcccaaagtgctgggatgacagaagccaccatgcctggcccaggagaggtcactgttttggactgagcccctgcactaggccccaggatgagaccaaaccaaaatgcagccactcatgccatatgccacttgatcaaactaaaactttaaagaaggaggtgcatctcaaacagaccagcttttcctgcgatcagaagattccagtcttcctgagtcagaataataaggaagtcgcttctgctttaacccttaggaaaaaagtaacctaatgtaacttgacgttaaccaatcagcttttctacctattgttctgtttctttgttgccgccctacaaaacccactgttgtgctattaccctatcgagctcttattctattttgtagaacggaggttgccctattcacaaatcaagaataaaagctaattagatctttaactaaatttgttgtaattttgtcttccaacagcactgatccagaatggatattaagaaagcatataggccgggtgcggtggttcgtgtctataatgccagcactttgggaggccgaagtgggtggatcacctgaggtcagcagttcaagatcagcctgaccaacatggagaaaccctgtctctactaaaaatacaaaattagcccggcatggtgctgtgcaccttgtaatcccagctactcgggaggctgacacatgagaatggcttgaactcgggaagatgaggttgcggtgagccgagatcatgccactgcactccagcctgggcaaaaagagcaaaaaaaaaaaagaaaggaagaatataaaaacacacaggacattaaaaccacagagtaaacatgatttaattttgatagccctgactcagagcagaactagacggtaggaaaaactatgtttgagcccatgtaataatctaaaagatgtctattaaaataaatcttattttattctttgaatacattaagaagctgacctgtaatctcactcttgttcttgttcttaaaaccgtcaaatgcacaatgaaactccccaagtgtattaatttgaaccctctggttgtttggattgtggataaacataataagtcaaaatttattctcctctcattaatggaaaactataaaccacttgattgctttgaagaagtaccctccagcaaggtaagtgttaaaccttatcctaggaaaagacaaatactatgtaaacattaacatgcatgccctgtttcgcactggtatgccaattgtcacttccctcttctgttatttaggatagaacaagatgatatccaaatagattatgctggaatattctataatcctttcccaagggaaaaagtgtggtgtccaggtaaccctgtgtatttcatttaaatcacatgaatgaagattagatccagtcacccctcagcctatccctgaggcctaccctggccctctcttttgcagtaaacctttgttactgcaaaaccatttgcaaataaacaaggtgagcggatctggactggtgctgtgcaagcaacgggacaccggtgcaaagcctagccccgccttgcaaagctagcgttacagaggcagggctgacaccgggcccagccgggacccaagccagctccaccgcccactggagacgcccccaccccaccaccgagcgctaccccccggggatccccgacagaccgcggcaggaccccgcctcgatctgctggcgcccggtccctcccccaggacactttcaagcggagtcccccttcctccgatagaagaaacccctgggcctttgaccgaggttagccaggcaggcagggcgtcggacaagcccaacgagcccacgaactcgcagcccgcctccggcgaatcttgcagccctgccggccgacccttcaggtcgctgccaatcccggagctgcgcgtgcgcagcgagtcccggctgcgaggcccctgactcgccaactctgctgctgagcatgcgcagcacaccccaggcaacagaaacggaccgccgacccccaccagccccgctgctgagcatgcgcagcccaccccaggcgccggaagccgaccgccaaccccgtaaacttcgctgctgagcatgcgcagcacaccacaggcgctgggggctgaccgccgacccctcaacgccgctgctgagcatgcgcagcacacccaggcgccgcgcaggaggccctgaccacccagccccactgctgagcatgcgcagcccaccccaggcaccgggagccgccacgaacccccaaatcccgctgctgagcatgcgcagcatgccgcggctcccaggccgctgcccggcacctggaggaggctgggctgtgcgcggcgtttgggggtcggcgtcgcccgcacgctctgcgaggcttgggctcgcgtaccttccagtagagcaccccgagccgccgcagctgctccaggcccactgggcggccggggtcggggcggtggggttgccgcgggtcgcccggggcgtcgtccatataccaggcctgcaccatgacgcgcagtgcgggtgccgtgttcgaacccaggggccgcgctcggagcccgtcggccgcgctttatcttatagggaggcgtggacgcgcatgggagccgggattgggcggctggttggaggcagggccggcgcgggggaggccccacggctccgctgttttcggaagcaaaggcattcaagccccgaccctgtcctgggcaccctcggacctgcctgaggcccgcggcccggggccagccgttcgccagacgcgccgggcaggtgaagctcaccgtaggcatcgcacgtgccttgtgtgtgctgccgcggtctccctgcaccttcagagcaatcttgtgaggcaaacgacgttaaacgtgtttagagtatggaaagcaaatgcaaaaaaaaaaaaaaaagaataaggattttgttaagctcatgcagtccatatgggcacagttgagacttcacagctcggatcccaggtgagacattgtcctccacctccccgctcgccagacttttgcagtgtcggcattctgcagtgctaccctgtactttttaaacttcctcttgtttcctcttttcatcgtttctcccttccccatacactgtaatgtgctagtcttagaataaaaacaagcttcccctatcccattctgaatttttcaatgtagctaataaagtccagccgcttgaccatcctagatgtcttttcaaaccaacgagttgaaaaagatcagattatctcagccattccctcagtctctttaacaaataacgataaagcagacaggatttaaatgagactgctgtaagagcacaaccccaatgcatgcaattgactcttgaacttccagaaatattgcaagaaaaatacacacttatttcatttc

SEQ ID NO: 36425 - DNA, 2516 bp, Homo sapiens
aacatactttagaaaagcaagatgatggagaggctctgaggaattgccaaggcagcccagcacttgctgctggcaggagttcaagcgggcagaatcagatgagaacagcactcattacttcatacggacattgccggcccatgggattcctcctttgaagaggaatctttggaacttgaactgtctcttccagaagaatagccagcagcagcccaaaaatatgtttcatgaccagaatttatcaccccgatgtaagacacttgggaagaatctgtttagatgttttgaaagacagatggtcgccatcgccgcagacctgcgcagactgttatccgtctgggctttgtgatatgctcccaacccaggggcgcgttaacaaaccatatagggatacagtagagccacagaagaacaggaagatccaaactgctggaatgtggaacgcagataaggctctatagacgggcagcaagttttctctggaaaaggccagatagtaaatcgtttaggttttgtagatcgagtcaaaattgaggatagtatgtaggtatttatacaacaaccacattacagcataaaaaccattcttagttcatggaacatacaaaaacaggcagcagactgaatctggctcatagcctggagtttgccaatgcctgccatgcactattaataatagttaatttttatctgatgatcaagtgtactttacttctggcctgtggaaagaactgccaagagtcggagatgtttacactctgcaagctaagaaattagcctgtcccagattcatgggtgttaacagaagtcaagagattatcggctcagagataaaacacagcctattactcaggagcaacagcggtagcaggggccacagtgtctgcagttttgcacaggttgctgaacgccagtccccaccaagggaacttgaaaagggatgatacctgcatcttcagtgggttgcattacaggggaggaactttgagcttgggaaaaccaaaatatttccctgagtcatactcagctattcagcagaaatgcttcctgtgtacttcccaatttgtcacagagaatgttagaaagatgtctactcaaaggtcaaaatttaataaaaccagtcatttttacagcttcattaaagacattcttaagagaagcgggggtttgtttttgtttctgttgttccagtgcaggtgtgtgaaaaacacaatgactgctggtacagtgtgtaccatgtcgtggctctcttgggcacggagagctgagcccatcactgactttgcaccatgagggcagtgctcaacacagagaagaaggtacatgtcatcctggcattgtgagacaaatagttttgacttcaaacatctccatactgtaagaaccacagctctcatcttttttgttcagggtactttaggttgcaggtgacagaaatccaacaagttggccaggcgcggtggctcatgcctgtaatcccagcactttgggaggccgaggcgggcagatcgcaaggtcaggagttcgagaccagcctgaccaacatggtgaaaccctgggtatggtggtgcacacctgtaatcccagctattcaagaggctgaggcaggagagtcacttgaacccgggaggtgaaggttgcagtgagccaagattgcgccactgcactccagcctgggcgacagagtgagactccatctcaaaaaaagaaaagtccaagttacctaagcaaacaaacgggaacaaagatatgttggatcacataaatgagaagggttagagcagaacgcaccttgggcatggcaggattcagggctgaaagtatgttaacagctctgtctatgtctctttgtctctatcttctccatatgtgtgtgtctctctcttcacttagcttttcttctcttctctccctctttctgcccccttttctccctcctgtctctcttcctccctctgtctctccttctctctttctctctctcctccctatctcaaccctcttttctctgtgccttgtctgaatactcagctactaaaaagagctctctgcatgggtcagaaaacagccgccagtagctctaagactgcacttgcttgcaattcaaggcaaaagagctctgttatgtaatgatgggatatccagtctcatgggagattccagactgcaagccctttagatctctctgggagcccgaggtgcagactccactaccctgggcctggccgggtgcccagtctgggaggtgctctgcctggcagcccctcagccccacgactggtcagggagaggggcggtggaagggcagaccgacaggccagacgtccatgacaaatactaagctgccaaggtgtcctactggtgagtgtttccaacagcttgcaagtgaaagagacgagcaaagctgctctcaatgccacgacttcaggtctcataccctcctggctgttccctgttgaacccagtctgagtgctgccagggcagacaccattctgtggaggaggctgagtctaca

SEQ ID NO: 36426 - DNA, 2513 bp, Homo sapiens
tgtaagcccagcacttggggacggtgaggcaggcggttcacctgagatcaggagttcgagaccagcctgaccaacatggcaaaaccctgtctctactaaaaataaaaaaaaaaattaaaaagccaggcgtggtggtgtgtgcctctagtccccagctacttgggaggctgaggcaagagaatcacttgaacccaggaggcagaggctgcagtgagctgtgattgcaccactgcactccagcctgcgtgacagagtgagactatcctgtctaaaaaaaaaaaaaaaaaaggttaagatgttaactttatgttatgtatattttaccataattttagaaatcaattttttacaaagaaagttccatctgagtaaagcccaggcagtggaacagcaaagcccctgaggcaggaggttcccagcacattgaggaacggcagtaagagccgcatggctggagttggcaagtgcaggtgaggtgtggggtggggacagggggacacctgtgggtgtgggggaggaatttgcattttattctgagagggacaaggaagtcacgggagggtcctgagcacagcagcgacgtgatctgacatggtttgaaagtgccatcctggctgctacctggagagggaggagctgggggagaaggtgcgaacccaccaggagctctgcactagtacaggcagggaaggacgcagcctgcagtggaggttagggctgatcagactagagatgtgttgaaaatggaaccaaaagcctgtgctggcaaactgaacagggtaggacacacagcggggtccaggcgtgagcactgtcggtcccggccacgagagagccagcaccaggtcctgtactgaccacagacacgtcactgccccaagacagggcggtcgtgtgctgctcagatggttaaaacagaaaaagaacattgccagcagagggagggcccagagactagagcaggatctctctgcctcttactttacacattagagaaaggaaaggacttgtggaaaaatactaatttcattgcactcacagagtagagaattttaaaagaatgacgtgtgtggctttatctggtgagtcacatgtcatacagggaagaacggtcggcctagagtcagaggagctgactcggctgcagtttcctccctgtaaaataaaacaaatgggccttgacaaagaccttcccggaccaagcttgcgtccaccgctccgagtcccctcccctctgggaccaagcttgagtccacccctccgagtcccctcgtggaccaggctctgaccttgggctctgtcctgggctggctccgtttgagcaaatcctgctgagcctgcttggggaaacccaccctgactcctgacgtttccacttaggaatttctgtccacaggccccacccctgctccggggctgtcagctcccacccatccctgtactcggatttgagccccatctctctccttttctgcaaaacctcactggagtgggcccttgaataatgcctcttcacacccttaacaagaatttcctttttttctttaccaagcatcccaacctaccatttcagcctgctcaggctgctgggacaaaataccacaggctcgggggcttgaaacaacagaaatctattttctcccagttctggaggctgcaagtctcaggtcaaggttcccgctggttccgtttctgcagaggctccttcctggctcgcagaggctggtgcgtggtctgtcccgggagagtgcccctgcaggcaggagggagcacgagcactctggggtctctccttatagggacacccatcccatcgggtcagggcctccccacccttataaccttaaccccagtacctccttagaggcccctctccaaatggccacgccagggattaggggtttgacatgaattttgggggatccattcagttcctaaatgtgatccccatcaattttcttctgggtttcaaaatgttaggttaaagcatgttgtctacctaaaaggagcacactacatattatacgaatctcagatacacacactgtgccatgtcacagagtttcacagagcagatgggagctgcaaagactggggtgggatctgaacacctcagctaagcatgtgtccacctggccactggggtttctgctggtcagagtcccacagcaccgatgccctttacctgccctctttgaaggcagacctttcgaatattttttatcaaatatttattaacaggtattacaacatgattcaaagatcaaggtaacatataaaaaggctaggcacagtggctcatggctctaaccccagcgtgttgggaggccgaggctggagaattgcttgagcccagaagttgaagacccgcctggacaacgtagtgagaccccagctctaacaaaaataaaaattagctgggaatggtggcacacacttgtagtcccagctactcaggaggctgaggctggagtatcacttgagctcaggaggtggaggctgcagtaagcttt

SEQ ID NO: 36427 - DNA, 2270 bp, Homo sapiens
tctagtttataatacctaatacaatctatatagttgtattgtctttttatgcgtattttaaaactgtattctattttaattttttccaaatatttttgatctatggttagctgaaactgaggatgcaaactggatatagaggaccaatttttgcgtgaaaagggcagagtcgcaccttatagttttatcctgcacgtcagactctacacctgtgttctactgtatgccagccagccagcacaccagcaccataaggctttcgtcaaactcaaagcataacaaaatactgcggtctttgaaaaaaatattaaccatttctttacaacaaaaaggtcaacttctgagatgcttcttcctcaatactgtagctgccgtgcatggggaaacacaggtaacgaactttggtatcttgtagtgggaagagttctggtggtacagtcagaacagctgggctcaagtcctttctctgtcagttacatgccctgggaacttcctgaccccaagaactatacctgaaagtgagaataatccctctcacctccaagggttgttacaaggatccaactgcaaatactggcttattagaatttgccttttttaaaagggaagattaggtactgagttccaatcccaatttagctggtacggaaagtcttctggtaacgggggttcgttctgattacgtgtcactttttgttgcactttaactgcaacaaagatggaggattaaacacagggtttattaggccacccctaacctttacgcgacgtttctgatatttcaaacaagtcttcggtgcgttccagtcccaggccatgagcctcctggaaccccgccggccgagcaggaaaacgaggcggtcccccgaccacccacagccacagcgcgcggcacagactcggaccgccaggctcccgccgccggggttagccgggctccggcctccctcgaccccgatgccggcagggaggcgcctcggcgggcgggccactcaccaggtcagaaagaccccggtcttgcggcccctcctcacggcatagaacatcccgaacccgcgagagccgcggcggcagggcaaggcggccaaggcgactctgtgggccaggaacagaagccagctcatcgctcactcccggcaccgggaagcatttcgactcccggcccagcgtgggcgcgagccgccggcgctcaacaccgcacttccgtcaccggcgcgggaagatgacgcacgtctgggcggagtcctgatgagggccggggcctagggaggggcggtgtcgtagggcggagcccggagctcggcccctgacgagcccgaactcgtcaacttcctgtcggtacttgaagaagcggagccagggctgagatcccgaaggcgggcgaggtctgggatggggcggggcctatgggagcggggctgaagccctgggcccggcagaggaaggtcgagatggaccatgttgggccccttctctccccgcccccaggccgcagttcgggggccacgccccggcgtgctcgggtcaccgcgggaagcccttgaaccccctggcgcccggcacccacgtgcggtaaccgcggctcctcgagagctccagggatgcggatctacagtaagggctgtggccagatgaatgaatgcacattttttagtgggcagaaagatgttagaattcatgaattagaataagcacaaaggagggcgagaggggaggccgtggaagccgcattcctccccttgccttgggcgcccacccccgaaggggcgcgtcccctccctgctccactgcacgtgggtgtttaaccaggggatatccagtgcctcaagcaccacgacccgggagaaaactgagttgagaaggtaacttttagaattctccccatttgaccttttgctctgtaagcaaatcaagtaattttaaaagtgttcatgggttggaggggcgtggtggcttacgcctgtaatctcagcactttgggaggccaaggcgggtggatcaccaggtcaggagatcgagaccatcctggccaatatgatgaaaccctgtctctactaaaaatacaaaaattagccgggcgtggtcgcctgcgcctgtaatcccagctactcaggaggctgaagcaggagaggcgctcgaactcgagaggtggaggttgcatctgggcgacagagcgtgattccgtctcaaaaaaaaaaaaaaagtctccattggcaaacattgttattcgaattatttttaaaccacttttctttaattttcttaaggtc

SEQ ID NO: 36428 - DNA, 1964 bp, Homo sapiens
agttcagtcggttttacttaataattagcacctagtacagtactagcatagaatgaaggcctcgcaattttttttaaatttatttttagacagggtcttgcgctgtcgcccaggctggagtgcagtggtgcaacctcggctcacggcagcctcgacctttcggctccagcgatcctcccgcgtcggcctccggggtagctgggactgcaggcgcgcaccaccatgactggctaatttttttttttttttttttgtagacatggggtctcgccatgttgcccaggctggttcctgagctcaagtgatcctcctgcctcggcctcccaaagtgctgggattacaggcgtgagcctcagcgcccagccaagttagccttttttaaacgtcctgtctccggaggttgccgaagttggttttcttcggcctccttctctctcccaggcccagggctgggacgaggccggttcccgcctgcaacctgcactgaagacgggaaccttgggagccggtaccggaacgctcggaaacggcaccaaagtacgaatcctagggcggaaaagcgttaccaagacactcgtccccagagccgcttcctgggactctctagcctcctaccgcttctcagtgatgttccggtttccgccctcctcctcgcgctgtttccgcctcttgccttcggacgccggattttgacgtgctctcgcgagatttgggtctcttcctaagccggcgctcggcaaggtaggttggcggcctgctctccgacagaacttttcttcttgggttgaggaaaacgccttttggagtcaggccctggaggggcgagccttgctcacagggtggggatacagccgattacccgccctgtgctttccgatggcttctgcggggcgagcggggcctggccggggggtgcgggcgggagggcgagccagcggcgcctgcagcccgggccgcgtaacgctgaccgctgtgccttcagttctcccaggagaaagccatgttcagttcgagcgccaagatcgtgaagcccaatggcgagaagccggacgagttcgagtccggcatctcccaggtgagagggtttccctggggtctggggtggggggaggcgccccgcccgggaggggaggcggccgcgcgtgtgttgggcccggggtgctcggacgcgcgctcagggtcggtcctgctgttcgttgcttcttaggctcttctggagctggagatgaactcggacctcaaggctcagctcagggagctgaatattacggcagctaaggtaagctggcgctccctcggctgggagggaggttgcggcgcgtctccccgcgcagtgcctgagagggttggacctgggttacggttgatgatgacttgccgcctggccgcctaacctgaactcaggttcggccgtgttgtttgggagtgataccgcccaggtgcggggagtggggttgcaggtaccctgcggcttaagctgtccacatgcgggcggtggagaaacgtggagtagggagggcctgggcccatttcggaccttatttgcccttacttagttatagatacggcaaagagctgtggggagctcaggatgagattctctctacccttagcccggagttgccgcaagtgggggtgcagaagtggtagtgattggcctcctggcctgaacagtctcccttcctggaataaggaaatgtgaaggttggagagagatgagaacatttccgaaggatgcatttatgattaactcaaaactagtattagtttgtagtgcagctacggtgttagtgataaggtcttcttatcctctaatttgaccacaacgtttactttctgaagcagttaacacagtggatttttgtttttttctttaggaaattgaagttggtggtggtcggaaagctatcataatctttgttcccgttcctcaactgaaatctttccagaaaatccaagtccgg

SEQ ID NO: 36429 - DNA, 1412 bp, Homo sapiens
tgaactcctgggttcaagtgagcctcccttcttggcctcccaaggtgctggaattacaggcatgagccagcatgcctggcctggggttaacttgattttcagttttaaggcctgtgctggagcaggagtgtctagtgtggcagacagttgggggtgagtaggatggtgtttggggacaccagaacagctcctatgtcttcactgagtgtcggtccatgtgggtcaggcaccagggtagactcttgaaggattagctcaaatccttccaaggaccctgggaggtaggcagtggtttccaatgcttggaaagttttaaaaacgagaacactgaggtcccaccggcagcatatctcatcggcagctttagggtggggcccagccatgtgttttaagaagttttccagtcgattctgatgcaagctcaagtttgaggacctctgatagttgactccctaatagtctctgatgagacagtggtggggccccgccctcatgcgcccaggcagggaggctgtgctccagatctcatgcctgtgctccagatctcatgcctgtgctccggatctcatgcctgtgctccggatctcatgcctgtgctccggatctcatgcctgtgctccggatctcatgcctgtgctcctggacagctgtgcgctgccggactggcacggtcagagggaagcgccggggagaagatggaggcccagccccacactgctgaggcaggaggccagagggctccactctgtccgggaacttaaggacggggagaggtggctgccgttaatgtcctcatggacaatgtcccagagatttggcagcatgcactgtgtgatcccagtgagaattcccatccggagacaagcggggttttcatccggctcctgctgtccagatttctgagttatctctgagaaatgtaaatacgatttgggatttgcgccagagtcttttcctggccccctggcgtggactcgttccatgagagggtcagggttcacgaggcaaaaggctgttcccagcagccacgacttcaacactttcaagaaaaagctgcggggaggagaggaaaaaggaggagggggaaggcctcctggcccttctgttcccagtgcaggtgtgaacacggtttatagtctaactgtgcttccaatacagtgtactcgaaataggaagttgaatgatcacttatttatataactgagagtaattatcggcttattggcatttttttttttttttaatttttaaaaagcccttaacgtttcaggaacacaaaaacaaacggaaaacacccacatcagctgtgaaacagacgctgggcgcttgggtcttggggggtcctgtgggccttgctggcttgcttggtgacaagtgcagctttagtgtgacgggcccagactccgactggc

SEQ ID NO: 36430 - DNA, 961 bp, Homo sapiens
gttgtgtccctgcggtgacagcagccacgtagacctgacgaccgaaagagcagtcaggagaaagaaaggtcactttggccgttgatggcaaagacgaactctggatggaggctgggccaaccccatgcggagctccatcggccggggaggcgggaaacatgcccggcgtttcttcaggggcaggacgagatccctgacagatgtcgcgtggctctcaatcgtccttattcgcgggcagctattcatccggatgctcctcccttaggcctgaaactgctctcgcgctctgcccacgccgtagaaggcaactcaaggtcactgcatggaaaccgtgcccttcgcttcccctgtgggcccatcagggtctgtggccggtgagggctgaggtcaccagacgcaacccggctcagctcagcagttcggaaccaagaaccacacgtttcttagttgcaagcaggaaaatcgcagtcgggctaatttaagcacaaagggaatttgttgaaagcgttttgggagctcgcaggaattctgggaggcccggagccccgcctcggtgcgtgtggaagggaacaaagcccatggattgtgccgcccaccacgacctgcaagggcccctcggctgccagcagcaggtgcgggtggttgctaggctgcccgctgttgctatggaagcggctgtgctgctgtgtttgcatttcactagcttcctgtgcagagcctgggggccggtctgtctggtacctagagctcggggccattttgtgggcctgcacaggttgtgcactgcacaaatccagagccactattcatagagctacaatccgcacaattctacatggaagctttgtaggcgtccatgccttagatacaaaggaggctgggaagcacatatttttccatttctatggtgggaagaaaatgtgtttcctaaggatggagatatcccaaacagcgtatatca

SEQ ID NO: 36431 - DNA, 1030 bp, Homo sapiens
gcattgtttgggaaccaccactgaagctactaccttgtattttacaaacactgaaaataaattctaactataatgctaaatcatgggcctccagtatctaacatactgcaattctattccagaattccttacaaaagtgtttccctgcccccattttctggtgactcatgtcacaaccaagtctgagtgtggtctgatggatgaggcagtgtgtagaagtctaggagacctaggagacacacagacaacatgcctgttttgaaagtctacacactgggttctggcctcggctctgtcattaattagtaatttgatttaggaaactttcttactcttcccaggccttcctcttgttccagatgagaagtttgaacaaaatgttttcttaggtcagtagcacctgagaacgattctgctctgattagacacaaaaatgcgacaggacattattgtgtcgttttacaaacgtcagttcaaatacatatgaattgctgagaaatcctgcccaagctacatgtttgagagcaaagtggactggatgcgtaattcctggagctaaaaagggaaaagtccttcagacgtctgcctacagcctgtgcttgacccaggagacagagtgactcatgcatgccatttgctgcaattccctgacctgtgcaagcacaagggatcagaagtcagactcataacaggaaatgctgctaaaattatagctccctccctgaacctggccttcctgctatctgttctttttgatgggacataattgagccagctctggttacagagacagaggcttgggaaagtcaatggtcagaatgaaggtgaccctgcagaagaatccatcaaagaatagggtttctttgtgcatgcatgctttgcgtggtgggggctgggttcagttcccaggtttgtgactgaatatcattttcggcttcaatgcctagtgctgacatgagtttctccggatggcttttctataaaaaggtgagtgccttatcattcatcttgtccttctcattgaactttt

SEQ ID NO: 36432 - DNA, 648 bp, Homo sapiens
gagctcttccatccaaacccatgtttaatttgtgatcggaatacaattttattaatactgtgtacagttgcagaagttttgctggggagcttcaaatctgtttaaagaattgcaaatatatgaggaccccaagtcatcataagcacttcctaggttgctgccaattaaagtcatgtgggttcggtaccttcctagagttgctcatccaagatttaagtcagggccattgctagaaagggagtcccttctaggcccactcagccctggccacccaggtatccccgccctgaacactgcggctcagagcaaccgagggcattcatcgatccctgcccttgcagctggcaggcagaaccaaagaactggcgccctttgtcaccttgtttgcagtgtgctccgatcactgcaggggaatgtgagtcccacaggctcctttgcctctgttgattgccacatgcatttccaatgcagggattctccccgaagtgccctttccccacattcactgctccttagctctcgctctgcttctgactttcactgggcaccttctcagttgcccgggggaagagtgcttcctgccgcactctgtcaccttcccattgttataacagatgcacaaaaaatgactcctcctatggctgatgt

SEQ ID NO: 36433 - DNA, 1775 bp, Homo sapiens
ggtgcagcgggggctccgggacgggcacgacctgtgcgcagcccacctgcagccgcctgccgtcttgcacctcccagaggcgctgccacagctggccgcgcgggtcggcctcgaactcgcccaagtgcgggcgtggtgcctcctgacaggcgcccagcagctcgagcagcgcttgccgggtgtcagggtcatccagggggtcgcgcagcaggaagccttgctgtgcgccgccggcctggccgcccgggcagtagcagagcagcctgagcagctggcaccgctggaaggggccgcggcgcagctggtgcagcaggcgctggtgcagccgcgccgcccggacccgggccccgcagccggcgtccggggtcacgggcacgcacagcgagtagctgcgctccgggggccccagcagcgccgccaggcgggggtcgggggcgtctgcgtcgccgggggcgtcggcgcctagggcgaagtgagccagggtgcagtcgggaagctccaggacgaagcggcgcggcggagccatggccccagcgcagaccccgcgccgcccgagcagcggccccgacagtggcccgcgcaggagccggcgggcgaaggccatgggcgcctcagcgacgccgccctcggccccgcctcggaaacgaaacctggcgggagccaggcgccggcgggaaacgaaacccggagggagccaggcgccagcgggaaacgaaagcgaagcgttgcggggaaacgaaagccggaggcccaggcggggcaggagccctggggctggggcgcccttccggcctctcctcctcgccgcgagatgtgcgcgataaacggccggcgctcgggagcagacgcttggccccggggccccaggtgcgcggctccgcgggcctgcgcggtccccaggcgccggctcccggggctgacaccgaatgaggccccgcgccgtcggccccaaggtagctccgtgtgcgttctgcgggtggctggcggccccgaccctggtttgagttcctcctctgcggcttatgccgggtgcatggaggggggcgggggtgcacgcgcgagggacagagaagtcccttcccggtgtaacgggctcttcaacgcccacttgcaggcgcactactgcccttggatgactgaccaggccctgcagaccatgggctccctccccgacctcaactcctagctctgaccacgcgtccccgcccctctaatcctgcagagctgctttcctgcgggaacagggcgcagttctggctcttccctctcctgtatcttatctcacctgtgcactcactcacctgtgcacacactcacctttgcacacactcacctgtgcacaagcttttccctcttcttggaattgccctctcccttttgctgactctccaactgggaagtgtcgcccagattggcacctcgaaatcgcctttcttccaccaaattgaagtttcctgcactaaggtgaagtgtgtcaggatagcaccctctgcctgccacagtccagcatcagcactgttgctgcctaacagtgtaactgcctaacagtgtaacagtgtttgcgcagttatttggatattttattctgtgtttactcattaactgatgccttttaaaaatgatgtcaagcaaaccaaaaacaaacaaaaagataatattctccagggaaactctctcaaaaaaatagaattgagacgaagattgaaaacattagatgagctgaaagcagttttttttttatgtcttaatagtattggacttaaacttgggattat

SEQ ID NO: 36434 - DNA, 1423 bp, Homo sapiens
ggactcttccaacttcctacaggtgtcacgaaagcacaagaccacacacttacacacagttctgatgaaagagggctaaaaggaagatttcagtaaaaaggtcaacaaggctttctaaaaaaactgtaaaggtaaataaatgatgtgtcgcagtaattctcaccaattaggaagcatcttagaaaagcattggatttcctctagttaaaaacatctataaaaagtgatatcaaaatataggaagatgtaaatatctaaattttaacactgtcaccttgcataaattaggctgaatagctgatggaataagacctaaattcaattttgttccatgcctttttactgtgatctgaaaggggtcttgaggtgaatgatcctgtactcatcctccaccagccaatcagtctgtttattatttggctttaaaaagaaaccccttcaccatgatggagcaaaaactgttacttggctatgtcaagagaaagcaatgcaacaagtacaaagcgtgctgattaatgcaccttgtctatctctatcagacagagagctagatattgatagagactgctatcctcatgtgtaactacatcaagctagagagactgttataatacaagtggactgaggcagccgtgagcagagaaaccaggaatgctcgccccgatctctagtcttcagtcttggccctgtttcaactttcagtttcacatgtggaaaaatcgaaactctaactcagctgagtgttagtcaaagaaggtgtgtcctgctccccaatgacaggttgctcagagactgctgatttccatccctatataaagagagtccctggcatacagagactgctctgctccaggcatctgccacaatgtgggtgcttacacctgctgcttttgctgggaagctcttgagtgtgttcaggcaacctctgagctctctgtggaggagcctggtcccgctgttctgctggctgagggcaaccttctggctgctagctaccaagaggagaaagcagcagctggtcctgagagggccagatgagaccaaagaggaggaagaggaccctcctctgcccaccaccccaaccagcgtcaactatcacttcactcgccagtgcaactacaaatgcggcttctgtttccacacagccaaaacatcctttgtgctgccccttgaggaagcaaagagaggattgcttttgcttaaggaagctggtgagtacatggtcctagacagaaatcaggattctcaaccactgggcagtggggtaaggcgagaaggggctgggggtatgcacaagctggagagcttctccaaagcttgaggtcaccatttacccttgcatggtgagcatgttgtcctatgagaaaataattcagtgaattttggagtgggcacctagtccttcctaaatcacagaattggg

SEQ ID NO: 36435 - DNA, 988 bp, Homo sapiens
agcgttgggctgggtcaccccttctttcctagcttgctgctgtgtgttccctcggtgtaggaatcaggggagtgtcttctggaggccactaaagcaggaatagcattttcatgttagcgtgcacgggcggtctccgcagcccctcctcgtgccggagcctgtcctggggcctgcggggcggctccgggcctcgggccggcgcaggcgggcggcagggggcgctgtgcggctcggcgcgggggcggggccggggccgagcctcccgcgtgcccggcctctgtgcgcgctcgcgccccgcccgcgcagccgcttctccccgcgcgggctctcggcaggcgggaggcggcagggctggcattgcagtgcgggccgtgcgggctgcgcgggcgcggggaggcgcgggcggcaaactgcgggcacccggcaccccgcagccagtaccgggcggaggcgtcagagccgcgcaccgcggacgagcaggcccaggtagagtgacgcgcgtcccctttgtgtccgcatcgcccgggccggccgcggagcggggagggcgggacgcggcgctgcgcggccggccttggggctcggggcttgcggccgcgcctgccccgctgggtcctgccccggcgcccggtggcagcgggcggggggcagcgtcccgggcggggactcgcgggctccgttcagaggacgcccgccctgccctgcccgtgtccctgacctcgtccctgctctgctcctgccctgccctgcctctcgcaggcggcgcccgcgccccagggcagtgggcgcttagggacctggcgtccccctgcctgccctgcgcggtcgcgggtctgcgctgcggcgcgggacagggcgccccgggccagggtcccgcgggcgagctggcggcgggggctttcaaggttcgcggccccgcccgcagaccctggggctggagcctcggccccaagaggaggtctgggaaaggacgacgcgtccggggcat

SEQ ID NO: 36436 - DNA, 543 bp, Homo sapiens
taaaagatggagaaactcagtctcaaggcagttgccaggacgagggaaaggtccacctacagctgcacttcctggacaatcttaaatgccgaccacgtggcagagcctgtgggcgtccacagcaggcgataagacacgcctcccatcagagagcagatgctgagcattcttggcctcgcaggccgtaggcctctgctgcacctgtcaactccacctggcggcacagaagctgccaacggtacgtcagtgagttaccttggccgtgttccagtgaaactgtttacacaggcaggtggaagtgactgtggtgatggttgcgtaactctgtgaacacactggaaaccattgaatgtgtgtacttgatctgaattgcgtggcacaggaattatgtcccaataaagctgtatggataaacaaaacagaacagatgatgaaggcagatttggcccccgggccatggcgtactgccctctggtctagagagttggtttgagctcctctgactgttctctttgcacgtggcccggcacggcttgaatccac

SEQ ID NO: 36437 - DNA, 741 bp, Homo sapiens
aagccatgtcagccagggacagcgttgagtccttgtgttaggatggcctggtgccaaggcaaatgtttaagcttggctgagggcttgacaagttgcattcaatgaatgttctacgttttaaagaaaatgaaaacccaggagcttttttgggaacagagggttggcttctcagctggtggataataaccacacaggtgcactgcctcccagtgacgcggggtgaacatttgacccatagagcctggtgaagccatccctgggaaagcctgaagcaagtgcagctctgagtgtgtgcagctctgtttgacttggctgcagtccccacaaacctggtggggggtatagcccagaggaaaacagccttgacactgactctggtcactgccatgctctgggccacctgtgggtttcacaacccactttcccttgcccacagcatcccagccagttagtgtgtattcccagaaaagaaagatcccattgctctcttgctccaatgctcagtatctgcccagggtcgacgcctaaaggcactcacctgtgtacacctctgagcacaggcgctgggccagctgcaccatcagaaatctttgttgattctgagtctctctcctatttccaagcatcaataaatatacaagttctattgcaatggggaagaaactaatgttcagtaagcacctgcctccagccaggtgctttcacaagcagtactttgtttaatcttctaagcaactgtat

SEQ ID NO: 36438 - DNA, 1150 bp, Homo sapiens
gaaagcaagtttttaagaaattgttttagaatacagagcaatgaaatgttcatttgtttggagagttgagagttgcacaattttaaagagactcaagataaaactgcataataaaaatctaaaaatagatctgtcttccagctttcttcaggccaaatgtttatcactatctcccacaccagccctacccagagagtcatcaactgtgtcacctcgattacagctagttctgatgacgtcataggctgatttcaaaatgtggctttcaaaatctgcctcgagcaattgcagggaaagaacataggttttcaataattcccgagttgtaatatctctttgcttaaaatatactgacacctggtaggaggtaaggtttcacttccttgtgaaattacagccttccatatatcagagacagcagctgaaaatgaatgaaatgctagaattttttatgaactccctcactccattcacagtatcccaggagacatttaggtaatattatagacatcgacactttcactgttctcttactttacttcttgagaggataggattttatttggggggaaaatagacccagaactggagtctagatcatcccctttagattaaaaaaaagggtgacccctgacaaccagggaaggcaattactactgaccaattaaccaccactttccagacacttcacttactttatcccctgtaattttcacaagcagcccgagaagttaagtatattatagaataaacaatttccacagagtcacagagatggtccgtacagagctgggatttgaactcattctgcctgaatccaaatggaaatctaacatatgctggggaaaggatctgggtagaatgacaggctccagtgatactgaccacgccatcttctggataaaaatgcattcttttcttttctttctttcttttttcttttttttcttttatttgagacaggttgttgcttattgctctgtttcccaggagtgcagtggtacaatcgtagttcactgcagcctccaactcctgggctcaaacagtcctcccagctcagcctccccagtagctgggactgcaaatgtgagccactgtgtctcttaaaactttatttatttatttatttatttattttattttatttttt

SEQ ID NO: 36439 - DNA, 2196 bp, Homo sapiens
ccccaacttacatgcacacatacacatgcatcatagttgctcatctatttcccaaaacctgtattttaagacattaagagcagtgctttcttggctgaaagagtaatggttagttgttgacaaatgttttcacagcagctcccatagtagacagaatgagcatggctggcccttggtttcaagccttaagtaaacataaacttccccagattagattgctgaatttttgaactttcttgttcttttttgaggtagcaattccattctaaaaagactttgttttacattgttaaggcagacaaataattccttgaacctctcagtccctggtggtgtctacaatcctttcttgtgcctctctgcaccttgttggtctttctcctgatgagctggacacacaagactgttagttgtgtctgcccctccagccctgcatatgacctttatccttgatggtagctaccatggtggtagtccctggctggagctttcagcacatttcatgggttcgcttacttaagtctccaagtgacccattttgctattgagaaaacagaagaaaatcatatccggtaacttgcctaagagcctgtacttctagtcactaacctaaactgtctcccatagacagggctctctaaaaatcaaatacctatcctttaaaaaataaaatcaggtaaatcaaacatcttcaggacagtttttaaataaattccatagaggaaatacaaacatactttagtactttacaaagcatctttctctcctagactttctcaggatttatacatacagagagcctagcatgcctttttttgtcctcttctaccaaaataaaaatgtttaggcacacaataaattgtggaatgcaagaagaaattttagatcttactttctactctttagcaaccagaaatcctacctcaagccctcaataaatgaggaagcctgagacatccatcagacagtaacgtctgcagaaagttcgttgcatcaaagacccagatgcagactcagtccgcttcttccacactcacccacaacttattcctcattgactaagcctaagatctataggtaaatacagaaaattatggtagcaaacctgagcattttctggttaacggataaggctttacttaagttgacaagaagattctaaattggtggatcatttgttatataattacaatatatgaatctaaggaagatattataattatgacaccagtttaataaaatattagttttttcctggactccatggcctaataataagaatgtatgaatatctaacacatttactaaaattcaaacttattttcttttacatacccacaagtagtttaagttgatgcaaaccccactgaaacaatttattaaatgtgatgcttcacctgatacatggatcatgaatgagttcctgatttttcctgctaagaacattagccaacatccagttgttaattccagcatcagtatattaagccgatagtccatagtctacacagcatgaacaatgtctgtttaatctttagcaagagttcagccattatttatgactcacatgcgcaagggcacgttgcatagatttaagtagaggtcatctcagagactaaatcaatagcaaagttagtcggctgaaattcattagggatgaacagtatttgcctgattatgcaacatttccaaagtttttctatttctgtatcagatttcagctttactggctacaactctttgtgcactgctttttttaaattaatgaggctaataggattttgatgtttcaagctttgtacacaaacctagcaggcaaaaatcttccgtaaatgtattctaagctcttggcaaactttcctcaggagcaaatattaacttgagatagtgtttattagcatttataaaataatcactgtaatagtggtatgtaattggtagagataagtgcttttctaagccaggaattaatcacgtttgcattctttaataggacctggtcagaaataatttatttcttgcacagtttacattttaaataacaatgtgattttccctgatttcatgaagatgcacttcaccctgcctttgctgtgagcactggagcatggagaagtgaattctgtattatataacacagataaaggctacaagagactccataatttgactttttaccccgtatctccgagactg

SEQ ID NO: 36440 - DNA, 4419 bp, Homo sapiens
gaaatgcgtccacgcagaggatcgcgcagaggcagaaggaggcttggggggtgtgaaggaagaatgcaggatgaggacactacatggagcctggaaaactgactctgctcagggcagtcgcagggggtggcttcagacacaggttctccctggtgagctcagtgtgcgcttaaaacagcaaagcagaaggcccggagccatggagaagagatattggacaagacaaagaaaacaaactaacaggcaaaaacttcaatcctgctctgtcgaatctgaggctatatacatggaggctggaaaagggagcagaggagctcacagtgagaagggaaccaatgtttattccagctttggtgcctccctaacttcgtgtgttatgcgccagacatggtagatagacagatagatatacagtcagacagatggacagatagttagataaaaagaaagatagatagatgcaagatttatagataaatcttatttaacttctatttaacaaacttggaaggtgagtattagccccaatttacagataaaaaaacagaaatgcaggaggttgaacagaagagcccaggaaatagagtgattccatggtgtgctgggttgaagggctgcctgagccatttagacgcgggctgggtcatgtgggtgtgtccttatctacccagtgctgtgggaggagcatctttccctcccctgcgaatccctgccaagcttccaagacccctctccaaagcagctccaggcttcctccagtccccactaccaactagaaagaaatgcccacacccgctacacgctgaagcaaacttctgaattgtctgggccttctgaaccttctggaactctggcttgcccacaaggctatctctccctgacctacacgcagctgcagggcagcacttgctctgcgctgaacacacatggagctctctggaagcatggacggaatcctcttcccaacataccattcttccacgtgacatggaacaacaagaaaatgatataaagcaaatccgggcccacatcgcaagatcccaaaaggcaggaggaacaggttgtcatttcttccgagagttcccctgtttcagttttccccacgcctctcccagcagtggagggcttgtttccttgttcctgaatccctgctttctgaatctatgtgagttcacctgggcactggaaggaatgaaagaaaacagagtccctgcctgattcagggaaatctggaaatttcttttattgataacaagcataagaacgacatcatttggctgtgtttgtactgcttgaaaacattttgctcagattagctgtaaaaatttcaacaccaactgcatcgtctatcagagatagggaagataaggcggctctcaaatcagccagcctttgagagttggaaagaactttgattaaacaaagggaatgtcacaatgtttcctgagccacagactgaaatcccattgtccggtgaaaaaacgcattcagcacagccctgctctttgccttcagacgtgcctttccctgtgaagcacattctgaccgtgaacctaacgagaaatccacaactgtgactaattgttttcagtcctcattgattgtcaagactcctgacaaaattctcagaaatagaaactaaaattgctgcatatgcaagactttctcagtgtgtctgagaatgctcccaatacaagccccctttctcatctggctagagagctcctcggggagcaggcacactgcacagagccccagaataaccacaacgacaatttcctccaggattaaacatttccttggtcaaggccagaggtaaatctatgcccctgtgagtgcacatagaggaaaactggaaccaaccaggtaaaactggttttgtgaatgaatatgattcactggtccagctgtaaaatgaatctcacaatgtgattacaccattccaaaacagctgagaccattaaagttcaaactggcagacttctacttcttactgagggaagaggagagagccaagttttaaacaattacagtttgtcactataaaaggcatgcaggttgcagtgagagagtgtgtgtgttttcaggtagaagagcctccctttgttgccttcaaaagttctctatgctttttaaaagctcatcacaggaaggcaggattggacaccacatggaaatcagaatcctccttcactgatcaacggaaaatatcaccctattccgaagttcaatgtaagaacactttctaagagacgctcagattcgacgttaggactcccgaacattgtgtaaacttttgaatattcaacaaacccttggtttcagttatgaaagcagtcaggattccagattgtcagttgttggtggtcagtagtgaaaaagaaaaaagatctacatatacatatataagtgtgtgtatagatagatacatacttaactacctatctatctatacacacagtcactagttagtgacttaactagatagatatatagttaagtatgtatgtatctacacacacacagtcatacttaaactcagagataatctattttaataatagtactttcctttttctatgaacgtgttcataaagaggaggaatgccaaagaggctgaatcccaacactgatccttgcatgccagagagaagggcaaggtacatttataggagatttccattcctgctgcctggaattcaactagaacatttcatcattatctgagaattttcatgtatgggccagacactgggtttgcgaaaaaatacgtgctgaaaatgcatacttggaattctatgaggatatctgtgaatcacaagtttcactaaaacacttagtcctacaaatcatgtcttcagggcattcattccccctgccctggtcgtggatggaagggtctacccaggcattgagcaatgggatgcttctggctgacactgctcagggggaccttcagctgcctgaagggagcctcctcacctcagagcccacccaggtctatccgtgagaggcactgggcaaggggctgtgggtggagagggggtgcctggaaggtagatggggagaggagagtgggtgggaatccactgctcctcgccatccctggcgtagctatattatttatttattttgtataacaggctttccaatggcaggccttttttagaaaaaagaatttcacggtgtaaccagggtgaattttggaatctgctgggctgggtggttttgtaagcattcgagcttaaatccgttactgattcattttagtgttgcctctaggtattctgccttctgcttttcttaaagcatcttaaaaaaaaaaaaaaaaaggcccttctaactatgatagtcaccaagaatgagattttcaaaagcaccttaatgtcctttgatgtgcaaaggcgggttaggtgttgagagctgtcttgcaggacaattcctgctgtggccataacctattttagaacccactgacctatgtccaaagaagagtagaggatgcatttattgctggatcttctttcctatctgcacttgccaaaaatttcaagaatgtatcattctgtaatcaccaagtttcatcattttctctccagacttttgtaccttcttagtggtcattttgacaaaccttacacagataaaattatgccacagcttatgaaatatattatctcattcaatcttccatcttataaaaggaagtatcaactatgtggatcatttctcctccaaaattatcaccttaagtatgaaaaaattaaaaaaagagaaaataaaaattggaacagaatcagacttattttctgttataaactgttgttactaacaggctgcccaggcactgctccaacccggtgagaggctctctgatgaagtagcgtttctaagtggcatggacaggcaagaccacgtgcacagatacccctccgtgatttcagtcaccaccttgcttttgttggacatacatccaatctgatgcttgttttgtttaatatcagtttttaacatcagactttgtaaaaggtacaacaagaaataatgcaaattcagaatttctccttccatagattgtcatctatcctccctcactgatccaggaacagagttacaagctaccattatttccctttaagaagctaagtagctgagccaccagacattcacagccctgttttcagaagttctccctccctgtgacgcagctggaatgggaggcagaggggattcacgaggtcctttcctgagacttggaagcttcccgccgtcagggtgtggctcatttctggtcatcagctgctgtttctgagcagatcctattaggctcccaatgaaaaatggggttccttatagctcactctctaccaagaaacagcgaatcagagcataatacgcaaattgctaatatgtcatttt

SEQ ID NO: 36441 - DNA, 1789 bp, Homo sapiens
tacaatcaaagaaggtatgaaacgttccccaagcaatgtggctggtgaatggcagagccagacccagggctctggacacctggctacaccatgggccacctgggcattccccactcaactaataggatcttgcaaaaatattacggtggtgcagaggtaattgcagttttttgcaccaacctaatacttaggtaaaactcacttaaatgttcacttttaaaaaagatgaatttgtgtaacatggtactttgacaaaaggggcagagcaacatcaacaaaacccactgagtgtttcttcattgcaagagggaggctttggaacaaagactatgtgtttgacccagcatgtgtttatgagaactgaattataatttcatcagcaaattcttatctgtgtcgttttacaaaggcacattctaaatttttgagggaccagctgacttgatcattgtgatactgataagatgaaaaaaagtgaattttgaaatgttgtcattccggttgctttggtgacacaaaccctgtagatcccagagcacaaggtcacctttatcttctcaaagggcatgttatgaaattgcacaatgcctgacactttcatgggagtaacttacccaagcccgttcttgggaaactaccccatcatgagatagctgacctagagagctcaacccatctgaataattggcaggaagcacatacgatctatttgacttcatcagaaaacaagcttctcacttggccttcaggggccttcccagcctcacagctcccatgcggggtcaccctgcacgcccttcctctcactctccgtgctcttctctgctcctatgctcaggaggagcacattccctctgcctggaatgccctacccgctgttctgatttgtgggtgccttactcccctcttaccagtgtctcctcccactagcattcctccacttccacgcaaaattagcatcgctggcttctatgagctcacagtaatctttatccttgctcttataaatgccacacgacactggacttttaacccacatgtctgtctcccacactgaactgtgacctccaagggagcagggactgtgggtttctttgaacactgggactccgccacctgtacttccagttacttgctggatgcccaagttctctgctccactgtgagctccataaaacccaggatcagctctctcatgtgttcctgcctagcacatagttggtgactaataaatatttatggaatctagtaatcaactatgagtttctagagagcaaaagaatttccccatttatgtgtgtatcccccaacacttagcacaatgcctagcacaagattaggtaccacaaaatgtctgaatttgaataaaggcaacttgagtcctgctataatcctggttttagcctggctagactttgtctacctcggccagatctggcctgtcaagggctcctcactaaacaattaactgaggcttgtcagaggcctcagagctcaacaaacagttcagcttggtctgacttatgctccagtctgctaagaatttcttgtgcacaaacatcacatggcccagagtgaacccaaaggactgatggggagaggagggagcgatggccaggccttctagaagtcagtcactgctattgacagcattttgaggcacttgattgggataatacagttttcccaagatagcgtttccactgttgtgccaaattaaatagctaactcctgcacaggagtgaaaatcagttgggatggctcaagtttcctctgtccttccatgtgt

SEQ ID NO: 36442 - DNA, 5527 bp, Homo sapiens
gtttcctgctgcataagaagggatgatgatagtactgacttcatggatttgttgggagaatttaaggagatgaaacctgcgaggcacctaggacagcacctgacacttaggtttactccagtaatatgggcgcaccttacaactatggccttcgccattccaggggcctgcatcaggagccacactccagcacccacccccacaggtgaggggactccgcccaaatgctcaccactcacttcagaagcaaactcaggaagaaatccaaaccccacccacaaccgtggtgatttttaaaggttccataccttgtttgaaaagctaatattgttttatgagaataaaaatgattaatgttggagaatggataaaaataataactcctatgatggtgaaatttgaaaacacctatgtctatgtacttaagaaaagcatttatagtacaattaaaatatattcaatatatgtatttgtatatatcgttaaatagaatttataagaagccattggtttggactaagatcctgcactaggcccaacagaataaaccaaaatggagatactgctagtcaagttccatgccaccaagctgaaactaagcagttgatctgacctcctgagaaatcaggagagagagaaagataatagccaaatccgcaaacaggccagtttcagctggcggggtgaggaagtccccctgtttcaaccctgcaaagaacatctctgcttttgattggctatgcctgacttcttcagccctttcctgtctataaaaccaacctccccagctcagctcatcagaacactcactctactttatagaatgagatggtatccaattctagaatcacaaataagagccaatccagatctttaaactaaatctgtcacgattttgtcttttgacagcaacacacacacacacacacacacacacaatatcttcacattcacacacacatacacgcacacacacaatgtcttcacattcacacacacacacacgcacacacacaaagtcttcacattctcaaccttgggtcctctcgtgctttctattgtcttttgcattgggggaaggttttcaataacgtcaaattttataacttaaaataaaaaagtttctccaaggttaggcaaacacattgctatttggttatgaactttggttgtttctccctgaaaaaatttccagtcttgctcaatttccaaaaaaaagagtttggactcttacctaagccatgtttgtccaaagaggtcagtatcaagcctacatgactttttgatccagaaaatagtagtcatgttttggtcattctgagatagtcatggaaaattacaacacagatgttcatacgggatcttccttctattgcccagtgccccgtgaagcccttgaacaaaaccagaagaaagtgaaaaataaacagccttatacggtaaatgaaaaaataaggtaactttgtggtagtgtcgctaggctgagggcagagaggggaggagagcagtgagcaggggcctgaagcccacaggcctggccagagcacagcagaggagaatgtagccaagtgtgtacaagcagattccagccaggctgcagtgagtgtgcgagctggctcagccattgactagctgtgggctgggagaaaatttcttcactcctttctgcctcagtcccttcatctgtaaagtaggaataaaaatagtaacactcgtatagtgttgctgttaaatacttcatctatatcaagagcttagaacagtgcctggcacaaaatgtgtttcatacattttgcaaataaaataaaataaaagggctcaaaggaattgtttccaacacttttgatgttaagatgcaaaagctaatatagtataatggtggttgctagggtctggggagaggaggaaatggagagtggctacttagtgggtacacggtttccttttggggtgatgaaaatctcttggaactagagacagctggtggttgcataacattgtgaatgcattagatgccactgaattatatgttttaaaatggttaatgcacattttaaaatggttaatgactaattttaagttatgtgaattttgccttaattttttgaaagacagagaaagaagaaagagaaagagatggagggagggagagagggaagaaagctatcactagtggtgggcttaaatggccctagaaaatcacggcttttgagaggaatcccaaccctcaaggttgacctcaactggctctcgggtcaaggccatggccatcttttttgttcttatcacattcattgattctaattgagcctataggtatatattgaggactctctatgcatccattcctagcctacaaggacttagaatgtgaaaataaattaaagtgattattagccagtttgggagtgaggaggagctatgtagaaaagtatcatatctatcaaaagatatctatcatacagtgtagggaaggtcatgattgagctgccacaggctacaatggaggttacacccaactctaagacaaggaatcaggaaagacaggtcctaataagtcttgagatttggtagaaagacatgagactgaaaaggtatttcctaaagggatttccaatagacatgatcaccaaaattatgtaaattgaaaaagatgccttttagaatatttaaattattttatcattgctgaattatattccacttttaaatgggcttaagccattcatggaaaaagaaaactagagcatgaaaaagatcagaaagagggaggaaggggaaagaagagaaggaaaaagaataatttaatgactttgctctaataccatgcacggaagggtcaccaagcaaagaaatacgggaatgactctgttataaacataaatgagataaacagtgatagaaaactcaactttaagaatttaaccaagtagtatctccaagttagttaatggcaaagacattaagatttcatgtgtgtgtcaatgaatttgactttgactcacataatgatgtccctccaaaatgtgttttcttctccttccattttacaactgtgtaagttctagaaagtatttttcccaaagcaacaaagccagcagggtaacagagagtctagaaatgaagccacaacaagataattaggggctcagtgtgctaaggatgaagaagagaattccccgggaaaggcatcgtggctgtcaactaatgtcaaccagaaatacctgatccatgcttctcttcaacagtgagaacagataatagcatcatctgcctcttgaagagctaagctttatgttcacccaagagggatcaaaaagaggtcaggagaccattaaccttagaagtgagctgtaggctgtgaaaagttgaactccagttcttgcagttgtttttaactctaaactctataaatctatgatagtcattttaacaggaaattgtacagactcaaagttcaccagaaataaaagtctagagccaaaccctgctttcagatgacagggccacttgcttctgtaggtgagtcagggcagccacagatatcggcatggaatcttcgctggggagaggctgtctaggatcaaaggaagcgcttgctgataccttattaaaaccctgtgaaggcttggaaacttttaaaatatgttgggtgggttgaggatctgtcttccctgcacctccaggtttcaactgatctgtagttcaaactgaaatctccctcctgttgttcttatagctcttgataaaaattccaacttcagtcgaaacaccaggcagactgtaccatggaaaaagttctcacttcagaagaacaattgtctgctgcagaaataaagtaatgccattcctatgaaatctataaactcaaaacagggacacagaactagtggttgccaataactttaacttcatttatctatatttggcaaaaattgtgctgcagctggagatgaaatgctgagctaaataactgcagagacgtgcgctccaaaacagcaattactaagctgtgctgccttgtgtaagatttcacttttatttattatatttaaagcaactctctaactctgtacagtacagacagcattgtctattcgagtgatagctgctcataacgacatctccacctcgctatttgtccaggaaggtgctttcagggaggcaaaagatctctcccatggccacgttaacacagtttagatggcagcctcgccaccaaatgcacctctcttttgtccataattgaaagaaactattctcatgttcaactcaaacttggcttatcacatactgtgcacaactctgatgatggctttttttttatcagtggagatattgataattataattggaaggctgaggaagaggactataaatatcccatcagctgccacagagctgggggggaggagaggtggcaacctatgcctctgaaagaggctgatggagaaagatggatcctcacagccattgtctacccagcccacatctgtttcttatagtgggtgatgattttcatagaatcatagaaattagagatggaaaaggctcattaggtcatccagcacagctctctgccagtgcaggatgattctctacatggaagatgatctctttgttcttctacaaagctgtgttaagcaataactcatgtaaccaccttcacgtgcattcatgatattcagctcatcacatgtgactcaataaacaccaactcagaaagtaggatttagccttttagagtttttagaggtacatagtccaaaacagtgagtaaaggagaaggctctctgaaccaagttaggaacaccagccaactgggatgtgaagtattaatctcatttcttccttccataggttgtcatcatcctatccccagtgatggagccatacttgggtctgaaatattttgacacagatgaagcaagtctttgcaatttccaaaggaaaggcttctgtgacacactctcttgtttgaaggagtgacaataacctgagaattgctggtagtattatttgttgttattactgtcatcaaaagatatttaattagaatctcttttatatgtgactgataaagccagtgaaatggtcacactgattctacagtaagccatttttgagcacctattatacacaaagcactgtgcaggaaggttgcatagtaagttgagtgtgacccagactccaactctgagaagcttataatagggtgaaggagacagagacagaaaggcaggctcttaatccagggaactacaggaggtaagcacaagggagacagaagcagaggcgggagacgtgacttagccttaccttccgaaactccacactggcatgaggaatagtgatatgcacttgtggaggaatggtctatagaatgaggataaagaggttaaagttttgcgatatctttcaattagtgattctgtaaccaaaacccagagaagcaggttatgatggagtcatcagcaacacatccctttttagcttaacttaggagttctcttaaatcagggtgcta

SEQ ID NO: 36443 - DNA, 891 bp, Homo sapiens
ttgttaggcatgagctttgctgaggctagacaggcctcacatctgtcacctaatgccaattcacctccacactcccagtacacaaaggccttctccctggagccaaacttcactctgcttcctccatgtgaggtgagaccttactcagactgtgccctccatctgggaggtgtttctcctgggacttgctatttaccccttggcccccagcttatcatccacagaaattccactgccctccctggtttccatcagtgctggctactccctcctctcgtccttttcagcaacactgtgggatcacagctttccaggtggagatttccctccctgggccctgactttccccaggatgagaactgctctctaactaacctgccgctgtgccagcccttagcatagatgggcatgtgcacctgccaggaaaacagctgctctttatcaaagccaagtggcacaggtccatcagatgctttgccttctgtaaccccagtattgaacaagaaacaacttccctgtacaaaagccagtctcacatttgggaagctgacatccccttaaattcaccccttcttataatgctagaaagacatagctaaacgctcgaaccttgggcagcatgtcaggaatctgacagaaatgtgcagaaagccagggcaatcacagcctcttctctatctaggactccgccttttcttatctccttctcctcagcatattacaatggccatgtgccctcccatgggactgtcttcttcctgaggacaagaacagtgccccacccaatgccttagatcatgcaaagagtgtacacagactgcaagtactaagtttaatatgattactaacatgttgaacactgctctatggacttcacatgtaccaactcat

SEQ ID NO: 36444 - DNA, 1777 bp, Homo sapiens
tttagctaggtctttctagctaggtgcattcatatacatatgcacacacacacacacacacatacatatacacacatacatgtatgtatattatgtgtgtacatagatatgcatacatatacatgcatatatatgtgtgtgtgtatataaaaatatacatatatgtatatatatttcctattggttctgtttttggggaagtctgaccacaacactcccttattgtgttattttgagggttaaatgagttgctacatgtgaaggccctagagcagtgtccatcgcgttagtaattatattaaactcaggacgtgcagtctgcatacatatacatatatatgtataatatcagagagagatagagattggtcttaaaaaattgacttatgtgattttaggggctgcaagtccataacctgcagggcaggcatgcaggctgaagactcagggagaagttgatgttgcagcttgagtccaaaagcagtctggaggcagaatcccctcttcctcggggcacgtcagtctttttctcttaaggttttcagcttactggatgagtcccacccacactatggagggtcatctgctttaccaaaagtccactgatttaaatgttaatctcatcttaaactaccttcacggaaacatccagacttgtatttaaccaaatatctgggtatcatagcctagccaagtggacacataaaattaatgatcacaggaaggtaccatctttaccctgacttacagaagcagaaaggaaaacacagattgtttaagtcactagccctgagtcacacagcaatacgtagtgcaattggaatttggcctgggcagtcattccaggaacttgtgttcataaaccctgagctatgccaccttcctgtgaatttcagcatggtattccttattttggcatgaggctgtataaagggaactgctgaaaacgaaccatctctttctgatattatcaagtgggtgatgttataacactgaaccagaaatgtatttccaggaaacagaacccaaaaggatgactatatacttagtttggccacataataccagcctgaacatcaactcaaaccaattcaccaagccctttgtggctgagaggaaggcatggctgtcaagagttctagctcgtctgttttggtttttggcttgggcgtgtgtgtagatgtgggtgtgtagacgtgtatgtgtatgcgtgtgtgcgtatgtgcatgcatcttaaggaatctgcttctggttctttggggacactgatgatgatggatttctctatttcaccatatataattccttcctgctgcacaggacagaatcctaagggctcctaagcctgttcccaagcttccaaaagagcaccaactcaccgtatggttaacaaacctaggtttgaatcctacctctgtcacttattaagtcaatattcttggacaagttctttactctctccaagtttggttccatccctacaatggggctgatcagagcactgacctgggatggtcaccgtggggactcaggaatgatgcacgtgtggaatgcagcccagcacctggcatggggcatacacagcagatgacaaacaccattccaaaagacaattactgcttcatcattaacgtctcctcaccaaaaccttttctaggaaacatgcctaaccaaggcaagctcctccttctgagtttatatatacctggccgggcatggtgacacacacctgtaatcccagcactttgagaggcagaggcaggcagatcacttgagg

SEQ ID NO: 36445 - DNA, 1132 bp, Homo sapiens
ctgaattttctgtgcaaaacatcaagttttaaaataagaactactgtttatggatgcaaaaaataccccaactttccaaatgcacctcatgtcattagattaatttgctatgcacctcaggcaattatgttagtggcaaagctattcttccagacctcgtccccaagcaggcactataattagagaaagcctacatcccaacagacaaaacctctgcagactggaaggcagagcccattacgtttaccccaagcacctctgactctctctgtgtgccgaggacgaggtaaatgtgcattgtgaaaattaacacagccagaaaggaagcatcccacagcgcgaatcaatactcagcaaaggataatgggattcctgctcaggcagctgtgtcctgcccctcccattagcacctgtcagtaagagcagtcagggccaggcgatgggcacctgcctcccagctcaatcctgacgacgatcattagctccagccggcacagaggcaccccacgctgccaaatagtgtccttttctccttaaatgcgaacaaacaatgacttctcctctaatagctggcacagatcttgttaatctttcttgtttcacttctgttttgcccttagcacagtgtgtaggaagagatcgacttgaaggcagaaattaggttattcaagttaatttcaggacatgctctactcagaggcttagaaccatctaggctggcctgcctcacctagaggtaatcacaggatggaaataatactctatcgatcatgtgacctggtaaataatcaatatctaccctttggacttttgttactaccacttgcgaaaagaaaagactgaacgatttcacatggctaaaaatctccccctgccttctttttcccttcctattacttactccttccttccttccttccttccttccttccttccttccttccttccttccttctttctttccttccttccttctttctttccttccttcctcccaccatcctcctccctcctctccccttcctccctccctccctcccttctttccttccttcctctctttctccctttctatcttttttcccctccatcctccttccaaagtagaagtgaatagtcattgaaaggaaaa

SEQ ID NO: 36446 - DNA, 759 bp, Homo sapiens
atttgcttttaatgatacttcattatattctcttttcccttttaatttggttgcatcactcaagtggtgtgtttgattcccagtttcttgtcagaatagccatgatgcctcaccctgccgccctaaagctcacagagacaggaaaaccagagtccccagtgtggctgcaccgggtctccagctgtccgtttgcaaaagatacaaaaaccgtttcattttcacaataattttttttaaagacttccccagatatctacattttctttggcagtttgacttcgatgacacaaaagttcagggtcaactttccaaaaaataatgaggaaagagccagccagctgctcagttgtgtcctcactttcaatgctgattgctgcaaaagtacacatgaaattctgatgcagacaaattgttcctttctcactgaactcagctagaaggctggaagggacatttggaaagatggtcattcatgggacttattttttaaaacatgaaaaagaagagaattttaaagcaacatccacagagtcgaagtttagcttcaccaacaattatttcctcttcagtgagagttagtggccagttacaaagttcaatgtttgggtttgggtttgagggatattttttcccccactactgagacaaagccgtaatccatgaaatatagcagatatctcatggacctagttctgcatgcttgcaaacatttgaaattgcacttgcggtacataaaagatttataatgatcttacccac

SEQ ID NO: 36447 - DNA, 977 bp, Homo sapiens
tgcagggagataatttttccttcatttcctattttatcagaaaattaaccttcatttaaaacactgtggtctgaaacacttttatagctacattctctccgctgttcaaaagaatttgaattttaaatttgccatcctggtctttaaaaatgaaacaaactgcggacgctttgggaaccaggtgtttatgatcaaggagacatcagaatgtgacccgggtccaaagcactgctcctgccaaccaaggggactatgctaccagatctgtttttagtttttcaacctttggtgaaataatgaggctctgaatttgcatagcaatctttttgtctgagaacctaacagccccgcagatctttcatttcattgcacaaacattggaagcctttattaagtacctctctgcatggagaactcagcttggccccagacaagccagacttgaatcctgcaatgatgacacagagttggccatggtacaaatgaagttaggtaattcatttgacacacagttcactaagcactcatgacacgtatgtaaccagagtgggcccaagttcatctggggtcaccttgtcttataatattctggaaaaaatacccaaactgtcatttcagagattgctgatatttctaccaggaatttagtctccatcaaaatatttctaaagattttgagacagagtgaagggtaggagggggcaccgtctcacatctagccctctgttataggttgaattgtgtgtgccctcaaaatggatctgttcaagtcctaaccccgggcgtctgtgaacatgacctcatttggaaatagggtctttgcagatgtaatcaggttaaaatgaggtcattaggatgggccctctgtccttataagaagagggaaatgtggacatagatgcacagcagatgcaatgtaacaacagaggcagagactggagcaacacagccgcaagacgggagtgcaaaggatggcc

SEQ ID NO: 36448 - DNA, 733 bp, Homo sapiens
ttccccctttttgaagccgttggtgcatctgggagagctcgcagtcttaccaaaagcttctctgtggtggctttggggagaacagcaaatttggaatctcacttgccagtggtataggcatcagagttcttagtggacttttgccaaaggccattaataaaatacagtccaaatgtcctaattagcatgccctcgagtgtggccacgtgtagaacttggactggctcttggccacgagctgctgtcgcaaagctcagatccctgcttcaagcaggctatgtcacagagaatccactgcagagagccttctggagatcggggcaatgtgcggaagggcacgtccctgccagccacccgtactctggccaggacccggagctgggcactggccgcacccggctgagaggtgatgtcagatgttcctgtcgggatctggcttctggctagcagcaactcccgtgtaatggaagagtggcttccctgctaagcttcaaccctgaagccaattaacgactcaaatccttcaggaagcactgcttgggttttaccagagacataaaggtcttatcccattaattggtgcttaaataaaaagaataaatactgcagaatctaacctagagttggtccctacctttcgctaccctgaatgtactatgaccctagaaaacacttattttataagtagttttttaaaataaaaataaataccctgaaaactactccaggatag

SEQ ID NO: 36449 - DNA, 1028 bp, Homo sapiens
gcagatgatgaacgcatgtgtcctccaggagctccttctgcgacatcccctaggcagcccgacatgactcagcaacacggtgctagggccagatccctggctagacaccgaggtgtggggccctcgtctctgacctgccattgagccacagtgtgaagcctaagcaaagccatttctctagggaccttggcttagttttctggtaaaatacaagtttcattctaggtgttctctcagctatcttctaggatgttttggagtctgtgctttcatacaaacacaggctcatgctggagcagggatggccatggacatccttaactctcctaagagccacccacggcctcccaagtcacctcatcagttgtcctcacagggagccaccctctgggagtatttatatccctctactttgattacagctgattagtaaatttacaatgtgtttgaatttcactagacttacatttcacaacagagagcaaggtttagtcaacactttcatttgctaagggcaaccatccaggcttaataaggctttccctaaacagacaccttctttacaaacttctaggaagccaagtgttaaacaaaagtctaacttgagacttttctcttgattcctattatgggcatttgcagtttgctttgcaattgcattaccaagtgcacacttgcgcacatgcctggaaacgtgcacacacgcacaatggagcaacgtcccagtgtgacggttcctgctggccaagaacagcactgggtatttgcatgggcaaagactttaacagcgtgaacaggattttctgaacaagtctggaaataaaatacctaccagctttcagagtaaattaccaaaaaagcaaaggagaaaaacagttcttccaaaagacagtcatctaacctccttactccctgtgcacaaattaccaggcttcccagaatccaatcttaggtgagatgaggaacaatggaaggtatttacaagtttaaaaaatatcaaatttttgcttctggactcccatgctatg

SEQ ID NO: 36450 - DNA, 1078 bp, Homo sapiens
ccggaggatgggtttaaaactctcaactctggaggagatgttgaaagacaatttctccaaaagagagggagaagatacagtagctagggaagtctggaaatctgaatttttaatttagaaatagatattgtggttttgttgtgagctttgaaaaattgagccatgattctgtataacgcctctaagacaaagataagatgttaaagcaggttcgtgaccatggtcagctatggaagcggtacacaaggccagttagcagggtggagtcaggttctgagagatgaggtggtatgggaatgtctggggctgtgggtaataagttgagctttttcccagatgttctctccatgttccagagaaggtagaaagctggctaccgaccaaatctgattttgacattcctgtaagatagtgccaagcactcagatctcatcagccccgtgtcagaggcagcaaggcaccacaccatggttggataaccccacattcaatccattttactgaaagcagcacaaataaactaagaatcagagcactcaatgactcatatcagaggtatgaattgaaagtcaacacttgtatataatctaactgaaggagagtttatagcgcagaattctctctgttggaaagaaaaactccaaatgcgtgtgtgtgtatatgtgtgcacactcactatcttacacagcactgctcattctaagaaaatgagaaaggagaagagaaagcaactcaaaacttttgtttgatttagaaacaaaattaaataataattgtcaaaggtatcgctggaataatgatattaaaagagtgattcattctggtatatttccagagacaatgtttaccaggaactccctactccctctgtacccatcactcagcatgatatgtttgccctggcttcaattctctttttcaaaggaacattttggagtgtgcagctacctgtacctctctgtttagtgatgatgccactcagcgctgtgtgtcaatttaatacatgggaaccttcatcccctactagactgtagtaatatgtttacaggccaaggccctacactccttgttggtgtag

SEQ ID NO: 36451 - DNA, 638 bp, Homo sapiens
aaagcctgtgagtagaaaaaattcaagaccagagaatagaagaaaagctgctttagttactgagaaattctccatgaggtagccagccagagggacatagagtggtggagatagccacgttcatcacatgaaaagccaaacccctccatgaacctccccaagcatatacctgtctccaggcttacgtagtggagactgaatcattccttaagttgctaaaatctacctttaaaggttcctgaaagatgttgcaatcattctgggaaatagatctatgtgtcattcaaaatgagctcatcaacatgatgcataaattgggcaccaatacaaagtttaatatttcagagtaaatggtgaatctttaggaattcatctgtttagaaaccaacaactgactaggaggatacattatttcttttgatgggcttttcacctatattatctcatctaatccttcaacaattctcagtgtagctgctattatccccattttatagaaacaagaactagggctctgcaacgtcacatgagctacttgcccaagctactggtacttgagcccaggtcctctgattaagcatcttgcattcttgctcctacactgaaggctttcaaacagtggcccacagagaccccaa

SEQ ID NO: 36452 - DNA, 1164 bp, Homo sapiens
gccactctcatatcatttctttttatatcacgttactgaaatgacagaacaggtgagtaccacaaatttaactggtacctctgacagaagatttacaaaggctaggagctggctaggaaacttccccatatttctctaacaacagccctaggcaggtttttagcagaatagtcccatttctcacttgggaatctgaggtatagagaggttaagtaataataattgtaaccaaaacaaaaagtaacacttttaagtgttttttatcagcaacatttccagagtgatttacacaaattatagttattatcacccctgttgtattccatgatacaaacacttagcaaaagtcatttggctaaactttggtggtgccagcgtgaaaccaaggttgtctggaaatgctgagaaacccttcccaatgtccaagctcacacaggtccatagtcaggaagctgtgattcaaacccaactctggaatatggcaaagtctacactctacacaatcatttctggcattcagcaattaatgtgacacgatttcttatgggtttctggaaaataaaagaaaatataggttcaactggttgcctaactgaactggagtgctgatcacagaatttctggtaagccagggcaaagtccatcctaggcattgtcaggaaccagacttgagtcaacaactcagatgggaacaaatgaggtcacagcttatagttttagaagacaagaatataggcagaagaatgtgcagatgaggctagggtgctaacactggggaatgcatacacatctcagccatctcatcaggaacataggcctggctttgtctggagttcagggtttaaagcccagcttgtccacatccttatttgttttctgtaacgcacctgagcccgctcttggcctcaggcatccaggggcaactgaggtccagaagcctaagccttgagtggatattgtacctgctcagttaaagaaagtgtgtgggcctccatccacaggcaccacaggcgccaagtgctgggccaagtccgtgtccctctgtgtgttcagcgctggagaccacgtggggcagagcatccaagagccggtgcttggacctcctctggggtttcaagtgagagccttcacagccacagaagccacgatcgtttttctctctac

SEQ ID NO: 36453 - DNA, 547 bp, Homo sapiens
ttccacttgagcctcccaaaaatatagtctttgattagggactgcattttttttttcaacttgtgtttgagccactgtgtttgcccagtttctgaaattgtcctgtgaggctcagctgtccactgtccttccagcctcatgagcaacatagttcactgtctcaagaggggctctgggaagtcccaaagccttcccaggccgtgccccaatgccagtccctccctgctggccctgacatgccagcgaactctgctctccctatccccagcaccacccagccaggctctgggatgcctgtctggccacattccaggacaacctgatcgtccttcctctctgcctgttctctccacctgttctcacacactcgtctctcctcctctgacctccactatcttttccatggcagttagaagtcaaaacagaccagatagaaaagatatgctgaccctcgctcgtccactccctccctctttgtgtatcacctacagcgtgctggataaatctctggtgcatgtgcaatttggagaaattccagaggtctgac

SEQ ID NO: 36454 - DNA, 2972 bp, Homo sapiens
cgacttcgccatacccccacatccgcatctgcagctctcttctcttccccatggcctgccctagaagtctgacagccttatgggcatcaccccaaaattacaacgaacacctctaacttttcagactcctcaaattaatcgtctttcctcaactgtgcctccttcttccttgatctcggggatgacatcagcacgcaatgcttccccaaaaaagaactcagacaccagcaaagactcgccctctcatttcatccaataaatagatctgatttactagaacctcttggctggataatctccttccccttcccaataccatctggggactcgttctcacctgcccagccccagtgcccccaggctggggtccccagaatgtctcgcacacgatggccgacacacacgtctgatcatgtccatgtcctggtgagagccaccctggccctccatggctttccagataaggcctgtgctgcggtcggcacctgaggccctcccggtctctcctgcttttctagccaggcctccataaatgtcggcctcacatttagtaaagcatgatgggttctccatgaataactagaatggatgaatgaatgaacctgccacttggtgccctgaaagaaccattcctctggccattctgaactattaatatttccaattccctcaacgtggcacccttgaagacaggcctgtgcctgctgcatacccaggctagctggctccctgctggattgtctgcttcccaggcccttcccaggtggagatggtggccctcggtgccttcacggtgcttcagatctgtctccccacttgggaagttattccctcggcatcagcttattgctggtcttcccactaatctcagagtttcctaaagtcaggaatgacgtcatatttgtctaggagtctctgagcactgcccggtctaacaccacgttctgttaatgatttattaacctgcgaaggaatgggccacatgccaattgtgtcatacaaacaacacaagcgaagacatcagtgtggcatctgtctttttccttttggctttatttccatagggctttccagtacatgccccattctgtcttatgagaagagaatggaccttgagggctttttttccccttcctttttctgccagacgcacttcctgctgcattgagagacttttggaaggttcgcctttccctcaaatttctcatgatgttgaagaactataatcgccactgaatggtccagtttagcacagagaaagccaaccaacattcaccagcagactttaaatgctgacagttgaaacagccaagaaaagttcattaagtgctaagcaagaaaaagagcaagaaaatgagacagaatcgctccctggggcattgcaaaagcaggcctttgtgaggaaacattcctgaaggaatctggggaaatgacattgtaaaactgcaacagacggcaggataggacaacaggctcccaaataactgcatggcaccacaccaatgctccttgtggagggagagcacatcacagagccccttgagaggcaggctggagaaggctgccccagcacacccgaacatcaaggcgttttcaaacttctcaattttcttttcttttctttttgttttgttttgttttggagacacagtctctctctgtcacccagggtgcagtgcagtggtgccatctcagctcactgcaatctgcctcccgggttcaagcaattctcatgcctcagcctcccaagtagctgggactacaggcacaccaccacactcagctaatttttgtattattagtagagacagagtttcaccatgttgcccaggttggtctcgaactcctggcttcaagcgatccacccgcctcagcctcccaaaatactggaattataggtgtgagcccccgcatccagcctaaactgtttctttaaagaccatttgtactccccttgcctcagcaccaaagggaatgagaattcagggaagcatgcctcccccctctcagtttgcagttgaaaactggtcaagaggaaccaggtacatttgggttttttctaaagaagccaaggataaaaaccatggccactataccatggacagctttgaaatgaacagaattgttttcacacacaggaccagccagaggtaaatgtgcctcttcaaaaaatgtggtgtcaatgcaatgtgcagaaactgtcaggggtgggggaaggggactctaagtaggatggtcatatcctgtattgtccacacaaggtcatttttgagagcagaaggagaagttactacttacaacacctggacaattcgttgcaaaccagcgctacccaggcaaataagtgagtctggccacctcaccctgagtaacgtactctgtgaacaaattgctgaggtgaggagaaagaatatctgggttgtagaggcaaacacatacttttaaaaaaataaataaagaggctctctctggacttagtactttgactttttcctgatgcagttacagtccaaatcacataggcatttcttatcagcaaaagcagccaataaaatacagaaggaccgtgagagagatgggccagagctcttgtgaaagtctttcaacacactggcgggcttctgccaacaggaaaacatttagcaagaggtgtgcaagctatttgtagatacaacccgatcattcaaaggtaactatgatctggcacacaacagcatgtaccctttaaaaataagcccataaaagtgaagctttgcttcacatgtctaagtgtttctgcattatatatatgatgaatatatatatatatatattccaatcaggtgattttgaaaaagtgagaaacagatatattacctgggcactggaaatgcccaggttcctcagacttcagaactggctgagcccacagcactgcccttgccggctacttcagggacaggtgatttgaggcaagccttcttcaagtctgc

SEQ ID NO: 36455 - DNA, 566 bp, Homo sapiens
catcactctactgatgaagaaccagagcatccagaatggagtgctgtccccactggatcctgcagggaaggacccccagagcccaggggtccccacagcctcacaatgtaattggaattagactcaaggcacagtcatctgggcatctccaaggactagatcttggttctctccttttatcccagatatgtgtcatagtgcctggcacatggtaggatggcagtaaatatttgttgaatgaatacacatatgaatatgagtcacttgtgctcccataagcgttagaagacaagcaaacagctctgaaagcagcagttagtctcctgggggtatctgagaaagcttcctaggaaggaaatagcaaaatcaggtcccagaaggtgagttcaagtgagttctgtcagaagcgtctgaaccagagtgactccatcttgaatacaggctgggtaaagtgaggctgagacctgctgggctgcattcccagaaggttaggcattctaagtcacaggatgagacagaagggtggcacaagacacaagtcacaaagaccccactgataaaacagg

SEQ ID NO: 36456 - DNA, 597 bp, Homo sapiens
tttgtgttttttttaccaactttactgaatacatatttaggagcatgcatacatacatacatacatacatacatacatacatacatacatctttttttcagcctttcaggaaacagaaagaagtgttgagaaataagtaaggtctcctttacgtgctgaaattgattaaataaataaccgaagaagcgccagggagcatcctgagcccgggtttgctagccttcctccccgcggtgggtgaacccataaagtgaaataaaacatccaggccggaaccagcgaaggcgacgtggagagatgcgactgcaaacacaatctgcccccaggaacacctcccccctcagctggaggtgtggacaaacaggaaccagcgatagcattcttaaaaggttagataaggaaggcaggtgcagcctacctggtatttatcttcttggcttttacttcctagaaatatttatcctttattacctactgtactatatttaggacctcattgggtttccggccgttttctgtttggaccggtttttttcttgttaccttgttaatataagcacgcaggtttaattccgtttaagacttgtgaaggattct

SEQ ID NO: 36457 - DNA, 612 bp, Homo sapiens
aatgtctgatgctcatgttctcacaagtgccagccagaaacaagcaggacaccagcccagaccccgcaccccacatgggccagagccagtctgtgaccagaccttctgctgtaagctgtcgtaacggagtcccagctctgaagtgatgtcaggactcaaactcaggcccctgggccttaaacatttgggcattaaatcccatgccctcaccacctaagctacactgacttgacccggcagaattttgcaaggagttgcacactaactggcatccatggcataaaccacatcagtcatgcaagtggaattttcaaaagccagaatgagttcccaaactttgacttggctctcataatcctagtggtcccttccactttaggaacatcacgtccttcccaggctggtcatacaggtttcctgccactactctgcatacatgcacacacatgcatctgatacttcaaattcacccaggcattcttctcaataactgatgccccaaagcaattggaaatagaaagtagtgactttggaccactttttgatttcatttggccctttaaacactacttattttgatgaaataagcgtggttattcagtaacctaggct

SEQ ID NO: 36458 - DNA, 2710 bp, Homo sapiens
atgcacaaattagatgcatttgccaaaggaagttacaatgtttagctttccttctacttccagaatcaagtgctccaaataaacacttccaaaagtgcaggcctaatggctgcattaggtgctaacaaatcgttaaaaggtggatgattttttctcgtggtttctcacccaactccccccagcaggcttcctcaaatgattgatggtctccatggcaaccgtggaagtcctgctcacctgaattccccaaccccgtcactcaaccagtttgcaggacagtcgggactgcactgagccctccgggatccctgaacaaaggttattttgaaatagcttacgtggccaggaggtgagtactttgttcctgaaaccaggtgctgagatgacaaatacttccccttaacggttggggcttcatcagacaggggaccgtaggtctgatgtacattagaataatcagatgaattgaaacaaggaagagcatcaaccaggctataggcctgtgagcaatttctgtagaaatgtaagccaaagaagtgatgttaggctccacaagtagccattgtttgtaacatttctgcaatagcaccacctgaaaaagcagccacttattgtcagggctcttaaaaaaaaaataaatacttccctaaaatcagcgcagcacacgtcagtataacggctgtcacctgctagctgtttggaccgtgctaaaacctttttccatattcaaaaaggttgtttcaactacatttaagcaggaaaaatcaatgagggaaaatcacaaactggatccggctacaaggagctcagagaggagaaaatcaggctttcccagcctgcagagctccctgccagacaaatgacaatgacagggactgaaattaaaagagaagggacacaacgccctttccacttaactccaagggcaagctcttttggtttgcagctacatttgccaacccctcacctaggattctcccgagagatataggagacatttccagactctcaaaggagcccataaaattgctttagaaatgggactaaccttttgcaaggtgagaagtctgccttcattacatatcttaggaaaaaaaaataactatgagaagcaagactcgaaatctaccacaagaaaacaccaacaacaaacggaattaataactctgaacaccaaagaatgtacctgctctttcattcaaccagcttttattaaactattacctaccagacactgtgggagttactgggatgttggggtgtataattctggatctgtgccctggaggagcttgtatgggaaagacagacactaaacaaacagttgcgacaccgtggactagccctgtgccaacagcaggaatgaggtgatatgggagccaattcacccacttggaggctcaagaacagggggattttgccagatgcagcagggtgatgataggattagacaggatgataatggaagtccagaaatgtgagttacagcctgtaatcccagcactttgggaggccgaggcgggtggatcatgaggtcaggagatcgagaccatcctggctaacaaggtgaaaccccgtctctactaaaaatacaaaaaattagccgggcgcggtggcgggcgcctgtagtcccagctactcgggaggctgaggcaggagaatggcgtgaacccgggaagcggagcttgcagtgagccgagattgcgccactgcagtccgcagtccggcctgggcaacagagcgagactccgtctcaaaaaaaaaaaaaaaaaaaaaaaagaaatgtgagttacagccacaccttaaggcacacctctcacttccttagtgccctatgagaatgcctggcccctacggctgcagagcagtacaaaggttaacgagatgtgggaaaccactcagaatttttatgctaaagtcattacatttgagagcgatttcatattggctggactttggtctcagtcaatatgatttcatctggcaccatttatgttaccaacttaaactggctgctatttccccaaaaaagtatttccctaaaaatcttcacatatatgtctgccttttcatcaattaaggagtatttactgcacacctccatgtgttcatatcctatttgacatctataaatgaatcttaaaaagtgcaactaagcaagcgtgtatcagtggcatccatcttctggttttccttttcattttgattggtttgctattcaatatgtacgtgcaatttttttcttcaagaaaggattcagcctatcacacttgtctgtgtttttggtttctgtggaaagagcctaacatgcagtggacaccaggataatggcatttggcaacagaggtcaatgctacctgtggggactggggtttcactatccccaggaaatggacctacatgttaacaaggaaagtttgccatttaccgggcttctgatggtaacagatttgagagaactagctggtgagtggcaccaacaagaagtcagcgatccatccggggtggcccaggctcagccacacaagagaaactgcactgtcctctgcacccacgtctgacattggtcctcccgtgaagcttcatgggggtgaggaccaatgctccagggaactcctccaacacacaggatcgggccctccccctcctcatctgagttatatctgggctctctttttctttaaggggacaaaggagaaagaatgccaag

SEQ ID NO: 36459 - DNA, 842 bp, Homo sapiens
aggatggtctcgatctcctgacctcgtgcccctcctgcccctgcctcccaaagtgctgggactgcaggtgtgagccactgcgcctggcccgaaagggagatgatttctctcccaacctgttggagagagaattctcctgcccatcttcatgttgtaattaccctgtcctgccccagatgaacagcttcacgcagctgccaccccaggactgctggggcacacagggaggaagagaagacaagctcgcaaatactgtgaacgttttctaaaaaggaatgtgtgctgattaaacctgtcagaaagcagactgagtttgcacaaggagttctggttgatagataactcagaaatcttggcaacaatacagaaccaatatttttatagaggtggcaccatcttaaacaatgtccttagtgtgcaagacacaggcagcccttctatcaatatccagcaagggtgactttttcctccacctcctctgaacaaacaggctgatgaaggagccggaatggaggtgggagggagacgggttgggcaggacacagtgggaaacaggaaagtgattttaatgatctctttcaataacgcagccacctccctcaactagatgtgactctggccaagctaggttaaaacaggtcgccatgctaagctggaaccagccccccaattctgtttgtttatcctaacatgtagaagtagctacacaaactttggtttaactacatgcagtcagcagcacattgcgtttctcctcaatcaggcacaagactgtcagagtcaccacactgctatcgacaagtgcaacgttagcagcatcaatgtccctgcctccttcctcc

SEQ ID NO: 36460 - DNA, 1199 bp, Homo sapiens
agagctgcatggaacggactgccgcccctccccgcattacctctgaagggctccttgttggaacctggacatctctcactcccctgtcctgggtcagccgctgctggcgggatcaggtggtggaagggttcaaatttcccttgggtgttaaaatgcaaagtgaccctaaccagccaggaaaagagcaggtgtcctctttcatccagctggggtcactgtcccctaaggggccccaggctggtccttcctgtctcactgaggtctcagacctcatgctcattgggacttggctgaactccaggccgtcagcccaacagcgctaaagctacagccaagccgcagagagccgtggcctcccacgccccacgttgctgggcagagaagggaagcatttcagacaggcaggctggcccctggccagcaggtctccagatgccatgcaacacacacctgagcagggtaagagaataggtgtgtgtcaacagtatttgaaaaagaaaatagctgcacaaatacagcacttgttaacacaggtgtttacaggtggaattatttttccagggctgctatctcccagccttctttgtgcttctcagctcacacctgcagggactttcctacgaagccaaggcacaaaggggaagtggatagtccgtatcgattttaccacggaggaggtcagcgatcagcttcaggcctggctagttttcacagtttcccttgctggactcacttccatgttttcaacctgctctaacaggatctggcctgcgctccacttcctgcttggctaaggcagctgctgtgaccaccccaggcagtcacagcaagaagccatttcctggggccagggcacgctggctactctcgggacataattatctatctggtccttgtctcctctcccccaggagaggctcaatgtttgtatattacagataaggaaactgacacacttgtctgaagtcacagggctaataagtggaggatgttgtgccgacatcaaaccagggaagaacccaaagaggcagctgcaaagggctccagaagtgtctccaagatgacccccccaccaccaccaccaccgcccacaccaggagcagcagtgctctctgtgggacacccagaagcacagacattcaacttaaaataggatctcatagaataaagcagtccgtcaggtggtaacaagtcccaag

SEQ ID NO: 36461 - DNA, 917 bp, Homo sapiens
ggggtgcttggggggatgtgtcgggaggggaacctgcaccctcactggcgggggtggaaggggaggcagaggccaagggctgccgtcaggcaccgtctcagcaagagaatcaggaactagagcccccagctgtgagggccctgtgagatttcttcaacttttgtcacttccccactttttcccctttggttaccacccttctgcccggcgtgactgttaattaaccccttacagctgcaagggctggcctgcagggtcagcaaagacaggagccagaggacagccccaccccagcccaggccagtcccgagatggggccaagccagcagggcctaggtccaggctgagcgggtgaggggtggcccaggcctggagccactgcagccagaaaggtcctgggcccccagccaccctctgggtaagctcctggtgaacgtccaggcaggcctggttgtgcaacaggccccgctcccagtaagttgcagcagggggaggagatctcagcctgcaaatgctgctttgctggttatactctcacctctggctggatccacccagctgcttccatgtctcctccgctcccaggcctgggggagaaagcccaggagggaggcgtagagcgccaggcccttgtggctcccctggctccatgcaactgaactcagccccagaggatctctgctctgactcgagaaagtccagggagaggaagggggctgaggaggggagcagagcacaccccagcacattccatgattcatctggacccagcgcatctgccagggtccatgcgtgtgcacgtgtgtgcattgagggtcgcacgtgtgtggtactttcgatctgaaaacacacagtatctctccaatcctcacagcagtctcatgagcagaaacgtttgtgtcaatacacagataggg

SEQ ID NO: 36462 - DNA, 1294 bp, Homo sapiens
tatcagtgagaagaatggcaataatttatgcctgttcaaagctcctgggtgtctgacttagaaaacagccaggttgtcagatctgcttctgccctcagcctgggccattagatcactttagctgaggcatgtgaagaaaattcagcccgaaacaaatatgtagctagaaaagagggacatgtctgtaatagacttttcagacaattgtggctattcctcttccatactataccaaaattcaaatcatgatagtttctcataggttagctgcactgttgaatgagaacccatctcacctattttttttatatgactacattaaaatctattagctatcctgcactttgaatagatcatttgtttacccactcatgattttgcaataaatgtattggtcatttggcaaatattgattcactgacgtgtgatctatcaaacgtcaacacatttcattacacagccagtgcattaatatgatcatgaattccatcagaaaagtccggaggtgttaggaagctatcaagctcacagcaatggatacaagttttctaaaattttaattttcacacgaaaggtctaattgtatggcaacagatactatcagttatttttcctgaagccacaggcttacttcatttattttcaagaaaatgtctgccaaatatccaagtctggttaacctagtttaggttacagaagtccctctcagctctaaaaggccagcctcttacagaaagttctgagggtcttaaagttcagggcaaagcaaaaaagagacctccagggagatattccctgcaagcagctcccaacagcccagggaatgacgattaatttgaaccgcattttcccagggcattggtaagaggtcagcctactccacagctgatctctaaatcccaaacccagcatccagtgtagaaatgatgaaaatggccaatacattcttctggcagttggtgcagtgctcagtgcatgaaggttgaagtaaccgtgcagtgtggggcaccagccaagacgccgtttctacctgggggctgtctcaccgtgcaggaggcgcgtttgctccacagtttactgtcagcatcatacatacaggtaaccaaaacccttgtcaacggccacaggcaaccatcaatagtgagcacaatgtaaccaacgaaggctggggtgtgaagaatccagccagcctgataggcagggcaccatgctgcagtcaggagacctgggttccggggccagccctgcctccaacatgctagggaccatggccaaaccacttaatgtctttgca

SEQ ID NO: 36463 - DNA, 1298 bp, Homo sapiens
tggggtgtgtgtggtaggtgtatgtaatgtgtggtgtggtgtgtgtgtatatgtgtggtgtgtatatgtatgtgttgtatgtgtggtgtgtttgcatgtgtggtgtgtgtgcactcatgcacacttacacagtgtgtgtgagcatgttggccctgtgtggctctttgcgtgtgagtgtgtgccatgtgtatgagcgtgtgtgtgtgtgtgtgagcctgctaccattgtgcctgtgatatgctgaggaagcctgcagagagcaggactggggtgtggattccaagtcttggccagtgcacagcaggatggggaccagggaaacccctctcctgagcctgtgccctctcgaacataggggcaggttcgcaaggaccagaagggatctgcctcccatctgccaccgccccatcaaaggcagagctgaagtgagatcagttgggttagggctccacggaaaaccaggtaagccccagggaccacaggccgactaaggctgacagcaattagctgattagtgaggggcagagggcaaatccagttccacaatcaaggaccatgaatgcagaactgtcagtggatcccatgggggtggcgcaggggcatggaaatgccctggctcaggacacggagcagccaggtcagagcccagctgaactcttaggagctatgtgaccctgggctgttcactcaccctctcttggccttattccactcgcacactcagatgctattataacaagcagtccctggacagcagtcaagtccacagaggggctctgcaacccatgacatactactcaattgctagtttccaaaaagtacctgggggctgatccaaaatgtgggaatggcaggtcccagcagagagagagaggcactggtaaagccgggagagtgaggccgccaggcatcaccaagggccacacgaaccagggaggagtgacagaggcaggagaggaagctgggggacaaggcccagcagagggcccttaggctaaaggaggccgttaaacagagcaggagatgggacagtcagcactgggacgagacatgggggctgacttggagacagtgagacctgataggaagacatcacgcaggagtcctgttgcatcactgtgagtcactctaggaggattatgcaacatatgatgagtgtacaatattagccgggcgtggtggctcacgtctgtaatcccagcactttaggaggccgaggctggtggatcacttgaggccaggagtttgagaccggcctggccaacatggtgaaaccccatctctactaaaaataaaaa

SEQ ID NO: 36464 - DNA, 1213 bp, Homo sapiens
gactccaattacctcccagaaacccgtctccaaatatcaccacatttggagttaggatgtcaacatagaaagctgagggcgggggcacaattcaatccctaacagtcagtcagtcagtctcagaacaagatttaaaactggatgcatctgcttccaaagctggtgtccgctctactctactaccctactctactctactctactctactgtactctactctactcgctgccttctccacgcttaccacttgcaggttatagaccccttgagaatgatttggggggacattcttggcccccagccttgtgctgagtatcaccagctctttgggcagtgccaacatttcaggatcggtgggcacccccttctcacttgttgttgaggttgatgtcctatattaattttaatgattttgccacattcacctccaattgtcaccatttaagcaagagccttaaacaggtgttccaaggtcacatgcgtttggaatttgtttccctgccctttgtcctgggaagatatccacctctggggggaagatcaaagtgcaaattcctgactgcctctcctcgtgacaaaaaccacatgcagaatgccatgctgataggacaagtgtggtatgcagctggagaggcaagtcggctgaaaaaggagacgcctctcctcccccttcaaggcccagcctgaagccataaagatctttggtgctttaactaggattaagaaaattccaggcggaaaccaacagttgacttctttgggctttctcttgattaactccacataaaccaaagttctatgccttgtagaattccaactatggatattctcaatcaatctactatttcccatgacagaagcaggtattggtcctttgcagacattgaaaataggccaaacagagcctcgaataatttggcctcatggggccacaatccatctcagtttttaatgcatgtttctcttcagcagattgtgcacgaatgattttactaatgaggtaaggaggacacacctcaataaagccaagtaattactctaactcaaaatacttgcacagcacctccaatatggattataaactagcatgttcagataaactgaagcccactcagcttctgtgttggatgtggaaatcctccagcattcagcatgggcatgcacagagccggacgcagggtttttttgcaagaaagtcgtgagacatgaaga

SEQ ID NO: 36465 - DNA, 2212 bp, Homo sapiens
tcctggatgcagtgggcatctgagaacaggataaaaatctgccctaggtctatgggaactgggcctcccatcccaggaactgtgccacctgtgacaggtcactggggaatgccccactccctccctgggcacggaggagctgaggaggccctgaccagtcatgtgactggactgccgagctccagccagccccacgtgtgggcagcaccctggcctccaacccagccacacaatgctgcaaagcgaccacctgggcaaagccagggctccgaggcacaggcaaccacgatgtcctggccaccaagggctgctctagcagggacctgtctttggcaagctgccctaatctaatcagtgtctgaacacagcaagcagtgcccacccgcaggaccagaacacagaggaaacccttgaaaactggcccaggactaagcttccctctgagtcaagctgcgtctctgagcctctgcccagacatcccagagcattcggtgctggtgctgaacacagccccggggaaggcgccctgcctccagactcaccttctccttcttccttccctcttattgtccctcccaggataattaaacaataatgattagtgccaaaaaaaacaacatgtcgttttcctggggactcggttcttgagctttctgaataaggaggcagcgttgatcgggagaagtagggcaggggcaacaactggggccctagagcagaggagtcttccatttcctcatctctaaaatgggtcacacatggtatttctgctgctccgggatgacccctcaaagcaaactgcacccgggatgtccacttcagctgcttcgcaccccgaggttacacctggtcagactgcaggactggcctttctcgtccagtctgcagcagggcccttgccacccgcccggccgggtccagcaatgggccccagtgtcatcattcaggcccaggcccaacttctccccagaggctggaggggctggggtgaccttctaggcacatcggggcacaaaacagaaggcgggagatgcacactacttctgcctagcagtcgtgcctttccctcttctgtggataaatgagtcactttttcattgtcccagtacaaatagaatttggctgaaaggtctggcgttcatggggctcatttcgcgttcttttgatagttgtattctatttgtcacacatggtatttccttccctgtggcaggtggttggggaggggaggttcccacccccaaaagtgaagcgtagggtctggagatttcctcactaatccactgaacagatcctgattgagggtctaccttctagaaaggagagagagataataaatgataagcttggtacataaataagttatgtagtaggttaaaggtcacaatacacagaaaatagaagactggggaaggtgaactagggggtgagggaaggtgggggcaggttgtacattaaataggttggtcaacatggacctcatcgagagatgagattacagccaaagccagggtcaaccaagagggactgtgggtaaagaccattcctggtagagggaatggctggaatgaggctcccaggggagagtgtgcctggagcacgggcagagtcctccccagtccagacatctggtccacccctgacccccgattctgatctgggcatcttctggcaacaggatgggggccaggccttgcccccaggagcccgagcccagccaggtctagcaactgaggccctgtgtccctagcctgcccagatgtccacgtgtgacccactcctgcagaagcgctctgctgcaccgggatgacccctcaaagcaaactgcacccgggacgtccgcctcagctgcttggcactctgagtcagcctgcaggacctgcctttctcatccagcccgtgccacccacctggccgggtccagcagtgggtcctaccaccatcgttcaggcccaggcccagctcctttccagaagctggagtttacgaggccatgccgctgaccacactgccaagtcgtcccagtcaccaggcacagccaccaggagcgctgggtgggaccggaggcagccctagaaaacggggctgcctggaggtgagcagactggtggacgatggacgcaggccagatgcggggaccacagatgcgctgctgtgaggacagaaaacagttgcaggtgtcccagaaagcgttccaaagaggaaggccctc

SEQ ID NO: 36466 - DNA, 1529 bp, Homo sapiens
cccaggagaccacggcccccaagagcaggggtggctgcgctcctcacagcctgtggctcacagctcacagcggagctgcaggcccagctgagacgaggcggcagagagtggagtggatgagcggggtgtgcgagagtgtgtctgtgacagtgagtgtgtgtgtgtatgagaatgtgtgtgagagtatgtgtgaggagtctgagagtgtgtgtctgagagtatgactgtgtgtgtggagtgtgagagtatgtgagtgtgtgtgggagtgtgtgtgggagtctgtgtgtgggagtctgtgagtgatagtgtatgactgtgtgtgagggtgagcatgtgtgtctgtgtgatagcaatagtgtgtttgtatgtgtatgattgtgtgtcagtacatgtgtgagtgatgtgtgtgtgtgtgtgagtgtatgtgagagagtgtgtgagtgtgtgtgtgagagagggagagagagagggagagagagaggggaaagggctatcaatgtaatttgcctctacagctaaacacacaggccgtaatcatagccattttactaaatgcccataaaactaaaaaacaaataggaaacctccggattacagggccttctctgagcagggagtggcgcaatcaagtgctatctgcgctaagtcccagcttgcagtgagtgacccaggaggcgcgggtaaacagagagaggaccccgttccctgtcccccccatcaaacctccaaggctgaatgcctccgaggctgagcgccgggggaacggggggcttcctgggaacgcagtcccctccgtgtgggggtcctcagctcccctgtgtgagcctgtgccatgcggaacgggaccacagcctcagcctcacaacgtgcctgtgacccagcgggagtggaacccaggcctctggcaccggggaccctcagaaccctgcctgcaagggaaccccagactttgaggggaacagcctcgtgcagccctcatttctcccttacagctgtgggacttcacagacaagcaaaagaaagggagcattttagcaagagcagcctcaacgccaccccctagagagcagaaaaaaagggatgctaccccaggtcttactctagggtctcccctcggccacactccctgcctcaacagaatctcaagcgccagaatcaccaaaggacattctaagtgtcattccgccctgagtgtcagaaaatgcctgcagtggatcctcagtggcctccgctgatgtaaggagggtggcccggaggaggccgccctgcagagggctccccagcacagcagccgcggggacccagcacgccaggcgcacgacagggagcagccggtagccggggcaaagtctgcaaggatccaagcaggacctgccccaccctggttccaccctcacttcttgatgcttgccttccaaagacctggggacttacctgtcccctgaaagatacgtttaccaggtaacagcatcttcccaacccccacgaacctcgcactccaggctgtgtgcacctcagatctctgtgga

SEQ ID NO: 36467 - DNA, 2343 bp, Homo sapiens
cctctgagacacaagcgcctttgtcagagacagcacctctcattgcagaccccgaagagacaggatggcgggctgaggcactgcagggcgagaagtggagcagcccagacaggaagccggagtcctggatggtggtggtgccctctcaagatccgtgggaaagcagcggggttggaggacagcaccctgagagggaggaagctcactgggcatgagacactgatactcaatatctggcgggagggactccccaagcagaccccagctcgttcaactacaaagactttgagcatcacctcagatctccagcagtcagagaatctgccatcctagggtggggcagcatcctaaaatgtcatctggtctgccccacctgccagaggaaggcagaagctacattgtcatcacagcacggagcaagtaatggcagccttctccagaaagtcccctgagatgtgggcagagccacaggtgggatctgggcctccaatttcctgtccaggggcccggagcctcctctctcacagctttggaagcctgagggagtcctgtagctgtaaggactcggctgggggtgctggggccaacaggtcatcctcctcattcctgctcagacacccttccagctgcacagtcttctgccaaccacttaacctctctgagcctcagtttccccattggaaaagaggacctgagcattcccacgcaccagggagccaaggacttcccttgggactcatcaaacaccagttccttccctcgtccttccccctccttcgtccccctccttacttaattcaagtcaagctaaattgattttttgaatcagcctcactaatttccggtcctggcagcttccaaaatgaaaatgccttgttcaaagcccacagtctgagcttcctgtggtcttctcgtgtggaccacatatcaacggggcgggtgaggagtggggtcagccccagggagcctgaagcagccctggccccacagcggtggcacaaccagtttaattattaactctttctccggtgcagtcagccgccaacgcacattcatgagatactaaccccttcatctccctccacatcactcggccacccacacgacaagagcaccagcgtgcctgggttctgagtcactttccaacatggtatttcattcccttccaggattatttatcatcagggaccacatacgctttatatgtcaacagcccattctgcagctgacatccctcacctcctccaggctgctctgccctgctcagccatctctctgttccttgcgtccttctccagtcctcacctctctcccagtctcccagggtcaccagagcttctcaggcccctatccctttcctggacagaagcctcgcttcacaggccccgaccagcccagatcactttccttcccccacttcacttgtaagcacccctgtttcttaaagaaactcctgattttcttccttcttctgggcccactgctggcacggcaggggaagccatttccttccccaccatccaccccttgatgaacacagatatcctaagcattctcatcacactcctgcactttcgaagctcccactgtgtaggacaccacagctcaattcctcttcatggttttcaagacctcctggcatctggctccggcatctggttccagcctgcagacccaatcagtatccgggtccaagcccctggtcctccctgctcaccagcaaacggctggtgcatgtcttcctgactgtcttggctcaggccaccccttccatctgaagtgccctgtcctcttgcccccacctaacccatgagctccgggcaggtggtatctcaccctcttagcaaccccacactacctaacgtagttcagttcaagcacaccgtcaaagccaggcgaacacttggtgtatttgttccctggggctgccgtcaccaattactgatggcttcaaacaacagaaatgtatttcttcacagttctggttgccagaaacctgaaatcaaggtgtgggcaaggtcgtgccccgtctgagggcttggggaggacccacctgagcctcttcttagctccggctttgccagccatctgtgccattccttggcttgcagaggtccctctccagcctctgcctccaccatcccacggtgctccatgcgcatgtccaaatctccctcttctaataaggaaccagtcactggattagggcccacccataagacttcatcttaacttgattacatctgcaaaactcctatttccaaataagccacagtcacaggcgcccaggttaggacttggacgtatcctactgcgtttggggaatgcaattctactcacagc

SEQ ID NO: 36468 - DNA, 1775 bp, Homo sapiens
aaatcagaaatttcagggcatcctaggagcactccccaggaacaaacttcaaggagtgacattcaaactaatgaaaatgtgtttctccctcccttttgaaatggcagcgataatactgaaaattaagaacggcaatgataggagatttccaaaagcaaagtacctttgggcaatacaaccgcaaaagataatctatagaagctcagccattccaacaattcacacagtaccttcgtgcctggcaggttgcaattctgtcttgctttggcaaatgagtcagtcagaagccagaaagaaaagctgacttctacaccctgcagtcttacaaagccaaccaactaaatcaacaaggactagctaatgtttgtacttttctctccctgcttttttgagcaccacaaattcaaagcagctgtgtgcttctccccactcaacctttggcctattagccaaagcatatgtagtcagcaaacccggtggctgagacctggctttctcaagcccaacttagaggcttctagaggtaaaaaaaatttgtgccaattaaataagtcaattgaggccgggtgtgatggctcatacctgtcatcccagcactttgggaggctgaggttacagctttgtgaggtgggaggattgcttgagcccaggagttcaagaccagcctggacaacatatgagacactgtctctacaaaaaagtagaaaaattaactgggtgtgttggcacatacctgtagtcccaactattctggaggctgaagcaggaagatcactcgagcccaggagttcaatgctgtggtgagctacgatgatgccactgcactctagcctggtgacacagcaagaccctgactctaaaaaggtaataagtcaatcaaaacgtcatgtcagccttcactccagagaaagaggcctgtttcttatgatgtcatggatacctatgaattgtgtatatgtctttacacattttcctttcatttatgatgagagtgaaataacttcatttattcattcaatgaattttaactagaacttctatgtgcttgtcccagctagatgctgggaaacaatacagtgaacaagagacatcgggctggaggaagaagcagaaatagccacagacacttaccagatattcacccccaccccaacccccgcccccaccctgagctcagccctgagcatcttcctgcctcaccgggaatccacatagggcagggtaggaagatgaaggaggaaacagcctcttctaactgaaaggctcaaccacaaaaggctttgtataattaagtcttaagtgagagaacttccagaccaggtcatgggggccccaggtctgtggaaaggcaatggccccgaggtgagacagctctggtgggttggaggatgagctgagaggtcaggctgcagaggcaagggctgggctggcactggaggggctgtcctcaagagctggggaaaccacagagagcgaaagcccagatctgagtttctgaaaacctgctctagtgacagatgaagaagacgggacagggttgtgtactcactgctcaccattcatgatgcagggcacggtgccaggcaccgcaaggaaatgaggccgcagtgaaaatggcctctgttcaaacccacgtggaggcagaggccacggtcagcccccgggagacactgtgtgctccagagcaggtcacctcacccagacggaacacgcctttccccagtgtgcccatgactcttcatgccccagctcccatccctggaagaccctgcgag

SEQ ID NO: 36469 - DNA, 2267 bp, Homo sapiens
catttgtgtggaatagactggctatgaggataccaaaagatcccgaacgctcaactgtggccctgacggcagagctgacagctgctccggtgccaaagtgtctcttaggtccaattctacttacccataactgcagggccacaagtcactctataaattgtgccccacagtggccaggcatcaggcgtggctcatatcttgtaatcccagcactttgggaggctaaggtgagaggatcacttgaggccagcaattcgaggctgcagtgagccgtgatcatgactgcactccaccctggacaacacagcaacatctccaaaaagatatttaaatggtgtccacagataagtgttgagacaacagggcacggtcagctctatctgctgtcaggacgacgtcgcgtgttatttacgcctggttggaacacgtcagggggaatatcttaacacatcagatgcgtgtactgggcatgggaccgtctacctgtgggaccttgcccccaggttccctgagaggtgccaggctggggacctcatccagttctatctctctcagtgtggcacaggcctcagtgagtggacatggggtgcacatttccccttcaggaactgtacaaaaattgaagaaaaggaaccacacaccccaaattcaaagaaagcctccaacaattggagttggaggcgttctccaaaccccttccccacttcctgacagccccctgtcagccttgaagaagaggaaggaacaggccaaccttggggaccccgcctgcccccagggttgagcaaggctctgagggcactgctcctggagaccagggctgccccaggggcaggggcagggcagagcaccaccctcgtcagcagcctgtggccttggcccgtcctgtcatcactccggacctctatttctcaaccgtaattttaaaaaaacaggacaccgtggcctgtttagggcttctttttggcaataacatttaagtctggaacatgacaagctccatctcctggtctgataaaacagcaagtaccacccccagaattctggacaacgtccacccctcgggccctggactttcacctgcaccctggctgctgagcaggcctctggcatcatctcccaacccagtcatgtgtggctccaggcctctgagcccaggcaggctcagccacccttagctggaggccccgactaacacacagttccctcttcttctgcaggccagccccagcctcatccctgtggttggttgatattggttttaagctatgggtgacaaactctctgttctctgagtgtgccttcaggacatgatgtcaccctcgttgaagtctgaatgcccaggaaaggctgcctgaggggttggactggattgtcgtccacctgcccatctgcagagctgccagggctcacccgcttgggcaggagcacagtccctggagagctggtcagagcagaccatgggctgtccccagaggcttgaatcccaccgctcaggctggggctggagcgtccacattgctgacgggttccccagtggtctggacgtcctggaccgcactcaaaaattgccgccctcaagcatccgggagacaggtggttctggctcctggacactgctccacctgccacgtctgggataaaagccccctgctctgggccatcacagtggcgctgttgaaggagatcacagaaagcagccagtccagcccagtacaggccaggctccagggaagaagaacaggcaggggcatccagcccaggggagcagggacggtttcaaaggaagtgatatctgaggcttcaaggacagagaagggtcagccaagcagcgaaggggagggtaatggtgttcccaggagaggagcgggcaggagtaaacatccacccagggctgtcctgggaacagcaggtgtgtgtggctccacacagatggctggagcatcatgggagaggagcaagagatggaagctgaggctggacagtgggctggctggaccctgacaggcttcaggccggtcgtggagtctggacatcagcgtgcagctgctgtcagcagacggggctggcagggctcacagaggcagggctgacatccagtctcaggccagggccagagtgactgtccacagggaagaggggacagccccaggtatctgggatagaaggaggagggcaagtagggaagaaaattcagaactcacattttttttttttcctgaaacaaactcgaaaaaggtactgtcggttaaaaaacaaacaacaaa

SEQ ID NO: 36470 - DNA, 525 bp, Homo sapiens
caccttctgagcaacagatccccacggcagccccagagagcggagtgggggtgggggggatggctttgtcaacttgttctcattcttgagctgacgatctctccgttttgagagtgaggagatctaggcctttttcttttccctggcatgtttaatttacaattactgtactcaggcagtgtgaatgtttaccatatgttggttgtgtggcaaaatattctggctcccagaaaaagtctggtagctgagtcaagctgagtcactcacctagagaagtcctgagggaggtcattagaggtggctgggacaggcacggtgcctccctgcctcctggaggaggaaaaggcagagctgggagtcagatccagatgggtgccccaaccggctggagcacagaggctcttacagaacaccacgattgtgttgggattgtatgcactagaactttgcctacagaggagaaaaaagccgagttggaaccagggcaatgaacaggaccaaagaaactcaaggatggaaatggta

SEQ ID NO: 36471 - DNA, 6262 bp, Homo sapiens
gaatttatacaggtggccacagaactctgggtgtaaacgtgggtttcttacatagactaaggtttgaaaagtcctaagatgttagttgacctttagttaacaaagggtcaagctcagtcattcggtgttaacttggaagaaaaatgagaacaaactgttttcacagattcctggctcttggcaatccagctgtccaggagtggaatacatttcaaggttaaaagagtaatcaatgctccacctggagtcaaggttacacacctttgcacaatggcaggctgtcctaggaagtgttggctggagtctaggccaccacagaggagtctgtcattcacgtgtgcctgcgtttcttcctctctgaaatgggggcagcctttccaaactcttgggctcaaggtgaacagcaaaagaggtgtgccgtgcacaggcgtgtaaaagactattttttacctaaagtgaatgtttactctctccttaaagagggccttcgtgttgctcttttttctttgaaatggaacgtctgtctctgtattcttcacacagaatcctagaaagtcaggcatgatggttaaaattaaatgtatgccttaatttacccatccttttctgcggagtcctgatgaagggcaggcctaggactaaacaggagaggccctgatgtcagcggaggcaggaagaggccgggatgagcccaggacccaccgcagagctaaccagggcgatgtgcgctccaccagctagagcgcaaatccttcgccccgtgcctaggactgctcctccaggaactcctccaggtcccctccgcccgcggtgtctccacgttccctcctggagatgcagccttaggtcctgcccctcccgcagaatggttcgcggtgacgcgcggctgggatcttgcaggacccgcgcacgcactctaactggaaaggaaaagtctgcaaactgtcattattatgaggagagggctgaatctgggagtaaacgccttaaagatgcggcaaggggaagaaggagttcaaactattgaaaaacctgtccaccagccaactcgcgctggcgccgcctgggtaacaccagtgcccgggcgatcggttcgcctgcctccccggccgagaaagggctgtgccccaaagcccttgtcctgtgcccaggacaagcgcgtcccggccaggccctagcccgtcccagggaccgggacagggctcacagggcggctgccccagctgggagcgcacgtggtgcgaggcaggcgggttcctcctcactgaagtcatggacttggctcgctgcggaggggccggcgcgcgaacgtggcttgagccaaaaaagaaaaagtgcacacaatgtgtttcttgttagggactgcaagccggggcctcgggttttgcttttggtgccgcattataatattaagatgcagtttgattccggacaagtccgtccttgtcgctggctggggcggattcccacggacgctggtgggcagagggggggtggcctgggtgctgcgctgtggcgcgagggtgcacagcggatggaggggggggtccctgcatgacctaggctccctgcggtggccggaccccaagactcgcgcctcggggcggcgcagacaaggcgacgccagccccgctcccgccagctcgcgggcggcccaagattgttttccaagaccttatctctcactcaagttaattttctcttttaatttggtgatcggaacaaaagacacaggaaaatcctttgtgaaagctaacgcagccacaaatcggggcacttcacagcatttgtaacaaaatatttgcagtgcccgtagttaagtcggcccctccgccaaacttcccaaactttgctttctttgaaccaagctgaaaagtgatctccctaaaaggggatcagaagattgcaagcaattggatttagcacggagttctacctggtgctctagagagctctgggcacacaggatggtgcgggaatcctggaaggaattacagcctgaatggtggcagggcaggggaggagccactgtgaagccgtggtagtcgctgaaacgctttgttaatgccatttattagctgtatgcgacaagaagtgtaagaggttaggcaggtcttcaaaaatatccaaaaagagaaaaataaacattcccttgtttgctttttgtggctttgctcattttcttcccctcgagtggcccttcatctaaggctgttttaaacccaaaatcggttatctggtttcagggtaagggctccctcttgccaaggtattaaataaacaagtacagcaaaaacttgaatccttatgtaatccaaatgccgtttcctcgaaaaccacaacaaatgctgctaaaccagataacaggaccgggaacattcggccccccaacccccaccccacaacacacagcctccgcccccagctttagggccagcagaggacatttatgttcaggaactcctctccaggacagataaataattgctactaacactctcaactgcagatgagcacccttgagggatccggatgccataaactgtccgggagtgttggcatctggttcttaaagccaggaccccaggaggcgtctgcgtctgcaagctgacttggaagtttctggcctcttgatgttctcagtcgaaaatggtgcattagaaaggggattggtctggcccgcgctttgtagtagtaatgagggcgcgaatcgcgctaggctctgcgcgcgcgaggctccgccgagcaggaggactggggctgcacatcctcccggctcccccagggcggagaggggggccgttctggaagaaaaaattgtttatgcgcaacctccgagggttccgaggagttaggcagtaagacggtgtggaggttgggggggcggggcgagtctttcaatctttcaaaggtatttttaggaatccaggatcaaagccattcggcgagaaaccgaaataatccaaaggagtaaataaatctcgccatgtgctaagacagtgaccttctccccatccacccttccctcgcgccagccccaccctgaacgcctcggttgcaaaaacaaaataaagcaaaaccttttgctttggcaacctctaagccacattatgcctccttttgcaaaaggaagatttctttcttctccctctcccggcttttttccttcgtcctctcctccgcccctcacccgcccacccccccccccccccgagcccttttcttttcttctcggtcctctttccttccccaaatcactcgaaacttaagacgtgcagcgtctgcaggtgcgcgcgggccggcggccgggcctgggcgagcctgggactgccgggcctcgcaggcattgatcagctgggcgcgcgcgctgagtgacggcgcggttgccatggcagccgcctgagcggcgccgcgaggacaaggctgcagggcggcgtgaatgggcggcgtcacgcgcctggcgccagagagtctgctccggggctccggctccggccccgccgcggcctggcccgcgcgccgccgccgccgccaccgccgccgccaattcatcacctgtcagggatcactcgcggggtcacgggcggaatggacacagctgtgagaacaaaacccgggaaagaaaggcgaacgctccccattgcgccagatgtgcagggaggaccttgagacgcgccccccgcccccgcaggctcctcccgccccccggcgcatcacgcgggggtggcaaaggcggcctggccagcgcggagctcccggcccggagctgcttctgattaccgcgaggggcccggacgcgagagccgccgcggggcctgccctagaggcggagtgagtgagtcctggagccaggctgggggaccttacgggccggtctgtcgctgccacggggtgggggcgtcccggtggggagtcgaggggaaccgcaccaacacccaccagcggaagccctgcacaccttcccaccgcccgcggatctagccctccctctagctggggccgtttgaactttggaggcctcaaatgcaaacccacccaagccaccaattgacagattttgacttgcctttaaacccacttggaaaatgctccgacacgattttcccccacgaaagcaatttttaaggtgatttcatattgggcgtgctgaaacagacacactagtaacttaggcctcgtttaaatcattaacttatacagcttcgtaatcccctttaaatgatctttaaatgaatgtaaaactgggtagcgtgccaatagaatcgaattcaacacagccaggcagactggactctgacatggcagctaaagaaagaaacaccagaaaactttcaccatatttagccattttactacatcagggtacaaaaatgatcatgggagaaggcactgccttaatcaactttgcaaagtgtaaagtgaaaccgcacaatgctcattaccgcccaacccagagcctggctgtggggataatgaggctggcacggatgttaacatacggtgtccttggaaaaagctaggaatgcgtcagtatcgaagagctgcaatgtccaagaatcataagtaataatttgagaatcccaaagatgtttgtttacattggctattattgtaaaatagtcaaagtataacatcatgaaccaaaatagtgtcaaaacaaaatctgttccactgtggcacgtatgtgacagaaacacatgcacacaaagtacatcaaaaggctcgaactgtgggaggactcggatagtaaatcacttccagacttaatatcagaagagatacggtgcatccaacgctgtcagggacagagtcgcaggcagcattgcctggcctggggaaggccctccgcaaacttctggctggacaggaaacagtttacctccttcctccaaactgagggggctgaatttcaggaaggtgagctccacctcagtgccacccactctgcctccctggagaggcgtcatggggcgcatagctgtcacgtgacggtcagagactgctggccccaccagctgagaaattaatcattaattgaaggaaaaaacactgtttccccattatcgagcttttctttcagcttctaggcctgccccttccgctttctgaaatgcaaaggaggtagagattgaggcagaaagtaaataagatttgaatattgcctttcctggagttttctagttcattgttttctggagcaaatattttcaaaaacaagaaactgacacactgtggtcaaaacagaattctagataagctacaattatgtgaaaattaaggtatttaagtaaatagctgcaaactttttaaaacttagactgaaagaacgagttcttaaaagattttcagccaaaaaaaaaaaaaaaaaccttgaacccgtattcagtactagtgctgaaaagattccaaacctcatatgacagaatatttttttttccttagtgtgaagatgtctatcaatggctagggccacctatctgtcacaaagctttggaactcctctaggtgttggaatgtgacaccagaaatcacaattagtgcataattaatcacattactttgccacctacacggaagggcacagaccggcagcctttcaagggcagtgtatgtaaatgtagtttcaatatgcaaattctcctaattatttccgattaatacgatcattataatagccctgcctccttcttgaaaaggaaccctgaaagcgccctgcctgtgagagctccttagcgaccggtgaggttgggcatggtttgcaataagtactcattttcttgagtttacagtaatgcctcccgcgctgctccgggttgcaaaagcccacactaagcctgtcgtcgaatgcgtgcgtgggtggtttgtttgtgttaacataacttttccttatctgaagagacgaactcactctacaaacgtgactcttcagtgacaacctaatttgcgttttcactttcttctgaaatgctttctatctttcctcacgctctccctccgatgggttgcagtgaactgtggcttcccccctgcggtgctgaactcgcccgtgtagctgtgattttagagctgccgacagctctaaggtgtgtagggcttggtctgggaacacccccagggcaagggtcccgccgcgcgcttggaattagaattaagaatgcatatttaggcgcccagggtctgcccccttctccctcctccttcccctcccccttcccctcccccttcccctcccccatcttcccttctcttcctcctccctcct

SEQ ID NO: 36472 - DNA, 2087 bp, Homo sapiens
ggaagaaccaagcccacgccccgcgcccgcgcccaccaatggaagcgcccgctcgtcttgatagacgtgccaccttccgccaatggggacgaagggaagctccagcgtgtggccccggcgagtgcggataaaagccgccccgccgggctcgggcttcattctgagccgagcccggtgccaagcgcagctagctcagcaggcggcagcggcggcctgagcttcagggcagccagctccctcccggtctcgccttccctcgcggtcagcatgaaagccttcagtcccgtgaggtccgttaggaaaaacagcctgtcggaccacagcctgggcatctcccggagcaaaacccctgtggacgacccgatgagcctgctatacaacatgaacgactgctactccaagctcaaggagctggtgcccagcatcccccagaacaagaaggtgagcaagatggaaatcctgcagcacgtcatcgactacatcttggacctgcagatcgccctggactcgcatcccactattgtcagcctgcatcaccagagacccgggcagaaccaggcgtccaggacgccgctgaccaccctcaacacggatatcagcatcctgtccttgcaggtaagacctgctccggggtccccgccccgccgccgcacactcccgcggtcgtctgggctgtcactaggagatccgtagcccagacggtgactttcgtatgagctatttaactttattttcttcagaatctgctgtagattgagctgtgcgtgaaattgctagtaagttctgacatgttaatgcgtctgtctttaaatctgaattgttaccataaacgtgtttaatggaacttgctggtctgtggactacaaaaaaaaaaaaaaaaaaaaaaaaaccctttctacttaacattgtcttaacctcgtactctttatcctctttctttccaggcttctgaattcccttctgagttaatgtcaaatgacagcaaagcactgtgtggctgaataagcggtgagtgtttgcttgtgccacccgtgggtaaactgcccctcggtgtgtgtgcgcgcgcgcgcatgtgtttttgcttgtgtatctataaaatgtctgatttggtaaatgcatgcttacttcgcggtgttacccgtactacattgtctcactagacatgaaggagcttgtagctttgggtgctcgagatcacagaacattttcctttaaaaggaaatgatgccaataacttactacgaaggcggccgaggaacgtgtgtattggctttgtagcaaatgtaatgccctggatcttcctacgagtcctctggtactatgaggtactaacctccactgtaattaatcttaccgccacaaattccatagtgatcctccttccctaaaactatagtcctctgggattctctgggctagttgaggattgctaccctgtgccttcaaccctgtgatgtgggatcccagacttccctatctgttaactaaagggctgttttcaatcaaataattgttacgagaagcagactggcgcctgtagcactgctgttggagatccaaataggagattgggttgggaagtttttcccttgagtctctgctattttaatgtttaatttgcgctgtcgaggcgagtgtgtgtgttgcatctggacgccagggtttgcccaatctttgagtgtttggttaaatgttcaaactgtggcttcctcccggcgccagtcgcccgcctctgcccttaggttacattctcttaaacatgcctttctcccccactctttcgcaggtgttcatgatttcttttattctttgcacaacaacaacaacaacaaattcacggaatcttttaagtgctgaacttatttttcaaccatttcacaaggaggacaagttgaatggacctttttaaaaagaaaaaaaaaatggaaggaaaactaagaatgatcatcttcccagggtgttctcttacttggactgtgatattcgttatttatgaaaaagacttttaaatgccctttctgcagttggaaggttttctttatatactattcccaccatggggagcgaaaacgttaaaatcacaagga

SEQ ID NO: 36473 - DNA, 2409 bp, Homo sapiens
ttaacccttttatacaaaataaatcaagtgtgtttattgaatggtgattgcctgctttatttcagaggaccagtgctttgatttttattatgctatgttataactgaacccaaataaatacaagttcaaatttatgtagactgtataagattataataaaacatgtctgaagtcaatacctgaattccgagtggtttttaagatctctggcattcactagctcttttctctccctgtctccccctctcggcccccccccccacacacacacacacacattgttttctttatccccttctccttcatccccccaccagcagcacccctgaagcttttacttgtgtacagagaatcttatcagatgtgtggtaaggcagagggctgagttgacagggactggggaggctttgagcacagaagtgcctcgagtccttaagagaaagcttggttctgtgcctcagggctgagtttaaagccaagaatgagttgagtctgggagtgtggaagcactacctgtctgagtgggcgttaagacgcttctctggagtaaatgaaagttaatcaggagaagaaaagaggctgtacagaattcagaacatgatttcaggtttaagggaaggcagaaacacccgagggttactgtttgcacagggaactaagctgtcacctggccccgggctcctgaggcctccttggcttcgcctgcgtccacacctgtagcccccccgccacaccccacccacctccgggcctccggagacggggctgggccgggcgcattttcccggacttttcgatcgccctcagccttgactgccgccctggactggaaggaagaggcagcgggcagaagcctttcccagccaaagaccgcgggtggccacgtgctcaagactggtctgcgttttcagtcccggggcgcgaggtgggctgggaggctctggaaggcgggtcccaggtggacgcgaaccgggggaggaagggatccgggcggggcagcagctcacctggggcggaacaggtgttcgggcggcgccaccgaggagtccgcgcgtctccccgccctgacccccgatcgctccccgcgggcgctggcgctggaggagggcgggggccgtggagccgcggccgcccggatcgccctgcggacccgcgccggggactgggctctgccggggccagcgcggggcggtcgtgtggttgatcatcatacccggaggaagccctgagggccgtaggggcgtcttccccgtcgcaggctacccgcggacctggcccccaggtccccgccacctgtcgccagccgcggccccggccgacctctgcgcggcggggagggaagcgcgctctggtcccaacccgacccccgcctcgcctccgggagaggcgcagacgccggccgcacgctcgccccccagccacggggacccgcgcgtagtccgctcggacggccctggggagcgtccccggacggaagcagtgcgggcgggactgtggggcggcccgggccctttcgagcccctgccgggcaccgctggcgacgttggccccgggacccctggagccgcagccgaggcgcagcagcccctctcggaggcgacttcccgcggcgccagccgcgctgcccgactccggccgtggagcccgggcgccacctgctggccgacacgaggacggcggctctcgcgcggggcctggtgggcctggggcccgggcactgggaacccgaggagcaatccgtggggtggaggaggtcccgggagaaaacgccagggagtgcggcctttccaaatgagtgctgctccagcatgtgtacagccgtttccacgtgtggatctcatgtaatctttgctactgcatagcatagacaggatccccttttgcaaattagtagttgctgccaacctctatgctaggtgctgtcccagagatttttaaaaagatcagacaggatcctagtctcaaagagactatgcttggattgtggggataaatgaattgtgaagtcacatgaaagccagaatgctttcccttctctttcctggatgttttgttaaattttgttttaatttttctgaactgcttaataactattaaccaagaacgccagtgttagttaaagcagtgggaggtgggagtcggcctccttttcttattccaaatcctaatgagaatcgatcacatttcttccatttagtaggatgtgactgtaggcttctgttgtaatagatactgtttctcaatttttggaagagcctttcaattgctaggcttgttggaaggggtttttttttttttttttttttgagaattttaaatcataattcgtgagtcaattggtaaaatacttttgactgcatttactgatattatttttgtctggtggattacactgatatttctgatact

SEQ ID NO: 36474 - DNA, 438 bp, Homo sapiens
cttgcagaaactattagctgtccacccagtatctagaaagacagggcttgttgcgggtggcaatgagctcagctgaaaaaaaaaaacacccagtgttcagcctcacttgcagctggaaataatcccacaacggtgccctggctagctctcccaggaaagcgctgtactaattcagctggtctgtgccttttccttcttcttgcccaatactgagacacagtgctggagcttttgctacatgactgatgtgacgcaataggcacacagtgaggactggccagaaagaaaggagcctgggttctgaagccatctatcagccttgaaatggctcatctagcttgtcatgtgagaaaaacaaaaccttaatttatctaaatcactgttttgagagctgttccatgcactacaaagcaattcttaactgatgcaccttttgta

SEQ ID NO: 36475 - DNA, 1272 bp, Homo sapiens
tccatgctagtaaagctagaagagaacaaagaacacacctggccacggcatttcccaacctgggctctgcactcaataccccacggtggtttaaaaaggtgtagatgtctggtcctcagtgttgtcaaaatgtggacaggaacgaacctgaaggggtgattcccgagccacacctcaggccgaaggaatgggaatctctaaaacgctaagaaatctacatttttaacaagcgcccatagggagcagagatggctgcatagttattcataaaaaaatttttcatcggtttaaacctgtcaacttgaaagaataaaaattccaacattacaaagtgatgaagaaattatttccctataaataaatcttggaggcgtggaaatcaatggcttgcactattttgccaggcgtttaaaagcctgcacaggacaatggagcaatggagcccacgataaaagcaagggagaaaacaacacctcccggcccgtggaagcctaggaggaggaacctagaaagactagcggtaccagctaagggggctctcaaggtggtggatgtgccagaggctgcttggcaaaagaaaaaaaacggttttaccaacacccttcaccccaacccacccgaggggcccctcaggagacagaccaccagagactccaaggtcggagaccttcccggcgctccaggaaacgcggactcgccccgaaagccggggcccgagcgtccggggcccgcgccatgccctccccgggacccccggtccgagctcgccccttccgcgcactcctcggctgtcccacctccccgcccgactccccgagcccggcctcgcccccgactcctccccaatcccgcggcaaagcttcgcggaccggcctccacactgacggtctcccaacctggtcctcagctccggcggaacgggcccgctcggctgcaggcgatgtcagaggacggggaagcaagagacggcgactgcaagcgcgtcgccctcaccacacccggcggccatattcttccctctccgcgaactgacagatcacgtgccctgggtaggggagggactccgggttgccacgccccctgggcgtggaggggaggggcggggcggggcgtagagcaggcggggctggaggggccgcggggcggggacacccaggacaagcgccccaggcaaggtttttcagtgtcaatgtcactcttattacagttaatttattatccctattttccattataatcaagcttattcagagaaataaacatcaattatat

SEQ ID NO: 36476 - DNA, 836 bp, Homo sapiens
gttgctgggattacaagcgtgcgccaccatgcccggctaattctttttatttttagtacagaaggggtttcaccatgttggctaggctgatcttgaactcctgacctcaggtgatccgcccacctcagtctcccaaagtgccgggattacaggcgtgagccaccgcgccgggcctagggttagggttcattcacctctgagtcctcatcagcacattccctgatgcgcaaacagcagggaaccctaagtgtcggtccctatctcctaggtccacaccgccttccgtcacaccaggctctctccagactggctgagagggtggagctgggagcctctgaggctggtaagccgcgtgcctttggagggtggggtaacaagcagggcctctcctaaggagggcttccccggccttccttcctcggggcgcagcatcgacattcgccaccagggggtgctgccgcaccgttcccggcgccgcctctgccccgcgagggactggggcgttttccaccgggcgcgtgtctggggctgtgactcagaatcctcaaactcagagttcgcagacggaggaactcatgctcaaacgtctgaacaaaaatatacagagcatgaaatttttactccagaaatagtgcacctctctcccccttggggaaaagcgttttccctacttccgtaggagttaactcgccaaggcttttaggagacgccgcacagctgtgctcccgctcgttgaaaaaaagatgccaaaagtgtagaatttgaccacaaacaaccgagcttcacaacggagtgtggcttgtgtgccaggccctgtgctgggggtgcaaaaggcc

SEQ ID NO: 36477 - DNA, 699 bp, Homo sapiens
caacacacacacacacacatacacacacacatgagatattaaactggcaaccggcacagtgcacagctccatgttccaggcatggtggacccaacctggtccctgaccacctgcagcccccaccagctcaggcctccctcctgtctgatttctacctcctcatggggctgggcttccccggccacagttctctcctacttggccattttctgcaatccggagtttttgttcccaaacttgtgcctaaatttctcaggcactagatgatgcaacaggggagtctggaatttggagacagttcaaatctcagctgcgccaccactagcatccacgtgacctccaacgagtcattaccctctccaagcctccgtttcttcctacatgaagtgggagaaaccacgcccaccccacaaggttcttggtgacaaagtgaggggaaccatctagattgagcagaggagtgttttagtctgaagagcaaaatgatttgggagtgagggtgtaaaccctagtgctgccacttgctacctgtgaccttgggcaagttatctagcctcacatacctcagtcttctcagccataaaatgggtacaattatagcacttacccgcttacacaacaacggtgaattgagttagtctctgtagagcgtgtttagcactgtgtccagaacacagtgagtgccgcctccatgatttg

SEQ ID NO: 36478 - DNA, 2172 bp, Homo sapiens
agtaccctaaaactataaccgagaatacctatcattgggcagcctaggaaacgcgactgggacttttagtaggggcccctcaccgctctgaagcactcacacttgagtcagggaacatgggtttgaatccccacccggccgtttatcttgtgctcttgggcacactgtgtcccctatataaaataagcacccatctcttcatctgtctcctaggcctgcgacgatgcaatgactgcacgcaaagcgcacattcacggtcaggtcacttctggcgtccggctgtggtccccgcagggtgcccgccggcggagcgcatcctccggcagggggcgagctccgcaccccgctttcctcatgggccggcgcggcccgccgttcaagtggggagcccagaggtgctccgcgccgtgggcggggggcggttggcgcgcacaaggccggactccggcggggcgcacctccacacgcaccctcgcgggcagcgggtcggagtcggggcctcgggccggctgggggcggggcatgggcgcggcgcgcggggcccggaacgccgagacaatgcggcgcgcggcggccaggaacggctcggcgggccggggcgcgcgccgccttccttcctgcgggatccgcttcccggcggcgcggcagcggcgagcgcgccgattggcggcccggtcctcccgccgccccgccccacgcccggccggccgccgcccccggcccggacccgcccctctccgcgggaggcgtcggggcccgcggctgggtggcgggtagttcccgccggctgtgcgcgcccgcctcggggctcgctctgagaggacgcggcggcagcggactcggagccctcggcgcgcaggcgggcggaccggccgagctgcgcggggctgcgcgccgcccctgctccgccgccaggccccgcgcggctcccgcgcccggcgctcccctttgtccgcgggccggagcggcggcggcagcggcggtgtccgagcggcggtcggagcctgctgcggcagttgaggcggcggcgcccctgcggctgtgcgccagcgccctcgcgccgaggcgatgccggaccagatctccgtgtcggaattcgtggccgagacccatgaggactacaaggcgcccacggcctccagcttcaccacccgcacggcgcagtgccggaacactgtggcggccatcgaggaggtgaggcggcctgcgcggcggctccggccgcaggtatcccgcgccccagccccgcccgccgctcccgcatccgcatcccgagaaaactttctttgctccgaagccggacgcggccgggccaaccctgcccgagacagaagccctttgttcccgcctaggtggctcggaggagatgggtgatggccaccttgggcctctttaagacctcccctctctcggcctcgtggccctcgcggggttccgcggcctggtcttttccccgcagcgcggccaactttgtccagagtcggggtccgcggcgagcgggggatcccgctgcccgccgccgcccgccgccgcccggggtctttggtacccggtgcggaccttatcaacttgttcttgaagtggaccggcgggggcagctccgcgctccgagctccccgccgcagcccccgagcgccgcagggcccccaccctcgggtccgcgggtccggggcatcccgggctgcccgggaaggcgtgcccgcctcagccagggcggcctggctgcgctccacccgtgcccggagaaggaactgcgggcaaggtgtgtgagagtcggcgcttctgggtccaagaagcctccaggagccgctccccggttacctgggtctcacctgcttgaacccggaatgccgcccttccccctcaacctggaaaaggcctggttttagtaaagtgctctcaaggtgcaaagtcatcacgcctagctgctaagcagtacgctctccaggtcctggggagaggaacacgtaggaacgaagaagcttggttgaaaattaaagccgtggggaaaggggcagagtctgtgagtccaggggccaccgttggctgtggtttgaggcacatcctcacctgcagtcctccttttccttacccatcaaacgggattagtaatgcatcctttccaggatcagagactgtgtgaagtgcttagcactctgctcggctcagaat

SEQ ID NO: 36479 - DNA, 2284 bp, Homo sapiens
aaaatataaaaattagctggtcgtggtgacaggcacctgtaatcccagctactcgggaggctgaggcatgagaattgcttgaacccgggaggcggaggttgcagtgagtcaagatcgcaccactgcactccagcctgggtgacagagcgaagctatgtctcaaaaaaaaaaaaaaaaaaaaaggaagaggggagtggttcacagaggtgaagcaatgttccctgggtcactgagcagagaagtcacaaagcctgggcactctggctcgagttcatttttcttcttgacgctatttgtgctgcctctcagcttcctaagcttgagcttcctaaactgtaaaatgggaggcagcaataaccagactgcctagagacaggctggtgtgagaattcagtgagaaaacccggggagaacatttagccagagcctgtcgcatggctggggctctggctagtggagggagaggagacagcacacagattgcaccagaacaaggtaatggcggcgcgtggccttgcaggggccttgataataggaggagctcagaagcagggagagatcacttcctgctggggcagctgggacattgtcatgaaagaccagggaggggacagatgggacatctgggacttcacagccacctggggaagtgggcactatccccattgtgtggatccagaagctgggctgtttctaatcagttaaaatgagtaggtagagccaaggtgaaggaagatggatttactcagggttcagttggttggactgttgaattgagctgggggcaggtggaataaagtctggtcagccactctggggccgatgcacaggggcccagcctggagcccacttccggccttgcgaatgcttcagtggctttgcatattgtctctttgttctcactctttagaaatgttctcccacaccttccttccagtggatttctagaaataccctatttttcatgactcaccaattgaacacatcctgtttggggaagtgataagagaggaatttgagaatggcatggagttgactcctaatgatgactggtgcaaggagtagacggcccagccttctgcttgctctgcctctcacctgtgtctccagacgagctgaatttctccaagtgccgtgtttcactgtccccgcccgacatatgccaactggagcttttcctgtcctgttgtaggcggggatctgtgtgtggctacagagtgactaatggtagaattaatcgagttagagatggggcctgtagttttgaacctgatgagttagatgaccttttggaccacacagatggctggtcgtcctgtgcaccagtgtggcagggatggagcttgtgccagctgccccgggcagagttgttttctttttaagaggtagccaaggcagccttgcctctcaggacccagccctggtgggtggcaccccagcccttccctttccagggctctgattttcctcatggcttgctgttatttcactcgcagagttcagatgttgttcattccagcagaggccggatgtgtaaatcatcctgcagcagttctgtcttgtatggccggaggctccttggtgggctgattggaaagcccagtacattagggagtgaagggagtgaagtaaagagaaatggaggagggagaactggagctggggcacgtgagctgctgtggtagcgtgcgggaggcaggggagttcagaccacgtctcggggccaggagtggctgacagctgaggtgtcgggctgggtagggcagagtgagccgcatggcctggcagctgtgatgggaacatgtaagaagtggtcaggctgctgttgttttagatgtctgaaccctgagggtagaactcggagaacttggttggtggatgcagccggcaatgccttcccatgaatggcaagggcagtgggcttaggcagatggagctgctccacctggcagtttagcctcccaggggacttctggcaaggtccggagtcatgtttgatctgccaggactggggactggggtgctggtggcatctggtgggtggaggccaggatgctactacacatcccacagtgcccaggactgcacccaccacaaagaagtaccttgtcccaagtgtgtccgggcctgatgttgagaaacgctgggtcaaaaggcttcaggtgatggtggacttggagggccggtcagggagggacaaagggatgtccttggcacctggactgctttggggcccctgtttcctgctcttggtgggcctgagtctctctgtaagttttgcagt

SEQ ID NO: 36480 - DNA, 3044 bp, Homo sapiens
tttctgacactatttgaaagagtctccatcccacaaatgatcatggcatctttatttgtggtatccgtagtatcccccaaactggaaacaactcaaatgtccatcagcaggtgtctggctagacggcagtgtagccatatgatggaacagtgctggccaagaaaaagaagtgaactactggtacacgcaactacatgaatgaatcgcacagtcatgcgcagtcccaaaatcatgatgcaagaagccagatgaaaaggcgtacatgcgggatgattccagataccgtatataaaattccggaaagtgcagtgttctctggcaaagaagcagatcaggggttgccagagacttgggggtaaggagctggggttgcaaaaggggcacaagaaaacatcctcttggggtgagagggtactttcccagtctggattttggtgatagcttcataggaatatccatgtgtcatagcatatcaagtcatactttaaatgtgtgtggtttattgtctgtccgtgacacttcaataaagctgcttaaaacttttcaaaagccatttgtccaaagtgttggtgcccaatagaactgtttgcgttgatgggaatagtgtgtatctgctttactgagtctagcaagtctctagccacatgtgactattgcatttgaaatgtggctagggcaactgaggaactcaatttttaacttcatttaagtttaatcaatttaaatgtgaagaggggcatgtagctattatctgtcctgtgggacatcacaggtccaaagcccactttccgctcttcaatgcctgcctcacacacatgttgtaggccgtgagctctggctcctggaggtggctggaagcttccagcactggaaggctgtttcacactctgatacccttgttaatgctgcagcctctgctaagaatgctcttaattgatacaatgaggtgtgaggtctttctacaactgcccacccttagacaaggtgttgcttggcctgtgcagaaggtgaataggtggtttgctttctctgaagctgtgctttttcctatttaactcttatgactgagcagcatttgctcgaattaaaatctccccacatttcaaagcgtcttttctacctctcaagtttctcataaattgggcatattcaaataagtgacatgatgcaggcaagcctcaggtaagatcctttggccatattgtatattacatggtaacaaaatggctttttaaaggaaaagctgattatcctcgaagagagttggattctgttaagggttttggaggtgagccctgggaagacctgttattttctagacctttgaggctagagctggaaagattctgcccagtgacctttggctgctccttaaaaatagctatgatgtaagaatcctgtctagcttcaggcttctagatgggatccctttgggcaagatcatttgacaaagcagaattactcactgcctaagtcagaaggcagcactgcagctccctggggtggggctgcacctccacactttggctggatcagcagctgttgatcagtggccagagaacagagagggtgacctgtgaactgaagggtgggggaaagtagaaagtgacagatctacaggcaaggaattttaagatccccaccaccaccatccacccccaccaaaaaataaaaaatattaggaaggacattgtgaagagatggctgtttggctggctctgttcccctcctctgtgccttctggcctatctttgtttgctcatcagctgtgacattagcataatgattttgttctttatatctaatagctctatgtgctgcctgccccactgactgaatcattttatttctacttgtgagatcacagacctttgactacttacttaccttgtcagacatatccaagtgaactcggggggaaaagctaagacaggaagtaggggtggggaaaggaaggattgttattttgaaagattgcctgggctgggtgtggtggctcatgcctatagtcccagcactttgggaggctgaggtgggtaggttgcttgagcccagaagtttgagaccagcgttggcaacatggggagaccctgtcttgacaaaaaataaaaataaaaaaattagccaggcatggtggctcatgcctgtggtcccagctactcgggaggcagaggtgggaggatcactggagccccactgtgctccatcctgggtgagaggcactctctcaaaaaaaaaaagaaaaaaaaagtttgcctgcttgttggtccaacgttaatagcagtgattaagattaataatttgtattcaggttgcactcgatgttttaaaaagccattttacataatatatttgttaaaagtgagtcagaacataagagaaagccctatgctttcttggtgctaaggaaaatattctggttgggttacccagggataatgtaattcttcccatagagcatgaaaatgtcattactcataaattgagactggagctgcctgagcacaagggatatgtaatcatcttctggctgtggtttccgtccctctcggccagaactcgaggatggctcgttcggctgcgggcctgaggctgctggacacacagaggaagcccagagcctgcccgccactcaggctgcagggcacacctgccgagaagcgcgtctggcccccacgcacttgttctctggcccagacagagaccagagtggccatgtcctgggaaattctccctgagccaccaggcgtgtgtgctgtgtggattgcatacaccaagcatggaaaggcagaggcaagcaggctgatgtccaggagtctggaagctttattagtgaagccatcgatggggattctatttatatttgtgagattttctttaaaaagtaaacacctttgttaagcatattttatgtattataaaaatcacccatttcaagtgtacacatcagtgatttccagtaactttaccaagtggtgcaaccatcacctcaaatccgttttaggacattttcttctccccttaaggaccctcatgttctttta

SEQ ID NO: 36481 - DNA, 2752 bp, Homo sapiens
acataatgacttcagtcactttaaagaagtttttaatctgtctgacaaaattattttttcctttgtgaaatgtcatctctgtttcttctttttcctgctagtttttttcaggatggactcaaagccgtggaaagcctcaaaccttccattgaaacgctgtctacggatcttcacacggtgagtagcttccctcccactgtggtttaaaaccatcttaatgcaacagacattttcatctaaatgtcacttctgtgtaatcctgtgttttcatgccgtgccgcccacgtggagtgtggcgttcccacgcctgtcctctgtcttggtgggagggaaggtttgaccagcgagggaggcagttgtcgcattgtgtggaaatggccccatgagcaccaacgtttcactgtacctcagtcttaattttctgattggttctgttgtgtgtgtgtgtttttaaagatcaaacaggcccaggatgaagaaagaaggcagttgatacagcttcgagatattttgaaatccgcattgcaggttgaacagaaagaggtgaggggatttaattttgaaagattgcagttttcaccccattcttggaggctttgggtctgaagaacatgaagttcatgtcttctaggagctcacagttcactcgggctgtgtcaggcaccagtaaaacatttaatgtattcttgcaatttagttctataaaaccatcttttaaaatatgtttatttcaggaggaagcatttactacatgcatggccttaatggcggtgtataaaccctgtgctctgtcagttgctagataaggagctctcagtggcttcgtcacagagaccatgtgtcatttgtgctatttatcctgtacctggccctgtgtcatttccctaccctgacatacgtggactctgcccctttaggcctaggcacgtagcaggggaccagctggggctctgccagccctgagattgtgttctataaaatatgaggcatgagcttttcttacagctgcctccatcatgacaggcagaaatccttagttctcttacttcccctctttctgtaatgacgtctctgtgtgctaacacgtcagcagggacagtttgtgttgtggggacttgtttttaaaaagccattaaaaagtaagttttaaagataattttactatattttcactacaatgtgggtatcataatgtgaatttagtataaatccatttccttgttaataaaaggaatgtatctaaacatatatctagtgattttagagaaattgctaaactacttgacagcataaagttccctgttggcagtttggtgagctctattttattgtaagttcttgtactataactgaatattgttgtttttctcccaaatgcgtttaccttttgtgaccgaagtctaggagagtaagtagttcagtattttaataaattgcagaattttgcatgttttattcgtgaacatacatatatatattccttttatatattaatggttagtagcattttttattttaacccctcacctttcattgttgtagactttattaaaggctgaagagtttgcataaatattagggaagtggacattttctgggtttacagtttacacttttgctgctgttcctttatgaagatgaagcaggtccctccctccctccctttctctcccctgagtggctgaattctacacatctctctagtccctctgaagccccacctctggagcgctgcctctgatcaccccagcccacagtgatctgagttcacagagcacatcctgtttgaatgccccatttgaatcacagcctattcctctttttgagtgttggttgtgccttaagtgcacagatggcttttcaccagctggacctcgagcagcctgaggatgccaccctgccttctgagccattcttccatcacactgtagtgccacagcgctcatttagtaggattttggtaaacatgggtcaactaagtgagacactggcagagcaaggttatatttagtgctagaaaggacctacaacatggtgacttcctcctagtctagagaatgtaggccctgacgctttgatattcccaataagcaaaaaaaggaaaaaaaacttggcgtaaggagaaaatagtgggctagcggtaacgaggaggaggtagtgcgagggcaggagccagaatgccgtccaaggtggctgctccccagcgcaccgttggaaatgatcgagaactgcctttgtctaagaaggaagatccaacccatgaagcaaagctcaggtttaaaataaggcagagcagctgctggggccaaatggccctctgggcacagtgcaaaggctgtgtttgctttgcctgtgcagaattaggaggtttgggaaaacgggctgttgtgagagaactggttatttacagcttcgcaggaaagtaataacaaatttaccagcacagaccagaagttctttatagtttgttgttttttgttaaccagcccatctgcccctgattgcacagagggatcaaatgaacctcctttactattcttctttggctgtctgcccagttggctccttgtcaagacctaactcaacagtctcctagttgtgggcgtgttgtgttttctgtgtatcatgctctgcgttgcttttaggtgatggcattcagcaagttggacaatctttgaacacagttgcaagtaataagcagatgtgaaaatgctaaattttctgttttaaaatgatttttatgatgggggtt

SEQ ID NO: 36482 - DNA, 2397 bp, Homo sapiens
tcaaacatgaatctaatgccactagcctgctgaaaatctttcactggttctccaaagtcagagaccaaagtcaacgttcttcagcacgacacgccaggtcctccaggacccagctcctaatcacctttccacttccatcctccacaacccgggcacagttcattgatctcagcaaggcaaagctgctcctggttctcagcgcgatgctccacgcgcccctgctttgcaccgcccgggacgtccttcacctgtcaggcacttggctacttcttacctttcaaggcccgtttcaggctgcaggccttcctgggatctcaaggctggggtaagggacccacagcttgagtgtaccccctgatcacagcgccacgatctgctgtggtctctgatctcactctcccagctgcacgctggtcaaaggcggagctcggtgactcctctgcattgccagggcgcctggcaggggacgcgcttactgaagccgagaactttctggggaggtgacaccccaacagcgattcccatgtaccaaacgcctaccacgtgccatgcacggtgctaggtgcacagatccctctcaccctcaccctcaccgaccagcaaggctgcaggataacagcccctttcaaacgaggatgccaaagcgcccgaagagtcagtgacctgcccagggtcaccagagtaaggacggatgcggccaagctcggggcctagggagagccggctccgaagttcctcccagacgccagcctgcttggcacctgtctgtcaccgtgatggagcaccttccaagcgctgggtgcggaggatgtgacagcgaaggggacagacaaccccgaccctgagaggcgggaggcggccgaagcggggcagaggaagaggcaaggaaacggcccgcggccgcccgccttgccgcccctccggggcgacagcggctcgggaagctgcagtccgcaagcccacgcccgatctgcgtggttccaagctcctccacccgcgccccgggagcgcggccccgcccggaaccaagcccgagcccaggcatccctcctccgcccgccccgcggccccacccatccttcctggccgtccgcgccgctctcgggaccgtgttcccgtcaggcctccgcgagctcggccccaagcgggacgagggctgggcgctcacctcgcagccgcgggcccatccccgggttgcggacttcggggtccgcgtgggagtgccgcggcctttggcgcccaggcagctactcccgttcccgctccagcgccggcttttccagccctcctgcccacgtccgccgggccgcgcctccaagactatgcgcaggcgcagtcctgacgtcctacccccggttccaagaccccaagtggtgggaagcctcgcgagcggcgtcccccgaccggaagtcgaggggaggagtctagtgccgcgggctccggagtgacggaagttgtgctcttggtgaatggggttcttccttttttatttaccggtggctgtgcttccaatttaggaagaccccggcgacctgttcctcacccccgcttcgccctcacactttcgggatgtctgcgattcctgctgaggagagcgaccagctgctgatccgacccctgtaagggaccagcgagagagggaatgaagccacgggctgtgaggggcgcgaggggtaaccggagactggcctcctccgtcgcccgcgctcccacctaccccggcagcctgcctttggtccgcgcttgcgggccaggcttctcaggctcgaggggttggaggaccgttgatcggaaggggcctgctatagagtgaacgggattttgctttttcatcagtttcaggggagggtatgttggagtcggaaaaaaaaaagttttacggggccaccgctcgctttcgtacacgctaagaagcgttttcacttagcacaagcacggatctctgcgcgtcagggcaagctgtgagggagccggtgaagcttatgaccgacaggatgagaggaggacctgaatgaggctacagccgtgcagggaagaattaagtctgtttcttaacaccagggcttcacatgtgccagaagttagaaaatattagggacttgccgtgagtttcgatcttctcagctcaggccctagtagaataaggaaggtgtaaagctggagaagagaaagtgcagaggtgttagggacaaaaactcagccctcgactgtccataaggagagtggcctttcagtggacacgatcctcatcagtcgggaatgctgctgaaggggagatgcaaatgtagagaacttgaattcctacagatgagcatttcgaacccacaacatgtttattgttagatactagttggcacaacatgaatatacgctttccaaaaggtagaaagtatctcc

SEQ ID NO: 36483 - DNA, 1918 bp, Homo sapiens
ttctgttactcatctacagctccgtgatttcaaggcatccttcccacccgttcgtttttagctcggctgccgaacttcattgcacagttgaggtaagaacgttgcattacaaccacgttttaacaggtgaatcccttggaagttagtcagtgctccgtgtccgcggggttctgcatctgcgcatccaccccacggcgggaaaaagaaaagcggccggctgcgcgcgcactgaaggtgcagctgctttcccttgtcattcgcagaaccacgaggtactgccagggtttccgcagtgcctgcgtcctcgtgggtgttacaggccctccagagtgacgctgggcgcaggaggccgcgcgcgcatcccacgacctcttccaggggggcctggagcagccctccgccccaccgagagccagctgtgcttcccgccgcgcgtcctgaggtcacactcctgccctttgccgaacgcacctgcgcccgcggagcgcggggtgggcttagaagggcccccaaccgcttttcttccgggaaccacgcagcgggacgcgggctccggactccctgggggcagccttgctgtgggtgagcaagcgcggaggccgagcttcttgcaaacggactccaaggggcaacgaccttcgcgcgtcaccaaagtgactgcgtgggtgcccacgagcccggctcccgcaacccacgggcggccactgcgcaggcgcctctcgtggctggcggccccgccccgccccgcccggctgctccatggcgctgtgcgaggccgcgggctgcgggagtgccctgctctggcctcgcttgttgctcttcggggactccatcacccaggtacggccgccccgacgctcggcctcccgccccggcctccctgcggggtcgctgccgagcaggccgaggctcctcgccgtcctcttcggcgcccgagacggctgggccggaggcctggccacgcccgtggagacaccggaggagtggcgggtcccccagtggctgcgccttccgggcccgcggcgtcccggaggtcacgacggcgtccgcgagagcccgggctccaggcacagacgcgaggggacccggccgcgctgcccgccccgcgccgcctcccacccgggtcgagatgcgcggtcttcccctcagcgccctcctgggcagcggcctttcccctccgggtccgggttagcggccgcgggcgaccgcgcgctgtgtcccaggaggccccgcggccagctccgggcagaggcgccaggagctctctcgccccattccctgcgggcacaggtggggccgttaggggttgaccttggaagtaaaacgccttcaggaattaggtagaaaaggaccatccgttcatccaagatcatctcacctcccatgaagggaacggtcttctaaatgcaggttcttacttcggggagggagtagaaattccattcctgtgtgtgtcctcttctcagacaggacttgcttcaccaggcttttgtgtatacgccagtaactggtaacattatgtttaggcatatggggcagtcagagctgccgaattccatgggaatgtgtatgaaaaagtgttcaccctcagctcggtaaccagcaaagcagtgaggcggtgtggccttcatttcctcactgacctttgactttatttcctgaacttagatttctgtttagcttttttttttttttctttttttctttttttgagacggagtctcgctctgtcgcccagactggagtgcagtagcgcgatctcggctcactgcaagctccgcctcccggattcaagcgtttctcctgcctcagcctcccgagtagctgggattatagacgtgcgccaccacaccgggctaatttttgtaattttagtagagacggggtttcgccatgttgaccaggctggtctcgaact

SEQ ID NO: 36484 - DNA, 1355 bp, Homo sapiens
tgtcactgtctcggccacccacataaataatctgtggttgtctggcatcaccatcattcctgactgattttacatgctacaataagtaatcgttttgttatacctattcacacataagtactacacagtaaaaaatataccactaacagtgaaaaaatcgtgtgttaggggtaatgtgtgctgtcatgccagcattcaaaaagtttcaaattttggagcatttcagattagggatgctcaacccatatatgaaaagcctttcatttcacttccgttacctcaatgaagcccattcctgtcctcctttcctatcaatctttttcagactttcttcacattacacttccagctgtatacacttattatctcacaaatagaaaatggtgaaggatccaaaaatcaaccacaattggccttggaggaaacctatatttaatgttctaggaaatcctgtgaaagtcaaaaggatctctccagtttccccatcacaattatctgcttaattcctctccattctactcttgaaatatggtttatctcttagactaatataaagcagagttacattaaatctcccttggagcagttagggcagttaagcatttaggtttcaaaggaatgcagccagtaagcaaaattaacatcaaaagagaaagccagatgtcaaaatactgagtaaaatggtgctgtcaataatgaaatcagcactgcaatatggagaatccccatgccaataacctcaaggtaaatttgaaaatacatgtttcagatacaaactttctcatccctcatctgtgacctatattttttcctcccacccactacatcctcttttattaaaagtaacacaaagggaaaacgattttgaaatcaaagtgagacttatacaccccagctgcaacttcaacaagatatcatcatgactaagctcatatgactcataactttcctaaattatgcaattcataacagttcaattgaaatcatttttggtgacccatagaggactctaaaaaccaggcttcattttattaggtattttttgcctttcagaaaaatgttgtcatatgcctaatcgatattgagtactgcaatatagtagtatttgtaggacaataaacataaaaaataaataataaagcatgtttttcaactatgaaactatttgctagtcttgaccaactcaatctaatggtaaggttaagtaacaaattatattgtaagctgtcaaacaaactgaaaaaaaaagtcattcttcaaaagaaaaatacccacaaggcctatgttcatcattgacaactgacagcatcttcctgagactcattttcctcctcctttatttgaaaactagactt

SEQ ID NO: 36485 - DNA, 2164 bp, Homo sapiens
tctagcctctaaattcatcaaactcgtcactcttgataatttctttgtttaaaagtgcaaggaaagcattcatagtggcagcatcacgagttggcttaccaggtttccgcctccccccatctcccaagcacctccaataagctacaattgaaataaccaagaacgtgcttaggatgttcgcaaaaacacaactcttaagactccaactccagtctccgcctcccaacgagattactgcataagtacctcctacagcagaaattctagttccctccttcgaggaccaggaagaattctggagctttgggcccttcctttctggctctggtaggaacacacaacactagatttgttccctactaaggcaagaaccctgaccacatctccctctccaaacaagatccagccaccctactccttaccgctttcccaacaccctccccgaacacaaagctagggagcaaacccctctcaggcgctcagtcactacatggagcccgtccagtagccctttcccactcagagacaggcccatctcctttattctttccccaaactccgagagccacacccccttctacactgaaaacttagggacgcgccaccatcgccaataccccgcccccaaacacctgatagacccagctcccctgctcttccctcaaacgagcgctccaggcgccggcctaagccaactcccctgggtctttaccgagtctctggtgggggccgaagcccgggtcatccggaggtcgcggcgccagcacgaaaggaaccacgctggtcaggaataggagagactgcctcatgttcccggccccgctaccgactccacctctctgggcagccttcgcctgacggggtttcggaaaactgctcacatcgggggaggacgggatccgcccggcctagcccctcaatcctcttttccctcccgcgccgcctactgggaagattctaccgccaggctcgacgcccccagaagtgcaggtggcgttaccaaaggccggctcagccagcttccggccgccgctgtcccccgcaccacccacagccggaagccggctgccgcgcggcatcccgggaggctccgcttgccccgccccacgccggtgcgccgcgggcctctggtccgctgccgtgttcggccccgcccgtcacgtctagctggggctcgcccggcgccttcctggacgcagacgtatgagtcccaactccacccagtccggcctggcctctgtccccgggtgaccgcggaatgggggggcgggagctagcgagcaggccctcaagcgcgtctggccgcctcctttgtcttgatgcccacgtctggttaggacccctgctgtccattttattaaaggagctgtagaaagcggcctggggcccagcgacctgcccagggcggacgaggaggcgcgactggcccgatgccgcaggctctctgcccagtgtgctcaggtgggagggcggggacatgaatcgagccacagagtgccctgggcacggaccccccgccccccccggccccgggccccgagccccgagccccgagcccggccaccgaagcccgtgccactcgccagctcctgcgagacgagcctttcgagcgcagctcaggcatttggttcagggtcctactgccggagtcgtctgaggcctccatccgtctgtcgtcacgaaaaaggttttggggggactaataagcacttcctgaatgcacatttgctccacgcccctgctgtagggagagggtctgcagacacttcaacaaatagaatcctaggaccttacctgtgagtacaagagctggaatcttcccaccaacttcttaaaattcaatcctatacttggtccatttagcttagactggaaatttcccaaggcagtttgttttgcaatcttttgcatgattttagctctgtatagtttagtgaatgtttatggtactgaataaaacagtctaaaaacgttgggtacatgttgctgttttatttagttcaaccaaagtttataaaagtaggacataatacgttttccacttaagagtgagacagcctttattatgaaacggtaaattgttaggaatactagtcctattcaagtttcaaggcttattcctaataaaatactcaaactgtggttaaaatttatgttaatggtg

SEQ ID NO: 36486 - DNA, 3101 bp, Homo sapiens
cccgacttacgccatcataaaaagcagaatttataagagccacaaaataaaacgaatattcctttggctcagagtcaccttgctcgagaacaagaaaaatcacgcggtgattctgaattgcttcaaggtaactaattgaaaagcaataaactgaacagaaatgaaatatgctgtaagagtatccaaaatacatacatagaaaaccttaacatatggaattcttatgagtcttcccttggtaacagataatgctgttaacagccattaccatatgttactcaagttgaagtctaccactactttcaagttggcaaaattttttaatacgagcaattcagtccaaaaagcttttacaagtgcttcttcaatgccaagcagggactggaagctaagagcacacggaagaatacaacgaagttttgacttcataaagtaaataatcttaagttttctccactttagtacacactgtctgcattactttctttgcctctttaccagttatttccatcagccatgattttgtccggatcgcctgtcatcgtattagaaaaatagataggttaaaaaagtttcgtggattttttttttttaaacaaggggtggggaacatattccctgccccaccattctgatgagatgaagaaaggcggcttggggggtgggggtgggggaggaggccagggagaaattatttcttccattcccttttgaaaaatccccagtctagtatgcttgtctatcaaagcccacctaaaatatgatgtgcacaaacacatcaaaaataagtaggcctcttgtaaaagtgacacttaaaaggcaaaccatatgagattatttcccattttattcatagaaatgactcttggcagcactgaaacatttaaaaacactcctggatataatgctggtatttcagttttaaaaacttatcctacggatcaaaagatccatggaatgacaaagctaaaaatgttctctctcactaataagggtgaatcacagcagccacctactccacccaacaatcgtccttgctaagactggacagttcaaaacctggaaagctttccttgtctgctccacactggaaacgaattcacttcaacactagtgtttaagcacaggtgtgcaacagcaaggaaatgttattaaatgttgaaatttaccaggacattgtgttcttcagatacagctgtgtccttttcacatttcccgaactcccctcctctcctgtttatggggggtgggggggagcacaacagatactcttacttgaaaaataaagtatctgttcagattttctaagtaaatttccattactgggtttgggaaaaaatccctactacattgtctgtaacaaaaaggtgcctgcgccttctttcaactgcctgaagcttgtgaaccgactgaatacatttaaagggctcacagatctcaggacgcagtctccccgcacaagaaacttaaaaacgcctttcagtctcgcagagacctacttggatgtttccaagttccatcgtttggtagctacccagcatctggggcgaaaaaaaaggacttatccttggaaaagcggcttcttgagtctcaacaaccggagggacacagtagggaagtcagggctcacctaaaaccctccaccccagcagacagtccggcaagccccggctcacgtttgtttccgtgcccgcgaaactctcaatgaaaagcatctcacaaaaggcctcccctgctccccgcgccgaggactcaccagcaccgtggtgcagatggatctcagctcggactccactttctcccgatagtccttaatcagctgcaacttcttgtcggaggtgtcggtcttctgctcgatgctagagatgaccctccaggcggacctgcggcccccgaccacgttcttgtaggccacggagagcaggttgcgctcctcgttggacagctcggcgccctgctcggtcactgccttcatgcaggtggccatgtcgtcgtagcgctcggcctgctcggccagcttggccttctggatcagctcagtcttctccatggcgggcgcggggccggggccggggcggagggcgaggagagcgagggcgagcgccgacccgcagcgggaggagcctcgagagctgcggaggggcggggcggcgaggcgagaacaaaaagcagagagggagcgccgtcagacaatgcggcccgccgcccgcttttgtctcccgcacacgcggccgcttgaatttccctctcccccgccccctcccccgctgggcacccggggaggccgcggcccgcggctggaggaggcgggggcggcgcggaggccccgcgcgcagggagcccgagccgcggccgctcccgccacccccgcccggccggcccaagatggaagcgaccgttggccccgcaccttcccgcccggagccgtccctgaggggagcggcatcgacaaccggctgctctcaagggcggcacctccgcccggccctcaatccgagcgcggccggaggaagcccgcgggccgacccaggcgctcaccttcacgtctccgcggccgcgacgcgagtcccaccactttgatctgcttttggctttagctgaggaccctcccgtgtcagcctaccccggggccgaggggcggtccaccgcccaatgatgcgccgagcttctcccgagagtcccgcccccagcgcgccgctggccaatgaggaccgagcgcgcggaagggggcgaggggggcggagcgggagggaacgcggaggctaggagggtgggtcggtacggggaagttcggttggccggcaggctgcggcttcggccacggggtttcctccaattagatccagggtaaaaggacgtcactgttgccatggcgatgccgttaccaactcccctcagcctccccgccaccccggcacttctgggtgcggcacgagacccagaggcgcgcacgacctcctaggcggcggctgcgtctcccgctgcggatggtgcattgcatctcacgggctctggccgaggctggacttcggagggtgacatattcagctgttttagagcacgggggcctttctttcctccacctttctatccgtgacaaa

SEQ ID NO: 36487 - DNA, 838 bp, Homo sapiens
gctttgctcatctgggtgggaggtactgcctggggtgagctcatcacctctggttcctcagtgccacccactgatgtctcttggcactgagttcttacaacttgttccaggggatatttggtggttgatggtcaccacccatgtgtcatggtccctgagcatcccccgccaccccactgctccctattttggcagttactgtcaccctctagggatgcagggatgcagtttacctatctagagtgcggtgatcaggtggggaagtacaaatggcaattgacagctagagagcttgaaaccctcccacttggctctgctcaccctggactctgggagacctcagctgcccagcagtggaggctggggcagcagaggggccagacctgggagcccagaagcctggatctgagtctgactcactgctagcctttgacctttggaggcttgggcaagctgaggaacttctctggtcttaatctccaccccctgctggagtaggtgaggtcaatgagtgagcgcatgtaacttcctcttggtaagccctgggttcctggagacaggagagggagggtggttttccaggggcatttgttgacatttctagagaatatctgaggcttcgacaaaatcagacctcagaaatgtgggcctgccttgctgttgtgggggatggtggctggaaagtggggagggagatgagaccccagctttctctggctgtggcctgggcaaggccccctactccctgcccgtgctccctgtctgtccagtagcaggctcatgtgtgactctctagggtacatggctatgtatattcctaaatcaaattaaatcccat

SEQ ID NO: 36488 - DNA, 710 bp, Homo sapiens
tcttcccatcattccccagtgggagccaatgatggtggccaggaggtgagactttcaggggacagccggtgtaaatattttaacaaatggaacaggcactatgggtgcattggctaaacatcagccctgtaggcccaggagacctttggccattgggtcctcatctagctggcattttcatctccctaagactcattccctcatattcttgcaagtctctcacccattcccatttcttttttctttttctttttttttgagacagagtctcgctctgtcacccaggctggaatgcagtggtgcaatctcggctcactgcaacctccccctcctgagttccagcaattctctggcctcagcttcccgagtagctgggattacaggcacgtgtcaccatgcccagctaatttttgtatttttagtagagatggggtttcacaatgttggccaggctggtcatgaactcctgacctcaagtgatccacccgcctcagcctcccaaagtgtaggattacaggcatgagccaccgcgcccagctctccattcccatttctgctcaactggcccttcttcagagaggtctctctgatgaccctacaaaaattctcttcactatcttccacccaagtcatcctatacatatgtatataccttgctgtgtggtgttttttcttacaatgtttttagtcctctctaaaattgtttttta

SEQ ID NO: 36489 - DNA, 1687 bp, Homo sapiens
tgttcactgctgaatccccaggacacaaaccagttcctgtttaataaataaaacaaggaatgaatgtgttagatgaagaaacaataagagctaaatttattgagcacttactgagactcaattatattcactcatgcatttatttattcagttatttacttatgcagagaaggggtctcgctttgttgccccggctggtctccaactcctggcctcaagcaatcctcccgactcagcctccccaggattacaggcgtgaaccagcacgcccggtggagactcaattataaggggctcacagataacatctaattcttacagaggagtaaactgaggcacaagtaagcaggagagccgtgattagaaacctaggtctaactcacagcccgtgagctttcctccaagccccgaggcttccccttaaaaaagccagcaaggggcgagactcggagggcagaacccacggagggcggaacccacagaggacagagcccgcgctcgcgagcacggccttgtccgaccccccgtgccgccggaggagcaagtctgtcttggaatgaatgatcgtcggaacggagcttgatcaaaccactcagcagtaggcgtcgcccactttcttattggttggttttggttctcaagagtaggaaagttaggtagtccgcgaggggtctgcgagctttgcggagcctcgcccccgagcgcgcggtttccctgccgcgcaggcgcacggaatcctaggcgcggatctcgcgtttccggccggaagcttctccagcctttcccggaagctgcgctcgctacccgggtaacgggtcccggctgtggaagctcccgcggcgccgcgatggacctcgaggaggcggtaaggaggcggtgcacctggcgggccacgatcgccggggccggaggagagagaagctgaggaggagcggcggaggacgccgcgggttggggcggcgacgccaccggctggaggaaggcggggcggagggctgcagggcgggctaaggactggggctggccggccgcatgcgcgcgcggctttggtaaagaggctggagtttctggctcggcgaggttgtgggggagggagggtgtggtgtttgtcgttatgggtgtgtttaaggatgaagctgtgggttttgtggggtggccacccacagggctcatcctcgagactggaccacccacaagttccctttaatgctggggtgggtgagggaggggcaggggttggaacctgagatgccgccgggtaacccctgtcggtctctccgggaatccttgccactgtctccagcagggattctaaattcgggtttgggaactccccaaattgtccagctatcattcatcgtagtgttagtacggggtcactgaacactttaccaagttgccaaaattgatttggcatgcattttgttttgttttaggtactacgtaaaatggcacatttttgttttttatttttgagacaagatctcacttcttcccccaggctggagtacagtggcacgatcacggctcactgcagcctcgaatcctgggctcgagagatccttccgcctcagccttccaatgagctagggctacagacatgcaccaccaagcccggctaatttttttttttttaattttttgtaggggcaggggtctcgctatgttgtccagactggtattgaac

SEQ ID NO: 36490 - DNA, 717 bp, Homo sapiens
cctaagtgctgggattacaggcgtgagccaccacacccagcagctccaacaattttaaatggacattattttataatagagatgtttgatcattaataaccctttcttcaaagagtgaaatatgcacctgtgagccagcaagcctcaccacagcctctcagctcccctgtttggggtgtttgcttgaaatggcattgagccaaatggctccaccccactcggtgtcagtcagaagcaagagaggttcactggaggttaaggccagggcgcttgagcccagggctttttggtaactgtgttgcaactattgagcctcccttggaatgatcactctacagtgaagccacaggaaaagaatgtgagagacctaggttcttctagctgccaacaagtgggtgacacccaacatgacatagctgcttctgcctacattctgaaacagggagagctggctgctggcttcttggcaactgggtctgggtcaagtcccaagtatttgacaagactcacctgagactccagtcatcctggcagtggcaggcaggtatggtggggacgggtgtcaaaccttcataagcaagcacgctcaagacagtgtcacggaagacacaggaaaacagagcctgtggataccaaacaaccgagagctaatccacagtcagtgtgttctctaagtttgagaatcaacttagagagtaatcaaatgccatcttctga

SEQ ID NO: 36491 - DNA, 923 bp, Homo sapiens
cctgtctacttccaagggttgttttaagaatcaaatgagctcaggtatgtgatcacattgagcactgaattctgccaaaagaaggtacatgtcattatcatcctgaataactacagtaattgttgatcatctaccatatgcttgtctctatgccagatgatgaggacgttttaaaaatatgagatatagtttttgtcccttaagcagcttatgctacagtgagggaaaatggggaggtggaaagtttaatattgacctagttcctgaaatgtgcctggcattgtctgagatacttttcttaaaccaaaacaaacacaacctttggtgataggaatgattatcccgtatcccacagctgaggaaagtgaggctcagagggtaagaaactttgtcacagagctggtggtgagggtggagattttacactccctgcctcccacaccagtttctccggagtggaaagactttcatctcgcactggcacgaccttgagaccccgggttctgatgaactggggggacaggtgcttggatgtcagggtgaaggctctgccatcatctttcagccccctgagatgtcccttcaatatgggctgtttcatcagggctgaagtccctgaatgtggggaattccacacatggattaggtaacatgtccaaccaacaaggatgtggaggaattggacagggttcctactgcctagtctttaaagaagatgaacgccatctgccagcgtctgtctgccaggcattgtgtgagtctttaagtactttattcatagttaactccacgtctcttgatgtattttccatgttttacagataagaaaagcaaggactggcagcgaagtagactaaagataaaaatcagaggcagccctggcatgtgaatctgtatctgcctcagttcctccctcggaattg

SEQ ID NO: 36492 - DNA, 2099 bp, Homo sapiens
tacggaagccggcaaggccctgctcaatccgctcccctgcgcccactatctctgaccgcagctcccgcctccctgtgccccaccagccacccgggtctcctcaagggtcacaaaacacaccagggtccctgcctcaggtacagtcccaccttcgtggcccctcatctccttcaagcctgaaagcctcgctcctccccgcctccccagggcctgcctgctttaccttccaaccagccacaccatttacttgtttttgtattgcccgttaccccaactaggaaggcgaggagttgtgtctgttctgttgactgccctgtccccggcgtctggggccgcgcctgtccgagggtcaggtccgacgctgggcatgtggggactcagtgagcggaccctgggaaagacggcagctcgggaaggacaagtgggggccgtcgcggtggagtggtgcccggggccggcccggggcgcgcgactgcacgggcagcgtggggcggccgcgcggggaagtggcgcccgggaggctgcggggcacagacatcgcggagccccagggactgccgccgaggggaccgcgggagctgcgagggcaagaaatcctaaaagcgcgcggccgcggtgggccaggagaagggacattccggagacggctctcgggggaagccacgggactcgggcgtgacagcctgcgagaaccgagaggtgagacgcgcgaccggggagcgcggcgaccggcagaggcgcccccgccgggcgagcgcaggggcagcgcggggcgctggggccggaacagcgggcaatgtgggcacggggcgcggaggcctgagtgagcgaagaaggaggcggctgtacggccggggctcgtcgcgaaggggatggccggggacggcggggacggcgggggcggcgggggcggtggcggggcgcgagcgggggcgctctcggtgcgcgcggaggttggcgggtgcgcgccgcagccgcagcgctccctctcctgtcagggcaggcgcgtacggccgcgagtcgggcgcgcagccccgggagcgcagtcccgggcgcaacctcgcggaacgcgcggcccccgccccccgccccgcgccgctcgtccccgtcagccccgccccggcgctcttctcgccgaccaatcaggaggcgcgaccggcctcccagccccgaggcctcgcccccagccggcgcatcgccagccaatgagcggccgagcccggcgcccagtgcgcgcagcccgcgcggagccggctcagagcgagaaaagcaaacccaacccgtcggggccgccgctccggacccgcagccgccgccgccgcctcctccccccggatcgggtgtactgtcccaacccgaaagtccagttctgcggcccggcagcggcgagcgggcgcgatgacacaggagtacgacaagtgagtgaggcgcaggagtccggccgccgcgggggggccgcgctgaggggccgcacctgcagcgagcgagccgggcgcagacccgaggccgcgcgggcgggcgggcgcggggcgcgagccgggggccgctgtccactccacgccgccacggcctttgccccttagccctgccgtgctctttgttcggtcggagcctcgggaggagagaccctgtcctcggggaaactcgacaccggaggggccaccctcctcccctcctccgcggccaggttgggtcccctcgggcgcgcaccttggggtccgggcccccggcgcggtcgggtgcggcgcgaggtcggggcgcagccaacgcccccgggcctccccgcccccctctcctgcccggtcggcctcgggagcctggtggggctcgcgccgcgtcgggacaggtggacttctccaggtaatctgtggtctcaggctcgtcactcggcgacctgctggaacctccaaaacagaaatgtagggaaaggttgaagtgccccgatgtccgggcgttttcttttccctggctggcggcatgagtgggaaaacggctgtaggagttattttgccacttgcatcattgatggtaattacagattaccgtgtttttagtgctcgagagaatcaagaggatgaaactttgaaatccgggtgtta

SEQ ID NO: 36493 - DNA, 727 bp, Homo sapiens
aaaaaattatctgagtgtggtgatgcgtgcctgtaatctcagctacttgggagactgaggcaggaaaatcgcttgaacccaggagttggaggttgcagtgagccgagattgcaccattgcattccagcctgggcaacaagaaaaaaaactctgtctcaaaaaacaaaaaaacaaaaaataataaacacaaataacttgtggatttggacaagttacctaacctctaagtcttggtttcctcatctgtaaaatgggtccaaaatagtaccaatttcataggtgtttttgagggtcaaagaatggtataaaagtagcacaaataccacagcagcatgtagttttatttggctggagttcaggaaagtgagtcattcgtccaggaaacgtgtatttcttattggccaggcactgccaagatgctcttggaatggaaagatgagtaatccatgacccaaaactcagaactcagtgggaggattgcactctagtaagcgtagggttgcaggtgacacgaaggaagggaacctcacttggaataggaagattcgtcacacttctcaagtgaccctcggcgggggtggtggtgggggttcctaaaggatagtgggaaccaggctggcatgcagaacccagaatgagctgtgacctttgatgtcttctgagccaggagtggtggggactgcagaggaaggccctggggtgccctcgcaaggagcttgtctccaat

SEQ ID NO: 36494 - DNA, 856 bp, Homo sapiens
atctttaaatattgttcttgtgggctgagtgtggtagctcctgcctgtaatcccagcactttgggaggccaagatggtaggattgcttgagctcaggagttggagaccagcctgggcaacatagtggaaccctgtctctaaaaaaaaaaaaaatacaaaaattacctgggcgtggtggcgcacacctgtgatcccagctagttggaaggctgaggtgggagcatggcttgaatccagaaggcaaaggttgcagtgagctgagatcacaccaccacactccagcctgggtgacagagccagactgtctcaaaaaaaaaaaaaaaaattgctcctgtgggaagtggtggcttgggcactgataggaaagcagacttttgaaactgtgggttgagaagctcaaagtctggtttagacagtttctctgaagtaatttcatgattgaatagtagaactgttgcttaaggaattggattcttcgtttctctcatggaaatagacccaccagcataacatcttcccgggttattctagggagttttgaccacatctgtgtggaacttcttgaatgaggaacacattcctgggtgtttagtgatcgttaagttctcagcctattaacaaacgttaccacttttgtcttaggtttaatctgggcatgtaaagaatccagttatgtttaaataaaagacccttgcactgatatttccatacctagaaaggagtatggaaataattgtaaattacaaatcatcccttgaacactgggcccaatgtgatttgataaccaaaaggttaataagaacaaactggaaagaaatgaggactgtttagtctgcatgggcaaagattgagagag

SEQ ID NO: 36495 - DNA, 1655 bp, Homo sapiens
ctgcacagctccccggcaagagtgccccccttgcccttgccctggtgaacacctaccgactgccagccaagcccgtgcgcagagcccctcctgctctccctgtccagggctcgcctctggttgttctggaatcctctgtgtatgaaactgcttctgtccgcagcaggtggctttggaagggcactgggatgcggtggcagcagccgggcttccgcatctgctgttgaaacaaactcagcagcaatctggaaacaatctagaagcctggcggacgtcccgcacctgtgttcggtgggggctgtgcggtcctggccgcagcctggaggggacaggcctagctgagggatgagcacagtccgctgctctccttcctgcctctgcctctctcctctatgagcccctgcccatgggtgaggagggccggacggttagcaggggccccatggggaggccccacagccaccagacccctgtccagccaactcctccccttcagccatcgcaccctggcatggccccagaatgccctcctgttgggacagcaagggctggggcctggaggagcctttccaagcaggaggagggaggcaccaccatggggcctcctctttccacggccctccctccccacgctggtctgcacctgccctagagaccagaagccggccaggcctgtccgcaggtctgtgtagctggcccaggtggctggcggccaggccagggctggcctatgggtgtctggcccggctggcaccggccacctttctcccactggccttggccacagccccacagctggcgcgacgctgcgacctttcccctacttccagctctggcctccagatcattccaggcccctgaagtttacatgagtcacatgtcgctggcagactcccaccccgttccctcttcttgctctgggtttaacgggccacactggagagcaggcatggggccttgtgcccctgagcagggccaggtgtgggaccagagccttcgtcgtgcccaaggcctgcaggcctcagaaaccccagccccacaccatgccggtgctcccagctttccctgaatgtcattcgtcatgagggctgaggttcaaggacccacttactctggtggccacttactctagaggcctgagtacgccaggctgtgaagctctgccaagtacctgggaatctatatccatgcggggcaccatctcaaactgcatgagtcaggtgggcaggcgtgcatatgggcgagtcaggtgggcaggcgtgcgtatgggcgggtcaggtggacaggcatgtgtatgggcaggtcaggtggccaggcgtgcgtatgggcgagtgaggtgggcaggcaagtgaggtgggcaggcgtgcatgtgggcgagtcaggtgggcaggcgtgggtgtgggcgagtctggacaggcgtgcatacgggcgggtcaggtgggcaggcgtttgtatgggcgggtcaggtgggcagacgtgtgtatggtcggtttaggtggacaggcttgagtatgggtgtgcgtatggacgagtcaggtggacaggcgtgcgtatgggagagtcaggtggacaggcgtgcgtatgggcgagtcaggtggacaggcgtgcgtatgggcaagtcaggtggacaggattgcgtatgggagagtcaggtg

SEQ ID NO: 36496 - DNA, 723 bp, Homo sapiens
tccatctcctcaattctgttttgcatttttcagttaatgttatttcaaaaaccattttatgaaaattctttgtagcagctatttttaacagctgtgaaatattaactgtctgtgacataatccaattaactgattctctgttgttgggcatttaggttattttcaagttctaactaatcctgcaataagcatcttgttctcccttgttctggttactctcttaagttagattcccagaaatgggataattgtttccgaagatatttgggaacatctgggaagttcctgatctgtattgccaaatgacttttctagaaggttgtacaaatttacattcccgctacacgtactctcttatgttgtaatacatgtttacatgccttttcccccacaaattatgccctatccaccttcctgtccccggtgcctgcacaggcagctgcccagcagcgtcccttgcatcacacatgcccatacttgcaccatacgtgaccgtactttcacagaggagaaggaatatccagggtcagggggaacatccctgacagacactcctggaaccaagacgtggacaagtgtggatggacacttgggtctctgaactctttctagaacacctggcatggagatgagatggccatcagagacctgtcagttctgttttctcgcttggcggcagggaagctgagatctaggtggggcaagtgggttccacacggcaca

SEQ ID NO: 36497 - DNA, 2280 bp, Homo sapiens
ttttacagatgagaaaacaggctcagagaggttaagctactggcccaaggtcacacaggaactgtgtcacacccctctctccccagtgcccagcccagtggctggcagcatatccggctccaacaggaacttgcttactgaagagcagcccacacgtgaatgggcataaaaaagcaaaacagcaaactcccaggtggttgtccatcactgcctctgggagttgagcctatagtcagggagttcagtgagttcagtccagggtcttgccccctcctgccatggcccaacaccatcaaacagtaagaggggtccttcttgtagtagagcgacagctcccactttttctttttctttttttcttttttattttttttaagatggagtctcactctgttgtccaggctggagtgcagtggcgtgatctcggctcactgcagcctccacctcctgggttcaagcgattctcccacctcagccttccaagtagctaggattacaagtgcacactaccacacctggctaattttacccactttttcaagttcccacacagcagtggtaaactggggagaggacagctagggttagtgaaaggaatgacgattccgtccaaactgtgagtgccagatgattgcagacaggcagactgtgcttctctcagctccccatgccatgcagagtgacccagagtgacccaacgagacccagcatggatctatgagtgacactgagccaggaaggtgtccagggaggggctgcagaccaacctgggcacgaggcctctttctaagcccaccctggttaagtgctttgccagtttctaggtgaggatcagcctcagcctgcactgggcctactcagtaaaggtttccacggtctttggatttggagcccccaatttagggcagagacaagtataaactgaccaagcaatagaagagatgcccacatgaggactcctgggaggggcactgactgcagcctgggtggcggctcctgggcagagggggagctgctgtggctacggaacaggccagcaggaggagccagtggtgatgagtgccctggtgccaggaaagcccctggcagagggcctggcctgtctgggggaggctggtgactcctggttccaatgtgctcagctctgagccagaggccagcctgcctcagacggggcatttccttcaagtggttaaaattcgtttttgtgctgagtcaggaagctagccggcttgggcctccccacctccaacgctgagtggcacacagtaccagtcatcagcctaagcagagacctgggtaagtgccccctggctctgcccaggggacaggaatgacagcagcatcccaacagattcctgctcaggccccgcagggatccacaccaagtcaccctgtgagatgtttctccactggtcactctgtcagtgccttgagctcctggcctggctggccctgctgccctgtctgcgctggtgccagcactatgctgggtcactggggaagtcgggctggcaacatacccagatgcaagcagttggctgagcagatgggctgggtagccacgaggacccttggaagcctgccctcccaggccagtcggcggtttgttctgttgcccagagacatgctggcctcctgaggctttcttctggggctgctcctggggcactctgtccaagaggtggcagggtggcactgcagtgtggttcggggtgggactcagcgtgagtctggaggcagggcatccagtcattcctctgcccacactttgagtaactaggacaggctgcttctgttctctgtgtctccatttccctttctgtaagatgcagagattggactaaatcagtggttctcactgccgcgattcctggaccagtggtgtcaacaacatctgggaacttattagacatgcatatttggccaggagcagtggctcacgcctgtaatctcagcacttagggaagccgaggccagcagatcacctgaggtcaggagttcgagaccagcctggccaacacggcgaactcctgtctctactaaaaatacaaaaattagccgggcatggtggtgggcatttgtaatctcagctactcgggaggctgaggcgagaaaattgcttgagtccaggcagtggaggttgcagtgaactgagatgatgccattgcattccagcttgggtaacagagcaagactccgtctcaaaaaaaaaaaaaaaaagacatgcagattcacagaccccaggaagacctgctcagtcagcagccagtgggtagg

SEQ ID NO: 36498 - DNA, 3974 bp, Homo sapiens
ggcaaaagagaatattccagtgtgtatcttaagacttaactttttacacacagaacaccctgcgcccctctcagagcctccggggtcttcatgcgagcagtttatcacggttctttcgtcttaaaccctcttactatttcagcaaacaccctctcctcagcctggtcaacccctctgcccaacccgagtgggccccgaaggaacaagtggggaccagagtcctgctcatgtgagtggtggggcccagcccgttcccctaagaccagaattctctcgctcagagcaaagccccggggtgccgggattctctctctgctcccgctccctggatggagcttttaaaaaaggaggattcctcactgcggcctctgccccttgcactgagcgccaacccgcatcacagctcagcaaaggcgcgcgcagtgaacagacggaggaggggtggctcctcgctgagctgaaggctgcggcgacgaaaataaacagcatggttcctgctctccacgaacctggcgctgcagacgtgggcaaaccacaccaagagacgcgagcaaccgaaatatagggagaaaaaaaaaggtgccctggacagcgggctagatgtctcctgcaggctcgaggacttcccggagggggcggcgttttctcggggcctgggaagaatgggcgggtttcagcgggcgccttctgggtgactgcccgtttcggcttcccctgaccccgtaacagagcggaagaggcccagagacgccagaggaggggcgtcagcgggacactcaggccaataagctctgactcccgctgtctgcaaaaatgaccggatgcaggaatgtcacctagaaccggccagctttccgacctctccggtcaaggacgcattcctaagagacgaagggagaatgacagaagttaaaaacaaccaaacaaaagccaggttgaggcctctaggtgggtctccgctaccgatggattcagccggtggggctgcaggaggttcctataagcgtggtcccctctccccgcaccgagtccggccccggccctgggatttccccagccgccgccccgccccctccgccccgccgcccccgccgccccgccgccccctccgcccccgccgccccctccgcccccgccgccccctccgccccgcttgcccctggcgccgctgcgacctttcccttactttccagggcctcaggccccgcccctcgctccgaccaaaacacgtgccgcgtcccgccctgcccgatcacgccgcggccaggctccgatcacgcggccccccgcggcgctcattggccggccgggcacgaattggctggtggtggccggccccgccccggcaggggcgcggtgtattttggttcgcctccgcgccccgccccgccagccgctccctccgcggccgccccgcccctcccgcgccgcgagggccgcgccggggcagagccgcgcgggcgggcgaggcgcgtgccggccgcaggagctccgggttgccgccgccgccgccgcccgcagcccacgtgcggccgctgctgcgcccgagctcacgccccgcggccgctttgttgctcccggccggcctgcacgatgcacacgccggacttcgcaggcccagacgacgcgcgcgcagtgagtggtggggctgccgcggcgggactactcgtctgagcgaggggcgaggcgggggaagtggtgcggcactcgcgcgcctgtaaatgcgggaggtggggcgtgcagggcttcgctgcggccgcgccggtaggggcctgggcgggctccggagccgggcggggcggcggccgcgacgggcgcgcccgggtcggcgggggcgaggagggggcgtgttccccgcgcagctttgtcttgcgcttcctgggcggccccgccccgctggccccgcggctatttccagccatgacgtcaccccggtcctgtgagccggacggccgttgggcgggggagcggctggcgggaacgcggcacgcggccttgggggcggggcaagagctgctggcgggaacgcggcacggttttgggggcggggcacgcggccgtcgggcgggttaagagcggctagcggtagtgccgctcgggcctgggggcgggcaaggtctaggggccggggcaacgacgggaggcgggagcgccgcactgccttggaggcggggcaacgcttggaggcgggaacgcggcacgcgagcgttgggggccctaagcgtcgcgacctgggggcttcggggaggtagccgtggacgtgggcagagcgcgggcctcgtggtgtgcgggcactgtgggccgggcgagccccttcccgcccgtgtggtgagtcggcctcggcgcccggttctgtgacatcacagggggtttagtggcgcagcctgcgggacagaggccggggatttgaggtggcctcgtcttgtttgatctcggggaacctcggcagacggaaagctttgatgctttggtgcatggcagatagagaggaaacgtgtatcttcgtacatttaaagtttcctttccttttttttttttttgatagggagtctcgctctatcgcccaggccggagtgcagtgggcgcgcgatctcggcccactgtaacctccctgggagggaggggtattactcttctcagagtaatatcaccctctcgcccccggcttagttttcttttggaagagatcagctcattccagcctcttccctcctcccctccagattaaagagacggtgagggtctggtgcggtggctcacgtctgtaatcccagcactctgggagaccgaggtgggcggatcacctgaggccgggctttcgagaccagcttgaccaacatggggaaaaccgctctctactaaaaatacaaaaatcagctgagcatggtggtgggcgcctgtaatcccagctactggggaggctgaggcaggagagtcgcttgaacctgggaggcagaagttgtggtgagccgagatggtgccactgcactccagcctgggcaacagagcaagactctgtctcaaaaaaacaaggccgggcgcctgtaatcccagcacttggggaggtcaaggcgggtggatcgcctgaggtcaggagttggagaccagcctggccaacatggtgaaaccccgtctctactaaaaatacgaaattttctgggcgtggtggcggacgcctcccagctactctggaggctgaggcaggagaatcgcttgaacccgggaggtcagttcaaggccagcttgaccaacatagcaaaactctctttctactaaaaatacaaaaattacccaagtgtggtggcgggcactgcagtgagccgagattgtgccactgcactccagcctgggcaactgagactccatctcaaaaagaaaaaaaaaactgcaaagagatcctctccgggttcgcggcaggttggcttcttgtcaccacctgctagccttgggacagtaacagatgacttccactcccgaatctgtggagggaactggtggaatcgccatgggccctacctgcgtggagtgctggaagcctaggcggaaggccccagagtccctgagagcatctgtagggacactgctttggcggctttgccgcctcagagagccatggtcagggcgccgcggccactggcagaccgactagatggcctcagtgttggctcctcctccctgggcagctgctcctcctcccagccactttttggcttgaacctcaggagttaattttattaatcatttacccaagaaaaatatgaacttagtagccctttttaagagtcaggatttttggtggcaacgcttgccagcttagttctgtctgtgaaatgttggcttaaaagccgaattgtcatgagcattccttgaatgtcttttactacacctcggtgtttgttgctatagactattgcatgtgcattacatgcctactgtaggcttctgatatgcatatccacatgcccatcatgggt

SEQ ID NO: 36499 - DNA, 1478 bp, Homo sapiens
caaacagcctcacatgatccaggcgcccagaggctgtgggtgctgcagccttaattattattatgaccaccttcggcacggcgtctggtacacagtgagtgctgagctccccgagccgcggtttctccaccctaatggtgaacagccttttggaagtcgcgctaaccttggcctgagacctgcaaacttgcccaggctggggcgtgtgaaccggcgagcgcgcagcggaaacggggcggggcacctgaggctgggaatgcagaggagccttccggggggcggggcggggcctcccgtgcagaccaatggtggagtagatgcagatgtcaaaacgcgcgctcaagtggcttccgccaggaatcccgacgcttagggaggcggagggaggatcgcttgagaccagcctgggcaaacaagcgagaccctcgtctgtttacttaaataaaaccaaaaaaacgagcaccgagggaaaaaggagtgaatcccggggctagcagcagcctgcggcgggcgctctcccgggagtggctgcaccgcccgacctccccggaggcggaaccgcccgcattgccgcgtggccctgggcgccgccacctcctccgcagcggggcaaagttgccggacctgggggcaggagggccacgccgagatgactcaggtttagcgcgggaggggaggatggcgacttcacccggcctttaacaacacgtacgcatctttcggcgtcttctacaatggctatgttaattacgtggccaggaactaaactatcaatgaagccacctctgactacttcagttacagtgagtttaacaggagcaaaaaagcacgtggcgccctagggcaaccgaaacgagggttttagacgctgattatgggaaattgaaatctgagttgagtatgagatgacaccaataaattataattttgttagataatagctttatcagccataaagtaatcaataaaaataccagtttcctggagatggatgctttagtgtgtttggggtgaaaatggcgatgaatggcgagttgctttaaacaaatcatggtacaccaaagttttagttgtggctttgtgtaaggaatgtgatgggcacttattcctgcaacacgagaatactatgatttacaagtccgtagtacttttaagaaatgagagaaacagacctaggtggggagggtacctgtcccaccccaccctctttaaagtatcttatctagaaaaggctttgtgaaaaaaaaagtcccgggtctctctcaataacagccctgagcgcagctgttgaagctttctcaggttaatgatttctttcttggatcttaaagtttctttctcttcctttatttttggcattttgcccgttgcagggcctggcaaatcagaaagccacatagaaaattaaatgaaagctattgctaagttccagtctctacaccagtggagttttcaaactcctcttcagcatatttgac

SEQ ID NO: 36500 - DNA, 879 bp, Homo sapiens
atgaaacagattcagtgtgcttaagcctttgcccaaaaggacagagcgggcaatgagggaaccgggatttgaaccggctctttctgagtccaaagggccttctcacctgaggctgtccttaaatcttggagcctggccctggctggagagatccctagggggtgatggaggagccaggacctcccagagtcagctccctccacctgcctcagtttaccgatcccagggacacttgcggtcaagatttatggggatgacaaatgcgagccttcagggctgcagggcccagccgctctgggaggatgactaatgcccatctttttagagcacactttgaccgtctggcgcccaggggtggggtgaccagtactgggagaggtgccattaaaacggttattgctctattacatttcgctaggagcaaagagcatccctcagctggagagaactgcaattacagctgagcaaattattgccttttaaacaattctccatttctgcgacggcctggggaatgtgtttccaggtgggaaatcacacccacccggcttctagttcctgggctcccggccttctcttcctgtgactctggttccttttgccattttcaccatcccccaattgcctttatacatttttgttgattttgtaggggaggcttgaagaactgcactgcactgagaatgcaggctttcggtttattgatcaagaactgtagcatcactgaaagcaaattggactagaatgggaatcaggagacctgggcctgacctgtctctactaaaaatacaaaaattagctgggcgtggtggcgcgtgcctgtaactccaactactggggaagctgaggcataagaatcgcttgaacccaggaggcgga

SEQ ID NO: 36501 - DNA, 818 bp, Homo sapiens
aaacccaacatttcaggctgggtgggtgtctgcgtgtgtgcaaacgtgcacacatgggccctacctccatttacactggaaggactcctccttaacctcaggaaatgggcagagcgaaaggcctccagccagtttctcagctcctgccccagggggcaggcttgctccagagaccccgtgggcgagggcagaagggaggtgcttcctgggcttagaggttgggaagttcccgcagagccctcagtgccagccctgcgccgtggaggaccatgtcctgcagccagtgggcccaaagcgatctgatcatgctccctgccaggaaggaggtttcttgcaccccagcaggtacacagtgttcgtttacagatcacacacaagtgttgtgcaaattatgaaacattccacaactaaaatttcataaagatgaggtcattgttctcagaggctggctgttcacaggttcactatgccaagctgcgaaggcacacactccccgtgcgtctggaagtccaggtgaggcaggagagagtcccagggtaacctgccttcatcttcccacaaatcggagtccagcacttgcagcaaagctggcatgaggctgtgatgaccctgatgtcaaaggtccttttcaggccaggtgcagtggctcatgcctgtaatctcagtactttgggaggccgaagcaggaggattgcttgagctcaggagttcaagaccagcctgggcaacatggcgaaaccctgtctccaccaaaaatataaaaaactagccaggcatggtggtgcagacctgtggtcccagataccagggaggctgag

SEQ ID NO: 36502 - DNA, 1770 bp, Homo sapiens
ccctcctgcagatatggagaaaggcttcctatgggaggtttgaccgggggaagagtcactctccagggctagaacaggaagggctgcctagcagggtgacggcaggtgcaactctgcagaggcatgaggcagtggtgcctgcagaaaaggaaccaggcacacaggggaggagttggcttcgttgaattctggaatcagcttcaggaggaatgctaagtcctaagcccttcttctcagagatgaggaaacccagcttcagagagttctggagcctggcgaaggctctgcagctggtgtactgggagcccaagcctgcaggtccagaccacggcccagcgatggcctctcagaagcacaaccccaggccccgagaagtcacatgatctggctggcagaagtggcagcccctctgggcaggaagcccgtctccagtgctgagtcatgctgtctctggccagtggcacggggtggcccagctgtggtgactgctaggacttctgctccccaggccttccagcctccctgggtccgcccagctgcatgccagccagcgcactgccctccccaggacgtggggtgtcgggaggccaccagcctccaaccctccctgcctctcacactgcatgtgcaggccggtggcccgcccactcgagggctgtgagggaggagtgtccgaactggaagtgcagggctgcaggctgtgtgcagggagctggtgctggctgaggaggggtactgggagggggcacatttgcattttgaaggaagaaatgtgtttgagaagtggagacaggcaggaggggccttccagcaggagggagcgcttgggctcgggcaggcagcctctcctgtgggcagcagagggaagctgaggagggcggcccaggggcagcagcgggaggggaggcccaaggcttttcccactcccatgaagtcaggaggtggaggtcctggaagcaaaccctgtagaggggtcccacttcctgcattcttccctagctataaggctctgggagggcctcccttccagggagcagcctggttaggaagaggagagcctgggagctgaatagagaggcagaggcaggaccctggcccgggcaggaagggctgggcagcaccgggctccacgggtggggccggccaccgttagggtgtcactggcctctgcccttagtggggcagtcaagcccacggccactttcgggcagcacggcctctgttagaccatgctgagatggcaggggagggaaaggatgggccttcgtgggtggggactccaccaaagcatcgctgggaggccatggttctaaaccaattactcctgactcctgggcacacagccctggcccctctgagctgatgcctcctctgggacctcatagagggtaaccagggcctcctgggaaggtgacagaagcggcagcagtcctggaaccccaaccagcaaatagcccccccgcccccgacgggagccctgcagcctgcggccgtgtgcagccagagctggccaggtgcccgagcgcctgcaaagcactctcagctttgtttgcttgctggtgccctgtccacccctcccgaaggcagtgatggggacagcttctgcccacggtggcttcagggcaatgggaagtgaaggagggggtgccgcagtgtgggtggcaccagcagtgggctgggtggagtcaggaggtggattctcgggttctcatccggagctgcccctggctcacagcctggcccgggatccatctcgcctccctccgccgg

SEQ ID NO: 36503 - DNA, 2088 bp, Homo sapiens
ctgggactacaggcatgcgccaccaggcttggctaatttctgtaattttagtagagatggggtttcaccatgttgcccaggctggtctcaaactcctgggctcaagtgatccacctgcctcggcctcccaaagtggtggggttacaggcattgagttttcttttttttttttttttttttttttgagagcatccaatgttagctcatttaaggctctcgacccccccaagaggtagttcgtaggtcaagctgtctactttatagaagagcctgggagtccagggttatctgacttggagtcctgttcattttcctgggtacctccaaaggccgctcggtgagtggacagtgcagttctggagccctcccctggcaagtcccgctccggcccataccccgccctgttccccagcagccacggtcgggtagaggggtcagggaagcagggcaagagggtaaggcactgctcaagaaacaaaaccaggtccttaacgtccctagtcctgccgggcagtgtcccaggaccccggccttgagattagagagaggcagagggcatacggaatgggaaatagaagaaaatgtaccaggacatgcttcctgtcttatgcttagactgccatgacgaaataccacagactgggtggcttcaacaacagaaagttatttctcagagttccgaaggctggaagttcaagatcaaggcactgctggctgattccttttctggtaagggcccactttctggcttgtagacagtcacctttgtgctgtgttctcgcatggcctttccttggtgcatggagagggagaaagatttttctctcttcctttctaagaccaccaatcctatgacttacaactcctttaacgttaagtacctcctaaaagtcctatctccaaatacaattacattagaggttagggcttcaacaaaggaattggggtggtggtggtccacagcaggggaggggatattttagtttatcttgagcttgcaaggatgaaggggaaagagcgggggtgggggggtggcatcggaacctgcctctgagtcacacttcctggatgagccatgggccacagcatctgtatcaggagtggttacaaaacagcgtgcctcagggataaacaagctgacctaatgatccaattttcccagctctggtccatctacagatttgaggcaggatccagtgattctgctggctgactggtcatggtaaatttccaactctcccctttccaggcacggctttggtttcctgctgcagctgctgctggggagttatcagggcatttcctccgcctgtgagctcctggggtcaggggaaggttgggtggccagagatgctgcctctaccctaagtcagcgtcacccatgctattcccagcagctgcatttctccactctgtaattacaaatgaaactggggaatagaatcaaaagagtacctagaaacaagctagcctctacttcctcaaacattctggggcaggagtttgtgcgctggaacaatgttatttgcaagattctccctggtggatatacactcaagtattaaagtgctacaaggaattaaaaaaagaatagtatttcttccagagcctgtgtgggcccagcacaatgacactgaatctggctgttaaacctggctgttgctgattctaatatgtggccttggacatttcatttttccaagtatagctttcctcatctgtaaaatatggaaacaatctttagaatgtcggagatagtgtatgtaaaggtacttcagaaacaataaagtccaaatcccaatgacattttttgcagaaatagaaaaacccatcctaaaattcatatggaatctcaaggggccctgaacagccaaaacaatcttgaaaaagaacaaggctggaggactcacacttcctgatttcaaaacttaccacaaagctacagtaatcaaaacagtgtggcactggaataaagcttgacatatagatcaatagaatagaatagagagcccagaaacaaacccttgaatatatggtcaaatgatttttggcaagggtgccatgatcacttaatggcaaaaggacagc

SEQ ID NO: 36504 - DNA, 4927 bp, Homo sapiens
gacaaacgagtgggtaaacacaatgtggtatacacacacatggaaatattactcagccttaaaaaggaaggaaatttggacatacactacatcatagatgaatcttgaggacattatgctaagtgaaataatccagttgcaaaaaggaaatactgtatgattccacttatgtaaggtattagagaggtagtcattatttaatgggtatagagtttcagttttacaagatgaaaagagttctggagatggatggtggtgctggttgcacatcattaatgtatttaataccactgagctgttcactttaaaaggattaagatgataaattttatgttatgtgtatattataataaaagttagaaaaaaattgtcataaaactaagtcagatattaagaacaatcagaattacttctgtcttgtttacagtcatcatatgaaaaacaaattgtttatctagcatgacacctgttatgggttgaattgtttccctcaaaagatgctgaacttctaacccttggtacctgtgaatgtgaccttatttggaaattgggtctgcacagatgatcaagttaagatgaggtcattagggtgtgccctaatccaataatgactgtgtccttatgaaaagggaaaagagacaggtatatagagaagatgtgaattcacagggagcgcacatggccatccataagccaaggaatgcatgaggttaccagaagctaagagacagacatgaaacaaactgccccccacatctctccaaaggggccagccctgccaacactttgatcttggacttccagcctccagagctacaaaacaacacatttctgttgtttaagttgcccagttggaggtgcttgttacattagccccaggaaattatacaacatcttacctgaatttgctttcttctttgctctagttaaattcaaaactacatattgaataacgacggtgtgctctctctccatgaagcttcggggtgggtagacagtcctcctcttgaaggaacaggagggacgcaagggaagggaccaacttgtatctcatctgagagagatacactcctggaataagaggtctgcggttaagtgtgtttctctagaagttcagaaacagaggaagcatctgcgggctaagctgctgagggctaggtgagagctaactgacctaagttttgaaggatggatgggtgacaggttggagggggaagatggaaaagtcacatgggagaggaacagcatgggccaagtgtggaggaaccagtgagtgggctgggtttcagaaacaggccttggtctgcttttgagccctccctgaacttttccaccccaaccccacctcctgcctgtgtctgccatgcacctcccttcctgtgagtctgtggacagactttgcccctttgccctgtgtgtgcttgggagaaatctgctcagtttctgtggcagggatgtttctacgtgttcatcaaaccggctttgtttacttccgaaacactcatgaagaccacagctgccagagccccttgcatcctggtgggactgtgcgactacttctggcccatggatgtgggtggaagtgacgtgtgcttccccaggcctggctcctggaccccaccgacggcttctcacctgtaaccccaccagccttctacctggatacttcacggggagctagagtggccttggctaagaaggaggcatggcacccgcgggtaccgggccgccttcatcagtcggtgcactctggtccaccgcccacatgccttcatgtaatcttcactgtagggcccacagggaggggaacttcctcgaggtctagctttgcctttccgccttcagagccaagtaagaatgaggggtctgggctcggcccaccttccctgcaaggccctgtgcccgctcccctcaaagctggtcttgcatgttgctctggcggcctctgtagcaggagttcactctgttttccgtggaggaggagtggaaggagggattcaagctctcccctagagacgctagaaagacagttttgtctcagcctcatacgatcgcccagctccacatttctggctgtttctgtggttacctttcttcggggatgtttggggcgggaggtgggtgtgtgtgtatatttgctcttctgaagccgtttttccggagctcctggtgggggtgggggtgctctgtccctggttcctctcgaggcaggtgcaggggatggaggatgcccccctccccgagagccaggaggcgccgaccctgggcaggaggtgccagaccggcgcctctcccgcgtggagctcgaagaccacagatgcctggaagggaggagcaccttccgtggttaggtggggaaaccgaggcagaggcggcccaatggactcgcctaaacggcctggggagtcactgcaggtaaccagagctggagccaggcttcccactccaggcccggggctctcccccgaacaggcgtgggaaggggtgcgagctgcacgcggggctggggctgggggtgcggggctggggcaactcggctcttccccttcctaggccgcccgggccacttcctgcggcgtgggggcggggggcgcgggcgcagggctggcccctcccgggcgccgcctctcggcctcttctataccagcaggccagaggccaagggttaggggaacagaaccggtgcccggctccgcccctgtcccgaaagccactgggggctgggacccggcagggccaggtttgggccgcgagggccgaggagcagcgaggtgcaggggctgcgagggccgagccgggcgctgagggtccggcagggggcgtggagggggcggggcccggagggggcggggccgtaggaaacttgagcgcccgcctctggccgcgcgccccgccccggcccccgcctccgggtcccgcctccaggtcccgccttcgcgtcccttccttcccggagctggcaggcgggccgcggcggcggcgggcagcggacgggcggactgacgggcgcctccaccttgctccctccctggctgccggcttccttttgtctttctgggcggcgatgagcgcagggccggcgcagcagctgcgggcgcacggaggcccgcgctgctagtcactcctcccggcctcggcgcgcttgtcccgggcagcggcccgggcccgctgcagccgccgccggcgccgaacttgggctcgggaagccggcggaccgcgtcctgcgccggagcaggtagggaaggggcgggctgcggtctgctggctgctgaagtgtgccccgggcgtgtgcacccggcgtgtgcaccggcgagcgctgcgatccggctctttgcgtgtgtgttgtgcgcgcgtgtgtgtgtccgggagtgcccgcgtttctctgcgcggtggagttgtgggtgactgcggacggtggtgtgtctttcgaatggcgtgtactcgtgggcatccatgtgtgccttaggtgtgcacattttggactgcgtttgtggaattgtgtgtcggggcgcagttgctggtggggagcggtgcctggcgggtgtcgtgtgtgagcagctgtgcgcagagcggggtggcggggtgggtgtgggtggtccagccccacgcccagagccccctgtccctgctggtcggcgcagtgcgtagcttaggagcctcgaggacagctgggacccgacgggcaagggcgggcctcgcgggcaggctgggcagccctcagggaacaggtccgtgcggcccacgtgggtcgcctgtgagcttctgccaagggtgggggcccacgcggaggcgatccgctcgttcctcccagggccatggggcgacgaggagagccctggcctccccgcgacccgcactgcgacctgggccagacgcgccaccttccccggtcgcggtttgcttctctttaaaatgaggacagctcctcccttgggggctgtggtgacaggtgaaatgagaacgcactgaagacagctcttggtccaaagccccgcacacagtaggtactgtgttaattggattagcgtctcctgtttaaaatcctttttttttcccctttatcgtgggtggggccttacattttccccgggcgtgttttgtgcctctccctggccctaacttaaccgcgaagcactgagattcgagaaagtttagctgccagctgcgctgcctcctgcagcacctcccgggcggcgccgcctccgcgagtgcccgagagcgccgcgctgggcgccggccctgccccagcccccaggctcccgcgcaagcgtgggggtccctctcctggccgggaggcagcgactgcggagttgagaaccctttggttcaacaagttcctagtccgggaggatgcagctcagctcgtggagtccgagagtcacggcgtaaaattggcgcttcccgcacatgcagatctcgggctcccggggtgtcccggccgccaaaggccacccctttcctcctggctgaccccaattccaccagaggaggatgtttgccagggacgccgagtccagctgctggcctcggcattagacaacccccagccccagcccctgccatccctgctcccttgcagccagcctcatgccgggggtgccacatgggacacctcctcctagtcccacaccttaatttaaaacatttacttttgaaacctactagtcgtaaaattgaaccgcagtgaacgagcacccagctcttaccacgactcactctctggagagttctggcgcctcggcgctggctcggacgcagcaaggccagctctaggggtcgggtggctctcggccagagcgaaggatattctttcccttcatcgccttggtgtctttctctgggggaaaaaaatcgcctttaaccaagggagccaagatctcaccagtgcaggaggctctcaaaatggagcgccggcatggggttgggc

SEQ ID NO: 36505 - DNA, 1048 bp, Homo sapiens
gactatgcacaatttatgtggcaagctagagatgctttctttttcagagcggcctttatgctgtgttcggggctgtctgtcggcgccacagggaatgggggctggtgagtcgtgctcagaaggtcccagtctagatgcttctgacatggacaaaaggagaattcctgactttttggtggatgtttgcaattcccagaatgcttattcttatttagtcctcataggagagtggcgaagggcagcagctttggagcaagggccaccctgcccctccccaccaagccctgagtcgtctaaccttcccggtgtattagtcagctctggctgctggaaacggggtcatagtctgggtgccttaaacaacaggaattcttttttttttacagtattggaggctgatgtctgagacagggtggcggcagggttggtgtcacccgaggcctctctcctcggctccgtgtagccctttctccctctgttctcacacggccatccctccgagtgtgtctgagtcccagtctccttgtgaggacaccagccctagatcaggagccacgcagtgacctcattttaccttcatgacctcttcaaagtccctgtgtccaaatacagtcacatctggaggtagtaaggattggggcttccacataggggttttgtgggggacacactcagtccacgttaactcacttcctgcccacggcaggggctctctgtcagtgtgtctccgactgcggaccccgatcatctttgtgagaatgcaggttcccaggcccacaccgtgctggttgagtcagagcttctgggtgcagcctgggggtgcagcaagcccacccctgcattcggagagccttagcgggaagcctgttgcttgtgcctcctttgcagccccggcctctccagttctctgtgtcttgccatcttggcttcttcctcatcccgcctctcgctccatctcgtggcctcccatctgctctcccggctgcaggagcggtttctctaagccttgcaagtgaccgcaccctcttactgcatgcgggccttgcca

SEQ ID NO: 36506 - DNA, 1357 bp, Homo sapiens
gtgtgtaggtgtgtgtgcgtgtcagcatatgtgtgtctgcattcactcggccagagctccttgagggcagggtggttcccacctctctgttcccccagctcccagctccggcctggcttttaatcacagagtaagtcaagcctgctttgggagccttctgactcccccagacacactgagtactctttcctcgagctcagtgcagttcgtccacattttcccagcagcacgcctcctgcagcgttgtcaatatttatttgctgttgctgttgcctccctcctggaccgcccattccccaggccctgtctggtggtggccgcccttggggagctggcctctcagcacagcgccgggcaccggggctcaaggtcagtgggtgtgtgtttgggcttgaactgatgtgtgtgtttactgagctttctccgcagcctgctccggcagctccaaaatggcatttcaggaattgaattaccgacatttcagtacttgcggaatccaggaatagattatttgattgtatctgttggaagtcattgccgtaactggcttcgttttcttcaccaacatctaaaccgagtggggagggaccgcaggagaatgctgtggtgacttgattttcccaaaagcacatctcccaagctggcggcagccgatggcgttgccctgtgactgggggaagcctgaggactcacggtcgcctcaggctggccaccttcgcactggaacctgcccatcacatcaaggagccctctcaggctgaaaaccctgtgccggggtggctgcagcaacacaaggattcccctccagctctgtgatgtggggagcagagggccactgagtcctgccatgtgagtcacatgatgcccgtggcctgatttctgtgcccccatcttgcctcttagagtttgttgacctcagggctcacatatcccttgtaaggggttgtgatggcttccacggccatcatggctagttaggattttcctccagcccttgaggaattctctcgggattttttctggccttgcctgtctgcagaatccatagaggacctacaggaatgtctgcctctgagtccatagtacttgcaggcctgggaggctggatcaaggtggatgttgacacttggtggggccggagccctggcttcctggctgcctcatagctcaggcccgtttgacagcatttgtgagcacctgtcccaggcaggagcaagttcaacagcagcaagggctccaggcagagggaggtgggctctgatgggactcaggggcagcctaaatgtagcagagaactgagaggggatccctgaggccttcttggaggaggtggtggttaagccagctaactttgtcc

SEQ ID NO: 36507 - DNA, 1339 bp, Homo sapiens
aatctgcccgcctcggcctcccaaagtgctgggattgcaggcatgagtcaccgcacccggccaggaactgaaccttggtaggagaaggaaagaaggagttcctgtcttgctttcccgaccagactggaagcgctctgagggcgttttacacttcggtgtcttcccagcacttagcattgtggcctgcatgtaaggggtgttccgtgactgcgtgttgattacactttgtgtgtatgggtgggtgcgttgccacaactctccctgcagaatctgtggcctctggtgctgtgatttaaagactaaagatggcaaagagtggcttttatgagctgccccactcctgattataaacacactctctatgagtcagaggcctgggtgatcatggataagtcacttgccaacagttaactccagactgtagctgctggggccaccgagggcggctggaacatcaccattctgtgcctagcgtttcagccgggctgaggccattttattaataatgatttattgtttttattgcttcccagagatattaaacatgaatcaaataatgcatgtgatgattcactggaggttcccttccaaatttaaaaaagaattaaagaaaaagtttttgacgggtgtgctggtgtggacaccaggcaggcacctgagagccctcccaccttgagctcagccgtgggcagcacagcacagggtggaccttgccctgcagacagagccatgcagcctgcgcaaaaccccagggaggacgcgcgtctcacaaacacctcttcagtctaacatttacaatggtatttcttacaaatggtttccacccgagatatattacaatgtggccaaaccccattcatttgggacacataaattcaaaatttggaaatagttcctttggggctcatgaactgatcaagtttagtcatttctcaagcagggacctggcagaaatgttgctttttaccatctactaagacaagagctaggcagctggttctgctgaacaaggtcccggggagagggacaccagtcctggctcagtgagcagctcctcaggtgctttggaagcctcctctggggatagactcaaagaagttttctatttatttatttatttttctttatttttaaatgtttttctcaaggatgttttttagagctagctcatacctcaggggccacactgtccaaacacatattggaccctgatgaggaaagtgagagccgtcagggtgtgtgacatagccactgtcacccaggcctccagctccattctgcagttgaaaatgatgccctcataacaaagagttcttttgtgtgtgtgtgtgtgtgtgtg

SEQ ID NO: 36508 - DNA, 4923 bp, Homo sapiens
cttggaccgagtgggctctgccctgctgtggcatgactgggcttcttctgtcctttttctttattttctctttgaagaacaggagttggaatttcactcaccctgccccagctggatgtgtctaggccaccgtggtcccaggctctctgcccagctgggcctcaggaccaggttttaatgccgctgcttgggtgtgccgagcgagaagggctcgccaggcagtgcagagattccaccgagcccaggccgcagcccccacctcccgccgggctgtgctcagtgtcaggaatcggctcccaagatggccgcctttcttgtaaagctgtgccaataccccaggcatctgactggtgctttccagctggcactccttttacagattccatttccctttatcctcacaactgctcagtagaacctgcaggcagggacccttattcccattttacagtcaaggaaaataaggcccagagaagttgagacagccaggaccatatggctggagacggggcaggctgggcagagcccccagcagggcccctgggtctgcgggctgctcccagcagcacccctcatatacacaccctcatcctgactgcaggcccctgaagctggcattctggttcaattttacagaggagcaaacaggctgggtctggagcgttgacactggcaactctagcccagccttgcctgactccagggcatggctccaagaccctggaagagctgcctgtccctccatggcccctccagggcgtgctgggtgctggcagggcaggctgaggcactcgacagcagagttggccccgtagtctcagttttgctcccgctagggtgaaacacggttccctggggaagggctgttgctcacctcttggcctggaacatcagggtggaatttgcagacggaattctgccatctgacgcgtagatcttccccccaggcatgggtcagtgcttgagtcattctgcagctggcacaaagagccaggaagaatgcgctccaagatgcctgggagctggcatgccaaatcaccaggcgtcatcagcacagccaagccagggtgggggcctcgggcaggagcagcgccctgccagctctggctgactgcacgaggggccacatctagagggactgatgaaggggcgtctaaagcctcagtatctccagcctgctgtgccctcttacattttctcccaaagagcagtcagcttgcagtatgcgccaagtccccgcaaatgggacgttgggtgattcacatggttgtttcagcttttgagtttttgttgtgtgattgaatagtaatagaattattcttggtgttctatggagcattaccgggtagtggggaggtgggcacactgagcctctactgtttctccccttcacccctccttgctgtcatcaacatgcgttctcctacagtcatgctccgcgctaattcctttagtcattccttccagcattactgaaactggaagagtcttttgtggcatgtggggattcctcgtcgtgcagggcttgagtgccacaggacccagtgctcgctgtccccatgccctggcacacactgttccctttgtcccagctggagaactcctggaacctttaagccctggctcagccctcagctctgtcccatcccagctgacctctgtgctctgcgcccgagctcctgagcccacgtaagtctcttcatgcccatcactgctgtttcatgggcgtgtgtggggggtcacttcaaggagccccaggaagggtctgtgtcttgtccatccacgtgtgactacacccagcatggaacaggactcgggaaccactgaggtgtgggtgaaggaaccagtccagagactccactctcacttcagcctgatgtttctggggtctgtcactgaaaaccccaacttcgccttcaaagcgagatcctgggtgggggcagaggaagtcccaggctctgtggccaggactccacacccagatttccaccgggctcgctctagcctggccctggcacgggtgctgcgtggctctgctccccgcctggcatccggcacccttcacctctgtagaaacacggaactgtcacagggacagacgtacatgggtcgggggttgctttcagaaagtctatggtctcattttggtcctgcctttgagcttccttttcctgctgggttagggttccggacggaaggggagcattctcttgggcgtttcccttttcctgtctccctgttctctccccagaggctcatgtatgtccgtttcactcacctccctttctctgcttgggaggcagctcaaagagctcctctccaaagactcaagctggagtgatgttcgctctatgatgacgccgcactggtccagggaatgatctcactggagagtagcaggaagtcccccatcctgtcccccaccccactggctgaggaccatatagctgggatgtgttcacctgggaaggagattggcaccagtttgataaatggacacccccaagtctggcatggccccaaaactctactctgctgcagctgtttccatgccagaaaacagagatttccagaataccgagtctgaatgtgccttcttggagcagcttcaaatctgagcaggagagcacttgaccatcctaacccctgaccttcctccagcaattcctaaaactggaagagtcacagaatgttagaataagagggatcctagaaaaagaaccactcactcattgctttgttcatttgctcaggcactgtgctaggcgcttggaatacacaaccattcattcaaacatatttattgactgaattgtgtgccaggccctgttttgggccctgtgggggtacagtggtgaacaaaaggaggcagacagtcaagagattttgtaaatatagtgccaggtggcaggaaatgctgagaaaggggtcagggtgagggaccagagggtgagggtggatgctctttgaggtgggtccttggaggaggtttccccacgactgttgagcaagaacatgaacttggagggagtgagccttgcagacactgaggggaaggaagagcagacaggtggagggaactgcaggtgcgaaggccctgaggctggaacacgctgagcagcttctctgactgggacaaatgaaggattctccttcccccaggagctcccagtctaatgaaggaaaaagacaaagaagtgacgcgttcaaagctgagttcatactagaaaaacgctgttagaattcaaagggaagagcagttgtaggggctgggaaaggcaagcctgaggagtgacctttgcattgggctttggtggatgagtaggggttggcagggtggctgaggcgagcgtgccacacgggtgaactcatatctgcagaggcacaaggtgtgcagggacagccacccacacattcctcttcctgtcgcagtagcagcttctgcaagagaaagtacagctcttggggatttcccttttcctttctccacctcttccttctcaccagcttcatttagggcatttcagccttgagagggtggaaaagaaggagagattggtagaggaaggggatttctgtgccctgctgggtctctctctctctctcttctcatatgttatgtttttcttgtaaggttttggggagttgtggggagtttaagaggctggggatgggtaagaagtcaagaaggtttcggttggatttctcaacaacaggtcattggcctggagcccctccagtgggtaaaatgccgtgatgcaacagctttcaggaaggcctccagaaatgagctctaggtcagtgggttgggtttaggtgcaggcacgccctggaactgtcactctagaggtgttactaacctcctctttccccggatctgactcagcagggttggctgttccagctccaaagagaaggaggaaccttttccttctgcagcccctccccaccagcctcattccttagctggggtcagacctggggtcctcactgcagctggcctctggcagcgttctcaggctagccctccctgctgaaaagagaaccgtgtgggactcacaggtaattatgaaatacaaacgccatgatctttcactcaagggcactaaggagtgaataaataaaggataccacagggtgctaatgagcttgaagagtccctgtttggtagccccagatccagggtccctggtatcacccactgaatgctacttctacccagcactgcccacgggaaataaagtgggagacacatacctatgtgattgtaactttttctatagccgcattgaaaagtaaaaaagatgaaatttaaaacttgtttgatttaaaccgttagatcccaaatggtatcatttaccatttcacatgtaatcaagaaagagaaagtattaatgagatattttatgttgttttttttcatatgaagtcgtcaaaatccggcgtgtattttacactaagggcacatatatgagttcagactggcgacggtttatgtgctcagtagccacgtgtggctggttgtgaccatagtggacaaagcagccctagcttataggtggagacacggaggcacctgagaggggcggggtctcagctcaggccctgggagcctgttcaacagctccctctagcgtcggcccagccacacttcagcctggatggtcccagatgcatcggctcctccctgcacctgggtcctggcagccggcacagcctccccgcaatcacccaggggcaaaacgggcccctccttggagaactaccgggaagctaaggctgcaggcagcttgactgtcacttgcttatttggaggaaagaaggacacaggcccgagttgttttgaaaaatgcaatcagccctaggagaggggcttagctgcaggggccgtgtgggtccagcggtcaccgggagaaagaactg

SEQ ID NO: 36509 - DNA, 814 bp, Homo sapiens
agaaagggcctgccactagccaacaatgtgtccatcaccatgtcgcccttgcctgggccagcctcccctctgctgcccatgcaaggcctggggaggaggccagaccgcctgggtccaagccctggctttgcctctcagaggttccggggctctcccagggttggtttacttgtggtgaagcgtgactaataggtaaagtatctgacaaaatgggccccacaggccatggttgctgcttctggctgtccctgctgagagcaggtgtaacgtacctggcatcactcctgccccagagacaccgataacacatgtttgtcagctgtaggtcagttccccaagggtggctgctgtgctactgtaacacgggactgcagactgggcacttaaactacagaactctgttttctcacggtctggaggccagaagtccaaggtgttggcagggttgggtgttggcagggttgggtgttggcagggttgtttcctccagaggcccctctcctagaattgcagatggctgtcattttgctgtgccttcacacggtttcccctgtgtgtctgtgtcctcatctcctcttcttataaggacaccagtcatattggattagggcccaccctggtgacctcattttaacctaatgacctctttaaagactgtgtttccaagtacagtcccattctgagggacctggggttaggactttaacatgggaatttgggggaagcacagttgaggccatagcagcagctgtctcattctgctcacagctggttctctctggccacgtgccagagaggagtacgatgccatccc

SEQ ID NO: 36510 - DNA, 3700 bp, Homo sapiens
acacctttcggtctttctgtaacagctaagttatttaaaatggtcaatcaattagcacaagaggataatgttagaagagataggggctaattcaaacaaactttgaaaaaaatttcacaaatcaattaaagtctgcccaattttatgtttaaacaaagtcagccaacacattctttgtcctccccagacattcctgagaggttctgccttctacactttcaccaattatttcgacttcgcaaacagcacaatcagccttttctgcaaaccttagggctgtctcccctgtgtatgtccgttcatctaagccaagcttttccgaaatcaccgagtcattcacagtccttaaataaacacctctaagtcatggccgagcatctaatatcacagctactacagcaagactatcttagctctacccactctcgcgggtttccaaattggtgtcatctgctctgtagacacagcgaaaataaaaactggaaggaaactgaaggcgccaaggccggggcccgctcgtctgtaccaaggcgagcccgggctctgcgcccctgcacctgctgcgcggccgccagggcctccccaacggctccccggccagcgcgcggccgccgaagggttgggaaagaggccggcgcggggccgcagggtctccgggtgggtctcccctaggcccctccagccccgagctgtgaagacgggggcagaacgaggcgcccggatcacccttatccagccgcgggagaaccccgggccgggaggaagcggcgcctcaaggtcgtggcccgctcggcgaccacgtgtctccgcaggccggcgaggcgcgccgcacacgtgcccggggcccggggcccgcagcccgccccggctcccgccctcgctccctcccttcctccgcggccggggagtccctcacctcagagcgcccaggcgccgcaggccagccccatggggaagcgcagacgccggagcctgagtcgcagccgcaggagcgctcggccgcccccgccgcgcccgtcagcgcctggctcccgcccgccggagacgccggcccgaggtggcgccggagctgctggcagaggggcggcgggcggcggcggcggcggctacaggagggactgacaaagccccacggcacgccgctccctacttatagcaccggcgggtcgccatggagacgcaccagctcaaaccagccacgatcggttccggccgggacaccgccgggggaggggcgggggcccggcggtggccaacccgggcccgcgcggagctggtggggcgccggcgggccgacgtcagccgagccgagcaccgcctgccccacgcgtggcccccgcccccggcttcgcgccccgccctccccgccctgcggccgcctctccccgccctccccgccctgcggccgcctcgccccgccccgccctgcggcggtctcgcccgcctggaactggtccgcgcacgcgcacgacgccgcaggccccggccccggcccgcggcagctgaacggcagagcctgtagctgcacagctgtgcttccacctggcgttcagtacctcgtgcccgagagcggaaaagggaaatcgcgagcggaggaccgatgtgctggccacgtgggccccgccgggccgactccggaccctgctgccgcccattcctccggtgcaagggacctggaagtgatcccggtgccgctctgctcccaccagctagggagcagaggcgcgggagggaaggggcgtcccgggggtcgccagcacgctgcgggcagggctggcagccgcctccacgcccccgcgctggaagcctcgtctttgtaacatcgaggtatcctgtaactagatgggtcctggcctgcggaggtagtttcccctgtgaagccagggactcagccaggagcgtgaggggacccggatcctgagtctccaagccgcccactaccctctgctttaccggatggaactcatcagtaactaggtatctttaagggcggctccctggcgcgctctgagagttacggaagtcccaaaatgctttgaccgaaaacgtctaaacagtgaatacataaagcaaaaagccgcgtgggaaattcgagtccctaggagcgcccaggggacgcctctggaggtggactgccactcactccaggccacgctggaatgcccgcaccagggaggcactgcacttgaattggggacacttttttttttttttttcatttttacctttcattcccttttggacaatccagacaggatatgtctctccctagggtggggatttcgactccttagggtgggagtacagccgatgaagagttaaggagaggagtgggtagatctagatctagccttgggtgggtgggggcggggttggaggagctcagagcactggcccagcgctgcccccaacttgctgtgtgctcttggacaagttatctcccttctctgggcttcagataacccaaggatccttacatatctttatagctacaaagccctgtgaggttttgaaaaacttccttggtacccaaaaccaggtctgaggcacagtcagtgaatacctgtttaatgaatgcatgcataaatgaatgaatggatgatccagctcttcctggagcaggcacgacttccacagaaacagagcaaacgctagccgtaagcagaagtgagtcttcttcctatgtgaagggatgtgggggtggtacgcccctatcaactttatctttacatagtccttgagcgcccaccgggcaccgtgttccccggactagagggagggagaggggggttagctccacccttaacaagcttaattcttgatgagattaaccatcaaaacccatcagagaacgttatagctccagcgctgaatgagacatctttgattctgtggtgatgcggactttgtgcctctctgtgaggaatcactttgttccaatgacgcaattttcctcacactccggaagtgtcctgcactgccagaatcgcccagcttcccggcacacctatcaaccagtcgttcccagcactgcccagtatgcagcctccaggcagagggcctggatgtcttggcaggtagggttcccctagcagcctgggggtggtcagatagaaacattaactggaacgtagaggccagttcttggctcagggagccaggagggctctgactgttgcacatacaagccactcacactgctatcgcccacataccttcctctcccgccagcccaccccaaagcccaaactcctgcccgcatgctgggaaggtgagcccttgcctggagagcccagcaggggaaatagaaggagggaaggaggcctgctccttccccggagctctgctctgcggctgcaggaagacccgcagaggccctgggcagcagaactgtggacagcaaggctggagttgtgaaacccaaccactcagctggattccagaagctcaggtggtggtgactaaacctggccttacttaaaatgcatgactttattgtctttcaatgtattttcagtaaacttcatcctctccattactattttcttttcttcggaaacaagcaacagatctttgtaaaaaaaatacgtgatgccacgcacttaggaatcaccctcatgtggagatgagatttcttttttattttttttttctgagagtctcactctgttgcccaggctggagtgcagtgacgtgatct

SEQ ID NO: 36511 - DNA, 740 bp, Homo sapiens
ttggaaagtttgacattgagagctttctggaaaatgggtttgggcgctgcttacgtgtccgtggttgtactctacttcaccaaacttcttccagaagcatagaagagtggactgtggagtgaggctcatgacctccagccccatgaggactttgggaggttagcttctgccctggcaagggtgccctaactcaggacacctgggtaatggggactagtcacagatgctctagtcccatctggatgtttggccaaaaatagttttccttagctcagtcactcaccagtcctttaaccttgccctttgaatggttttaggtgtttccgaaaaatccaatccaccctccaaggtggaaagtgtgccatctctgcccataatccaaatggcgtgcctgaggcatagaaagcagctttcagggaggccttccttcctctgagcaatggtggcatcatcagaaaagtggagctcctccaaaaggatctgctggaagcagaggacgcccatgtgtaagtggaagtcccaggatgtttgttttataaagtgttacatcacggccctaccttgccccagccctggtgtggctcactgggaagctgctgggaaaggagccaaataggaactaggccagggcctcctggagcccagaagggccctgggggcaggtcagtgggcacacacagttgcagagaagagggggcccttgtctggaggctgagagtttggaagagtacttttttttt

SEQ ID NO: 36512 - DNA, 3404 bp, Homo sapiens
atggcgtgaacccgggaggtggagcgtgcattgagcagagatggtgccactgcactccagcctgggcaatagagcgagactctgtctcaaaaaaaaaaaaaaaagggtttcttcatataattttggaaaatcatgtgctaaatacagataaacaaggtgtgtgtgttggagcttctaagttaaggtaccttcataagtcttcaacatggacatcagtccaaggtttttcccttatctgtctgatggcaaaagtaatcttccagagtcaccatttacatctcctggaacacattttgggaagctctgccagactttctccaccaaggtaggagcttcaagaggagcttgtaagcagtgactattgttctgcagacaaatttccatgcagaaaaaggactatgactagcctctctcccaaggcggcatctggaaggccttgccgccatgtggcggattcaggaggataggatctatgggccattagcgcttctcctgggtgcttctgcctcctcttcccgactacttcaccacagcctccagcactcctgtcacagagggaggaggaggacaggtgcaaacaggcacatttgtatcagcaacagtctcaggcttgatgaggaactgtactaaatggcattttaaaattagatttgtgactgaatcccagttttgccactatacaattttaaacgacattaaagcatggattttctctcttcaattttattgaaattttaggaggtacatatgcaaacataggaaaaactcaagattctacctgagcatatctaacctgcagtataaaaagagacttctatgaacaactgcccgaataagtaaagtttactgtaaactagaactcaagtaaaactgagatttaataattaaaatgtctgtcaagtaaggaaacacacacatcaaacattaattgacacagtcctcaaaacagtttcaaagcctctgcttgattcagttatgaggccatttaaagcaattcttaatactttttttataaacaaaaatataatttcagagccatcttattttcattttactacaaattttaaactgatcttcaactcagtacctcccgatttagaaacagtgggaaaaggcttgtattttcatgttactgcaaggtaggtgctcactcaacccagcagaggggcctctgcaggagctgaggtggctgtgctgcagacctgggatccttccaggctgtgctgctcctgccccatttgacatcacttgagtttcagagggaatcaacgaatgtttccaggtataaagaaaattgataagaaattaggaacaggcacaatgaggtccctctgaatgtgtatttggcttacgtaagtgataaatgtaagagggcaaatttgctctcagcagacagaattaactgaaaagctttttgcacttagaataatgaagttttttattacttggcaagcctcctggatgcacgttgggaaaattttagagaaatcagagatgaatgggtacaggatgtgatgaggtagttctccagagatgacacacaaatgaccaataagcacatgataaaatgctcaactcattagtcattagggacctgcaaatcaaacaacacaccactcacacccactagcatggctataataaagatgaccgacagagacaggtttggtgtggatgtggaaaacctgcaaccctcatacgctgcttggtgggaatgtaaaatggtgcagccactgtcagaaaacagtctgacaggtttctcaaaaagttaaatagctacactagcaattctgctcctaggtatagacccaagataaataaaaacacatgttcatgcaaaaatttatacattcattttcacagccaattattaatcgcttaccccaaaagaacacaacccgtgtcccttaaaaaacgaatgaatagcaaaatgtgttatatacgtacaatggtatattattgagccataaaaagaaatgcaattccaatgcaagctacaccactgaatgaataaaccttgaaaacattatgctcagtgaaagaagccagctatgaaagacttcacattgaatgattccatttgtatgaaatgcccggaacaggcaaagctatggagacaggaagtagattagtggttgccaggggctggcggatgaaaagatgggggtaaatgctaaagggtatagggcttctttctggggtgatgaaaatgttctggaattacacagtgtgatggttgcccaactcagtgaatacactaagaaccactgaattgtacactttaaaaggatgcatatggtctgtgaattatatctcaattttaaaaaagaataatctccctactactgcttaaggaaaaaaaaagggatgaaatctttgtcattctgttctatttggtgactatattgaagaggactgactttgaatgagaaaaaaattttttgagaaataaaactgtatccagttaacagtaaatatttaagcagcttactcctcctacaatgtgacaggtattattaccactggctaaaaaaaatggatcttataaatcaatttagaatagaatgaccacgggcagagtagtctgtcttctaaaatgatagtatctgggcaagctgggtgtgactgtcacaagttatcagaactcgccaattcccggtcttcttcaaagtccatatacatgcgaggtagccctacatcctcagagggtcaggatgtagtagccctacatctttagagggtcaggatgggacttttgctttataagccgcacctgaggctacagagcaatccagaaaccaagacggctggttcatctccaacagagctaactccagggccactaactccctgtctcccttggaacaccagtgacattcctggctctgctgcagtcacacactgtgctcttggcccaccaggggctctggttgcaaggaaaatgttagaacagggaacacagcttcctcaataggggaaaagcattgagaaggctgctctgaggacacacacacaaacactattgaaaggctatttttcttttgtgaattaaaaaataacaataaaagacaactcaccctctttaacgtgaatgtcaattgtttgctgccaacggtggtgtcggatacactcaatgtcccattttttgcttcaattttcaaacgatcttcaagggttttgctatgggaaattcaaaagaatgccacattaatcaaaattatgttttaatttaccatttgaaacaagttttgattagaattgatagcgaagaaaaatgtttacacatgtaaacagaaaatatcattcatttaacacaataaatggaaagaattaggtgcattcaaatagtcattattcatattccagagatagactgtaaaacaatggctggcaaaaacacccac

SEQ ID NO: 36513 - DNA, 1209 bp, Homo sapiens
gctactgagacccatttagatagctcaggactgatactaaattcctttttatttgtaccattttcaatggaaagttttctaaactgtactgtaaacttacctgttcacttaagtagatgacagagaatcttacacatttaggactgtcttattgttccttctctgctacaggcttggaagccagatgaaacggcttactcagaattgtttgtcaatcagagtaaacagccctgaacactgctggaaaaagctgacctgtttgtgatggactctgactctgctgaacagactactttactatttctccactgttgagagtaaacaagattgcaggcagttgagttctgaatattatttgtgtgacagacctatacaaaagtttagtaaatcataagatattaaggaacttggcctgtttattatttgtatgtacctaaaaacagataaacccttacctaaaattctaagatattaaatgcagcaagtttccctgattaaacatcatttccaagaaagacttacaacgaagggaaaaagaaaggtaagatcgagttcctgatcctaaactagtaaggaagaaaaaacactgcaaacacgtgctactaggcctcttctgagggctgctcggtagtgctgaaagtgccacaggagaggacagaaaaaggaatcccaacaaaagacaccccaggaggggccctggggggtgcagcatcagggagggggcttgaaagatgagtaggtttcaacaagtagaaatctgaagaaacagcatttccagccgatgggagtggtgaatagtctggcgacataagaatgatgcaatttcaaaacaattttttgattgggtcatactgtaaaggattttaaataccatgactgttattttgaagatataaggggaaaccactagcgaagaggaggagggggaggaagaagaggaagagaaaaaggaagagaaacgaaggagggagacagggaaggagggaggaaggagaagatggatgatcaacagaagtgtgcttcaagactcccagatgacagaactggccaggtggtggttcatgcctgcaatctcagcactttgggaggctgaggtgggaggactgcttgaggccagaagttcaagaccagcctgggcaacatggtgagacgctgtctatacaaaatataaaaaattagtcaggcgtggtggtgcatgcctgtagtccc

SEQ ID NO: 36514 - DNA, 519 bp, Homo sapiens
acttaagaagacatagttttgtttggacatgggtacaccatttccactttaaaattagccaagttcagctaaaataaaagactaatcctcaaatggggaccctagagcctctgaaagtaccaaagacagagtgaatgctatggccacgactctagaatatgcttctcacataccaaccaagacaatcagcaccaaaagcaatgatctccagtggaaagagtgctaggcgatgagtcagaagtggacaatatcactatcaatcctatcgtccacatgcccttggcccaggacctagagtcctggctgttggctgtcggcatcatcaggtctcttctgccacctagagcttgagcctgtaactgcgctggggcacctgtgggaacctcgaagcctcatatgcacagcaactttagtcacttactcttcaaagtatacttaatcatttctttcagtatagtgatatacttctctacttattcctttgtcattttcttcacatattttttttggagacagggt

SEQ ID NO: 36515 - DNA, 1851 bp, Homo sapiens
atgctataaggtgacatatttgaaaaccactttctaacaagtgcagagtctcaaaatggaaatgagcttccacaaaaggtagtgctcagtggtagtgcttggacagaggctggatcatcacgtataagaaacaaaagacaagtttcagagcctaagtgtgtcatgctggacaagtcacccttccccttgctggatctcagctgcatattaaacgcattattaaatctcagctgcattactaaacacgagaagattggaagagaattaccgacttgtccaagccctctccaactttaagactaggaatcaggttaagttcaacaagtctcgaaaatactgtcctctacaccataaattctgcagatgcgaagtctgtatctcccttgttcactgttgtatccctaagacctggcaaatgatagggactccacaaacagctgatggccatatgggggagagatgtgtcaacgaatctgccacgttttcctcctcgatgtacggcagggactgtgaacacccaaagaggcccaaatggttgcgttctctggaacagagaactttacaaaagttccagcaaagctcactgaccctgattatcccttggtccagtttctggcgcggtgacggcagtgtccttgtctcccaatgccgacacctcccccggaaattgtcagccgcctctgggcctccccgagtcggggggtgaccagcgtccagctaaaacagaggctagggccgaggagaggggcggctgccccacgaggaggacgacccccaagagctcgagagtgagggggccgggaagtgactcacctcaggaagggacttgccgcagctgaggctgtaaatcttcacctcattgaggctggagacctgcatggcgccgcacaacactgttcaagtcccgggtcctttcccaccagcgtgctcgagcaccgtaatcccgggacctccgagcccctgctccgcggcgtgcggccgctggcgccgactgatgacgcacttcctggagccggaacacgcgggcaagttcccggaagagggaaggtggctgaatccgggaagagcggcggccgggagaaaaactagtgaggctctgacaacccggcgtggctgtcggcgacgctgctacgggcaagactagacacaagccgggcgcggtggctcacgcctgtaatcccagcactttgggaggctgaggcgggcggatcacctgaggtcgggagttcgagaccagcctgaccaatatggtgaaaccccgtctctactaaaaatacaaaaaaattagccttgcgtggtggccggcatctgtagtcccagctacacgggaggttgaggcaggagaattgcttgaacctgggaggcggaggttgcagtgagctgagatcgcgccgctgcactccagcctgggggacagagcgagattccctctcaaaaaaaaaaaaaaaaaaaaaaaaactagacacagctctccctgctgttagcatcccgagcggcaggaggaggctttcgagtctctgcccaggccgagatgtcatcctcccgggcgggggcgaggcagttcagcgagtgaacccagcgaatgaaggcgaccagggtgcgaattccgagtggaagtgtattctcttctctcctccagtgtttctgcgatgttacgttagaagtactgtaggccgggtgcggtggctcacgcctgtaatcctaacactttgggaggccgaggcgggcggatcacctgaggtcaggagttcaagaccagcctagccaagatggtgaaaccccgtctctactaaaaatacaaaaatcagtcgggcctggtggcgcgcgcctgtaatctcagctactctgaag

SEQ ID NO: 36516 - DNA, 589 bp, Homo sapiens
attacagacacctctttcctttagccagagaatggttcaaatgtcttacagaactaagatctttttcagagaaattgctcacaaaagttagtgacagttgtatttatttttttaagttacaataaaatgctctcaagtcctttgaatgttccaacaaattcaaaacttcattttctgaatgttttacataaatgcgaactacctgttcgcattggtaacctgctgctgtatttcatgtcttaacggctattttgaggttcattaacaacatagaaagccttgaactgtataaccagctagattccttaataattagtcactagagacagcccaaagacaaatattgggcaggaaatcagttctcactgagcccggtttccatgtaaaatctctgttgtggtgggcataggtggcaccatctaaagaaaagaggtcttgttttttgtttaaaaaagtttgtggggaggaaagacatctgtgtatcacttcaaaatattgatttactgctaaacatcactctgaatttatgatgtggatactaacttcatacatttatcggcattgtccaaaatattttattctttaatgg

SEQ ID NO: 36517 - DNA, 2099 bp, Homo sapiens
gaggatcactcgaggccaggagtttgagaccaacctgagcaatacaatgagaccctgactctacaaaaaatttaaaaattagccaggtgtggtggcatgtgcctggatcccttgagaccaggagttccaggctgcagtgaactatgatggaaaccctgcactccagcctaggagacagagcaagaccgtgtctcaaaaaacagaaagacatgtactaactcattaatcctcaggacaaccctaagggagtactattatcagtccctaaaatggtgaacaccgttgaaaaggcactggcacagagtggttaagtaacttgctccaagtcacagagccagtaaatagggggaaggtggtctgaggccagagccgaggttaaggactgtcagagccaaggctgtgaccaaggcgagcccggcaaggacaggaccctcggcctcgcccactaagaagcagacatttacagaattcctaagacgccgcgttccatttcgtttttaaggagtccgatcacatgcgaagcgcccctgcgtcttaagcccagcttttggaaggcactgtccctttctaagggaactatgggtccttatttcaggactgagatttaacatttcagtttttcgtttctgagacagagtttcactcttgttgcccaggctggagtggcgcgatctcggctcactgcaacctccgcctcctgggggttcaggagattctcctgcctcagccttctgagtagctgggatcactggcgcgcgacaccacgcccgactaattttgtatttttagtagagacggggtttcgccatgttggtcaggctggtctcgaactcctgacctcagatgatccacccgcttcggccttccaaagtgctgggattacaggtgtgagccaccgcgcccggcttaacatttcagtttttaaaagtaggagctgcataaagcaggtggcagaaacaagcagcagtgcaggacgcccgccaacctccgtccccacgcacgagttcgagaagagcccggaacaagctcccctgcgactctccgggaatacagaccccctccccgggatccggccggggctgggctccgcggctctcccgcccggccctggaccccgcgcccggctccagcgcacgaggctcccgccccccgcggctgcggaagcccctccccacgggcgcccgagtctcccgcgcacccgcacctccgccggggcaacctagcagctcctccggacgccgaggcccgcgcctcccgcccgccaggcccacttccggccgcctgcggccgcggcccgccggggaacggcctagagattcgaaacctttcaggccgaccccagctcgcccgcctccctccgctggcccgcacctaccgagcaccaggagagccatgccgagcgccgggctacgtgcagtccccaccgccgccgccgcttcagccctgcagcgtgccgcacgccgcgcccccgcgcccacgtcccgccccaggccagtccggtggtccgaggggcggccgcgcgggggcgggccggaaggcgctcgccaagccgtggctgcggctcattggtccgggcggacatcgctcactcacatatccaatgggaggcggccgggtagaggttaccggtttggttttttttcacgggggcggtggcgagcagcggaaggcggggcctgctgggggcggggctggcagtctcggctcgcaccgcctcagctcctccgggccctctcggggtgctgctcggaggggagtccagtactgggcgtttttaccttagttccttattctgcacccccccaccccgcctcctccttgcctgtgtgcgcccccaccctctttatcccgggggagcgtgactcggcctcagggcacccacggtcctgggagctgacagggaattcctcttgtgcccgacgaatattccgtggacacacatttgctccgcacgcgctgtctgcaatgtaattcgacaagtttctattttgttgaattacttttgaaagttcttccgtccagggcgcatggctctgcagagccttctcctccttctctggagaaccccagggacttaagcggtagcctcctcgctgaca

SEQ ID NO: 36518 - DNA, 497 bp, Homo sapiens
tctgcccctccagtgtgggtgcgcagcttcaagacaggggccaggactgggctgtgtcccagctcctagcacggcctgggaaaatgaatgaatgaatgttggaatgaatgaacgcatccgtgaataatatgctgtggacctccgtgcctatcagttctccatttgttttggctgaatgcttgtgtttgaactggtggaactcagtgagtttgcaagcctgcctggttctggccagagggtcaaggttctctcgggcaccttttcctgcgggcacagctatggggcaggagtgcgtctgcagggacatggggtggcacccagagcctttgcaggaagcagcagggcctttcctccctggcggcctggggagtgcagccaagggacaaaagaggattctaagttgttttctggagctcactctctcaaaaataaaatccaaaacccagcccatgagggcaaagcaattttgtaggagatacttaagtcttcagttaaag

SEQ ID NO: 36519 - DNA, 1544 bp, Homo sapiens
tttatttttttcaaatcctttccaccttcctgtggctggatccgcacatgcagaacgcattgttagagaaggccaactgcatgtagcaggtcctcaaagaagaatgaataagtgagtgaatgagtgaatgcacaaagaaacaagggaacactttggtgactacgggaaggaccgcatgagtgggagtgggtgaatgacggagggagcagacatgggaatgaatgagtgggtgactgagcaaatgaatgagtcagtagatgagtaagtaaaggccaggcatatttgttggcgacagtggcagaatgaacgaaagaagcccagcatctcaaagggcaggatatggccccatcctctgctgcagtttcaggagtaaagtaaacaatgacaaagcttgggtcaagtgtgactcacgggatgcaactaaaacaagcaaatatcactgtgagctgcagggtgcattcccagctccggccatcagaaaaccatggcaactgagcccttctctcctcttaaggctccaaagcagaaggcttaccccaagaaatggggagaattccacgttccatgtatacgggacatttgggattttctttctgaaaatgtgggtcccgagatgtggccccttcctctcacttttgcccttttccgtcagtttctttctcctcgaactctcctaaggcctctgaagcattagtttacatttgaaaaatatatgttgggctgtgtgaccttggagaaatcactccacctctctgagcctcggttttcatgtgatcaaatagagatgatccattcgcggcatagcattgatgagataataagcacatttctttttgccagaatttagattttattttgtgttgtttgggtacagtttggtggggtggggggacaggggtaaggaggtggctggatgctgtaagaatttatcagtgcctgtctcaggctgctccaccagcctgggagttcctggtaggtagattctcttattcatctttgctccttcctttattttctccatttaaaaccattttctgggtgcttgctgagggggccatgtgctatgtagtggggctgctaaggttaatgggactcagtacctgcccccctctgcccagaaagtgggagagggagccacccaggtgagcagggaacataaagagctctggctgaaatggtggaagtctattctaggcaccaacaggccaagatggggcagagtggtgaattacatctgttgggtgggagaagccatggagaattgagtagggcatccccaaggccaagtgggttagtctgttctcacgtcactataaagaactacctgagatggggtaatttataaagaaaagagatttaattggctcacagttctgcagtctgtacaggaagcatgattggggaggccttaggaaacttacaatcatggcagaaggtgaaggagaaggaggcatgtcttacatggccagaacaggaggaagagagtgaagggcaggggagtgctacacactttgaaccaatcagatcttatgaaaactcattca

SEQ ID NO: 36520 - DNA, 735 bp, Homo sapiens
ggcggtcacttaatcttgccggtaagggcctcagtttcctcatctgtagaatggcgttggaaaggcatggctgggaggtctcagataaagcagagtgctgtgtgaacgctctgggtttgcagacagagtggatgttcctagtgcattgcactcattttcctcgcccaacataagctcatgacttccgccatcgttcccaaacaagcaggaagcttcacactgatgcctgatccacaattcccaaagcgccctcagggccaccatttcttgcgagcctcgcagcatccacgagggggcagcacaggactaacatcgccccacggcctgacgggctgccggaagcaagtgcaataatggtgggggtggcccccaggagccccagctttgctccctccccctcccccaccctgtgcggaggactccggccttggggtagggggctgctgaactgggcgtggcatctagtcaggaactctctgccccccagccctagggctcagatcacacacacacacacacacacacacacacacacacacacacacacggggcccgcccctttcctaggagctgtccgttcccaggacaacagtcaacacagcacaggcgggagttcaaaacgaaactgggctcaaatgctctccccagcccggagagccctgtccccatcggccactctgagctcgaggcctaaagggacagtgaggaggaccctgcccaggctctcccggggtt

SEQ ID NO: 36521 - DNA, 1882 bp, Homo sapiens
ttttctcatttagacttgggaggcaggactcagcacctgtttttttttttccataggcggaggtgatgggccggtgaggctggagagaaagagcctcggccagaattccgaactccgaagctgacccagctcccgtccctcacacttcccggctgagatttatggcacaaaaccagggatcgtggattctggcattgcattttggtgcttttttgcctgcttcataaccaggccctaatacacaggcgattttcagaggttggaaaatgcgtccttccctttccctcagtttgtggcttagacggccacgtccaagttactttatcaggagaaatccttaagaaacagtttcactgtgaagtgctcaagttcaaggcttccggtggcccctcagggcccacgccgctaggagggaagccttcagtcccaggctggagacaggccgcgtgctctgaaagggcacaaatgaggcgaccctggggctctggtcccagaaagtctctccagcctggttccccacctgtaagtcgggagggtgcactcagcccttaagcaggaggctttaactcctgaaatgcttagtgagagaaactaaaacacttgcagggagggaaaaatcccggcagaatggcccatcccccggggccatttgcctctcggtccacccaacccgtggaaaagccggacttccagggcggctcccggcggcggctaaactatcgggtggcaagaacgcggaaatgcgaagcagctgctggtggagcccgcaggccagggtgggactgtcgcccggggcggggctaggaggggaggggcggggcgaggaggggcggggcgaggcgaggttggccacgggattgggctaggtgaggccgaccgggagggggcgaatctgggggcggggcgagatgagggtagtccgaggactgagcgagcccgggcgggcccgtaggcgaggcgagatgaggctggccagggggcggggcgggcccgggcgggaggggcggggcggggcgggcccgggcgggaggggcggggcgggcccgggggcggggtgcgtccaggggaggggcggagcgaggcgggtccggggcctggcggcgcgcggaggggcgggccctggccgggtggtcccgggcggatcccgggaaggcggaaggcttcggcagagctgcgccgccgaggctgagcggtcccttctcgctgcggccgcccaggtgcccgcgcccgtggcgctatggaggcggcgctgctggggctgtgtaactggagcacgctgggcgtgtgcgccgcgctgaagctgccgcagatctccgctgtgctagcggcgcgcagcgcgcggggcctcagccttccgagtttacttctggagctggcagggtaaggcccggggcggccggggctgcctcctgccccctcgcagctgctgccggctgggagcccaggagagcctcggctcgaagtagggcggggatgatccccgcgcgccggcgtcgcagctgggcggccgagggtgaactagggagcctaggggctcggggtgctcttcccacggccacccgccacccgcgtacattgtttctcaccaagccccgcgtggcacgaattgattgcgcacgcccattttacagatgagaaaacagacccagcggaggcagcccttggtgcgctagtgacaaaacctgctggccctgagcaaggccatttgcacctcgaggctgtcatattcattgtccctaaactcaccacgcaccgtcaacctcgttctcgggcctcggtttcctcacctgtgaaataaggggttgaactaagaatgtatgaatctcttctcttctcccggtgattggtggggaatctttcctggttatttaatgagattcct

SEQ ID NO: 36522 - DNA, 468 bp, Homo sapiens
aaagtgcatttctctcctggcaccagaacatcaatgtgttcaccaaccagtaagctccactgagtgtcagtatccagagtttctataagggccccattacacagacatgattaattaaatcactggccgaatgattaaactcaatctctaatcctcccccaatacctccttctccctctcccgggaggtctggcagctaaaagccttaatcttctaatcatgtgtttggtcttttgtagcggtcagccctcatcctgaagctatcagaaggacacgtgagtcacctcactggtgtaacaaagacactcctatcactcaggaaattccagggcttttgaagctctgtgccagaaatggcaacaaagactagatatattatttattataacacaccatacaatggaatactattcagcactaaaaagggatgaagtataacaaacgttacaatgtggatgaaccttaaaa

SEQ ID NO: 36523 - DNA, 587 bp, Homo sapiens
aacatggcctaaagatactttcttttcctggtaaatatccctgtaataaatactgtgtatttcatttctgtttttaatttagcccatgttatggtaatctgatcctaaagtttggtgagtttttttaagggaagtagcttgactgcatttgtgtcacctggtgttagcactgattacaacctcacggaatactaaatgagttctggccatcactgtaaagtcttatttacaatttttaaaaaaaaggttaaagcagagttgggttcaaagtcaagcagttttaaatgggtgattcctacaattaacatgcctaatcacatggcttagaattgatgaaagatattgccacattattgtgacatatactgcaatactgagagaattcctggcgtacacaactcattgactcgtagataaattccgaatatgaacagcaaataaccagattgcagaacggttaccaaatggcaaacaaaatcatcacaaaatattctattttttgataattcctgagaatgcaaaataatattttatatcctggcatgctcaacattacttactacaaatccacgctctgcaaaattcac

SEQ ID NO: 36524 - DNA, 3489 bp, Homo sapiens
attatgattaatatcattaaagatctaagatatcaaagtgaattgcaaaacgtttccatctaggatttagcatgaacctgatgaatacttgagatttgctgtactatttttaactaaactttctggccttaggtcaaagttttgctagcaaaataccaaagtgaaaatgctgggagtgcagcccagagtctccgctttagcctaggaaaagctatgccatccatgcaagcaatcttactcccgattaaagactttcaaagactgctcccattaaaacataggaacaacacattaacccgaaaaacagtaaaacatcaaacacatgtgacacaatatagcacatcattcattactttctgtacactgtgcagaaagacactatatagctaaagtcagttcctgcattttgaccaaacaggactgagtcactctgcaaacgatgcctgaaacctcaaaggataaccaaccgcctctgaccaaaagccagtccgtccgtccctggaaagggaggaggcagtttttctcatcatacagtaaggtttattccaggagggaatagaactaaacatctgcattccagcacagaatgtctaacggatctaaggacctcccaccctagttctagtcttccagagtcaatttaatacacagagtatcgttttcacctttcttcccctccccagggtaaaagtccacacccccttttcccataaatgcatctacactgcacactactcaaattgcgaaatacaatcatctatcctaacaaaaataagaaataagccagcattctacggtgcatttctattttgtaaaacatgctcctttcttaaccaagagccaattagcagcctttacggtgctattaatctggatttcaaaggtcgttataggaaagagacgcaatgaagaggacagatttattccactccacaattcagactgattttttggctctggcgcaataatctcagggaattaaatttacagcaattaaaatgcactaaatagcaagtatggaatgctcaaacgcaagtgaaaacagcaaaactttagctgtgtgttccaagatttcagactaaaaggagagagtgagggcggctctttgtcatgtaccccagtgagtactcgcaacagggacagcatcaggtttctttctccctcgctcgcaccaagtccccacgtagcatgacactttcaaatcagctaacctggtgtatgaagcatggccagtcctccacccacctccccagagtgggcaggcggaaggagaagaggggtgttttcctcccagtgctgcaagaaaggagcagccggggatgacactggctccagcaggaggtagagggaggaatcaaaggcgggtcactactcttggaactcggtgacagaatcgtttggtctccggccccggctgccggaagcagggcggggtggggcaagacctccccctccccacgggcggacgggcacggagggctgggcggagaggggatctgaggtgtgagctgcaacgagcaagctcccaggccccggccacctaccagcaagctctccacgttgatgggggagcgagggtctcggatcagcgcctccagcttcctctggcggctcgcgcctgccccgtcccccggcgcggtctcgggggcgccgggcattttccccgtcggcgggggccggctcatgccgccaccgctggacccgcactcaggctcctcgcgctcaggtcccgcagcctcggggcctagcaccgcccccgaaccaccagctccggccgggactccacccgggcccaccgcctgcctctagctccggcttcgggtctccaaggcggtcccccgcctgggggctgctcccaggggcccgcccggcccagcccggcccagcccggcccggccctgccgggagcggcggggaacagacggcgtccccgcccctcagtcagattcgcgccgccggtccgctggtcctcagcgagtgcccgcaggagtcctcgggcgggagcagggaagtggcgccgccaccgccgcggcccggaccgccccgccctctggggccccgggaggctgaagcccaggcctgggccactacggccgccgccggcccgctgccatggtcgccgccggccgccttgcagtccctcagccagctcccggcgcacacactcccgcgcggccgcccgtctccggccgcgcgccgccgctacccacaagcccctccgcccgcagccgccggcgcgcgtccccgccggccctgcgcgcgctccgccccgccccgccccgcgcaccgcgcttcctccctttctttcccttcctgcgtctgtcccgctccgctttctcctctgcgccccttcctcgcccgccctcgcctcctccccctggcgaggttctctgaggcgaatagccgggcgcgcggtcacggccgagctcctgctgggggaggggagacgcacccaggccgggtccttccgcgcgccccctgcccctcccgccggaccccgcggactaccccgcggccccgaggcggaaccccagacgccgggcccagcgcaccgtgcgctgggggggagcccggccgcgccccccgccgcggcccccgctgactcagcgcgcagctatgcgggcctcgcctcacccgcgcccaaataatagcgaccgagctcggcgcccgcgaggggccgcagggccgggggtttcgaggcgagcctgagagggggccctgggtgtctgggattccgaattagcggaggcgggtggaatcctagtcctggggcaggagggcctgggatcctgaaagcgtttctgcccggcttagacactaaccacttcaagagaacgggagagcaccggaaaaaggctttccagccgcaggccttcgcggggtcttctccttttggggggcggaagaggggtggttatcgggaccgttccgccgcattcctgccctctcggcggccggtgccatcgcttagatccgcccagggcgcaatccgaaaattatgtgccaagagctataaaaccgttcatagagcccctttgacccagtaaacccatttaaggaagtacatttccaaggaaatgatccaaagggcgaagaagggggagaacttgcagaaagatgttaacagcagggctattcacaatgttcgtgatgaccaaaacctgggaatgggcccagttgtccaacaattgagtaacccaaacaggcgccttcacattaacagcaagaatcctggcaggtatgcagactgtgtcaaacatgaaattttggcaagtacatgagaaggtatattagaaataaatgaaacaaaaaaaatcgtttgtacacactaaaactatgtaaaatgagcagctataagaaccagagaatacagtacttcttaaataaatgggatttttttctgtaaagatacttaagaacaaattaaatttcaaaaaatggaaaaaccactccgaaaagcaacaatctgatatccattaagtaataaga

SEQ ID NO: 36525 - DNA, 596 bp, Homo sapiens
attaaaatatgttacagtttgtgaagatttttttccagtctgttgcttgtcattcagttttgttttttacctgttatgcggtcaaatcggttgatattgtcctctacagcttctgggttctgtatctgtgttaaggaggatttccaacccagtttttaggtcacacagaatactggaattgcaacaggttatgaggaaatggcagtttcctaatattctcagctcagctcatcccaaattagctgtggaagggggttccctgggcttgctggtctccaagggaactcctgctgtgactcctgttgccacgcgactcgggccagggttgactgctcctttctaacagagtccccagtgtgtcctgagcacagttgagacaggcaggaacttggacagaaacttttgttcaatagtaaggaagaacaatggaaaaataaacacggaaaatacagggcatttaaccaggctggcctatcaatggataaggcttggattgcaccataactgttcatagcttgctctgcagaacttagaaactccactccgtttcatatgaatttcttttctctgtctcttcattcccaatggtctatttg

SEQ ID NO: 36526 - DNA, 708 bp, Homo sapiens
gttttccttattcccttccatgcctagctggattgcagagttaagtttatgattatgaaataaaaactaaataacaacagcaacaaaaattcagcagagtttggaaacagaaagagagaacattcctccaggcagaatgaggccaggagtgggaaagtaggaagtaaataaaaggaaaaatgagtgatgactagggaaaagggcatacaggtggtcagaaagaggatggggggtagtcagtggaaagcagatgagggaaagcccaggtcctatactaacttgcaatgtgatgtcaaagaaactaccacagtgccgtcctccaggactcactgcagttgcaaatgttaacataggataccatccaagggctttctgatcgcaccaccctctgctactgtcgcgctatgtaggcaggcaggtgggagggaaccttgcagcagtcatgggcaagatcgtgtggaacttgcgacacagcagagaggaagaaagccagtttgggggatattttactcatccacaggccaccatttgtaattaggtggtatatgatcatgattaattaaaaacttacaaagcatacaaagaagaaaactgtagttaaagtgattgatcattagaatactgggatacacttagtttccataaaagcctgccttattgcaaaatgaggacccactttaaacttcccggcatttagagtggcatttt

SEQ ID NO: 36527 - DNA, 784 bp, Homo sapiens
aaagtgaatctagaaaaaatatgagtcttgagcaacaatattaattggagggtcctggacgtgaagtcataagtatttgaaaaaaaaatgattaaaattaacaatgagaaaaataatgcaaaactactgtaagataagtggagttatttgaaaaatgtgtccagctgtgtgaatttaggcaactcccttcccttcttgggcctcagtttccccatacgtcaaataaaggagttaaacacgaggatgaggtctagaagcctgtcctgccccgacagggcccatggctcccatttcaccactctttttcctctgttgagaacagcattcctgggagggcagttgcatcactttggtgtcggctcctctgatctctgtcccctgtgtggcctctcagagcacaggggctggagaactgaggcagctgctcagctctggcactttgtccggctgcggccagagatgaaaggattcagagccagcctgcaataaagctgggcctctgggtagaggtcatccagacatgccagtctcactgccactgctgggaacaggcctcatcaaacctgtcacagatgctcgccaggggagcccctcaacgcttgtccagcctccagtacacaccttcaggtccccacagtggtcattccaagaggctcatctgtggtttgtgttattctccagctcaaagtgttggcaatgctcctgtgttgagctacagcagtgtgtccctaagagacacccattctgagagacactcagctgcaggaacacaggtgtggtcact

SEQ ID NO: 36528 - DNA, 1795 bp, Homo sapiens
gaggatcactagagtcaggaggtcaaggctgcagtgaattgtgatcgtgccactgtactctggcctgggagacagagcaggagaaggcacctgggaggcctccctgagaaggtgatgtttcacatgagacctcgccaatgagaggattcaaacaggccaagtagggcatggcacgtgctcttggcctggtcacgtgacccattggaactagtgaaatggagataacctgaggcctgagccccagggttgtcatggagatgaaactatttaatgtgtataagtcacctggccccgtgcctagtacatcctggaggcaccgagcaaatgtttgctgaatctggttggcaagtccctccctgcccttgcattccagggttccccatttctctgtgactttgaccccagggaaccccacccttgctgtagatgcttgctgtggcctctctggctacctgtagaaacagagaccagttgggagcagggatctgcctggacccatgaccctggcttccttgcgatgctcgttgatgcctggagtcagcacctctgtcagcaaagcagtcacaggctgcttctctccagaaggaaaactgtcagctctgtcccacccatccacatgaatgacaacaatactgaactagaggcagatgatattggggaattcgtacatagagcaaatcatctcttcattgtgctttatggttacacatacacatctgttttatatcaactgaccatcacttgtaactttgtgagccagacgggcaggtcccaaaccatgctgtttcacagcagaaatggagactcgcatgcttgtgtggaaaagtgacttgctaagagtcacgcaggttgtcagagatgcagacctgggcatctgcctctccttacaccatgacataccttgttgaatgactgagacaccagtgacaccggtgacaggacgcaggagaggacttggggcagggaggcgcctgctcataaccctctctgacttccaactgcaaacccttactggctgttgtcctctgccaggcactgtgctgagccccatggaggcaccagcctcttcgatggtggcattttaaggcctacaatggcagagaaacgtcgtggaggagtgagggtatttccagccatggctggaaactgaccctgaatccgagcgttctctggtctggacagagtgccaggcctgtggcaaagcaggtaacctttgaaacggaatctgatctgctgtcggccactgcccaggccacagtctgccaaagggacagctgaacgaaaggctcaacttcctccttcatcagctccaagttccaggacaagaggcagaaccaggtgccaccgagcctgccacaggtaaagctgcttctctgtcttaggcctccctgctctcgtcctcagggcacttctcaccccctccatccctgctgacgctgagtgctatcacccccaaggaaggacgcttcctggaatgcccagcctgccacccaagagactcccctcagggcacccactgctggatccaacaggtctgccccagtgccagcccctagaaccacaggcttctgtaagcttcgacttccacatgcaaaccaagtacgctcagccttttaaagtgcaatcctctttgttcagaatgttcttcctcctgtggccaggctgactccttttctcaatcctcaggtcccaggagggctgtcactgcccagcacctctccccaacctcctgtgtgctctctgagcattgtgtacccgctcctggtgccacacagactcttgccatgacctcttc

SEQ ID NO: 36529 - DNA, 2108 bp, Homo sapiens
tttctatgcatgtctttctacatataccactgtgttgatttgctagggatgccttagcaaagtaccataaactgtggggcctaagcaacagaaagtagttctctcatagctctggaggctgaagtccaagaccaaggtgtgagcaggctggttcctttccctctgtctccacatggccggccctctgtatgtgtctctcctaatggcttcttcttctaaggatgccagtccgatggaatctgggcccaccttaatgacctcattttaatttaacaacctctttgaaggccctgtctccacatacagtcacattctgagagtgctgggttagggcttcaacatatgaattttggggggcacatttattttggcctgtaacaacctcctacatgctctttctcctacagataattttttgggagataatcaacaatgctgcaatgaatattctcacacaaggttcggtgtcacatttgctaactagagctgagtgtatgtgcctgggagtgaaattgctgggttattcgggttgtttattgactagaccatccttttctcattgatccataatgttatatgtcaagttgccaaagacacatgggaaatgtctgggcttaccagcctgtgggtctgtttgtccctctggactaattcacaaaggagagccctctgttagggactgaattgtgtccctccagctcccaaattcatgctctgaagtcctgatccccaggacctcagaatgtgacctaatttggaaatagggttgtttcagatgtgataagtggagatgaggtcatcttggagtcgggtgggtgcctcatccaatatgcctggtgtccttacagaagggggaaatttggacacagacatacacagaaggacaccgtgtgaagatgaagatggccacctgtgagccaaggaaagagccctggaatgaagcaacgctgcctacaccttgccttcagatttctagcctccggagctgtagggaaataaattcctgctgtttaagcccttcagtttgtggtgcctcgatacggcagccctggggaaatggatacagcctccattccactttcccacttccgacccttcttccccatctctcttcactgcttgcaaagccagaaatagcacaggatggtgagtcaggactggcactgctcaagagcactgccagccacaccccggccgcctacccccacgattaagagaaagcacagggcagtgccatggactgggactccgacccccactcaaccagccacaatggcctgtgtgtctttaacaagttaccagccctctctgggctttagtttccttggctgtaaaatcaggctgctgcttgggattttcaactgttctgtttataacatagcatttttaggtcaccagaaataaaaatattctgcttgcctcccactttcagcaaacttgggtggcaaagatgacttcaattcttctaattatcagagccacaaatggctctgtctcatcctcaagatgagtttggtttttatgttttaatctgagctctgcccattttgcagatagttatctgtgaggctgtctgtgtgtgtgtgtgtgtgtgtgtgtgtgtgtgtgtgtgtgtgtgtgtgttggattgcttgtagtagctgcttacttgatttcacaaggatgctgtctgaccagggtctctcagaatgactgagtccaggtggaccttggccagatttgaaccagcacccaagataaagtatttaattcttctctatctctagaccaagggtgatggaaatcatcagacaccaagcagctcatgcgttccagaggtttcaggactgaacgttggttctgtggttccccgtttggcatctggctttcattaggccataaaaaacagtttacggcccttctggttggaacaataactttcacagtatccgtagtggctgagtggttatcagaggaagaaagaccactagcagtctgcgtccttgctgtctgtcatgggcggtgccagcctacgtgttaacctattcatctcgcttcaaccttacacgggtaggtattgggactgccatttttagatttggctcagacaggcttagagattttaccaa

SEQ ID NO: 36530 - DNA, 950 bp, Homo sapiens
caattttggtgagagttttacttgttaaaattttatttgagctcctatgcctctatagactagatgcctggcacacagtggggagtaaaatacttctgtgtttgaactgttccactatctactctggacaggaactgtgtttatcaagtgtttggcaaagggatagtgtatatgggcgctttgtacatataggttcaatgttaaaagtaaacatgggcacattaggattttaacaagtttatttgaacattaagctcagcaattcatgtatcaggcagcacccgactgctagctgttcaggattccgtcgaggccacgcaaggggaaaacctttataaggtgtttgcacaacgaagacaaataaaatatttgattagttaaagtgaaaagcctgtagttagagattcgctggcagtttgcgattggttaagcataagtttcattttactcttttcactgagttgggcttttctttgcttaggaacctgaggtgttggagctctctcagcctaatagcctccccactaattctaataaaaagaggacaagcagctgcagccagtacagcagcctgcaccaggatctggcttcctgtagtttcctccgagtggtttctgttctgccttctgcagggggtaccttaggtggacactgtgatgtgtcacccagacgccccttcgccaaaaaacttgcttccctggctcgtgggaatgctgtctacagacaaagctgtcagccccttcaggatttgcctcagctgcagagagctggttggcccaaggtcatgcccttttggggtggcccacatccaatggggaaggtataagggcttggtcagctgggctcaccagctgtgagggccattctagcttctgggctttctgtggtcagcgagtctgtcattgggcctcaccttctccttttgcccaatcctgcttccttcctccctc

SEQ ID NO: 36531 - DNA, 1197 bp, Homo sapiens
gaatgtattttaaggtatttcaccaaacccaaggtcagaaatgctcccaggacccagaaaggatcagacacatgatctgggatatctgtccctgaattctgcatctgtgtattcgtgcgtgcgtgtgtgtgcacttgtgtgaatgtatgtgcgcatgcgtgtgtgtctttccctggatcaagtgcctggatcaagtggccaatggccaattctgcattccaagctttatatataaacattttaaccacatcaagatactaactaaactctctcttggactcaatcccaaattcctaggagatacaagttcattggcgggttttggtcacatattaactttccatgctgttaggcaggggcaccagggaggaccatgcaatccaaacctgcagccagggacccacccctgtggctgtgaccaatggccccaagatgggcactcccagacagccctgcagatttgagccaggcagcttgctttgctgtctggcctagagagtgatgattcagctgaagactaaaataattacctgcgtgtgaggcaagcaagagcctgcactgacgtcagcaacacattcctgagctcaccttgtcacagaaccctgtgcagcccgattccgccacggggcatccaccccaatgggggactaacgagaacggtgatgagctcgtctgtgtttaataagaaaggctaccacgtgttgaatgacttctaacgtaccaggtgttatacatacagcacctctcagcttcgcaaggaatctgtcaagagatagcattacgtgcccctcttacagatcaggaaaactgatgctcaaagaggttaatgaagtcatccaaactcacattttagaatgaagtgggtggaatttagaatttgattataaatcaggttagttctaaagctggtaagtcttccgagaatgatgatgtgtcaccttctaaataacgactagatcacacaagtgaaactttaataatgtgtaaattgtatgattgaggaatgctgggagaggttacatgatgcaaaaaccactcactgaaacgtgaagccctctgtcagtcaccggcagcccagccttcagtggagactaattcccagtaatcacggaatggggagacttcactgaatttgctcagtcttccctttttgtgcttcttaattgctttgagaatcatctagatgcttgtgtggcc

SEQ ID NO: 36532 - DNA, 744 bp, Homo sapiens
gaagggagatctgagccacactcctccctgactgccacggtgcacaatagccagattggctttagtaagtgggagttcatgctgctgggcccatatgtcatctctgcttctgccagttcatagctcatggcatatgctagctgacatccgtggctgagctattttgcctacttggctatttcgtgcccctttcgtgactaacgctttcaggtagttgatatataatgcaaagatcaccattctttatgtcaatttccatatatccatgaactgcctctcccccagacctcctggtctctgatcattcattcttctaggctggcccctgaccagtctgccaagtcaggtgataaggtgaactcttgccactgccatgagttcagatttttttcacctttggcaaagattccttccacacaaagtgcatgaccagggacaatgctggaatccccctgatcagaagggtttcccctggccactgtctttagcactctgtccctgagtgtcgctgtaaggcagctgctctccagtttctgcttgtttccgcacacagcacccagccaaaccatctgcaaattaaattcaggccctttctccactctcagccgggtatagaaggcacccccgcccactcccaccgacgggatggccatgggggtgtgctgagggaggggtgatggtgcagctgtggcagatgacatggggtctgggacacctgctcatacaacttccttgtgctccctc

SEQ ID NO: 36533 - DNA, 958 bp, Homo sapiens
gataattaattctgacctggctatttgtgaataaacaaagattaatacagtgatttccattttgctgagtatttttcggcctctgaacaggacggtcacatggttttgctcttgtttgcatgaagcgaaattctggggtcctctcaataaacccacaagagtttctatctcataatgagagctggcttcttgtgtttttgaggcagaattttgacagtgtttcttgtgcattcttcaccatcatttggagccaccaccttggcaacgtctgtagacaaggagataagggactctcaaatctatccttgaagaggaagtggccccagagttccgataaaatcctgccgtatacgggctgtataaaagcaatttgaccacttgcgattttgagtcttaagaatctttcaatttctcagcctctggcaggagtaagagaataatatcctggatgtttataaaattcgataaccttttaaatccatcccacttgaaggaatagctagatttctggacccccattttctgaggctttccaggatggacgcatgctatcagctccccctgcaggtctgactctttcctgacagggaattcctggaggtccactgagaaaatggattctggaagggctctaaattgtgtcgcacagacgaaatgcttcgactgcttggaaatgacccacctttctgctggaagccacatgtcctgggaatgcaccaaagtctgaatctgtcagtaccttactatgctgcaggaaaacaaagtcccacccagaactccagtgcccaggcaggaccttccttgcgctaaacgcgctttagaatgttcaattctctctcttctttgtaagcactgtggccctgtggtaaatccatcacagataaaatggcctctacatgagccatgtgctaaaaaaggatacgtacacccattgtgtgttgagtctaaaagttgtttc

SEQ ID NO: 36534 - DNA, 1808 bp, Homo sapiens
tgggaggtgggggttgcagtgagctgagattgcgccattgcactccagcctggggaacaaaagtaaaactcaatctcaaaaaaaaaaaaaaaaaagaaaaaaaagaaagaaaagaaaaagaaaatgcatttgttgagggccctgataaccgcggggaatacagcatctggtcctgaacaagagaagaaatcagcctttgcaggaaagggagccaaatttcctaaccattttctctgtcaaacaggtggggagataatttgatgaatgggagctgtggcgtgggaaatataaagcgtggacaaggttttaaacggctgcagtagagcagaaggatgggagaggaggcagaaaaacaaatgataggttgcagagatacagctagagtccatagaaggagataaacatggactctctaatgcaaagttgagcaattttctccaacagtgctctgaagttccgatgtaaaagcctagaagactgataccacgtctgtgagcagatgctgaaagcagaaggcgggagagcgcagttcgcagcacgtgatgggcagcgcctggcccagggggagcagacgacccagacgacggccagcggggttggcggcggcgcggggaggagggggccggatttgggagaccaccgcccgtccccgtcccgtcccggagcttaccagcaggccctccacgttgatggggtctcggcaccgacggcgaaccgtctcctccgtcgggtccaggaggagactgggtaacttcctcgccggccgctgctgactcatgctgcccggccgggcgtcctgctcccctcgcaccccacgagctctcccgccctctcgcgctcagctcgagcaccgccccccacgcgccgatttccaagggcccagcacctaaggggtccgcggcttcctccgaggcgccgcccggctaggccgtcccgcccgccagtaaacgcggcacggcctcacgtgcccgggagctcccgacgcagacggaaaaagaggagggagacccgcggatctcaagtcgcccggcccgccatcttcccgcatgcgcagtacaccgcccccctctgcgcatgcccgccgctgccggagcgctcccacgcaccgatcctctcccggcggctgccgcccgggaaacccggaccgcggaatccacggagaggctggcaaaggaaaaggaagaggtggagccgaattccagaggaagggaacaggggtgagagaaaagaggcaaccgggaaaacccagcggtcgcctggaattctcgacggtgataactgaaagttctgaggtgataactgaaagttctgagccgcagagatgttcatttattccttttttttattttaattttttttttggtcgcccaggctggagtgcagtggcgtggtcagggctcactgcagccttgaattcccgggctcaagcgatcctccacctcagcctcccaagtagctgggactacatgcgcgcgccactgtgcctggctaatttttaattttaattttagtagagacagggtctcagtatattgccccggctggtcctgaactctggggctcaagccgtcctcccaccttggcctctcaagtgctgggattataggcgtgagctaccacacccagccttcatttattcgtgagctctgttagcgcatcttacaggcaggtcagtgttgatgcttagtaaatgtgagcaaccacaccattgtggaatcgttttacctctgcctgcccgcctgcctgcctgcctgccttccttccttccttccttccttccttccttcctccttcctgtttgacgaatg

SEQ ID NO: 36535 - DNA, 1735 bp, Homo sapiens
ctgagcgcagacggcgcgcggagccggggctgggcgctcaggtgcgaggttccgtccatctttctgaacccacgcaggtgggcgcgggaagggacccggcagccgccagggcagggtcagctggcggggcagccccgcacggtgaccctccttgggtcgcggggagccgggcacgggagtgggggagcgcgtctttgttggggaggagggcgggcgggacagggtaagactggggttccaggcccggggcgcgaacccgggtgggagggcgcagggggctcccctctgtccctgtcacctccacccatcgccggccgccgctaggggttccggccccgcgccctcccccgacccttccccggcggaggtcctggggcagccaagcccaccgcccggccctcctccgcggccgtcccgaagacccggagaagtggaccacagggggcggccagtgtcaggggtcgagtcctccgcgctggccgcggttccggagatccgggctttgccgagcgccccgcgccgtggccggggccggggccaggtccgggtgcggggcctggcgctgcggccgcgagctcagcctgtaggctgggctagcctccgtcggcggcgggcgctcaggagcggggccgcggcggccggaggacaaagggcccgaggtaggagcggtccctccgggcggcagcgggcggagcgggggcgcggggctgtgcggggctgctcggggcgggcactcggcgcccggcggggaaggtgcgccccgccggacgcgggcacttcctggccctggtcccgggaaggaggtggaaggtgtccgggatcggccctggcagcgtgtagggacctgggtgctgccgctgccgtgcgcttgtgcgtgcgtgtgcgcgcgggtataggtgtgggcgcgcgtgtgtgtggggtgtgcgtgcgtgtgcgtgtatgggtgtgcgtgtgtgcacgtgtgtgcgtgtgtgagtgcgcgtgtgcgtgcgtgcatgtgtacgcgtgtatcggtgtgcgcgcgcgtgtgtgtgtgtgagagagagagagcacccgaggctcctggcgcttggcacatggtgagccctcggtaggtgggagccgtgaacagtgacggtgataatcgtattgcaagggtgtgtgtgtgtgtgtatctgcctctgtgtttagggagactgtctggagcccagagtggcagccacatgtccccagcacttgggacccgggagaaaattttggggtatctttcctgagtggctctgggacggtggtttaggggcccctgcacttgaagaggatgcttcaggggaggtggggacttcctaactggatcccagtttgggtcctgggaacaaaggctgcttccccgaagtacaagaaggggtgtgtgtgtgtgtgtgtgtgtgtgtgtgtgtgtgtgtgtgtgtgtggcccggccaccagggcgccggcagctggagactgggagagccgccattcatgcagagggactccgggccattttgctgtcaactctctttgatgcctggtcttgaggacctgcaaaaaagaactacttactttgtatactgaagcttttctttaataaacttttattagagagttaagtgttacttcagggcttgaaagactttttattatccctttaaaacaataaatgtgtaaatttagcttgaataaacactcttttattcccagtgaaagcactttaatttctgcatttaacctgggagtt

SEQ ID NO: 36536 - DNA, 1593 bp, Homo sapiens
tttattttatggattgtacttttgatgtcaaattttaaaactccttaggcctagatcataaaaaatttgttttttccagaagtgttatagttttatgttttatgtgtaggtctatgatcctttatgagttaatttttgtaaaaggtttaggttttgtaaaaggtttaggtcaaggttcatttctttgcctgtagatacccagttgttccagcaccatttattgaaaaagctgtctctcctacaatggattgcctttgcatttatttattttaagattttaagaattcctgctttttattaccaagtcaaatatatagggacacaacagtacctaaagtttgcataataaattatgatattcaccgatgttcacatagctaattctaggcttcaagaggaccacaaagagtgttcagcttcgggacaccgtgagtcagaactggggggcagtgaggtggggacgtgggtcaggggacagccaagctggccaggtgatgggagtctgagttcctatgcagttttgctgctgggcagctgggcagcctgcctgcctggggagagggtggtgacacttggcgtcctgggctgatctggggcacactgacccacgggtggagctgaccttgtggtaggcacgggcatgactgggctgggtgcccgttttgtctcctctgtcagctgcagactcaccgaaactgctgactgatttcagttgtcagcccctgtgacatctctcccagccccaaatgtggcgtgcagctgctggctgcttaaaaacctatgcagagaacatgtggaactcaagtgctattttggaagtgtgggttttcattttaaaaaatggttatgattttaaaatgcttaattacacaaacatgttcctggtggtgggggggtggaacataaaaagcacagataagcaacatgtatctgcaatccccataaacacagaattattattaattgtggaaggcagattgtcttttttgtttatttcattccaaaactccattcttactccagttgggtcatgaagacacaaagctggtttggaaaaaaggaaatgtcttttcaatggctgaatctggagagaatgtttgacactgctaaccatgctgcaaatgaggtctttgtgtgtgggtgcaggggtcagcctgggaaacagcaacagcaaggggtgggcacacacaggccggctgcagccagtgctacgagaatgatcttttgtttccgctggtcagccgttcaggatgaaggctgaaaacatcaaagacatgtctaaacactgttatctggccatgtcctttgccctgactgtgtaaggggtctctctccatggggaatagagccctgagcttagcttctactgtgctgttaatttcaggcaagagcagatcaataatatttgcattagctacttacatcagtctcttttgttctgaggaaaatttgttgatttatttatctgatgaaagtaattaaaaatcactttctttacatctcaaaaattacatgtgttaattgcagaaaacttataaagcatggaagaatacaaaacaaaaacaaattcctctacctggacatgactgttgt

SEQ ID NO: 36537 - DNA, 962 bp, Homo sapiens
ctgtgcctggccatttttttttttttttttgatttttaatagagacagggtttcaccatgttggctaggctggtctcgaactcctgacctcaagtgatccactcgccttggcatcccagctgggattacatgcatgagccattgggctggccccaattagtaaagtattcttattgcagcaacaaaaatgttgcaaataaaattacctacttgatttacaggaaaggcttaaatgtatccttcaagtaacggactgttacttactagggaagatggtttcagcagttgggaaagcggaaccacagagctttactcagttttcataagcaaataatggggactttacatattgacagcagggaatggtaagattcccaaccaactgcggcatttctgtgagagcaagtcagagtaagaggaatggcagaagaaacgaaacagaaagtggagagagtgacaggcaaactgcagttgggttaaatgagatatgagaaaggttagcagttcaggagacaccatttcactccccagttcaagctatgatgtgactttaatgtggtacagagccagggtcccttctcagggtcttacatgaggtagtgacaagctctgtctttcctccactgcccagtcccttgagggtaggaatcagggatccatcatctgggcacccatgggacctgaactgagtactgcagcttcggccagtgaacacattcagttttttttcctggagggacactctttaatcagctgtgttccctactgactttgcatttatcaatgtcatgtcataggtattttgagtacatcgaagcagtggtggtggggagctgagaggcagaagggtgggcctgagagggcaggtgggattcttgatcctgaaatgttttagacacatttgctgcagatctccgagttaccatgacccagctcattaaagacagaaggtgctgcgtttt

SEQ ID NO: 36538 - DNA, 1496 bp, Homo sapiens
aaaacaaaaaattagccgggcgtggtgatgggtacttgtagtaccaactactggggaggctgagatgggaggattgcttgagcccaggagaacgagggtgcagtgagctgtgatcacaccactgcactccagcctgggaaacagagcaagaccctgttttgggaaaaaaaaaagtgttcaaactaacttgtaaacggactttggaagtaaagcagtagtaaggcatgctgtaaataaatattaaatcaggaaaaaggataatgtttaacatcggcgaactctcagttgtgatgcagggtgcagagaggcagagcaatttactaatggttctacagtgaaggagcgacagggctgggtatcaaagcctgttgcgtttgtttattgctacaacaaatatttattgagcacctgcagtatgtcaggcaccaagaacagacctgtgagcccagtgcacatggtccccgtgctcacgggcctaacattctctgtggtctgggagtaatgtttctagtcacagcaaatcatctcatgtgttcttggttgagtatagatgctggaatttcctgtccttgagaagcgtggtttggtaatgtgccaacaggtagttaccatgcagctgagccagggtcaaatggtttatctggggactgggcttgtggccatagcctgaggggaaccagtgacaccttttcttcagggaggccaatggtaagagcacctgaggcccaggaatcagagcttctctccccatgatctccttggcaggccttagcatacccagaccagtgggcattttgttcattaggtgatgagaaacctaggtggccaggggaaaagagtggagatttagttggtgtatttattattttctattagaccatctgcctttggagttggttaggaattagaggtggatttccccaaattagttagaaatgatcatacagtcccgtcttcccttccttcatgtcttgaaagttcattatgctaaaatgtgatgtgtgctagggatgagatcatggaagcttggggaggcttgggaactggcagaatgaccagagttggagcagcagagcagcgtggaaccctgagctctggactctccatcctggggaggagccaacttccagtccctgatactgcacacacactgcagtgtgcagtggcagactgcactgtactgtggatatcacactttgtttttcagaactttcaggatcaaggttccacccacgttaaatacaacatgtgttacatccctttatattttgtgtgaagcaatcaaagaatattgctgattttgatatagaattacaagataatcaataacttattatacaaagaaattaaaacagaaataatccttctctatataccagttttcttggtagatgatatcacaagcattggtattttttcatgattaattatagtaataacaacagtaacaggtggctcacgcctgtaatcccagcactctgggaggccaaggcagg

SEQ ID NO: 36539 - DNA, 852 bp, Homo sapiens
tagctggtgttttcttgaagatttcctgggcctctccagggggtttttgttgttggggcatgttccatggtattcacagcagagttgtttgaaggggcacgtgctcgcttatgtggcttaggtccacgctacctgtagtccttcggaggcaagccaggctgccagctgactgtcttccaccacaaagcctgtgttcttctcctgaccctttgttctttgcacagcgtactgtggctccagtccaagtacacaaacttccatgtagtttaaaaagaatcagtttaactgttggtggttagacagattggtatgtacctgtgtggagagcactgtgacccagcaaaacacttcagggctaagaagacacgaaacggtggcatttgccatctgacccggcaggcgctggggcagatgaagctccagttggaagggctactgctgaattttttttttttttttttttttggttgttgttgtagctctgggagcagatactagctctgaaacttttcccctggctggcttggctgcctctccctgccgggcaggggccaggaagcctgggtgtcaggcagacccgagccaggctctgcacagcagggcattacgcgccccacgcatcctcttccatccccaggcacagatcaaaggcgcagcccaggaggcgggagcccctgcacactttccacctctgctgggcttagcctcttggctggttggtctgtggagtgcctgaagtgaccagctttttgtaaggtacggtttatttgactttgcaagcgagcacctgctttgggggttggagaggtttgtgttgacttacgaagacagctgtggcctgtgttcagcaga

SEQ ID NO: 36540 - DNA, 424 bp, Homo sapiens
gtattttgttatggcagcctgaattgtctttgacagttactaatccctatgcagcttttggtctgatgccaacacgtggactagagagaatatttaaaaatgcagaggtcattccctcttttcctcactccaggattgagtcacaggaggattttctgactcagagaagcagagtttaccttcataggaacaacagagatgtgtgtgtgtgtgtgtgtgtgtgtgtgtgtgtgtgtgggtgtcagagagagagagagagagcgttctcgatgagctctggcctccacagagcttggccggtggtggaaggtgagtgaaaggagagacagttccagtgtttgttcctctgactgggtccctctgggctgattgccatgggtcagctgacacccttgacacccaagggccgcagggtgatcctctc

SEQ ID NO: 36541 - DNA, 845 bp, Homo sapiens
cagatatcaggcctatcctcttccctttgttaagccccatgatacagagataaataggattctggctctgcccctgagatcttaggaatatattttcagcctgagaaatttaaggcattgaggccagctgaagttggagagaaatattatttttgggtagggactggccaaatcctaccctagaggctttctctagacttgggcccagttttgattggaaggaagattcagggtcactgtgacagacaagatgggtccgataggtggagctagagagtcggagaaatagaaaaggcggggcactcgtcctcaaggtcccagcaaggccaggtacagtcgtggtccaaaggtctgtcagaatcacctgaacaacatttttttttttttttttgagatgatggaatcctaggtccagctgaaatttctggcattgagccttgggcatgtttagcaaattgcccatgtgactctgatgtgcagccaggcttgggaaacactgatctggagatcccagaattttctaacgtgacccgggcactctgctgaaagatctggtcagcagtctgagctggtctaaatctagagccctgcactattcggaggagctaatgagaaatgctgactcccaggccccaccttggacctgctgaatcagaatctgcattctcaacaagcacccccttcggtggttcgtagtttcctcgtggtgtgagtggtcacctggcacagagcttcttgtttatatctgaaactatccctaccatgggcactccctgagacagggatcacattttgcccttggcacctctctgagcctcaatttcctcatcttcaatgggggtggc

SEQ ID NO: 36542 - DNA, 658 bp, Homo sapiens
tctgaaggctccatcttcatcacctaatcagcccccaccttctgcaagaccacacctccaaataccatcaccttagggattacaacttcaatatatgcatttatggtggcaggggtgtgggtggggacacaaatatttaatccatagcgtcacataagtctatgttaaatgagaaagaaaaggaagaaagaaatcaagacaaacaatagagttgagaaggaggttaacacaagcatgtgtttcatggagtctgactcacaccgagaacaggaatgtggctctggcagccaatgcactgaacaaggacctgaacagtcatacagctcaaggttcaagcaaggtagaagcaaaccagctgctctgaagatgctcacctacttctgaccttgaatcttccacttcatgaccttcatccaggagtagccactgacatctgtatggtacgttactgttttcacagtattctgtcttttgattctcacatcagttctatgaggtaagtattttattgttagcctttctttagaaatgagaatattgaggcttagaaaggtaatttcttgccaaaggccacacagctcctagtagaagaactggaattcaaagccaggttcatttttggcttccaccgtgactgccaactgcttgatgccagaat

SEQ ID NO: 36543 - DNA, 1829 bp, Homo sapiens
gaggcctcgtctgcttttctgaggaccttgaactttatcctacaggtaatggtatacagggggccggggcaggtggattgaaaggccccaagcaggcaatgtcccctccagatctgcagtcctgtgagagtacagctataggggtggacctggaggcaggggggcagcttggggtccactgttagcctggctgagtgtgaactgctcatggaacttcccaaggcaggtgaccagctggcagttggatgcatggtctggagccaagggacaaggtctgggctggaaacaccgaactgcagtccacagtggacggtgcggatcaggtgtgcaaggtggacagactcacgctggagggcgcatggcatggggaggtggctggggcatcaggcaggcttccaacccacacctctccttctatcccggcattgatcattgttgtgtcccgctgtccgcagaaggtaggttcctaaattccaggaatgtttagtaatgagaaaaccaaaaatgaggaggaagggcaataggggcgaaagtaagactcaaagtctctctctcctcctgctctccctctccctctcgttcactctctctctcccagtctcctctctctctctgtccctctccctgacactgtccccctctctccctccttcctagtgactgtgccactgtactaggcactggggacacagtgatgagtgtgtcatggttagtcttttccttctggagttcaccaagcaggggagggggtagtgggatcataatgatggtgccgtgtgtcaggtgctatgacagggttgcctgtggactcgtgagtgcagagaagccagcgattaattctccatggactggagacatgtttgagggaaagtttttctaagaggtcaagctcttggtttgaagaatctagctgtgaaatacagaaactcaacgaaatacacactcaccaacccacctcccccggctctatccccaaacaagattcaagacagcaaaagacctggaatgctgggacaaattgctacaccagaagcaacaccattcacgttgtgcctccctcttggctgatgtgtactttgattgcgacatttctaataagaacaacaattcccagaattctagcttatcctggcccagttactggaaaccatattttgcttatttcttttatttcttgtctttaggttgggaaaggactggacctaaattttagttttcttggagggagcatgttttgtcgggggaggaagtgaaactttgtctagatttacatttatttttgaaacatgtgatcaaagcgatttatgtggctggttctatagaatcaactgggaaatactggctcacaatgaaggccgcagtctcctgttcctacccagttaattgatgcgtctttgcacattgccctgtggattcacacctgatagaggagggtctggctgattctacagagcatcaaatgccaatgatcttctttctcataatctagcatttatgtgtaatctcatcatattttagtttgttctatgttcagatactgccttacttgtaaagagttttcttggcggggagagatatggggggtgtttttcctggaggttatatttgcctctcttttttattgttagaagaaataccactacctgcccatccccccaccctccaaacacagaatgtccttaaactttgacattagcctatcacgtggaaatcatcgcattctttatttttaagcctgtaaccttgttaccattggaatctattccttctatttggacgaccatatttttcatatggcttttagaatttttaaaaaaaattatttagca

SEQ ID NO: 36544 - DNA, 432 bp, Homo sapiens
cttcctttcaaaaagaggcgcctacacctacctcccttgaatgtgggctgggcttactaatatgtttctaaaggacagaatgtggtgaaagtgacgatgatggtttgtgactttagagactagggtgtagaaagccttgtggctcctgcttgctctctcttgggtcagcccctctgggggaaagccagaagctgtattgctcaatcagcctccggacaggtccatgaggcaagaaatggagcccctggctacagccatgtgagtcaccgtcctggaggcagatcctttggccccagtcagagggctccaatccagccatcaccttgactgcgacctcacgagagagcttgagttagagccaccagctgggccactcctggattcctgacacaagaaactgcagggaataaatacctgttgattcaagctgct

SEQ ID NO: 36545 - DNA, 3028 bp, Homo sapiens
acttgagatgtgctgcttaaggctgtgacagccccacacttgtttagcaaggtcatgggtcatggcgactcagaggactgactcatggtgatatgcggggtctttttgttcctcctggaattagagcccactgtaacagtccacacttcccagcatagcagccactgtttctaagtaatggagttctctcctcccatccctggtcatgttgaggtctctttccctgtccgctcctcgcaccttggtctctttcttctttcctgcctctctgctgttctgtgtcttagccccgctcattatgaattgttcccaatctgaccagaggagaaagggcgttccagaccccctctggcttcatccagtgggagacaggcatggggcttgctgtgagctcccgagctcccccgcccaccagcggccagccacggccttctttcaagcacctgtgcgtgcctgactgctgtgcatgtgctgctggctggcccgtggttcattctgctccttgacacctggcctagatttgcctaggtcggtgcctgcttaggccaccaaggtcaggtgaatcctcttgcttggggacagggcaggtcaaatcctgcatcagtgcacggcccttcagttcacagcggcctgaagcactgtgacagtttttacgcgatcacaacccagactgtgcactccctgaggacagacactgtgtctggtctgctcccctttgtagcccccagtgctcagcctagggcctccaagatgctcctgtgtgtccagctgtcagcctttatcactctgccacttcctgtgcctcaactctaatctgcaggccctgccctaactgtgaagtgggcctctggatagcccgggtgaccgtcaaaaccttctgtgctttggttccagctgtttgctctccgaggatcactgtcctctccctgcggaacccagaaccttttacacctgcctcttccccatgaaacttccctgctcagccagccacagcacccagggggccccattccaccttgggtggattcccaggctgctctgttccctgccaccaaggtagtgaagcggcaccaggtggcccctggttcccacctggttcttaagagagtgcgcaggacaaagtcacctcgtgaggggcccccaaccaaggagtggccttagaccccgaggagatgccctcccttccccggagccccaggcactggtgccagggataaaagtctgcacctctaggggaagaattcattgtcctctctttgggatcctttctgcccgggcagttacagagctaaccatgctcagagtcctgggggatcagccagtgtttctccttcctacagtagctcgcagggcacccgtgaagagggatgctcattcttcccgcctaccttgccccaggtattctgggcctgtgtaggtggttgatctggacaacttcagagttctcgggatacaacagctactgtcaccagctgggctcagcagtgaacagatccttctgggaatggccactcctcaacttatggggttttagaattgaaaaatcttccaaccccacaactgtgacagcagcttcccatgatgcctttttcatcctcaaagcagatctgtgtcatgtgcacctgcagcccatttcctggattgtgaaactgagcctctagaatcaggatgcttgtgctggctttgctaaggcattactcagcccctccttcctcctccagtcagctagagcaagattactcatccctggagttccttctcctcttccgagtgcagctaggtcctgggattggccagggggatcgcctcagctctcctggctgagtcactgctcagtcaggcctggttgctgatagcacagccaagggccctcccagggggactccagccagtgcctgatcaaaagcgccagggctttggaaagtccggtttcgtttatcgcctgggagtgcactgtgatctagtgagtgttttcttctcattgcttgtttatacaaaaggctccccccaacccttggccttccccgaggtggtaggctgggcagcagcgggacctaatttgctctgaatccagccagaccctgctcatcagagctgaccctagccgtgctgggccccccagctcatcattttcagaatgagggctttgagttgaattgtcctatattttcagacctcccatctccacatttgaataatggacttattttacacaaaaaataaacttaagtggcctgaagttggactggcttcctggaaagcctttccacatagagtagacttcttcccaggccagctcctccctggaggtgggaggggagggtgcaggagggcttccttctggggccttgcaacctcagcagttttgggcagccgtgatgcacttgaaactctggtctctgagaaaacccctgtggaggtagctcacctacaaactgcaagattctctttgtgtagctcccacgtctgcaatgtcagcatgggacaggctgcctagataggagctgccccaagcccagcgggagcgtgtccacacttgaccagatggacgggagccgcgcccctggacaaagctctccaagcagctgtccccaaacatctatctcaagcttgctggcttatccaattcactaagctgccgcattcgatgctgtttctaagctggcctcctccctggccctctgcatctcagcagagcagcggttccatctccacactgagacttgcctttgagtatcgcatcacacacctccaccggttccattcatcagtaagcctgtgggttttgcctccaaatctctctgaagtccttccgcttcttgctgagtagcccctgtaatctgagccaccatcatgtcccccggtttcctgcagtgccacctgtctgctggcttctactcctgcagtccattttccatggagtggaggggtgactttttaaagaagtaaattagatcatataattcccaggtttaaaattctttttggaccaggcgtggtggttcacacctgtaatctcagcactttg

SEQ ID NO: 36546 - DNA, 2060 bp, Homo sapiens
cagctacttgagaggctgaggcaggaggattgcctgaggccagaaggtgaaggctgcagtgaaccgagattgtgccactgcactgtagcttgggtgacagagtgggaccctgtctcaaaaagaattggtttggaataacatttaaataatacctaaactccttgccttggcctacaagacctgaatatttggcccctgccttccctccagcccacagcaccggccccaggacctttgcacctgccatttctgctctccagaaagccctgcctcctccccatctttgtagtcataggtgtttcttgtcatttagagtttcagttcaaatatgacaccctcccattgatggaaatcatttcaccaccagacgttatgtggctcattgtttatccgctgcctgcctcccggctggagaggcgcagggagctgcctgtccctcctgttcagagccaccgttccgcacctggaccaccgcttggcagaggcgggagtggaggctgtcaccatcaggatgaaggacaggggtggcccggcgtggagaagctaagaagagatggcgataggtcaacgcgattgcgcctttaaggtggaagaaacgaagggcgagggtcagtaaagtcaaggacgggctcagatcccgccactggtgataagcgggacccataggaccgacgtgatcgcggccaggccctgggtggtttacctggacttttacctggctgccttttctctgcacccctccgtcctcactcccccagtcatcggcataggtcaagtcagagtgttgaagaaacacacgagtttggctctggaaaggaaaatcagaaaggcggcctaaggggccccacccccaggaacgctaagataggcggccaggggtgagcgggcagggccggccagcaggccctgaaagcagccgggccaccagcgcgtcccgagtccccctcgcaccgccccgcttgccccgcccctgccctctgcccccgcccctgccccgcccccgaaggcgagctgcgctgacagccggcggcgggctgggtgtttgcaatacaaaggcggccacgcgcggcgccgctcggtgagtagccgccgcctccagcctcccgctgtggagcaggggccgcagcctcgggttaggcggggcggggcgcggcgccggggcgctgaggacgcgtggcgaggcgggggctcggccccggggcccgaggaccgacggccgggctacgtccccggggccctctacgggaagtggttcgggggagggaggcggggaaacaggccccggaggccgggagggcctcgcgagcatccctcgggcctggctttcctgacgcgccgcgaggcccggtgtgggcccggcttggctgatctcgagcggcgtaggggccactgggggctgccgcgcagtcccagaaccgcggggactagctccagccggccagcgcgggtgcgtcctggctctgcgcgatcatccccagctttgcgccggggactgggatgagagcctttctttcccccggagttaggattccagcgctgcagttgaggaaactgaggctcagggaggttgacctctgtgcccaaggtcatacagttgccgggcggcagggcaggctgagcccaggttggaatcccggttctcatattacagctctcccctgcgaggcctctgcacctttcttgcagcctaggaggtgctaggcctagtgagctccgtcagctgctcctgcacgtaattttattatgggcaaggccaggaaaatgcaggatgagaagtaacgttttgggagtaacttaagtgctgtggagctagagtaggtaatttgtgtggtcagtagttgctggagaaagcagatgtcaaccctgtttttgatcagcaagcaggaaaccaactaagacaactggcagtattaatttggagatgttttagaacccggcagtttcccacaggatagaagtgttttgggaaatcaaagcttgtagccgtttttttaattgggggtgttgtggtatggtggtctaggggtagtgattgtgagattgactgtttatcctttgtt

SEQ ID NO: 36547 - DNA, 1845 bp, Homo sapiens
gcagcgctgtgccccatctctgccttaaactaagagaaagtggtgaaaatgccagtaggttttctgcctttctgcttccaactcccttttgaaactcctgctgcatcaaaggtggtgatcagtgtcacttctgttgcaagccaggcagggagcttggtacctgagggaaaccaaaacatgagcagacagaagctgacctgaccctggaagtcaacgggcccaaatggccaccggggggcacagtcgcttttggtttggcagcacagcctttaaaaaaaaaaaaaaaagtccccactttgacaaaggccccttcccgggtagtgctggccttggagaccagccaggctgtggatccaacttgtgggcagaggggggagttcctcaaggggactgttttggtaccaacgtgcctgcaagttggcacagcccaaggtcaacaacactaactggctggaaagggcgctgtctggctgtttgttcaggtctaaaaaccatttagatctgcgattctcaaagtgtagtctgcagttccagcactagggaacttgttagaaatgcaaatgctcaggcccttaccctagacctgctgaatctcaccgtgggcgtggggccgggttatctgttttaagaagtccttcaggggattctgcctcacgtacaagttggagaagcagggtttagatgatgcagtggaggccctgcatgctgctcccaggtagcctcttctgtattgctcagctcacatctgactttaatttggcctggccagagcaacgctcaccgcccagagctcacaaagatctgccacaggagagaagccgctggaaagattgtcttcccccggccactcctgaaaaggagcttggaaacccagtacaggcgctcgcttgagtcacaaggtgtcgttgtgatcctttgctacacggcttccagcctgagacaccttcccagggatgtgggccggcccaggctgggaggggattccaggccgtgcagtgtgagtgagtgagtgtgtgtgagtgtatgtgtgtgtatggcggagtttggagggggtgtccatgtgaaggagcaggcctgggctgtgcccagattgctaatggctcccttcctcccccaaattgttggagcctggaggtgcctgtcctgatgccagcgatcttttcactggtgcaggaagtccattcagccctgcattgcttttaatgagttttgcaagcaagtggcctcttcctgtgactcattctgccttttgtgcaccggagattgtggttttaagtttcactttggaaagtaaccaccacttctgctgctttctccctgttggaatctgaacaagttacattcattttgcaacaaagaaatgtaaatgtaggagccgccagtcatatttctgctctgattgtaaaaacatccttttccgagatggttgacagagccaagctaagaagaaatggtttatattttcaagtaacacattcatttgggaactccgtatttcccgctccccccacccaccaagtttgcttttgttctttgtcttattgattcgtatttcagggagatcctaaaaaataaacagtgcttgttggttgagtgaggcggttaacctctaatttattgaaagagacttcattctggacaaaagtttgtgttcttccttcatgcagtacacagaggatgaccataaggataatttcttgtacagtaaaatgtttttccttcggaccttccacacaaatccgcttatggtatccgaatagatgaatttcttaggattagcgagtatatgttaagtggacaaatattatacaatatttttcctcaaatttaaataatgtaggcata

SEQ ID NO: 36548 - DNA, 790 bp, Homo sapiens
ggcatgcaggagacatttagtaaagaatgataaataatgattgcttatatcaataaagcctccttatgttgatagaggaacccctgaaacagtttagtgcagaagtccaaaacacaaactagagacagacagcctgggtttgcatctcaactttgctacttcctagctctgtggctttcaggaagttacttaacccctctgtgcctcatttttcccatctgtcaaatgaagataacactagtaactttcctcttgattgttgtgagaattgaacagggtgtaaagaacctggaaagcacctggaacagtgccagcccatagtaagtacgcagcgagaatgagctatttgtattgtgtaaacatggtggacagtgtctgttatgtatccaaaatgattgttgttggagactaagagaaaatggatgcagctacagtactgaggaggctgcagtgtctgaccaaatacaaaatagtttggtacaggagctgatcaaagaacacgcattgagacagacctggagtttgacatcagctttgacttactaacctggtgaccttgggcaaacctctctcctacgctcagctgcattagcaaacacatggaccaacaccactagaagtgagtgaaaataaggcaaataaccataaaaatgggagtaatatccctgcatggcagatttggtatgtggatgagatgagatttggtctgtgaaacctcctgcacagagcaaaaatgatttctgaacaaatgtacaaatgaaagtggattttgctacatgaatgcagagaa

SEQ ID NO: 36549 - DNA, 1213 bp, Homo sapiens
atgtctgtcattgttggagagaaaaggaaaaaaattatctccttgctatgaatttaaacaatatattttaaagctgctgggagcctttttgtcctggttttctgcatctgatttacctgtcccattttaaccattcatgtgaacattgttatgtaactagcacatgcttttactgtgtataacttagtgttacataaatctaaaggctgctgactgctagcaatcttttaaatgtaatgagctgaaagatttgctttgagccttggggcaggatagctttggcttaaccatttgctgagttcagcttttaggaggataagtttactgcatcccttcaataatccaactgaagcctggattccaagcaactgtagatgagatttaagtctccaagaatgttagaaacttaaataaaacaaggcttaagcagaaagtcctcacaatggtgtccacattccatcaggatgacgtaatcgaaggttggaaccaggcggcctctgcctttgtgttccgggacccctcactcagtgcagagggaaattgacacagccatgatgaggcctggctcacaagagccatagttactgtaggagtttctgtggctaaatatgcttagctattggtgggtttctcagctatgacaatggtctccgtaaaaacacagaacaaaaatttttggttaattgaggtcaaattttgtgttaaaggagggttaatttccctcccctctaagagaagagtctctatgtgtttaaaaacatgttaacatttagtcttgtctgttttgttgatcagttgaagtcagagcaataaaatcccaggggtggaaagggtgcaaagggccattgggttcatttccctcatttggaagccaaacacatgcaggtgatgatcacactgtccttgagctgggtgcagagatcagctctgccacatgctgtttgttaatttaataagatgaagtgtgggacccaggctgagttcctcaacacattttttcatctgtaaaatggggattataaaaaataatagtacctaccttaaagggctaggcacagagccgtagatgagttaacatgtgttttgaacagatctgggtatactgtggtgtgaaacatttgcaattcttcttatattacagaggcaaggacatgtgctggatgtgtatgcagtctttgaagctggagaggcctgtgttggaaactgtgctctg

SEQ ID NO: 36550 - DNA, 1500 bp, Homo sapiens
tatatataatatatatatctgagaaagcttttcaccaagctctacagtccacaaagtaaacagaggaatgtgtcagataaatttggcttctctctctgaccctgctgccttacacagagaggggcggagcaacgggggagcccaagcacttcctttttggttaatcagcctgacccactgattgcgacactccagagcctcatgcttttctcagcctttaagtatctttctgaattgctgtccaagggcaaatttttcctgtcaaacagacctgcaaggttgctaggcacatacaaggaaaaagagattctggttactcaatacttgttttgcaaagtctgtttaaaaaaaattgcatcatatctcatttgatgattgtgcaatgcagggtggatacctaaactgaaagttaagtaagactgagctgtcggcacctttgcaattgagacatccatttatacgccagtggaaaatattcagttgttattagttttaagtaaaaaaaagggggataaagccaatgaaaatagaccccaatgctccctgcacagataaaatacacacagaaaatttcctatcctgtttcttctcaggtatttggtacattatgctcctgtgatgaatataaataggattagtctttggatcctgccaattcacctggggttgtcttttagtacaaagagtaccgattagggaattgcccaatctggatgcaaatcctgatgactggcaaatgacttaatctcgctgagtgggattttcttcctctttatgatgaggatggtaataggaagtcagaaattagtggagaataactgtaaaggactgaggctatagcctggcatgcataggggatcaatacatattagttcccttccaactcttaattttcctcatcttaaactgctcgccgtaatgggtcctgtttcatgctcacttatcaaacatcattccgccccaggacctacattaatacttggggtggggtcaacagatacagggaagagtcagccatgggcactgcccttcacatgctcacagtttattggtagaagaggcacatctgtgagtggattctggaaatagcagatggcagggcatcataagggagaagtttatggagcctggggaggcaggtatggagggagattgaagaaggagaaatacttctacactcagaggtgccagaaatcactgtgcaagagctgggcttccatctaatggtgtactataagcaaagcacagtcctagggaatttgagctgtgtccctaaaaacaaaaccatcagctcatagtctgtttacacagttgcttctctagttggtgtttctctaactttggggcatcattcaccctctgcaaatgtccgtttcctcaacctccaaacatggtcaacattccatgcttcttgagtatgtgttctgagggaagagttggcagtgcaagagaatgggacaggatggggaaagggaattagtgttcagtgatataattgac

SEQ ID NO: 36551 - DNA, 631 bp, Homo sapiens
ggccaggcatggtgacagagctatgcttagccagataacctgcagttaaaagtccagctcccacagttattatggaactttgtgtaaatcatactgtttttctgtatcctcacttatgaaacaaatggtgatctttataggtagggcagttaaagcactaaagaaaaactatgtgcaacactcagaatagttcctggtacatagtaggcttttaaaaattattagctgtttttttttattagttcatgatttttgtgctcaacaagcctttagaggaggcatggggtagtattcatgtttaaaatcaataaaaggtaaaggtgatgcttattcagcaagcatgtgtccagtactcatccagcattgaccacatgcaaatagagttatttcagtcatgaccctggctcataagtaaagaaaacatgagataaaggagcccgactttagatactcactcggaaaatcggaggagcaggggatgtaacgttactgtactctgaaagaagggctgaatggccttggagactgattagattttaatgttcaaggggcaaaaagtcaggctgactgggcttttctgagccagggcagtctgaaaaatagggaaccttaaccaagggaggaggtgtaa

SEQ ID NO: 36552 - DNA, 2263 bp, Homo sapiens
aatatactacacgcatgcaaaagctcagagggctccaggagtcgtcccaactcccctttctcagttccttgggatttttttttttaagtttgtcctctactagatcgcttctcattcaccaggatatcttagatcaaggctggcgtttgaagcctctgcctgagttcaagccccttgcttccggtgttcctgtccaagcccgcggactggaatctcccaaggaagttacgaataattcggggggggtggcgaaatggggggtggagtggggcgtgaaactgcagccttcacctggctaacagaagaggactcaggacgcccagcaccctggataggacccaacagcgctccctggaggtgtgggtgcaaagttttgtctagcttggcctccaaggccctccaggcaatgcactgggaagggaagaattagtgattaaatttgacctgaatcaaaagatgccttcagttcctcttctgctgaaaacactagaaatacaagcccaggatgtggggatcgggggcaagcggtgacaccaactaaaaggaagcaatggatttccttttaaatggagaggaggatgtcggagagataccatgaaacgaattctcgaaactccaggcagcaataccgatgaaagcgcattcttccaaaacagagctcctcattcagggccacatctgagcctgggggcccaatgctcagagcgtgcctggctttctggggaaaagcgccaggaacatgaacgagctacgaagagctggagcgggcgctgcgggagcagcgtgtggggaacggctcgggagtcgctgctggtaaccccggcccagccgcccgcagctgggctcgcagccggctcgcagccgacacccagggtgctgcgcccggggccccgggccgcggaaggatatttcactttgtttacctccccggccgggcgagggagctgcgaggccggtgctggcgcccccggcacggagctgcaatggcagcggcgcggggagccgcccgaggactggcagcggcggggctgattgatgggcgcccggcgcaatgaggggggcccgggcgggggcggggcggggccggctctgggctgagccagtcgcgggggcggcggggggggggcggaggctccgtggaaatgtgtcggtgacattgaatggggagaccgagcgcgagcgaggcgcgcgcgcgcacacgcgcactcacggccccgctcgctccgagatccccggccacgtaagtaactattaataccgcctcgccgggggatgcgggcgtgctgagcgcggggattggcctcgggcaccgtcggccgtcccctttaatttttaaatacacggtcccctcttttctctggggggggcaagcaagaaatcaaagaaggaggagacaagccgtcaattttctccaaaacaaaccccaccgggcaatttggtctcggggtagggggagacggggtgattgcaaattattccaggacgagatccagttctccagcgggaaaggggcaaaggaacgccgcgcgttggaagggccagggacgcagctccccttgcagcgcccgcaggacccccgcaagctcgtgccggcgaaatcggagaccgccgatctgtcctcgttctctcctgcacgtctggctgcattcggaggaagacctggggcgcgagcgagcggcgacagcatgagcctgtgctgacctccgcgcggcgggccgagcccagggctttgtcgcggtacctgcgcccagcccgcgccgcaactctgtgcccagcttttgcaatcttttgttggcagcgctgaccgcaccaagttaaatgctcccttgcaatttttcttttttttgtttgtttgtttaatttttggagagctcgcgatcttggaaaagcctcagacgccatctacagttaaaacgtaggtaactgccctctcccgcaccccccccttacacgccccccaccctttccaccaaaaaaagggggtgcagcgcggattctggctgccgtgcgtcgccagccggtagacccgtgcttgtttcctttctctttttgtttggcttctaacgcgttgggactgagtcgccgccgtgagctccccgaagactgcacaaactaccgcgggctcctccgccccgtctgcgattcggaagccggcctgggggtcgcgtcgggagccctggcgctgcagctccgcaccttagcagcccgggtactcatccagatccacgccggggacacacacacagagtaactaaaagtgcgg

SEQ ID NO: 36553 - DNA, 696 bp, Homo sapiens
tctgtgtggcactctcttggtttgctgccaggaggcagaactccagaggtgagagcacgccccagtgcacacagctagctaggagccagtgaagcacagccaggcctcacctgggctgtggagggcttttactcccacccagcctttgcttctcctttatgagtgtgtcatcacacgccaaaatccttgatgtcccaggatccagggaagaagcttccaacctcaggagtgtgtgcctctgacattccgtctggaagttacgtttgactttcgcgaaagagcatgaccctgtccagagataaccagaaaggagtatccagtgtgaatgtgaaaccgaaacaattgcctggagtaaacatgtcaaagcaaaatcctttttcattttcaagagcattttccaaggtaaaaagagaatgtaaaggactgtagggagctggcctatatagtccctacagcatggtggcatgtgtgatagcccctttggccatgcagccgtgttgccccaggggccagccttgaggctgatgccctgtaggaccttggagaaaatgagaactcctccatctgatcagtgaggttacttggcctcatggcagggtcacctagctggcttaatgttacacagccagtctgagggtgcagccagcctggaaatcctgtcattccatcgagagctcttcttccagcccaagtcac

SEQ ID NO: 36554 - DNA, 980 bp, Homo sapiens
tgctactatgttagaagagcgtgcatacacagttacagcacactacgctaaacgctatcacagaacacaggactggaaacacaaacattgaggcaatgcttgacaaatatccagcacacatcaatagcatttattgatgggaaaatatggtccaagggtcacatcatctcatttgatcatttcaataacccgatgaagtatctattattgtgtctaacttaaggatgaagagactgaggcttagaaaagtgaagaaacatctcgaatcacacagcaagtgggtggctgacacagggctcaagcctcatttttctaaactttcacttgtgttctttgtactacatgatgtcagttgtgtattcttaagctggaatgacgaattggtcacccagatttttcttactgccttcagttgcttcttgaccatggagtttcaccataccacactttttggtaataggggcttgggataaagcctgtcctctctaaagatctgtctttccttctttccataggaagaacttgctgctctgggtatggacaaattggatagggtagagcaaaacaggagagccttggctgacaaaaggagacacatcagctaagggtgatgtcggctagctgaaaatacacactaatctaatctggctgttctagatgaatctcaggaatgtgggaggctagcatgtcagataggcaattattggccggacacaggattgcataatgcaatgatgactggggcttcctgcttcagcttgaatgtggcgagcttgccagagaggatttatcttcccaagagaaacatgccaactttgagaggatatgaagtaactgttattatgggaaaaaagacaggcttaatttgaaaatagtcaaggtctctttcagttgtactctggatctgccttcctttggttttgtttgtttgtttgtttgtttgtttttccttttctgctcttctgtctctgtcactaggt

SEQ ID NO: 36555 - DNA, 1109 bp, Homo sapiens
aatggattacaacaaaaattgctaccaagcgctgaggtgttgctctaaatatacctgaaaatgtggaagccgctttagaattggatgatgggtagaggttaaagagtttggaggagcaggctagaaaaagactgtactgtcaaaaatggagcataagggtgattctgatgaaagctcaggaaaaagaacaagggaaagtttggaacttctggtttaattattgtgaccagaatgctaatagaaaagtggacagtaaaggccactctgatgaggtcacaaaaggtattgggaactagagaacaggccatgcttgttacactgtaacaaagaatttggctgcattatgtccatgtactagcactttgtgaatttttggcaggaaaatttctaagtagcaaagcgttcataaagcagtacggttatgtttaacagcatacgttcagttgacagcaaaggaatgatctaaaggtggaatttataattaaaaaggaagcagagtgaaaacatttagaaaattagcagcttggctgtgtggcagagaatgaaagaccattttcaggagaggaattcgagtgggctggcggaggacccatgggccttgataaagagattagcataggtaaaatggagccaggtgctaagaatcagaaccatggggaaaaaagcctcaaaggcatctcaaagatctttcaggtggcccttcccaccccaggcccagagacctaggaggacagaatattttccagggacaggcctgcagtgccactgacctgtacacgctgggacactgcctgtttgcatatgtccaattgccctttcaccctcttttccacattatgatgcaacacaaacacccttgtcagaagccaggacaatccccttgaacttctcagcctgcatcactgggatataaataaacctctttcttttataaattgtccagcctaggtttttctgttatagcaacacaaaatggacaaagataggggatttacactgtgtgactattaattgaattcaaaaacctaagattatactatgaaaaaatgggggggtgcagtaatatatctataaatgtcttacagggattttaagtgatattgtttggg

SEQ ID NO: 36556 - DNA, 1558 bp, Homo sapiens
tgccagcgctctgcgaacccggcgacctgctggagctgctgtggctgcagcccgcgccggagccgcccgcgcccgccccgcactgggccgtctacgtgggcggcgggcagatcatccacctgcaccaaggcgagatccgccaggacagcctgtatgaggcgggcgcggccaacgtgggccgggtggtgaatagctggtaccgctaccgcccgctggtggccgagctggtggtgcagaacgcctgcggccacctgggcctcaagagcgaggagatctgctggacgaactcggagagcttcgccgcctggtgccgctttggcaagcgggagttcaaggcgggaggggaggtgccggcaggcacgcagcccccgcagcagcagtactatctcaaggtgcacctgggagagaacaaggtccacaccgccaggtttcacagcctggaagacctcatccgcgagaagcgccgtatcgacgccagcggccgcctgcgagtgctccaggagctcgccgacctcgtggacgacaaggagtagccgcctaggggctgccggcccctctgcctcccccgcacctcgctcccttcccttccccgcacccggacttcgcagtcagcggttctcaacctctgccccgccccgccacgcgcgtccgccgccggtggcccgggcccgggctgcacccccgcatccccaagccagcggcaggaagtctcaggaactgccccagggccgaaagggcgccgctgcgagcgcctggctgacagccacagcggtggtgacggtgctgggagaccccgcgtgcgctttccccttgagatgtaaaccgggaacggggaaggggctgaggggagaaaggacatggccttccccgcgagtccatggccagtgactgtggcccgactcgaaaacaaccctcttctcaaaagggaccatcaccgccccgagcgtgcgcacacagaccggtcggaggcgagaactggtctctacagggcacagttcagctcctctgtggatgcgtccccagatcgcaggatttccaagaaatcgagcctgtcccttgtgcacttgggaataattccccaagacagcacttcgggattccgggttatcctgaggctgcccgggacttttccagctctccagccccaggtctcctgacattgtgttccaggctgcgggctaagccagacagtgtttgcctccggttctttccaccgtgggaagcgaacgccacccccacccgcctttgcctgcgagtctccctcgctggcagaagggaagccggcccggtcccgggaggaagatggcgctgcgaattcggtgaggacagccggccccgcccccgacaaggagctcgctcgttcacctggtgtctgggaacttgaatgtgtgaagggcgcttattgttctgaacccttgattgctccctcctcgggctgcatttcaaaaatagtcatatttttaaaggagttggaggagagggagggggaggacatggcaccattccagaaaccagcattgttacaacaccatagccagtatatttagtttggcttttc

SEQ ID NO: 36557 - DNA, 2003 bp, Homo sapiens
cacatgggctggactacataatctttaataaaggttcttttcgatctggctgcttcctctgggtctaaaacagtaactggcacgtgttaagcactcaataaatatctgttaaataaacatggatccaaaaaataataataataaaaaataaaataaaataaacatggatccatggttcctactcttcatcacagacccgggaggccttcactaccaaacaactgataatcccaagatccagtccataaattatcaacctctataacccttctgtagcggagatcccaatcccagtcagcagctctttactctgcacttccgtggcattttgctcacatcgctaactatagcgcataaaacgctaggttatgaaaaacgtttacgggactgtctcccctctagacgagaagctccacgaaaacatattcatctctgtatccttagcacctagcacagcacctgtgacaccgagacagacgaacggacacgcacacccttattaaatgctcttttattgaaacacacaagacctggcgcgatccagcccccagtatgggtaaaggctcagattctgcgctctgcaccagcctggcagatgctgcagactgtaaggtcctggaaaattctcccatcgcagttgagcgtcggcccagactagccctagccagaccgcgagaagggaccactgagggtccagataggagaaaggaccctcgagtccagcgctgtgccttcccctcctaatacagagagcgacactaacaatcccctctcctcccaatacagagagcgaaactgagaaccaaagtgggatcgtacgctccccagagcacgaagttccagcccccaacaaccgaattctgagcccaggaagaatctcagggaccaccaccccaccccgccctagacccccgctagcccaaggtgccgttgccaaggcgaccgcacaagccaaccggccctagtcccccacccacccgtctccactcccctacgtggctcctgctacgtggctctacccacgaagcgcccgcgccaagctggctgctgctgtagatgggcctggttcacctgtacttcagtctccggtggccactcggtgttgaccaacaagtcatagagaatcgtctcctcctcaccctctgcagtgcctggactcaaagccggccctgactcgggggccgccatgttcgccgaggactcaggcagcggaggagtgtctctacggaatccctcacaggacaagcttctctatccgcggccgcttttgtttcacggcaaggaaatgctaggttaacccttttatgagtaggaaggacagggactattgcttgtcttgggaacgacttgtgtcccggtcctgatacactccttgttcattaatctacatgagatcggccaagtcattgagcctctcttataactcagtttccataaaacagaaatggtaaaggtaccccactgaaatgctaatgttcatttgtatattctttgcctaacacgtagagagagttcaaacagtggttttaaaataaacaactaaagttatccaatgaaaggtagcagaggaaggatgctacaggagctcagaaaaggcaacgaaggccagagtctgcagggatttcctggaggacgtggagcttgtccctgcgtctttaacaataggcagaattttaatctactggagaagcatttcaagtagcgggaaatggaatgagcagagacagaggcagaaatacagagttgaaagaactctttcaacgtgtcgccagtgagtgacgactttctcagtgtgggagtaaaagaatttaccaagacagtggtagataaagaaagacagattaaagaaagtatgaaagttcgttgccagggagcagcgggccgactcagcagaggaggagctcattgctaggaaacaaaggcttgttgagaattttatagactggaacttggagtgattgataacaccaggtagcagggagttaacttgctttttttttttc

SEQ ID NO: 36558 - DNA, 1971 bp, Homo sapiens
ctgcaaccctattctatcttgcctgagggttccacttttctccatgacactctggggcaggctacagatagcacagcacgcgccctcgcattgcgcagatgtggctcagatcccacgctgccattcggtagatatgtgtctttagataagtgacttaactttcccgaattttagagtcctcatctaaagattctaataccttcctgacagagtgagtgtctggttgggaggattcctcatttactttccccatctctctgcaaagagaaaggagttaaaattgcatggaagtcaaacccgaaattataaaagcgacatcaaacatgggtgaagggagggagacctaaatcattacttagtttaaaaaaaaaatgtaacaaatacctactggctgccaggcactcactggcattggtgctcagggcaatgaatccagtccatctctccgggtcattcacacaccaaggccctgctcacctttggaaagctgggggactgagtggggagggcacggtgtggtgtcagcctgagcccactggatgaccctaatcaccaaacatctgcttccttctctgtagctgtgaccctgataccgcgtggtgtgctccgaacacatggtgcccagaacgaaggcggcgtccagaagccctaggtcccagaggtccgctcagcggcaggcgcataaggcggggccggcgcgggcctttccttccatcggaaccgttctcccggggctgagtccctgcccggactccgaacgccgaagaccaggggccggaagcgcgcgccgccactgccacgccgtgtcagtcgggagggagggagcgagcaggcgaagccgcggaggacggggtgaagatggcggccttctccggtgcgtttgtggaaactctgggggtggtggggcggcttgttgcacgcctcagccctggggccgcccgcggagagctaaaggggcgggagcggacaggggtcagggagacagaagggcgctgtccgctgcagtccctgatggacccgcgttgcgggatcaggggcggccgcggctcgggttcggaggacgattcttcccaggagcgggccggaacgtccctccccctgccctttcccttctaccagtctccacttggctttcctgccagtgcaccttcggctgcaaaatctaggcggcggcgttgctctggcggctcccagacgcctgggcctcctgcctcttaacgtggcagtgaccctttgggaacccttttctgcccgcggctcatctgggcttggccaggcagagaggcgagacggcgtggggaggagtcattggggaaaaatgacgatcctgcctctgtccagttttttcaggcccttccaaaacgtcccaggcataaacctgatctttatttgttcttaaacgttgttatatcaacattaatgttcagtgttgaagctaaagggaaagcattttcattaacgtacgcaccagtccaacataagtttggaaaattcatatttatttgccgtctgctaccctcctttattccaaatatgatttgatatggcttatcgaaccctacagttgatattttcgcctcttgctttatcatcctcctgttaggcatccagttttaggaagctgtaatcagccttaaatgcgctaaacgtgatacatttatgtagcacttatgtaacgtttattgctatataaatgtatcacgttaggcctaatgtcctttaatgttattaactttttaagatgacttcagatgtagtattttatattttttagttttcttctgtaagaatattaggaattccatatctccagtcatgtaagatattttttttcttttttgggggggagaatgggggggtggggggatgtagtctccttctgtcgccccagctggagtgcaatggtgtgatcttggctcactgcagcctccacctcccaggttcaagcaattctcctgcctcagcctcctg

SEQ ID NO: 36559 - DNA, 848 bp, Homo sapiens
aaattgtggaaaggactaggaaatgtatctcctggggcaggaggcagtggttgagaaggctctgcacccccacaactgcctgtacgggcagccaagtgtgcaactgctcaactgagtggagcattccagaggagggtgcacctggggcttgggaagcctccacaaagaggtgagccagtggccacaggctgcagccccgctgggagcaggcagggtgaggctgggaaagaagggacgcggaaagaggcgggagagcacagtgaaccctggatacattatgctaaatgaaagaagccaggcacgaagaccacatagggaatgattccattgataggaaatgtccagaacaggccacaccagagaaacagaaagtagatgagtgtttgcctagggcctgggaagagtgagaagcgacagccaatagggccagggtttctttccaggacagtgaaaatggtttacaattgattgcagcaatggttgtgcaactctgtgactatagtaaccatggaattatatgctgtaagtgggtgaactgtatggtatgtgaataatatatcaataaagctattttttttataaaaaggcccaagatccaagggaaaggcatatataccttgatgtgtttgccacagaaacacagcaggttcaagaaaaaaaaaaaaaacaactccaggaagttctcctagtgcaacctgctcattgtcccaagtggatgactgagacccagagaggcagagtgactcattcctagtcccactgctacttgcggctgtgggaaaagcagtaccatgcaccgagccgtcctggggtgccaggcactgtatgggagtcgcctgagttaccta

SEQ ID NO: 36560 - DNA, 825 bp, Homo sapiens
tagttgttactatatgctgtgtacactttacgccaattaactcaattttcataacgaccctattaggtaaatactattattatcctcatttgacagaggaacagagggttattaacttgctcagggtcccacagggctttgacaccaggcagtgtggctccataggctgagctcctgtagtgcatgaagagcatttgtgcaaaagacctctaagatttgtcccattcctgagaccctgaggtttcagggagttccctgctgggaccattccccagttatttacttccttgtaataggtcatgcttagcgtaaggccaaggagacaagacactgctgactcattctttcccagctgtgcaggctgggcacagagccaggctgcttgtccagccctggggcagatgccggctgctgcggtttggcagtgggtcagcagctgggatgaagccacagagtctgacctgtgaggagggtggtgggtccacaggaacccaggctctgcagcccttctgagatgggcggatctgggcataggaaagaaatgcaatcaggaatgcagcaaggcagagttgaaaagtcctgtgaagactgtgctgagcatcagggtcgggtaagcctcctctgggggttgcataggagctgctcacaatcatcccagtattattcacatcatctgtatttagtggcacctccttggtgccaaggtgtgagccatggccccgggtagcacagcctcctgcttcccagctgctggagggattgccctgatcccatgcttctccaaggtggtctgggggaagcaacccagcagcaactgtaggagct

SEQ ID NO: 36561 - DNA, 973 bp, Homo sapiens
gcctgcaaatgcatgatgggaagctccctgtgcagtggctcgcttttgtccccctttgacttgacacagcccagagacccagtaacagagcagccctgtggtccacagagagcagtgggaggaggagaggcctgtggtcccccctcaacagaggtgaggatgaaagggagctagtgagctaggttggcctctctgacccagccagaagaagcgtcccctccatcagccctggtagtggagcgctcctggtgtgcataccttgggaaagacagacagcaggacctggggtgagccccgctttgtctcttctgcctgtgccgtactggcttcgtcaccccatccctccaaacctcagtctccacctctgcaaaacggaggctctaacacctcccttgcaggcctactgttggatgtggggaaggacctgctcagaacccggcacatgtgtgtgatcatttctcccactctgggtctgagccatgagtccccacaaagagatgcttagccccagcaaaactggtatctgctggtctgtttccaggtgacctcctgtaaccccttccgccctgggcaggtcggctgacctgtgaccctgaggtgttgacagaatctctgacctctgggaaggagcaggtcactttaccaagtttgtgcaaatagataaagaacaaagtggcccataaatcagagcaacaggaaaaacaaataattctctccccccttgggaaagaagccgctgcggtgtgggtggaggtggagggtgaggggaacgctgtccaggttaccttcgtggtttctcctgatgccgctgagtggctgcccacctggatggaggtggagatgggcaaccttgggaagaggactgtgccaggccggggcaggacagtgggtcctgtcctgcaaggtcctggtgaattcttcctcaactgcagaggaggggaggcatttggggacctcgaggtctcttcctgga

SEQ ID NO: 36562 - DNA, 578 bp, Homo sapiens
ctcaagcagggacccaggggtgataggagagtaggggaattgcattctatgtgcacagtttaatccctccaaacacacagccagatattctagtaactaaaacatgacacgaactcaaaaaggtgaggagcctgcccatagtgtgactgtgtgactgcagagggtggtggcttggagcttttctccagacgaaacaagtgcaaacatttcatccctgtccgtttcctcttgagtctttgaacataaaatccatgcagcttcagaggggagcatccatttcaacattccctttttgtgtgttgacattgcagataaagacatttcatcatacgcctaattcctgtggcttcctgagcccctgccctctcccgctgaatagctggtggggccatggtgctcacattggcctataatgttgcccaatcctattggccaattatttaattttctgacctgagtaggcaatacagggaaaaggatagcccagtcccctttggtcgtctctccagccaggtttgttgtatattttgttggggaggacagagtggtagaagaaagctgtttgtttgcttgatcca

SEQ ID NO: 36563 - DNA, 3597 bp, Homo sapiens
ggagggaacttgtgaggcaaatatatctgcaggggcttccctaagtgggcattttgtcccatgtggctatgtcagtgggaggaagaaagtgggagaagaagcatctctccaccaaccaggcagttgccaaaaacagtctctctcccaggcccagtgtttattgttctctgtcacagcctattttctgttacataatgcatcagactgacccccgccccacagactctgccccggggtcctttgttggctttgccccttgggcctctgattgggcagctgaggggcaggccctccgaccagcccctgtcagttccccagcaggggcaggccccctgggcccactgagctcctgggtggggccgaggaagcacaactgtgggcaaatcaaggctcatcagcaacgtggtgaaagcacaactcccagtgcctcatctgccttggaaccaccaacaggcttccggctagggttaggcaaatgagttcataagatctagaagcgagcaggattccagcaacatacaaagtgctggaagggggctgctcaaggttgaagaaaatgaaaaagaaatggtatcactctgtcccaaactggactgtcacctccagtgctgatgtccttacggtccgtcctgtgccttcagtttctaagggctggagggaggggtagggcaaggggagtttccccccagagctctggagaactcataagtgagtgagaagagcaggagtgatgcctgcagtcatggtcaagttccttccggagactgggcaggtcccaggaaccaggctctggtctctagaccagccctggcaagacactcgggagtgtgtgtgtgtgtgtgtgtgtgggggagtgtgtgtgtgagtgtgtgtgtgtgtgtgtgtgtgtgagtgtgtgtgtgagtgtgggagtgtctgtgggagtgtctgtgagtgtgtgtgttgtctgtgtgagacagtgtgtgggaatgtgtgtgtaagtgtgtgtgagagtgtgtcagtgtgtgtgagtgtgtgtgtgagagtatgtgtgtgagagagagtgtgtgtgtgtgtgagtgagtgtgtgtgtgagagtgtgtgagtaagggagatgctgcttcttgatatgatacaagtgtgggcccacctggcagcctaaggtgggatgtggaagccaagggtggctgcagcccccagtggctggagaaggcaacttccctgacccagagttgccgagtggctcagggacgggccagggccacggccaggagccagggaggaggctctgaacaggcctttcatccatggccagagatgcctgggaagcaccatgtggggcagaccccttagagtccgagcaagagcctctcccgcctgtaactactctacagccacgacggctctggcagagcccgagaaacccacaaatacatccatgaatatttattcagccagtaaaaatgtaacatgcaccagttctattccatgaggcttctaggtgctggacacagcagtgaaccaagcagaagacgctaccttcccaagctgcccgtgacaatggaacaatggcagctcaagtcaggaaggctgcaggcatttcccaatatgctgtctcacgatggccctgccacagccctgcgagaatctccactcaccagcaagggaaacagaggctcagaaagcccagcgagtcagcccaagtgcagagagctaggtgacacaccagatgtcatccagtctctctgtcacatcctcaccctcaaggaggtatgacggtcccgtgaaatcaagtaaaagcactttgtaaactaaaatgcaactagtgagatgcggttcttatcatgaatgggaaagaaataggaagtgacccaggctgaaggtgagctgagggtagagacagaccctcttgggtgtgtctgggctttggttttgcaggcagtgtactttgctccccaaatgcccctctcctggtgtcttcctgtaatctttctgcatgagtgagcaatgtttgttttggaagctgaaggaccagacttgtaccagttgagatgagtacacttttggtcacaggcgggggctcagatccctctgcacacaggaattcatcctgtcacctcatgtgtaccatccataaccctaaaagactgccctgtcatcttatctggcaactgggattttagcagtcccttcattaagcctggagaacaaaggcgggcgggtgagggtctccgaatgtccaaacaccctgtcacccggagtgtgaggctgcggctgccccggggagggccaggcgctgtttacagatgggaggagataaccgcagaggaaggtcgctggagtcttctcttccatcctccctctcccacccctgaggggggtccctgaccaccctgattctccagctggcctggagacctatttcaagctcctgacagaggaatgcatggcagagcatgtgaagcggggtgtgatgtgggggcagggaatccaacccacgaattggattttacaatggcacgcccactgctgccaaggggaagtgggaagcaggaattaaagcaatggagcaatggtttgagtcaccctctctgcgccagaacattctgagaaatcgctggttcgtactccaaaactcctttccctgggacaggagctcctctatatcatcagaggcaacggggtacccagaggctgcttggataccatcagtgacagggagctcactcctctaagcatggtctgttcctttggagggtagtttgtgggaaaaaaaaaaaatctctccagggctgagctgtgacctgtgccctgtggctgcaggttgaatgttcaccttggctttgtgctttaagttactgaaactcattagagagtgcgttctagtggacattattatcatccccactacccaactaccagcaagaatcatcaatgataacttgcatttagagtgtcttcgtgctttcacacccgagaatgtatttgttcatcctaacagccgtatgaaatggggataaattaacctcattttcttttttcagatcagcaaactgaggtctggagagatgaagtgacaggcacaagcggtaagagcagctgggaccagaccccaagtctcctcactcccagtccatgagggctcagctcttgtcaggcactccctaatcccggacagtcattctatagtaagggccaactttgcatttaacaccgagaaagaatctcctctgccctgaagatcacggtggtcctatttcctcccaaaagatggacaggtgttgtttacaattcagtattcagaagtgaactgaaatgcaagagctggcaaagcttgctctgagaagggaggtccccgtgcctgaagttgggtgtccatgagctggtgaaggactcagtgtagatatgacagagggtatgtcagagccaggcagggggctggagtctatgacatcaaagtccttttcaatctttgtaggaagacttctttccttcccaggccctgtccttagcacaaatttggggacttacgtgggatggtgtcttgcagggacagtgatacatgtcagagccagccatggcgttttctccctgtgctgggcagccggccgccagcac

SEQ ID NO: 36564 - DNA, 1567 bp, Homo sapiens
ctagccaccaggaggatcaggcaggtcaaaccgtgcttgatggctagggtatttctccctacacacactgcatgtttaacacaatgaaccttccacatagccacctcccacttccccataccagtcactacagctgcttcatttcttcctaggagcctggagagacaattcacttctctgattcacccaaggtgatcgcctggtctgactgaatcatttacctgctggagaattcttcactggctccctgatgacaactctccacctctcctcccaggcagcaaggagacgccagtgctggaagggcaggtccagggagacagtgaatttgcaaagagcacagtatgcccataggcttttgtggataaaaactaaaagaaccattcaacggtgacgaaaataaaaacccaggcagagtaagcaatgaggagtccatgtgaagaataattcaggcataaagcaacaggcgtaaaatcccaaggggaacctggagtgccaggagtgggagatagaattgaaggtcattccccaggtcattgaacctggccacaggcatcgttatcaaagtgcccacagtctgggctgggaagcaagtgaaaatgttttagtaaagagagttaagctgaatcaaacacagccagaataaagtccagcttcgtaagtctaacattcaaagttcccaaaatttgaccttaatagtcactcccagcatcacttccaactatgaatgccccaggtacacatatccacatatccacaccacccccaaaatgaaccattacttagcttcaccacccaaacatgcctcacactttgccctgtctcagttactcagtcaccatttactgagtgtgtttggccaaaatgatgacctagtgcacactaggccccacgccaggtgcctgacaggcattcttgcagaagattaagtagtaccatccccatttttcatgagggaaattacagacagtagaaatcatatgcccctagtcacagagcccagaagagcaagagccgggtctggaatccaagtccttctaactaacaaaacattgttctgcctctccagcccccagttgcatcccagggttgtctcaggactgggtggggtcctgtgagagaagtgagcacagtgatgtcttccaagagctctgcggaccaggagcaaaggtccaccagctgcccagaggaacaggcagtccaggcgagggagaggtgctcagtgataagtgttgggaccataggctgctgggtgagcttggaagcatctcaagggcagctggaagttggggagcaaagtcaactgtaccacaatatttgatttttgtatcaaaattcctatccttatagttcaggaaccaggaagcaactactggcaaccatctcagtgagctaagcacatgtgtgtcactggaataagaaacatgtgcaggtaggctgagcacagtggctcaggcctgtaatcccagcactttgggagactgaggtgggcaaatcacttgaggtcagcctggccaacatggtgaaaccccgtttctactaaaaatacaaaaatttgctgggtatg

SEQ ID NO: 36565 - DNA, 1572 bp, Homo sapiens
tataagagctttcataactctcaggtaggaggcactacgaactccatttcacaattgaggaaactgaggcacaaagaaacgaagtagtgacagcagctttcctttttcccttcaacagtttggaatcaagctgtttgagccgaggctgggtctcaggaggtgtggacagcacttccatctcggtaaatcagattcgcctgcccataactggggagaatggtggctttgaaaaggttaacttgggagccctggggacggctgcagggaacgtacgcccattccccctaggaagcagagccaggccgcctcctcctccgcagtggtgaggacgcgtggacagtcccgcgggggcggcgggagacctgcggagtggccgcactccaggtccgcgccaaggccgggcagctccgctttctgctcagtctccgcgaggtgtcgccttcggccgaagaaaccaccgcggcgccaccctcgtagctcgcacttatttatttatttattttcaaacaaggggggcgcccctcttctttcaatttgaaactggaaacatccagaggtcttgttcctaagggggcgcgtcctctccctgctattttgcaccttcggactacccttctttcgtaattacacaggagcaacctccctgcaaggccttgctcaacgttggcctcgcgctcagctgcacaacacgcagtcaaagcgggggctgggttagaagcatcggtctcccctccccaacacacacccccggagccctccgtaatttttttttcttttaatgacaagcaattgccaggctcgcagggtgggtgctgcattgcaccgctccgcgcgcagctggttctcagagtgcagccggtgcaagcccgggggtccaaaagggcgggaggagcacaccctgggcttcccagctttgcagccttctctctgcaaagaaaagcaagtggcttttggcgcgaaagccttggcgcctcccctgatttttatggaaatcaggagggcggggtaaagccgctttcctctcctttctccctcccccttgtctgcgccacagcccccttctctccccgccccccgggtgtgtcagatttttcagttaataatatcccccgagcttcaaagcgcaggctgtgacagtcatctgtctggacgcgctgggtggatgcggggggctcctgggaactgtgttggagccgagcaagcgctagccaggcgcaagcgcgcacagactgtagccatccgaggacacccccgcccccccggcccacccggagacacccgcgcagaatcgcctccggatcccctgcagtcggcgggaggtaaggagcagggcttgcaaaccgcccggcgcccagggaagcgacgagcgccggggcaaggcaagccctggacgggattgcgacgtgcgcaccgggcgccctaatatgcccgggggactgtttctgcttccgaaacaaaaccatctctgggttttcccagaaaagccagttccagccccgaaggcatcctggctagaggagacccgccctaatccttttgcagcccttaccggggggagtaatggcttctgcg

SEQ ID NO: 36566 - DNA, 1783 bp, Homo sapiens
cacttgaacccaggagacagaggttgcagtgacccaagatcacgccactgcattccagcctgggtgacagagtgagactctgtctaaaaaaaaaataaaaaagttcatgactcaaccatgccagaaagcatggagactgcaaaaggagacagatgattaagaatgtgtacatatgtattgcactgattagctatgttagcactacatatccatatgatcttggttgaatacaacaaaagaagcaaataaactgtcttgtccaacctcttatattttcaggtgtggcccagaaaaattgaccgaattgtcccaggcattatggttggttcctggcagatctgaaccgagaactccagtatcattctctccttctagacagacacacacacacacacacacacacacacacacgcacacacacatgacaggggcacatgtcccatgctgctttctatttaaaaaaaaaaatgacatctgcccaggaatcacattgcacaatggcagtcctttcttttcctcttcctgtgttgagtcattgcccttgcctgtgaagtgcctgcatgaccacgttgccctatggacttactcagaagaaaggagtaatgatcagctgatgggtcagacactcaggggtacacagccggccccactatgggaagcagagatgtgctgggggtcagagcagccctggccttgctgtccctatgtaagatctcttcttgtctctatagaatgcaccagagctctaaacatagagactgtttataaccaaaggtcattttcctggtagaacaaggagtcctcttttgctttggaggcagatgagtctgggctggctcatagtgtttgatgtgagatggctgtgctcaagtttcctggccagaaagttaagctgtggcccttcagagttttatagggcccagcacaatcttcttgcctcctgcctgggccccagtatgccccgaggccacacccactgtggccaagtgcatggtccagggaaaacaggagctgccttttcaactctgcttccttgatcataggtttaaccaataaggctcatgacaactactctttctgagcacatttgatgagttccatatgagacacatattatctaatttaatgcttatgataatccttcagaggtgagatttcagctcccttttaaagtcaggaaactgaagcttagaagagttaagtgatttgctcatagattgtaaactgagcttcttatatcgccgttaaaacaaccctggattctgtcctcctcagaatcacgactctggagaagtcaaatgggttttaccatgaaagacgagtaggacttgcatcctcctggtgtccactccagcctcactttcccaccaggagcctgatcactgtcctcctacgaggtctggaagtgtcctcatggaatgtcacctcatggactttttattttttagcttaactgagcctcaagttaaaatcgctcaatcaacaaatgttttggggatagattgagctccttgaaggaagtgagagattcatcactatatccctggggcctgacacatagtaggaattcagaaaagttttgcttaaagaatgaatgagtacctcctctgtgccaggcactggacaagagcaatagggaatagagatggatgagcgagcagtcccttccctcaaggagcccagaatttaggtcagaggagaagccacatttgcaagtggaaagcaagttaacagtgcaagcatcccaagttagggtccagatgggttttactgtcaggaagag

SEQ ID NO: 36567 - DNA, 459 bp, Homo sapiens
ccgtggtaccccatcccccttcccaggcgaaacaggacagtatggggccccctgttttgttaccccatcccccttccaggtgaaacaggatggtatggggccccctgccttggtaccccataccccttccaggcgagacaggatggtagtttccaccgtctggatccagacattgactgtttttccatcagaggcaaagccaatgaactcaagactagtgaaccctgaaccgaacgattttcgtcaatattttcatcatatgtttatcgtctgaaactttgccaagagctcaggggaagttattcccagaggatcaatcacagagagtcaatcgtgaaagagaaaagggaagttactgataatttgacccagacatagttttatgatctctttttcctttcaccacttgaaaggtcagaacaaaactcactttagatgctgtatttcattctttcaaca

SEQ ID NO: 36568 - DNA, 418 bp, Homo sapiens
aacaaagatttcttcagtgtcagcaactgatggagctggaagtagatctaaatagcctgtttcaaacccagaattctctcctgtactccaggtaacgccactggttgtgggcaaaatccacctgtgagccacagtctagtcttacgaaattgtaaaacggatgcagggggtgaaatttcctttttaatgttttaactttagattggccttctgcctctgactctagaatggtttgtactgagtaaatattaacccagggctccatggccagtgttttatgagctggtggaatgccctgcagcaggggctggggagaggggaattggctggccccacatttgaagatggcacctgatgcttgggtcggcaaatgtctgaaaggctttgcagcttgctgggcagcccaggtgggaactta

SEQ ID NO: 36569 - DNA, 641 bp, Homo sapiens
agcacctactctgtgtaggagaccctgagagatgataacctctcagtcttttttcttttttcctttaaatagggatgggttctcgctatgttaaccaggctggacttgaactcctggactcaagtgattcttgccagaactcctggcctcccagagtgctgggattacaggtatgagccaccatacttggccaacctctcagtcttaagtcctctgttacatgtagacaccaaggtgcagtggagagagaggctgcagaagagttggcctatgacacagaagattggaattcacaaactttccactccctggcagtgtggccttagacaaatgagtgcatctctgagccttagctaactatttggtaagatacaggtgaccattcttgctcagtctacctcatgggcctgtgatattctcaaaggtccctggtaaacaggtgtgtggagagtcctcattatgactccccctagagtaggcccttttagagggcaggagtgtctgtgtctctgtcttcagcacaggcctggcagacagcacatgggcccttgtgagtgtgggaggcaatctcctaaatcttagctgaaatacaacattcgtcaggatcttcctgctctgttcacaccttacacatgaatcca

SEQ ID NO: 36570 - DNA, 675 bp, Homo sapiens
ccctctttttgttttgttcccctggaattagctaaccttgcacaacaaaaggctagactgctagctgcctgggggcagggacagccctgcctggttcagttttgtaggttagttgttaggaaggaagctggtgtagaattctgagaatgttttctacaaatgttgggtgaataaaaaaaaaacaggggactaagaaaaaagaaggaaagaaagagtggaaggaaaggagggtggaaggaagaacacaaggtcacttttcctctggacaaagtccagagtttttggaagagaaggaaaggagaagcaacatttgccacctcctgctgtgagcccaaatgttataaaacttagttctcacaaccaccaggagggccctgaggataattgcccaagctctgctatttacttattaaccaataagtaaatctgtcttctgggcaagttatttgctgagtgggtgagtaagttctttgtgcccctgacttctcctctaaaatggtgagaattaaatgagataataggtgtaaacccattatacagttattggcaaatactaagtgctcgatacatgttggatatggttatgcttcacgatgaagaaacagaggttaagtaacttggccgattcacaaacctgagaagcacgtggctggattcccactttgcttctagagc

SEQ ID NO: 36571 - DNA, 758 bp, Homo sapiens
gtgcagatgggcttgtggcgctggttgaggcccagctgagccatgagatgctaccggcctggatgatgggttatcagagccctgtgcagaccacacagacggctgcccagaaccccactgctgccggctctaccacccaagcagtcgctaggcccccctccagctgctctgacattcccttcccaaggcctaagaaatgctctggccaagctagatgatcacagagttcagtggactcctggtgcactaaaagaaaacacacacagtgttagggctacggagggcatggttggatgtttgaggcaagactgctgttagtcaaggaggaggggaaggggcggtgccggaggaggcaggacgccctgaaggatccaaaggtcaaaggaaacaaatattgcaaagcagctactttaagccaggaattctgtaatggttatttctttggttctctctgaaaccctgttaagcaggcattctcatttccagttcatagataaagaaactgaggcccagggagattgtgccgagtctgactccaaagcctgtgccctttccactacacaacccttgtcagaaccagcccttaaacaaggttcacatccaagtcatttattatacatggaaagagcttctgaggcctgttgaggctgatttgcataattcatttttagaacattaattagccgggatgtgtaatagttcttgtgccaatttgtgtttcaatttcaaatgcaaatacaaattagcaaatgttattc

SEQ ID NO: 36572 - DNA, 905 bp, Homo sapiens
cagaaaggcaagcacagagtggtacctccccctaccccttctacagccccagtgaggactttcaatccagtggcctcatcccagggaaccttgggagagctggcaaatactctaaacagataaaagataattgaacaaggagtgagtagtaaacggtgacaaagtgctatttccataataagcttatctgagtaaactttctcagagcccctgagttccagagcagggtgtggatttggcaatagtaaagaaacaggccacgccaggaatgtctggggagctaatgaatgcccctgaagtggttgacgttcctatctctgctttggatccctgccaccttgactcgaatgtcagacggtgtttaattggcaaacagggcttcaaagggttgctgggccctgctcccagggccctggggctgttaatgtttaattgtcatgtgcaagggcccactagctcttggtagatttgggtgttttattgcactttgaaaaagcaacgttatgagtctccttcttgctccatggacatttttacagacatgccttggagtcacatgttgcctcacctaaactctgagtagcaaagtcaccatgttattcagcagggttagagagaaacaccttcaagctgaaaatactccagatttactgcctgtgtcctaaaatcaacaaatattgatttctttggagcatctggatcagcaacagaggaaaaaaaaagaaactgagttgggggtgtaggtttagggaagagaaaaaagacacagaagtgaaattgctaaatggcagatcatacaatttcttcattgaacgctggtggcatccactctccttgacactggctctgttactcatggctctgctggaaatgcaaatctttaaaaaaatccctctccctaaaag

SEQ ID NO: 36573 - DNA, 1273 bp, Homo sapiens
ctcattcccctgctttcaaaaggccttcatctaaatcaaattctcatgatccgataactacactaacagcagccattcgctgagtgtcagccctgcactcgatgctatgctaagcgctacatgcaaatgccctcatttaattctcacaattaccctccagtaggttagtttgaagagttactatattgtatatttctgctaaattggagagcttttctctgggcaaatgcaagagcttgcagttaagtaccttatccactaaggggcattatcatctcacattaaaaataccagacctggtcaggtaggtaccgaacacaaatgcagaaatttgtgaaaaaaggacaaagcagaagtatcaagttcaacatcctgaatattttctaaacgtgattccactcatttgtaaaaagtgtttaaactcacagttgtagtagccaacgcttacttaatgtagtaactcaattgctgcttcaaggtcatttcaaaagcatctgtcttgaccactttgccagaaaacggggctatgacatttgagaaggaaacgtgaatagacttagccatttggcttagtaattatcctctccagccccttcaactagtttcttaagtcacgttttccactgaggaaaacatctgtgttgtggctgaatcaacttcactcaagttaagggtaaaaagaaaggttggaatcctaccacaagcttatcagaatgagtttctataactcatttaaacaaaacccccacttaaaattatattttgagtcagaaaatactctggaaatggaaatgcacatagttgaagaccctcaattcatgatctgtacccccgagcctgcttttatggacagatgggagatggacaaaggtacaagttgctcccatggaggatgtccctgcaggaaatctgcaatccacaagagaaggcagcaaagtcctcatggaacttccctgtttagattgataagccaagaccacaattaaaccaaacaaacaaacgcacaaagtttatctctgaatttctgtgtaagcccagcctggctcctgatgactcagcgatgctctatcctgatttaaactttcccctgtcgtcggggttcccaggctgctgtctgtggccacacagtcctctacattcgaacgctttgcctttcaccctctggagagcctgcaagcctcccagacagatcaagcactgtttgggctatttcttcattccacttgaagacagcaaattgtgattccaacatgaggtctgagttgctccccag

SEQ ID NO: 36574 - DNA, 1098 bp, Homo sapiens
accttgtgttcagcaggggtgacagcaactgccaaggtcttgaggcaggactgcaaggagtatgtttgaaaatagtaatcatcctgcaaagtaattgctattatcctcattttacagataaaaaatcggaggcactgtacagcaaagcaactcatctaaggtcacaggactggtgaatgtacagctgtaatttcagcctgagtctctctgactccaaagcctttgttctttccttcacattgccatgttcaaaggcagtgctggtggtatgaaaagagagagtggaatgccccctgaatttatcatcccacctcactcttccagggaagtttcctggatccttcctccatctatacatcaagcagtttatcttgactgagcaaccactatgtgcccacttgtgttgggcaccaagggaaagccagtgttcatgaccacctgatgatctcacacaggagagagctcacagaggggtcaaagtccacctggagtaggtcagagaatgagagctggactgggaatgcttgttgggggagatagaatatgagctgggtatgaaagaatgaggagtagataagcttctggcttggtgactactcggcttccccatcacccccacctgtagtaggtagtattatttgttgacccatatttctttctctacttctattgccaagtcctccctgtgggtagaatgttgtctgtttcattgactttggctttggccatatgatgtgcatgggttaatgcaatgtgggtgagagtgacagttactgctttgatctgaaacttggagagtcatggcaaagctctgctggtcttttactcttcactttaccacaagaataaagcatcccaggtagttgctggtccagaatgagtagatatacggggtggaactaaatccagcccattttctaaagtcaagctcagccaacccagcaggtgccaatagtatcactgttggcctgtccacctgtaaatgtgacataaacatttgttttaataagccagtgagatttttgtgattgtgtattacctggcactcttacagcagtatttaaataataaataatacacctttgctttcagtcatag

SEQ ID NO: 36575 - DNA, 957 bp, Homo sapiens
aattccaacatctattgagtatttattaaagacaggcactgataagcattttacgtaaatcagttcagtgaatccttcaatactttgaactgtgtactattattctttccattttatgcaggaagaaactgaagcccagagaggttaagtaacttgctcaaggtcacacagcagtttagtacatagtcagtgtctgaatttacacaggctccagagtctgcattttaaccctttcaaaatattgccttcctcattttatagatgaagaaactgtgccattcagttgaaagagatttgcttaaggttacacagctggtttatgaccaatcaggtcagtgcccaggcctctcggtgccagtctgggcttcattcaaccttggttgtgcccacgctggaggtgcccagctggtgacacagccaggaggaatccttgcagtggtgcctcctgccaactggccatacctgtgtgcagtccacgctgggcatgttctcatttgcttgcagagctggaagggaccttggagcatgtccaggtcattgacttttacctgactacccattaaacttacctgggaaagttttaaaaatactgctaagctgcactctcagggtgtctgatttaatggtacagggggtgtgccaggacattggtattttggacacactcccaggtggttctgaagtgcagccaaggttgagatactctgttgtaatccaacatactgctgtgccaccccatttcatagaacaagaaatgacctgtgtcagtccccaagtagtcagaagcaaagcctagcctagaggagactccctgatgatattaaaccccatactcgattctactaaacaggagttccccgctgatcatatcaggcatctacaccttcctgtggcacatgagcccagagcaaagcaaataaaatcccatctggttggagaaaaataaaatgaagacta

SEQ ID NO: 36576 - DNA, 969 bp, Homo sapiens
cagagagcgagaacaaatctcaagtgcgatggtccctgctcattcctctctccagcccctgcctgcatgtgcctcttgtagagacagctgcagggcccgcaggccagagcccctgggtcagagcaacaactgccttgtgttttctccaaaaatgaagattgcaaaatcctcgtggcctcgagttcacagctgtggaaagaaacttcacgaggtgacggtggggtcaaggggcccgggtggggacgtggggaccacagggcaggaatgagcacccacggagaaatgcagtcccgaccccttccaccccttcaggtctggctgtataaactcggagaggaggctgctcttctcagcttttcccacgtttcagttttctctacatctggttatgtagcaatgccttctcatcccctgagagctagcaccccaacatatttactgaacatcggtctgggttatttgcgtgtcatcaagctccaagggcattcaaatgaccttctggaggatgcacagtgccttggggaacggcgccacctggtggtcactcggagttaataaccacattctagggcgaggaagcctagagcatactggagggaccaggtggaggctcagattaaacaattcctgctgccgctgacacatctgttccatggtgacagagctgagtgtgtgtccctggctagaggcagtgattggacaaggatggtcaaaatgtatccttctggaatctgagcgctgaagggtggtttagagaccaatacaatcccaaccattcatttctcagatgggcaaactgcagtccagaggggacagaggttacctaaggtctttcaataaattagttgaagagatggggcaataacacaggtttctgggctccttgtctgatactcctccattctagcacttcagagcacctcacggtgatgtccgtcctttattttattttattttttaatttgaatt

SEQ ID NO: 36577 - DNA, 836 bp, Homo sapiens
aaagttattgtgaataaggtactaatggtgaataggatgctaaaataggggttttgtccattttagcacaggccctaagctgagagcagtaccatagtagcagagtgcctcccgcctaaagccaggtgtgaactctcccgtgcagggcatgcaaatagattgtgaaactgattctgccaagacagaccaaccccaacctccagcctggaagagttgagttgggcaagctgggagttgaagagaggggtcagaatgttgtcaatatcaacctccctgcttgtcccaacaagaggcaaagaagtgattgtctctcaccttaagtgagaggctttggcttcagggctacttgaaaagctttatttgcattccctgaagtttgaaggacagaggggactatggtctgaaacattcctgagaaacgtaagagcaaaggttacagtctgtgcctgaagcaggaggagcgagaaagccagggctgtccagggagcaaactgctctcccacctgctggggcacagatgagagacctttccaaggaccagtggactcatgggatggagaagctggagtcccttggaagagctatgtgcagggagactgtctggtggaggaggtaggggtggtggtgttaccagtagaaggtgtccacattcttggcattttgaacaaggaattgcacaatacacacaaacaaagcaagggaagaatgaagtaacaaaagcagaactttatagaaaacgaaagcacactccacaggataggagctggcccgagcacaggggctcaagagcccctttacagaattttgggggtttaaatatgctatagaggtttccc

SEQ ID NO: 36578 - DNA, 1284 bp, Homo sapiens
gggcaaggcttgcattctgggtctgactgacagatacgtcttcatgcgtggctgcagacccaccatcgcatgctaccaaataactcctgtgtcagaccatgccagtggctgactgtcatatcagagggctcattgccagtcagagttagatctctgagctaggaagctgatgtgcatcctgggcgcaggcaggccttccccagtctgcagtcttccacatgctatctctgtatgctcctctggggagcagccgtcagctgctttgcaacagcggggccagaatcaagggaaagtgggcctgatttcacaaaagctgcagccatatattttttactcttcgaggtgtaactatggtaatgagatcagaagaaaaaccctcaaatgcacatggcagtttggggtactggagaagggtttaattttagaacctgagccttgcttcatggaacaaagagcagtggaacggggcttgccacagagctgccacaggtgcctctccttccaggactgcacagcctgtctgatagcaggcaatttttgtgttcatcagttgtggaatttgtttggcttgtgacattcgtctactgctgcagctattgtgacaagggtgcgccattagaaagtcattctgttgcggcaattttcaggagtctcaaccgagcaacaaaataaccgaactcaagaaaatgcagctgttctaatcattccatatttaaacgaggcaatttatttgctttcataattcttaccacaaactctatataggggagataccaggattatccccatttgacagatgacgaaattgaagtgcataggttgtgcaagatgccctatgccctgaggtcccaggatgaggaaatgatgttgtcggtatttgatccaagcaatctggctgagagcccgtactcttaaccattgcatggccatcacaatccagcatcagttatgcaagctgcgggcagggccacctggggaaaagaggatccttggcagggatgtaggaagctgcaacttaagaattttcagtcactgccattgtccgtgcatctggaagggctaatctctgctctcataaaaggcaaggctcttggttataatttccaagtatgaatatatgtcctcccaaggtttcagggctggaggagagggagcaagaagggatctttaaaccctgccaggggtagggagtgagtgtaaaatcagtgtcaagtctataaaaacaagtttccaggatgtataaacagcttctaaatgtgcatacatgttaatccactaattcaa

SEQ ID NO: 36579 - DNA, 1065 bp, Homo sapiens
aaattcctggctggattacactctagagccatatttcttgcaaaatccaacatctgaaatcctagactgagcaaagaattactttttggggggaaaaaaaggagtttaaagttggaaaaaaagatcttttatggaaagacatcccaaaatcacaccatgcactgtttacttataaacttaactaattttattacatacaattctttgcttctatttttcaaataacaaaaccgagatgaagagcaactatctacttaccaaaagacacataattagtacgtggtaaagcccagttttcaacattggtacaactctaaagtccatgcgcttatcttttctgataatatgtaccagaatacaaaagcctctttccacaaagtccagggcattccagatatgtcattgaataaggtgacattgataataggaattctgaaattagtgaccaaaagcatttaatgaaaaatgtagggtttaattaataatggcaataagtcttgaaattttaataaaatttctggaagcaccttaacatcttagaactatctgttgatttttacagggagagtaagccagtgtgacataaaggaaagagtattttgctaaatgtcaggaagtggggattcttgttctgactctgttcctggctagatgattttaaatgagtcattttgttatccttagccctactttctgaatcaagagaataaactcatcagattaggtcatctcaatattttttgcagctttatcactgaagagataacatcgatttcaccactgctaaatgaaaataaagacctgatccatggactcacacatttattaccaagtagaaatctgcacatcccaaaggttgtgacctgcttaaggtcacacagcaatttggtggcagagcagggatgaggacccaggtgtcctcaatcccaatgccatgtttctcttcataccagtagcttgcaaagtggtcacttaatatttgtctaagtcaaaaattgaatcattggaatgcagtgcctttggtggataggcccccaagaagggtgtttttgtaaatatagaaat

SEQ ID NO: 36580 - DNA, 737 bp, Homo sapiens
ttatgaatgtagatgcagaattctcaacataatacaggcaaacagattccagcaaattataaaaatttgcttttggtccatgaccaaaaagagagagtgaggggaagagacagagagagagagagagagagagaatatcaatagacagaagaacaaaagccgcatgatgatctcaacagacatagaataaatatgcaaggaatgtttgacaacattcacactctttcacaatagaaatactcaacaaactgggaatagaagggaaattcctcaaaatgatgaaggaaaactacaacaaaccccctgttgacattgtacatatggcgagagactggatgctttcttcctgagatcagaaaaaagcaaaggtatcatcttttgccacttctattctgcatcatactggaagttctactcagttccactgggcaaaatagataaataaagtcacccagattggaaataaaaagaagtaaaactatctctacagatgtcatgatcttgcataccggaaattctcagggacttactaaaaatctattagaaccaataaacaagtttggcaaagttgcagaatacaggatcaacatacaaaaatcaattttatttctacacatttgcaatgactaacaaaatataattaagaaaatatatacaatagtatcaaaaataataaaacatttagaaataaatttgacaaaagcagccccaaacttacattcctaagggaaaaaact

SEQ ID NO: 36581 - DNA, 1312 bp, Homo sapiens
ttaattaccccaattttataaaattcaatggaaggtttaataaacatgtatcaattccatcccactaccaactcaatacatacaaatttttaaaataatctattttattactgatttttgcattaaaaaaggtttgatttattattactaaatatgttttaatcctagaattagactattttctgtgttgggtaggttctaggtgtcagattgcaaatgggaacattatttctgggattgagtcttctcagaaaatagttacattatcaactaacgttttgtgatccaacttttctcaacacatcatcctctcttcttccccagaaattagataagaactcttttccttctcaacacagaatcatcactttaatccataagaagttaaaggtttctccaaatatttacctcttcagtcaaaatttttgggtgaatcaaaacacatcccttatatttctgtttcattttgctgagtcatttccattctgctttcaggacaccatcctaaaataagaattgcttttccttttgactcatgtatctacagaacgatgcctttgttatttctaaagttaataattacctcatttttctaaaggctgagagggtgaaccgcacaaccgttcttccaccattctccagtctgctcctccaaaaaaactgtaagttgaccaggaatctaacaaaacttcagtcgtcagtacatctcctctccttaggtgagctcccacaaacccacaattatatcccccagtttggatagaagaaaaatgatgatgatcatttacatatctaactgaaagtagaaaggcacttagtaatgtgttcaggaaaataacatttgtggcagtcaattacagaatatagtgatgtcttgtaactccctcaccctacccccgacacatacaccagatatctctatgtgttagccccacaaaataaaaatttctgtctctcctatctctttctcatgtttgctttcttcctttactctggatcgttttctccaaaacaacaaaaatatcacttatattctttaccccttctccaccataaagcttctcttaaactacttcacatccagtgctgttgacttctctaaaatccacccccaactcagcctccctcactctctgtgaaactgtgtctcccttctctgttcccacagctccccacccaagtgtctcttacaatacctttccatgtattgcaatgacttaattatgtgcctgtggctcctaatgctccttgagggagtgatcatgtttattttatctccaaatctacactttacgtcataactggtactcaa

SEQ ID NO: 36582 - DNA, 686 bp, Homo sapiens
ggccaagtgaaattgagcaaagtacgataactattttgggtttattatgtaccctaagaaattttgtgtagcactgaaggacaggagatactcgaaatagagaaggcacatgagaaaaataacccaaccaattgtaccaggaatgttaaaaatcttcaaaaaaggtcttcttgtaatattttaggatgtgaacatatgatttccttttgttgttgttgtttgtttttagaattcctataaaagtaatatatgttcatttgtaaagtactggtgtaaagaggtacataaataataataataatcttgcataatctcactagactttataaagacattattgctgtctgactcaccactctgtaagagaaacagcccagctcagtggcccagggtacatatttgctcttgtgaagtacaaagtatctacatttggtaattgatgaccctgactaagattactagttaactcaagcatagtcattagagaagaggcaaaaacctaactcctggaaaaagcttatatgaacaccaaaggctcatatgaataacatcaaaaaaagcgcctatgaacaccaggtgtcagcgattaagaattaaggttagtggtccaatgtcaagagatgaaagctgacagtgtcagaattgccttgaacaccagctagtgtttgaagcttattattataagc

SEQ ID NO: 36583 - DNA, 1199 bp, Homo sapiens
tagtttccttgtaaaaggtaacatctaaaaatggattttctttgtgaacattgtctcttccttggacaaactgttgttttcgattctcatttctaattccatgtatatcgtgtatagaggtgctgggcagaagttgactaacccctgctttggagctattactgcggtgcacactgaaagcctctctgtcatgcaggcctgcctcagaccttcctgaagccctcaaatcagaatcaggactttgtgaggggggagactgcaaacagctactcatttggaatttgagatttgagcatttcagattacatatctgcttcccactgactgatttctccacacacgagtctgtggagttatcgaaaatagcattcgttgaaacaaggagtcccttgaagggtctaggggacaactcccagactttttccgcctcagacaagcgaggcaccagaggcagtcgccagcccgccttaaagacacctccaggctcctcaagacagagccgcttgctactaggtggttgggaatccgggtcctcaggaggcgttaaagaggaggtaggctttctgagctcggccatccgcggcgtgggctgagggagagacatgacagcgaatggaaaggatctgtccgagtcccggcggggctccaatcccttaataggcggttccgggccgctctggtcacgcccctgacccgcccctcaagacctggccttagcctaatctcagggtttgccccaccccgaatccgcccctccacagccccagcctcagccccgccccgcctccctcagtccctcctctccctgcccccacccacgcgccccggttgtctcaccactgaaggtcggagcaccctgggccgttacattgtctatttttagcgcctttttctaatgccacgactgtagagagtctaaatgcttttttccctgtggtagaacgaaggggaaaagttagaacctctcacttaaaaaaaaaaaatttgtgaatggtaacaactttattttctaaattctaaaattttgtttacctcagaaacggcatctccacaacggctcgagtgactctccagtaaaatcgtgtagttctgtcagcaccagaccaaatctctctgtgtatggaaaaactttttaatccttccagcgtcacttaagatcatattaatatttccacttcactaataaagtgtgtttgggg

SEQ ID NO: 36584 - DNA, 1138 bp, Homo sapiens
aaagctacataatagctggatattaaacattacaatatcgcatttaggacgcaaacagcgctgcagtgcaaatggaactttaaaaaatctgcccgcccacgtagacaaagctactttacaaaagcgcacgcgtcgatatcaatcgtaccctacaacagagcatggtttaaagtatcagtgtacattttttcctaaacacaagttgcaagtaagttatctaaaatcgaacaccgccacgaaagagacctccagggtgcaataaataggtatatctcgttgaagtggagaaatggcatcatgaccctttgggttgatgcagattacagtgcggaggctgttctcgagagagaaactagaactcagcgtaaaatgctgtagtaggggaaatcgaccaaagacgagattttgaaagccttttgaaagtcgtttttctagctaaaaagaaaaagtgacttattcaggactgactccccctgccagtcccaggaaacaggagcagcccggcgcgcccgggagccccgcagcgcagtgcgcactgcggctccagagcgaagggctggcgcccgccagattctaaacgtgctcggctgccgcagcccgccggggccgcgcgccgtggtccgcgcgactccgcgctccgggtttccgcggtcaccagcactggcggaagagccctgccgagaggggacagccgcgggcggtgtcccgggagtcccgagagcgcgctccccctttgcgcaaccttcccgaggcgtcctgcccgggaagccagttcctgggttctgggctggctaggttggcagcgaatgaggcttaggcatcactgcctgaggccctcacttagcatgtcgacagccacagacttgtctggcggagtttctcctggtgcccacttaagtagtctcaagtttgttcaaagctggactcctcgacttggaaccaggagcagctggagatttgtcaatttagagctcatttgccacgggagacgctcttggtgtccccagcaccgaagggtaggtcaactctacagttttcctgaacatgataaggtgtgtgaagacgctgtgcaaattgtacagcgctctgcttaaggagaacctcgatcttcatctcgcccccagaacttccctccctt

SEQ ID NO: 36585 - DNA, 2215 bp, Homo sapiens
ctaatcagagcccttaaacgtgggttcgcaaaatggttcattcccgccctttcacccaccccctcccaccccagacgcaaagcatatgttaaaaacacttaagtgcatacagaaggcgcttggctcagggtacacagggcaagaagcctcggatcccagctccctttaacacacattttttcaacgccgttctggaccgagactgtccggggcactgggtgctgcaggacccggctcccagtactcctagcagaagaccctctgatgaaatggcccatgacaaaatgaccaccataaccgttccttcagtaagccaggtagacgtgctcacagcttgctgggaagtcttctttcggagatttctgcagttttctccttcaccttacagcctaacaaagggtgggccgggggtcggctaggacagaaagcagcgggaaaagcggctccacgtgttccatctctggcctcggccttcagcccccaggttcggtaaccactgggcgtggcgagtccgggtaacccgcagtccctcgcgcccgtccaggtgcgggttgctccggtagccggactcccttttcctatatactttccttttgagcttttgctaaaatctggagacgtggaatccacccgcggaaactccgagcccctccgactgagcatgcgccatcgccaggcggcttttggtcacaggctcccgagttctcctagctggggctgcggagctggggggagggaagagaggaaaggggagggggtgcctggagaggcggaggctcgcgcgcctgcgcatccagctccagggaccctaggttttctatgggattcccaatctgcagcagagatttacccgagcgtgttgcggcagcggctgggcttgcaaggcgcgatccaagagggatttaagcagcccagagctccagagaaaaagagagcgagagagaaccacacacagagacggcttaagcgtttacccgaattaaatatatatttttaaaaagaactgttgagttttatcattttcgttaagtgaccgtgcgcagcgctgtaactgtaagtggaaaatacaatcttcgttgcatttctgcatgtgtagtgcaaccaactgtcagagaaatgctttggctattgtcacatactttgctttgcatagatgcgtctaaatgcatggggacaatttccttgcttaatgctggcgatctgaatgtgctcttagtccatgggggatcttttggaatattgggggtgggggaagggggagtgtttatatgcggcgtgtttgggggattgtcttagactagatttaagacaggtgaaactgagatgctttcttagtttgtcttagacagatttaagtagctaattgaccgattgtgaagttttccggttgctgataaaactattgagcgggtacagtcgagtagcaacctgtcatccgtgggattggtgcaccatttttctcactgtggaagggcagcaaaggtgtttgctaagtaaaactgagtggatgagattggtatggaaatcatggttgatctctgagcgggatgttagtgtttaagatccacggagtcaggcgcaaaatgagcacatttctctcagtattcagaaatgagtagataatttttttcgtctttgatttttgtcacaatggtgaatgggcagaaaagggaaagatgctctactgcactgtcgattttgaacggagtcacaggctcggtcgctgaatggggactgtcagacccaaactagttacctgcctttgcattccgtgttcgccatccggaatctggggttaaaaaatgtaaatcaaggtgtgttacatttggtagtatttctttaaaggataaaaggtcgttttgtgttttgagttaaaatgggttgttccttgcccagaaactggaagaagggtctttgcaaggtcaaaccccgggtggaaatcagaatgatgaataccctcaggggtacaagaatgtgtacgtggaaggagcgaggagaggctgatgctccctgcatggtggaaatgatgagtgctccgcattgcctgatcagtgccctgtgagatgccagagtgggaatccatttttctagagttgccctcctgtccgtattttggaaactaaaataaaatagaattgttggtggttgtggagaacactaagtacatactatttgtgtatcactttccagttgaaggcaagaaaagctggggagt

SEQ ID NO: 36586 - DNA, 496 bp, Homo sapiens
cacttgtaatttatcacagtaaaattttatacttctttatatggtggtttgattaatgcctattttcccccactccttaatgctctatgtctttcttctattttattgccagcacctaacactgtccttgacacatagcagctgctctcaatgttgagttaaagaatgagtcagaaaataactcagttagaatctcagtaatttccttgcagtacatatgtgctgccagaaggtggcgaaaatactcagagcagagaatttcaagcttcagaggcaatggatgctaagaattacataatgcaacacatttggttgcttcatcaaatgtggagttaagtttatttcctcggctaacacttgattaagataaatctcaaggtgtggcagaaacggtcagacagatttgcattcaaatccagcctctgctgcagacagccaggaatcttaggcaaatgcctttgacctttctaggcttccacttcctcatccacaaaat

SEQ ID NO: 36587 - DNA, 2049 bp, Homo sapiens
gcctttaaaacactggcttttaatctactactcgtgacatatgcagagtaataagcgctcacaaaacttctgtcttgagggctcaaacaccaaatgattgctctaagaattttcacagtattacctcaaaccctattggttctacaacctttctctaccctagagtcctgttttccgcaattcccaattgggattcttctccggttcatttctgtaagaaatgagggcagagaaatgccatcagtaaacctttgaacacatgttaatttttctaggtaatacaatttgcattttcgtaaaactgggctttaatgacaaatccgatttcagtgatctttgcatacaccctttaaacacaccagttgccgcctgcgagatatcatcagactcatgctaagagccactccctaccccagctttccccagacctctccccgctttacagttattcgccacagcccgggagagtctggggacggccgcctgggaggggacggccgcctgggaggggacggcccggagcagacgccaggtttcccgcggctcaggagaccggtgccgcctcggagagcgcgcgaaggtgccgccggccgcccgacccgcccgaggaacggacatctcccgcccgggcccgcaaggacgaccatgaacaccgccgcagctcagctgaccctgcctctcccgggtggctgggggtcgccagccaagggggcagcgggcggaggatgaaccccggagcaagggaaagcgacagcgcgcgccttcaccctaccgccaacaagtcgaagtctcccaaaggaacctgatcggcggggctgccgtggtacgaccggccgctaaggccaccctgcgggcgtctcgacctcggctgaccgccgctggccccctgggaaccgcgtgccggccgcaggagaaggtagattcccgggagccccggcgcccaccgcggtactaaccgcgcctgcgccccgccctccctcccttcgggctccgcccgcgcctgcgcagttgcggggtttcgcgccgccggagtctgagaggccggaagtgccccttagcgggtgggggaagctggtaggcacgggcggctccgcagtgaccggactcgggggaggtgagtgatttgcctaagtaaaagggaaagataattgagcgcccccggcagctggtctacgcatgcgtccgctaggccggctgggagccggcaagggaaagccgagcgggccccattgggggaaaggggtcagtcacttcccggaagaggcggggccgcgcgggcccggcgctggattcgaaacgcttcctggtgctcctgggcctggcggttgagcccggggagctagtctttgcttgggtaaagaaagaggactttcctttttttttttccttttgagaaaattcagaaatttggaggcacagtagttaggattcaggccaaactggtaaatgacgaaggggcttcttccagagccaaggaggaagggttgtccgggtaagtcccgcgggacgtggagagacggcgccgcccgggtcctcccactgattcctttgaccatctggcttacggacgagctctttgttcgctgctcctccgaaaacgccttcaatgactccctttgaataaagtaggaagtccgaaccgagccgccaggccgcgacttggcccctgttttccactcgcgagggccctgcgtcaccccgcctcgggaaagctgcgcgttctccggccgcttgcgcttggccgaagctgctgggtcccgctgtgcttcccccgggcatgcgatggggataattcccacgcctcgctcaaagccatcccgggagagccctccctggtccccataggcacagttgggtgttcccttttccgtgttaaccttgtatttcggatatagttctgttatagtaattactttaaggtattgtagttatttacaatcagtctttcccccacggtaacctagagtgtaaaccccctaaataaacgtcagaagtaatgaagtcttaacttccttggcttaggtttcagcgcccttctcaaccccacac

SEQ ID NO: 36588 - DNA, 3802 bp, Homo sapiens
cccgcttcagtctttacacaacccttcccatgaatatgctgacctaacaagtaacctacttttcatactccaaaatcttctcttctgtgtggggaaaataatgcattgactgccacctcactccacctccaaataaattgatgttgaaattctggcctccggtaatggaattctttacatcaaagtcactttttatttctaaaagtaatcacatatatattatattcctactgtggcccttgccatggatcaacgaaaaatatgacatagtcaaaatagaccaaaacatctggccttgttgtaaccaatgggaaacacggttgggaggtccctacttacatgtcacttgcttcaggaaccgttccttgattcctaagtgggggaccttttttcctaaatacaactatagcttgctttcttacctcttaagccctttttatctgcagtctcacttaccctactaaggtctttaaatgcagggcttgatcttccattattgtatctccagcacctataaagctttcctgttaaatagtagacatttaataagtatttattgataaacgtgaagtatgcctcaacgtttaggctaaattcatatgaaaataaaattgaaaaaataattttaaagaacagcattagttactgagattatgtggtaaatcccttaaaatataatcttgcattgaaatagttttcaccatttaccagtctttatatgaatatatactcatctaaatggaaattgggaaatttaagcattttctgcttttccgaagtaaattttctaatgtttttcttaaagctgaactaaattgcaaaacttgctttaataaagtgtgtatttttgcatcagttaagcccctgacctctttatgttctttaaatttgattcattagtgaaattaacaaggttctgtgtttttctcacctcattcagttttataattaaccaataaaagcttattagcttttaaggaagttttaggaacttaaattgatttatgggcaccatatggttacatcaaaggacttgtttttgttttaactggaagtggattcttaagtcctttaagatggaaatttatgttctttctattataccaagcaatactttctgaaatagagtgatttttttttattccatgctaccagttggtcatgcaattcaaatattaaatactagattacagatattagaatcttgtaatgcatctggtttaatacctgtcattttgtagaacggttaaatgtcttcccaaggtcatacacctaatcagtggtatattcaaaacccaaatcctaggcttcctatctgaagtccattgcttatgaagtggtttgctatgtgttctgactttgttgattcaaataagtaagctaaatcaatttaagccattaataggtttataaagttatttgctatgtgttgttcttacatcattgattcatgtaagtagacttgtgtgacagctaattcttaaaaaattatgaagatgttagacttcttttgatatatatatgttgattgtatgaacagattgacatcaatatacttattcattataaaagatttgagtgggaactcaccaaatcccacaccaaaaaaatttaaaattttaccatagtaaaaaaaactaaaaagcaagatgaaattatacatagttcttggtgtagtatttttaatttttattatttatttttatagaaatggggtctcaccattttgccaggctgttctcaaactcctggcctcaggtgatccgcctgcctcgacctcccaaagagccaggattataggcatgagctaccatgcccggctagtgtagtatttttaaattttacttaatgctgagccattttcaaataacctcatcacattgattatgacctcatgcaagaaccatctgttctatctttcagtgtagttgtactttaatatcttagaagctattgcattctgtccttttttggaatgttttatgcttttacagtcttaaccattgcttcttaatatcacttccgcggaacagctggtgcaaagaacatgtgataaggaatggaaaacaattgatgatggaaacagagatttggagttaattgcgttcttaaaatattatgatgttctttctaataaaatgtacatttcacataattttcctctttcagaactaaccatggttaatcattctttaaaccaggtttgtttccgacaaaagaaatgaaataataaaaactaaattctaactgtagtaatcatgtgatattaaagatattatttatggggttaaaagccctctttatcttgcttaggggtttccaataatcgaatcagtgctggactttttttttttttttttaggcatggctgccccctgttaataatatatttaattaacagctttacacaatgatcttaatatacttgaaatacttagaggactgcagtttataaaatcaagagtctaccttattgctgttttatttttttttttaccataaccctcagaaggaatacagttaacatcacagtcctatatataaatgtgtgtttatgtgtgccatcataaacatcactgcactaggtggcaatcttcactactattcatttgtgtatgtgtagtcaacctacgaaaggaatcattagaaacagggtaggaatgttgaaccttagaaccggaagttgccagagaaaatatgtgccctggccaactccacaggactagttctaggcaatctgaaggaaaccagaaaatgtgaatttctcttccctcaaaaagctatactgaagtagtatttaatattcaagtacttgtaaatttgcagaacagtactttttaatttgacccatgaattctatttaaatttgtcacttaatatttagccaagaagcaaaccatctaaaaagatttctggtttatttctccaactcctaataaatagggtcacatattttttaacttttttctaatttgaaaagtaatacaggcatatggtattttaaaaatgaaacaacacaaagggatatgttttgaaaagtggttcttgccatccctgaactgtaatcatccctaacatattcatacctgttttcattttaaaagttgggtcagtttttttattagtacatgtatttctatcctactgatttatttgctatatcatctaatttagtttgaatattccataatttacttaattagtcctgtatggagacctagctcttctcagtgtctactattataaacaatgctacagtgaatattgttgtataaatccatacacaccacgtaacatatcttaagttcctggaagagatattgctaaaccagaagataacctgcatttaaaattttgactgctagggtcagggtcacatttaaattaaattagaacaaaggaattgcataattgtcttcgatagcaatctattccagtgtgcaccgtgagtcacaaaggaaagcaaaactgtcaataactttcttctcagacttttggtttaatgtgttctgatgggttaataatttgtctcatttctcttcataataatgactttgagaatatttgtactgcactctttttccagaattaaccacaacttttcacagtaactgaattaatgccacaatggtacattcaaccagtggggcttcaggatgtgaaatagacaatattctgggccactgttactaccaaatactttctttacctttaagtctgtatatttttatctgtaaagtgacatccatagatgtcactgtacacttcatagaaatgagtacacagaataatactcatggca

SEQ ID NO: 36589 - DNA, 1065 bp, Homo sapiens
ttaaagaaccagcataaaacaaaaaaagagatgtccatctcttcttaagaaaattgctccattcctgtttctttattgctgcagtaattatggtgttcttaggcattttgtgtcagttcagtattgcctgttagtcatttttatatttctgtactcttcagttactaggccctgcttcctcctaatccactgctatcttttaggtattcgcatgaaaagcacaaattagtagtcctccaataccacctccaccccacatggtagagacatagagtgggaaaaattgcaacagccttataggaaattctgtgctggttctttgaaaaaatttgaagtggcaaatagtacaagaagttgaaataactgtattatgaaaggctattttttacctaggggtaaggtcgaagcaacactgtcacaaaactgtctctctaaaatcacggggccagcgtcctgaaaagtgatatttttcaacatagtactttgactttttgaaccttgtctgccttgggcaacatctgacagtggtagttattatgtaatgtggcgtggaagtgattaatcaaagcaagaaatggtatttattctgtcagtctctagaaactacaagtaagtagccttttctccccaccatactcagtagtccctgatagagaatgatacatgacaaaaaagaatggcgtattacaagaaagaatgaactaggctataaggccagactacaagctacccagcggggttaaattcataaaccagaggaaagtcacagcaaattatttgtgcatcagcaaaatgatgtaatcattctgcacaaacatttgatttcctaggaggacactgacagctgacttctccgcagtttcccacaatacgagagtttcattgtacagggaaggcaagatgagaaaaaaatgcaaacattaaaattcaagccaaaactgtatgatagcatcttctttggaagtacgcgtattgggttgaccatcatgtgagaaaaattattgaagtcttctagatgtaaatcttaatatgattaattattatttaaagatattttcagaatct

SEQ ID NO: 36590 - DNA, 672 bp, Homo sapiens
tgacttgtttgtttcacatggtttgattctaaatcattttcaaaaatacatcacgaattgcatatgaaaatgtgttgctttgatcctgaatttccagtttagtgtttcatcctcagaaatacctccaaatatgcaaagagagagatataaagatgttcaatgtagcattgttaataattacaaaaatttggcaagcagcccgagtgctcattgatagggacatggttaaatccttcacacttactggttcccagttggagagatactgctgggagacattttggttgcaacagttcaggcttgggcaaaggagagtatagatatgtgatggcttggtgccaaccaaactaaaccttctgccagacatttctgctatccctcccgaaatgctaatattagcacccccattgagaaacactgtttcagagtccatatgatgtaatacagtgcagtcattgaaaaggctattattgacataaaagatatccagacatattaatggtggaaaatttctcaaaatagtatttttatataatcctacttttacttaaaaaacgtaattaacaataaatattcatatatatgtatcaaaggagatggttttttggaagaatatgcaccaagctattaatgatagctcaggcagtgcagttacggggaatgtttactttc

SEQ ID NO: 36591 - DNA, 390 bp, Homo sapiens
gatttcctgaggaaatccaggcaaattagcaaagtgtcgcttgggccgcgactttagaaaggcggttgccccagccgccggggccgcgggggaggtcatctttttcccgcagggccacggcgcttccggcccaggagggcgcgcaggtgggaggcgcggggcgcgctcctggtcccacccggacagcgcctgccgctccggggtgactctgcacttgggcctgggcgggggcgcgcggccggcagggcagcatctaggtctatgggtctgtccgcctgtctggcggtcggagccccgcagtcctcagccgcccgcgccctcggcccggggcgcccggctgcgggcccgaagcgaggggctggcggagctgcgaccaatggggcggcggcc

SEQ ID NO: 36592 - DNA, 843 bp, Homo sapiens
actgcagtctgaaactctggggctaaagtggtccttctgcctcagcttcccaagtagccaggagtacaggtgcacaccatcacattcagctaattttttcaaaatattttggaaagatagggtctttttatgttgcccaggctgatctcaaactcctggccttaagccgtcttcccacattggcctcccaaagttctgggattacaggcttgagtcaccatgtccagcctacacattgaaacattgaatctttattttctcaaaatgagcctgacccagtttaggttatctcctgaggtcaaacagttatgagccaggacaagaggaagtctgtctgcttctgtcaatgtgtaatcagcctgcagaaatttctggaatgctggtggctgagatgcctttggtgttactcaaggagtgtcttatctgtaagactacttttctaaaggaaagggaaaataattcaacctaaactttctgaattcacaaagattaaatgaggacagtgttgttgtggggtgaatgaaaaatgagtacaatagtaaaataatataaagggaactaactctagggtaagtccatcaaaataattacgcataaaagctcatgaaacaaatacaggctttgtaggaataaacgctgttagaacgcctgaacaatacctttgaaatagttgcataatcgttgtaaggaaattaggcgatggcttatgcatatttcatgaagcctgtacgtcgccctgtctaggcttgtgcacacacttacgaatgaacagcagccaaagcactcacttttgcatttaatagcagtgtaaatctgatctgcaaatgtatccccacactttct

SEQ ID NO: 36593 - DNA, 975 bp, Homo sapiens
ccaaagctagccatctgggctgtgccaactttatttcaaaatcaccagaggttgaaatgttggccaagggactaatctgaattatgtacctgaagcagcaccttagctgggagatgtgaaaactcaataataaacaaatggcaaacaaaaccaactctctgggggaggctgcttagattaactgaattctgaactgaatgtttatttatttctacaacagtactatgtgttcatagaacaaatatttatgagccatggcacatgtttagaccaagaattggggtaataaaaactgaatttcaagttgaatgtaaatacaactatgcacaagtttctgaactgaataataaacatccatatagcttttaggcaccatatgtgatttatagtatttaaatatctaaaatatcttttctctgtttataagtgctgatattttcttcctagtctctttttccctttcttctttcacaatatttggcatattgtgacatgctgggattcccctgaaggagcagccatacctttccgaacaaacccggccatgctgtgttcagtgataagggacaaatttcacccaagagttcacttggccaaaggactaatctgaattatgtacctgaagcagcaccttagctgggagatatgaaaactcaataataaacaaatggcaaacaaaaccaactctctggcggaggctgcgtagattaactgaattctgatctgaatgttaatggaagacaatggaagacacaacaggaagaaggcttatgaagctggaaccatgtttgggtactctttgtatctcctgctgggctcatgtttctttgaggacaagaataaggagtgatttttttggagagtcatgtgcccagtaaagagtctggctaagccattcattctttcctcccacagcatccatggctggcaacttctattataaaagtgaatgatcaaatttgaattgaaaagcca

SEQ ID NO: 36594 - DNA, 1298 bp, Homo sapiens
tatgatcaaatcattactctgacagtgtagacagtggattacaagcagagaaaattacagatgagaagataaaggcagcagctatcatccaggtgagggattaggatgacataaatatggaagtaatagcaaggatggagagaatgaatatatcccactgacacttggaggatggttgatggcatagaccatgagtgtgcagaatgtcatttgaaagtgctcttgggatcaatgtctgaggggaaagagaaggaagcagaactatggagagggagaaatggggttgtaatgaagacataaggcattcactgggagctctggagctaggacggtccggtagagttgtctagagttgggcctttaaattctccaagaactagtcactgggcatgcgctgtactcttggatgaggtagtgctctagggttggggaaatcccggagagggcagatggctgcaagctctcagctggcagcattcttaccacttggagaaatatgcacttaagtcctgaagggcagtctgggcagtacagacagcagagtgtttgctgttattcaatattgacagtaagggagtgggagcggtgaaatgtagctttaaatttctggctgaggcatttggtggatattaattctatccagagagataggggacatggatgaaactgtaaagttgggtgaagaaggaactggctcagtttaggtcatgtggagtttgattcatacagatggagattcacactggcagttaaatttgtaaagcttgatataagtataaagatttgcactgtgcgtatgtgtatgtgtgtgtgtgcatgcatgaatttgtaagtgtcatttagaaaagggcagttgctcacatatggaataattttgtataaattagaaaaagccctcctctaggtaaatactggccctggagtacacatcctggcaagcagaacacagactgaatctctgccagcactctctctctcttggcctagcactttcgggcagtgtacagactgcacagccttactcagcggccatgacttaaatgacaagtgaagtcataggaatgaaatacattgtctaaaaagattagtgaggtgagaagggatgtcttctgaaagatgcctaaggaaaaccaatatttaagaagtaaaaaaaaaaggtgttgcccacaaaaatatttggaaagaccagttagggaggttggggaaaatgtgttattcatactaaaattttaaaaccctaatattcaagaaagagtttgaacagtgtcaaaagctgcagagaaggccagtaaaataag

SEQ ID NO: 36595 - DNA, 2547 bp, Homo sapiens
ttgaaactaacttgcttttcaagaggctgtaactgaggaacactctctatgggcagctctttggtagcacagagttccccaggaagcactatataacatctcccatccctgctccatcatgactcatacgaaaaacttctaggctgaattctgtcaggaaaaaaaaaaagaaaagaaaaggaaaatgataagtaaatacatttgacaataaatttgagatcataaaccttgggattctttttataataccacgcacttcaaaatcaggcagtatttttcatttgacgtggttttaaaggtagctcaaagaaaacacaggattaaccgtaagtagtgggatagtaagcgtgagccaagcttccaaataaacacatcagagacttgggctaaaaaaagacagaacacaaataacctcctcttgatgtgcctacagtttcatttaactgttcccaggtcatgaactaatttaccaaaaagaggttaactccagtgcaaccaaatggcatttcaggaagcaggttttgtgcatatcgcctgtggaagccgggccacttgaaccccgcctgtgaaatgcctctcggatgagcactttttaaaactctttagtgtattctttttcagtgaatgggtaatgcgttaggacattggagaatacaggccttaagaaacatgagcttggcttcttcccaagtattgatgtctccaaaccaaagaattagcctaaataaatttgttttgagtgactgtgtgacctcgaacagcctactttcccttggtcagctagatgtgtttcctacaaactgaagagcttagatgagctgctctttcaagtcccttccaggacacagaggcccttcccaagaactcaacacaggaaagctggcctctgcccccagaagcttccaggcgaaggagaacagtcaaggagccaaagtcctaggtgctccgctggagggtgacttccactcacaccaatcttccaaaacctagggacttgggaccgagcagcggcattatatcatttccaggcaaagcccaagttctgtcttccgtacccacggtctcttttcgcattttgcgcaacatcatttgctgcttcatctgacctaactcggtgggtttcttgattttaatgtgtgtagaaattacttattggagaattttattaaacatgcacattcttaagcctggcgtccagtgatcctcttttgggaggcctgggcaagggccacgacgtaggcacgcttcacaggcacccaaaaggttcccacgcagcagtgacccatgaaacatgctttgaggaacactcatctgatggttctggagtggggttggtctccctcacagactcaggctcctgggagccagggactcatttgacattgcagtgaaacagagaacatggaaagggacatgccatgtagtcaatccaaattggatgagtaagtgaatcaatgaatgactaaggcacatgcaatagggaaggtcattgtcaccatgaactgaaactttccggcagtgttggagaaggtaaggtgagtgggagacgtggtacaagacaggcttcaaagctgggtctctgatgggtcaccagaaacagtagggtccttgtaaggcaatgcttcttctctagcagacacatttttccagagggagtctgtcagcctccatgatattttaagctgcatccctcaaaatgtcgtaaaggaggattaaagtataaatgattgtcagttcactcctgtcctcctggtactgcgctgagcatctcaggctgtttggaagacaggggcagcaagggaggggaggagcaggggagggccttaaaatgtgactgaacagagcctgcagagaatgaggagctctggtgtgtcttggggggctaaagcagttcacaggctgctactttttttgtgacatagcttttacggggggagagccagaatattaagctcattgcttccagatgggaaggttggacaagacagagaggctttggctccgaaagcttggacgctgtggtgcgatatggatgtgacatattgaagtaatcgagatagaagatctggctttagccaaggctgtcagatagatactttttaaaacattacatggtttgtaacaaggtattgtgtatcctcacagaaactctgccgcctaggtctctgggaaggcagtggggggaaaagtgtgcttattttgcttgagttactaaagctccttttatatatgaggaatttggcatctcctggctgggaacggctgagccaacagtgtccgatgcacttgtaatgtagatcatgctagtgacttgctaagtgagtccaggtgtttgcataagaggcagggtcctaagcacctccttatttgagccccgaagcaatcatggcccagtgcttcaaatgagcctcaaatctgtttaataaatcatccttctatttatagagttaatccagggagaaagcctccgtgttgtctggtggggcatgtgccaccagagggcgcccgatgtctgcctcattccatcagagtggctcttgctatatc

SEQ ID NO: 36596 - DNA, 2005 bp, Homo sapiens
tgtggaattacttaccatttgcacaaagaaatcctcacacctcactgccaggcagcaggaggaaagaacaagggttaaaagcaagtgttctggagacagaccacaagcaagtttcttagccttcctatgcctcagtttcctcgcgttgtaaaacagggatgataataatgcctactccacagggttactgtgtagcttcaatgacagttataggcaaggacacttcattttcatttaagacaaaaaggaaaatctgaaatgcttggcacagctcctggcatacagatcttcaataatgctgggtgttatttttattcctgtctctgtatggagcatgaccactgggttccaaaatgtattctacttggaaatcaggccacagtcccgttaaggatggtgctgagtttactggtggcagcgagctccttaccccagcagaaaaggggcagaggccgggggaaggagaactttttttaaaggactgatatgaggtccttagctagcaacttcccccagtgctcaggggttctgaagacacagcttggtgcaaattcacttctgacacaggaaaaacaattcagaggccatggatctacttcggggcggtcctcacgtaacgaaatgaaacgttcagaaactggtttatttatttttctcttgggcccatttctttttcgacatccttagaggacagaaggcagccctcccagttagtttctctttccctctcaaccctgcagcttcccggccgcctcaaagtggctttttggactcctctcagcctcagcggttcccaaggtgacaccctgaaccccagggcggtccctcgcggctcagccccagcccgcagtcccctcccacaccgtgcccaggccctccccaccagcccggccccccgaggcccacacctggagcatttcctggcagaaggcgcgcaccgagcgcagcgaggcgaggtccagctcccggactatgagctcgcccaccccgctgacgccaggctctgggccgcactccgcggcctggcggagctcgcggcggagctgacccgccgcctcctcggcgcgcgcgcggtcccggcagcccatgatcacccgcgctcccaggcgcagtagctcggcggccgtggcgcggcccaggccgctgttcgccccggtgatcagcacagtcttcccgtgcatgaggccggggtccccgcctctgcgcagccgctggaccctgggccccacgaaccggcgggccgccagccacagcgccccgcccagagcggccagtactgccgccgcagtggccactgccatcgtcaggcccgagggcccaccggcccctccacgggagttccgcagccgccgccttaccggaacccaagagaccacctgtacgcggagaacgctggggcgcggcgggtcggcccctgacggtgcgcgtggggcatgctgggacttgtagtttccctctgggggggtcgcctgattggttgtgagagttcagcgccctgggtcctgcgccctccgtggaagctcctcccagcctaatgatggaggctgggcaaccagcacagtgttcagggtgctggggttcatacgtattgaaatcccagagtagtggcggacttccccatgggaatgtctgatgagtactttgaatcacagatctctgtacaggccctgttacaaatgccactcctcagggcatttcgtgtgttttcctttgagggctcttgggacttgtaaattcagttcaattcaccttctgaggaatgggccctgacaagctgaagtctgaggtaggactgtttttcatagatgagacaaagaattaagcaacatgaatcagttggaaatagaatggtcgagtagttctcaaacttaaatgcacatcagaatcacctggaggacttggggtgggggttcggggtgggggaatgaaacaaaacgaaaacaaaaaaccagggccccagtattagagtttctaattcaataggtacaggatggggcctgataat

SEQ ID NO: 36597 - DNA, 1359 bp, Homo sapiens
catccaatgagactgtatctctatgtattagcctattttcatgctgctgatgagacagtcccaagactgggcaatttacaaagaaaaagaggcttaatggactcactgttccatgtggctggggaggcctcacaatcatggcagaaggcaaaaggcacttcttacatggtggcaggcaagagagaatgaaagccaagtgaaaggggaagcgctttataaaactatcacatcttgtgagacttattcattaccaggagaacagtatgtggaaaccacctccatgattcagttatctcccaccgggtccctcccacaagacgtgggaattgtgggagctacagttcaacatgaaatttggatggggacacagccaaaccctatcactctaaaagtctctacaggtctcagatcatgataaaggagcagcttctcatgagcttggccctgctcatggtgcatatgcagaatactcttgccaaatgctggtaagtgaaaatcccttgtccaaaatatcgactagaggtcagtgtgtatctactggcctcttcccagatggcagttacatcaacattccattcatgtaggtcaaagctgaaaaatacaagttccgggaaccttatccagagaggtgagcatgtctctcagaagtcatcagcgaataaaaaagttttctttgaagttcatagttcttgaatcagtccatcttgaccatccacatgattcaagggtcactatggagtcagagcaccagagaactctgtccatggacactagatagaacgcctttgatggattgggaaaaaatttttaaaaagtaaaaagcacttgtactttaagaaaagaatttttaaaaatatcctggggaaggtagtctcaaatgtaaagatgctctataaaatataaggtcttgaaaaataaaagttccacttacttgcatagattagggctctgaagttcaatcttctcatctgtaaaataggaattaaatgcctatgcacatcttacaatttttttgtgaaacgcgaatgtggtcatgcaaagaaaagcacttaggaagttcacaggaagttctttataacacatcccaccaaaaatctgcatgatgaacgaagaaataggtcacttggaagatggccaaaggacttgaaaactgggcaggctaagtggaaattgatgaccacttcctcataaaggtaagggagcttggtgccagtgcacaatcgatgtcttcctctttttaagaaaatcatgaggaattttttccacgttttattaggcttagccaaaatggtgcatgttcaccttttcccctccatcctgccttcaacactcactttagtaagtaaaattaacaaataa

SEQ ID NO: 36598 - DNA, 2356 bp, Homo sapiens
agtgaaatgcaattttttttttttttaatgatggcagtgggggatatgagagaaaggctgtgggccttggagttcagagctaagtaatggctgcagtttcatgttctctcccttagttcattgggaagtaagcataatagcccgcttttatgtgtgttctggacacttcaaagctgtttacatggattaacacatttaatcttcatagtaatacaagaagcagatattgtattcccatttcacagatgtggagactgaggcttattgagtttaaattaaatggctgactttgtcacaactattaactgtcagtataaggcctgaaccctgttcagcctgtctttgaggcttgagctcctaatcactgtgttaagtttggatcttccttcattttaatggagttcccctttattattattattttaaaataaatgttatgtttttctccactctttccattcaaaccataggaggcttatttaatgcacatttcaaatgtacatcctgttaaaaggataccaggttacttcacaagaaagaacacctactaacttaattttagacagaacattaagctatatgacctccagaactccttccacctatgacagtctgtgatttcagagagggattttactctttagagaagcattctgaccaaagactaccaaaagaatgggacaactgttagcctgaagggtataggttgtcttagggtctcggagagtctcactctattaacaaagtgagaactatgctctgatcctgtaggaactaatacattagctgctactctttggacaatgtcagaagatctgtgtccaggtccctgctgtgccccttactagctgcataacctcagataagaaatcttacctctaagagcctaatttccttttgtgtaaaatgaaaataaagggacgtatctcagaattgataaagtgttagtgaaaaaccttgagtacaatgtttgctgcataccctaggtcttgtccttcccatctttagagtcaggccattcacttggctgtttttcttaatcatgacttaatatttcaagatgatgctcatttcttaaaatttcattaatttgaaaagtcatgaccattgcagctgagatatggtatatattttcacaaagacaaatctttcttagtcaatggacagctcatagaatttcagaatggtgagtaatctaagagatgacacaatcaagtcccattatttttcagcacaaagaggttaagtggctttcccaagattacacagtaaattggtgatcaagtcaaggctagactttctttttcctaatcccaggcccagtgttgttgctgcaagattctaataaactcaagatgagggttaaagttagagggaaggctatttaaactacattataaaagatacattttatgtgtactttattttttgtttccacctaaataattgcttatacattaaatattattggcagtgaggaattagaccaaaaagcaaaacaaaacaaaaaaaaaaaataggttataccatccagcaaagctggattgaagacatttatttgctatatgaccttgaaactctgtaagtttcagtttccttatcagcaaaatggggataatgattatagctttctagttgttacgaggattaaaggagatattttatgtagtggagtgtctagtgcatggttgtcatatcaaaaatgttaacttataatgataaaataaactcaatgtgaacaatttcagccattaccacaactatcccattcaagggtggattcatcccagtagaacaaaaaagccttgtttttagtgaaagttaataaattttaggaccaaacagacatactgagttaggcaagttgtccattgactacaacctgcccacactactgactgatttagggagctctcctgaagcactcagagggtactcagtagtgagccagtccttgaagttatagtgcatgggactttattgaatatgaccagagaagaggtgcagtttttcaccagaaggacctttatactataaaatatgagtagatacactatgtggttagtctatgtgctatgaaagcttaaaagaagagattaatgtcaagtaatagcaatactctaaataactggataaacctaaaaccagagacaattcctgtctgtcaattctcctatttaaagggctattggccgggtgcaatggttcattcctgtaatctcagcactttaggaggttgagatgagcggatcacttgagtccacaagttcaagaccagtctgggaaacataatgaaaccccatctgtacaaaaaatacaaaaattagctggatgtggtggcatgctcctgtagtct

SEQ ID NO: 36599 - DNA, 1247 bp, Homo sapiens
gattgatatttaaatacagaattgctgaaatataaatgcaaaatctgaatgttagtctgttttgggcaatgacaatgtacagctgttaaatgtacagcaagatttttctaggcaacccctattttctggaacagctggaacagccccactgatacctgatttatagttcaaggaaataagttttgaaggctatgatttggccacctgcatctaaatctgtgtgataatgagtcacatcatggatgcaattcagaggtatttgaagaattcatctgtgacttcttggctgagagtttctccagaagagtaccagggaaaattgcatgttttcctctacttggctgatatcagtacttctgagattaagaaattgtgaaaatctaaggatgggaaggtaagtaaacaatgtctggacacaggatggtccaaatttgcatgattactattttttttttctagaaagaagtagagttacagaattgaatgaactgagaacaaatctaaagtcctaccataacctttgagggcctcctgatctcactctgactagattttgacctcttttcggcctctctccccagtctccctccccactttctaactgcacaggccccttgctcttattctcctgctcaggctttggccatccttccctctgtcctatggtctctgccccagcaggtccacatgactcaccccccacacttccttcagctctctgttcaagtgtcacccagttagagcagacttccctgaccaccatccataggactggcaccccaccctaagtccctcattgtgcttttttgtgcttcatagccctgttatcatctgacttttatcttgtgctttgttgtctatttctgcaactaaagagcaagcttaatgagaacaggggcattctgttttgttgttcactgatgttgaatctccatactagaaaagtgcccagggacctaataaatatctgttgaaagaatgagtcaatgatgaaaggagagcaatgtgaatgcatagtatttccttttagacttgttgaggctctgttgagaacttgaagagtgaccactgggtagccacagctgtcttcaccaatctcatgaagtcacactctttgctgaccatactgtgccagagggcttggcatgctattgttcttctgagtggaggacttcaggttgtttgtcttagttctgattgtgcaagggaaatgagcctttaaaagacctggtgccatcatatttatc

SEQ ID NO: 36600 - DNA, 1108 bp, Homo sapiens
gcaaacgaaaatcctgtgataattgaaatagaagcatccaaatatgatgtcctggtaaatatttataaatatgagatacagactttcttctgatgccctcaaatgctggtcaccatagagcactgaaaagaattatgactcaataaactgcatgctgacatataactaaataagtaaataactggagtgaaggccaactgctgcttaacagcttccccagttacgtacacactttcaaacaagcatgaaatgtaggtctctggacatcgcttaaaagaaccacaaataaacagagtgtgatcccacactcctattccttccggacagctagaaagcttggctgggaattggggtggtttttgttgctcttctgtcctgtgcactgtaaacacaaaccctgctcagagcaccagggtcgtgctgctgctgacagagtcactgagcctggaaaagtgaggagtcgaagagcctgtgacctttggcccatcacctcacctccgattttgcaaagaatcacgctccagacttggatacgtcgattgtaacatctgggctaagtcagccgaagggacagggagcctgatttgccagttctcaagtgtggctctcttttttcacatgcaagatatatgttaagctcaagctctgcagtttggggtcaaacagatgccaaaatagtagaacattttcatggaatacataccttttacattaaacataaggttgaagctgaaaggctcgttagatgttatctattgtgactttttctttctacatataaggaaactgaggcaaagaacagagttcacaatagagctcaaatgccctcgttcttggaccactgccatccttggacgtttaactgtctgtatcagttacctgtagctacatagcaaaccattccaaaagtaatgatgtcaaacaacaatgatttattatttgtcacaattctgtgtttgcttaggctcactcaaaccactaacatgcaccaggccagttggctggaggctgggctcacctgcatggctgagatggctgggctctttctctctacttggtctttcaccccagacttcttcacagcttgaggattcgtggaaagagatcc

SEQ ID NO: 36601 - DNA, 778 bp, Homo sapiens
gcagctcactgcctgcgtccatttctccatgcagagctcttgctgggtgaactagaattaggacaaaagggtctgcaaacagcaatctgtcatgagtctgagtgaaaaggagaaaaaagggatctgattagaagaaacaagtggtgagttttgtgtgtatcttctacatcagtagttcttccgagtcaggcagagttgtagccaggggaatgaatacttgtttaacttagtacaagtttacctgagattaagggcaagttgaatacagccagtatcttttgttccaatattgacttagtcttgttgtcacaaatcagctattgatatttggtgtccccattagtctcaggcaagagagctaatccttctttcatgtttgtttatataccatatttggccggagcttgggatgcacttttcaccttggtctgcaagtagagaggcaaacacatgacctcagcacttgaagccatcctggctggtcactctctactgtttgtttaattttgctccgactccagcctgcctcctaatcccaggtattcggacatgttacaaaaagaaagagaccctgagatcaaagcactggtcacgattttactagggggcacctctgaaagcacttgtaggcctgtgtgcatggagtgcactgtgatctttagaaaatactttgctctccaaattggggccaacagatttatcaccctctgggccccaaagctccaggtcaggctagggttatttttgtgtattgtgtgcaaagacatggtagttctta

SEQ ID NO: 36602 - DNA, 954 bp, Homo sapiens
tgtatgaaatttgaggtcatccagctttgtgctttctcattgtgtggcttgaggaaattccttaaactctccatcttatttttagcatccaaaaattagcagaataataagtattctgtagagttatgtgaaggttaaatgtgatatgtattgaggtaattaacaaagagcgccacctagtaaatcctcaacaaatattggggattgctcgtcagaacaagctgagtgagatcaagccaggagtgactgtttgtgcaagtgagatttggccttcccctctccctagagctcacttctcctatgtaagatcaggcgagtggggaggggggaggcctttggagatgccatgggccaaagctcaaggaactgtgaggcctgctccaggccacacagggagctaatggccaaacctactgaagtcctggctgtttcacagttccctgggggctgacctctctgccacctctcatttctgtaccttttgacctacaggagtgcacagcaaggcctttgacaaataaacagtggcctagatattaaactgcacctgaagctggttatgcaggttcacttagcatttgaaccaagagcggaaactcagctatactcagactgcagagggattaacccattctcagactcagcctgtgaattattgcccactgagtaaatagaaaaagggagggatgaactaaatctcattcaaagaagctcaaacgtgtgtaatttttaaaaacaaaccaaaagtaaaaataaaaaaaacaaaaaataatcagaaagaaacaaaacagatttggatatggaaaacaatgccaagtcacctttctgctgctgtctcccacattagaaaaggagagaagatgatggatgatggcaaaaagggtccacctcactcctctggccttgattagtttcagaaggaacaaagtatcatcttcaaaatatgctagttac

SEQ ID NO: 36603 - DNA, 4368 bp, Homo sapiens
ttgtgagggaaaaagaaattccctatgtgacacatattgggtacatgtgtgtaatcaacttcagggttttagcaccccttgtcaattacatttgttgctatatcagctgttttaacacattttcttctcagttatttggattttaattgtacttatgcctagacactggcatatggtattaggctccaaattctgaataaaatttatttatatcatttattgtgagatgctgtttttcttctcatttcccactatttttccaataattttatggaacttttattactggagggatatattaagatgcctttagcattgtgaaccttggattcttgcttaggcaaggccaatctctaacacatacaaaaccatgtcacctgctagagtttgatattgtatgtttacatatgtgtgtgtatgtaagtgtgtgtgtgtgtgtgtgtctctttataaaagtcactaatggcttttcaatgggtgaataacttcagctataaatatttcattcataagattactcatgtgatacagaagacatgtggtcttgtagcaaacttttagccaactgagtccagatcaaagtaaattaaagaaactgctacctatttaggagttttaatggtcagctaggaatttccactctgttaccacctaacaaactgagatttcacttatgtgaagtgacaggaatttcagggttttatcccacttaggagatcttgccaagattgtctatgtcccctgggctcgagaccaaaatacataattaattcttttcctaggcctgtgggagtacacacgacttgtcataaaacaagctactggcattcttacactttcagggtacttgtttcactaggaagactgaagaagaagctattagtagaactatgttgatcttctttcagaggagggaaaattgagcctcagggtgaaaaggagaaggttcagaaagaatagctgatatgtctgcgataattatgtttacatgggtaagaggtgtcaaagtgacattactcatgagactgatttgaacagaatgttgcaaatcactttcaagattttttttggacttcctcatatttttggaggttggagtcaggattactggctttggtaattaatccttcccagcctgcattctttgctactgagcataggagtgattcaggggcccaacctgctaaatcaagataatgtttgacctctggaagcagaagcctcttcctcacttaaccggagaaactaaatctaggagtacaattggcaaaatcagcagagttcatatttgaagaactagagagggaatttagaatatctattttgggcatttgagggtattttgagagtataatataaaaagttataaacttggaggagaaagttgggctgttgtgtgtgagtactgacacaaagtccttaaagaactgtcatattttctaggaatcatttatttcaacataagcttattaaagtcgatctttcatggctgctgtgtttgaatgtttatttgccaagtaaggcattatgttaatatcacagctatgtataaagaaattccattggtttggtttggccagagccaaaatatttgtgagattaatttgcccaagagactatcattatcattgtgttactttgcaattagttataaggcctttagacaacccttctgcctctagcaggatgatgtagataaaaatgatgactttggtttttgtcaacaagtgggaataggataacttttcttttatgaaaccaattaagttttataaaatgtagaaggccagagtgggccctttttcaagagttaggatcaaagggacagtgttctttaacaccatgggcactgacactttgcacagaataaagtcatcccttggtatccatggggatttagttccaggattcttgtggataccaaaatctgtggatgctcaagtccctgacatgaaatggcatcatatttgctataacctatgcacatcctcctatattctttcagtcatctctaagttacttataatacctaaatacaatgacatactatgtaaatagtatagttgttatactgcatttagggaataatgataagaaaaaaatctgtacctcttcagtaaagatgcttgcatcctttcatttttttcaaatatttttgacttgaggtcagttgaatctatgatgtggaactcactgatacagagggccaactgtatatactttaaaaaatattcgagtgagtaaatgaaattaaatggtgattttctgttgtgttaaaaagtaattttgttagtcattcaaacagcgtaaacttgagatttttgagactagagagaaggaacattttgatcaagtttgtcattgtatttttgtgactccacaaatattaaagctttcctatttatttgagtttaaagatcagtctgaggtgggatgagcccagaggggaagaaacatcttctgttttgaaaaacaaacaatgcattagctattttccctgttcactgccaccccacatctggcctcacagggcaatctgagcttcctcttatcatggcccttatcactctgccctgtaatcattgggttactttggctgtacttctagattgtgcatgccttgagagcaaggcttaactgtatcacctggctctgtattcccagagtccacttagtgcctggaacatactaggagctcaaaaatagaagactgtatgaaagattaaataacagaattctcgaagtgcttttgaactatggcgtcccttcggtccttgtgtgtgtggtgtgtatctcacccaagatgttacctcatctaattgtgttttttctttattatgtctggtttaaatttaatttgacattgacacacacatgcacacacacaaacttgtaccacatatacacataccacagcaggtacgcacagcatatatactgcctgatttttaggctttaaaagcaaaactcacaatttccagactcttccttatcagcagtcaaacctttctggtatcagacacctgaactctctgtcagtgaagttgtaacctgcaggccatctttagacttttgttttttaagattcagcttgagaacataaacattgttccttagtctcaaattcttcactgaattacaccttctttctatggcagtttcattcttgggcaactctcaggagctttgtctttaaagcctatgggttttggagactcagagaaggtcagtaacactcaacggtcaagaccaaaacagttttcctttagggaaactttagtgtttgctcattttgatgtcaaaagccctggctacagagggggaaaatgcaagatggtttttcttccttctgtgctatagcacagcatgcactttacagggaggatttgcaagttgtttaaggtctaaaatatttgctccctgcctttctagtacacgtgtttgaggctgagaatcttatcagcagataagggcagagaggctgccatcccacattccacagactcacttccagatggtttggagactaaggggtgaaaaactcaaactcttcaatcaagccaaacaacccacacctttattgccccatttgttcagcagcctgtcagggggctcctaacatctcagaatcagccatgagggcagctgtttaattaactcttcaaggcacattttggtgggggcaattcattttttatgaaaaacaaattgagagctccaaggctttttgttcttcctccccccccaccctccccgctttagtggttactgttatctggagcttctggctcagtccaaatagcaacaatgatttcttttttttaaagccatctgatcttttgttatttttttttcttttctttttgttttcctaaatcagtctggctatctgacttgaacatggagagatttcttttccttggtgccaggaaatgatggtatttttctggactgttttgtgttttagttgtaaaaataccaaaattgcaatattaactgcttataacagacacaagctttcacattgctttttcccaggttaaaatttggttgtgaatcatttttggtctacttaattctaatatagatttctttgagaacttactgcaagatacctctatgtgcagtactaaggaacatacagaaagagaaaagaaggtccctggtcttgagaaatgtacgctcctactttctgagaaaatatataaccacatttttattattttaaatttgtttgaaaatattttttatttaaagaagagtgcaaagatactacacaatgctcccatatacacttctcctggcttcctctgatattaacatataatatagttatacaaccatgatatcaatacaaataaattagta

SEQ ID NO: 36604 - DNA, 2264 bp, Homo sapiens
tctgaatgttcatgtcccttcaaaattcatgttttgaaacccaacccctaaggtgacagtattaagaggtgggggctttggaggtgactaggtcaggatggctcttccctcacagatgggattagtgtcattctgaaagaagcctgagggagctgccaacccctgatgttcttttgccatgtgaggacacatagaaggtgccatctatggggtacagccctcacaagacaccaaatctgctggcaccttgatcttgaacttcccagccttcagaactgtaagtgatcaatttatgctatttataaatcacccagtctatggcgtcttgctatagcagcccaaacggactaagacaccaagtttttccgcaaatatccattttctgttccaggacccaatcaggatcccacattgcattaaggcatcatatctccttcatcccctccaatctgtaactgtttcttgctcccttcttgtcatccgtgaccttggcctgtttaaaggggagcagtcaggtgttttgtagaatgcctctttgtagttgtcctttcagtgcctattgtgaatcagcctctttcagaatgctgtctgaacacaaagtgcaaagacttagaattatatggatttagagtaaaagctaaagtatcacctcatttttaaaaggtagaaaatgagatccagagaattaaaaaaaaaaaaaaaaagacttgcccagagtgggacagttgacttgagctagaattagaattcaggccttctgactttcaaggcagtgttggaattatgtccctttcctatttctggtccatagtaatttaattctgaggagagtctgaccttcagagtgtgctcctatgatgcccagagacaggccccttgtgcttcctggagcccacagcacggagtccctgttgcaagcacttatggaactgaattaaattctacttcagagaatcaaaatgctgggaatggctaaagagggttcttttagataagagctaacactgctgagagagttaagaactgaaggtctgagtgaggtcaagaaacatatggccatattgcctggagcaacctaaaatggcactggcagggccatagcttttgggcaagaggcctcggacagcttcttgagcagtgggcaatgcttcccagcctgaggcaagtcttttttctcacccacagggtgagatctacagggaaggatctgtatgtcccctgatcctagggcactttctgcccatctcaatccttaagaccggaggacacagagtgtggcacccatgatttcttgctggttctgtctacaatcagtgtccctgacttcacagaccaggcaggacctagcaaagcactatcgacctcaaacctcagggtgtagtatacagaattaataattaggtcacactgtgcaatcctgagccatctaaggtccttggggaatgtgtaattctgaatcatagagtgttccagaaagcaagctcatgattcatcattcatgattggaaatttacacttggttctcaatattttgtgtcatcctcttggatagagaaagattttctcttggcatcctctgttggcatcttcccaacatgtgtcaggtacagagtacatttgccttgtgctttggagcaaatgcagagcacacaggggactggcccaggaattaagagtcctgggttccagctccagctgtcccactgattatgggacttgagaaaggtagcttaacatctccatttcatggtatctcacagctgtgctcttattaagttcaactagattggtggcatttaaactagatactaagatggaactttagggcctggttgagattgggttattgaagagggtcagttgaatcttttgctgcagaaccttttttaaaaattagaacaatggtccaagtgatctattccattgtattaaaaagtgataattctgccattagtcaaataaaactggttttgtataccagctcaggaacttactaggtatattcctgaagcaacttgattaacatttttgaatcttaatttcctcatctttagagcagaaataatagctataacttcgtgtgaggtgatgcatgagaattaaatgtgctacgaaataaaatatgcttttcacagcacatgatacattttattatctataaagacccttccacctgtaatgttctgtggttgtaagggctggacctgtggaggagctactggagcattgctactatggttgccgtcttcagcactgtgaaggta

SEQ ID NO: 36605 - DNA, 1595 bp, Homo sapiens
aaaagcccgtctctactaaaaatacaaaaattagccaggcatggttgtgcatgcctgtaatcgcagcttctcgggaggctgaggcaggagaatcatttgaacccagggggcagaggttgcaatgatctgagatcacgccacttcactccagcctgggcgaaagcgaaattccatctcaaaaactaaaaaaaaaaatctacaattactcactaatgagatgtgtactcagtgaaccctgtgaaaccacaaaatttggagtcagcttgaatgctgacactcttgtttcctgtttcacattaatttatatgcagtgtgtgctttttatccacaaccaccaaaacaatttttggttatttgcaaaaatatagcatcactgaaagggatgtgatacaatctaatgttaaaactgtgccctaccttgagtcagtagttcacatgatgcaatacagatgccagtgtccctggctgtgttcccctggaaattgattttttcagttaagaaaatttaaaagcctgtggcttccctataaatatgctgtggcatcctagggaacctgggcacaaagattggaaacctgatgtattagtccattttcatgttgccaataaagacatacctgagactgggcaatttagaaaggaaagaggtttaactggactgacagttccacgtggctggggaatcctcccaatcatggcagaaggcaaggaggagcaagtcatgttttacatggatggcagcaggcagaaagagagcttgtgcagggagacatccacttttcaaaaccatcagatcacgtgatacttattcgcgatcatgagaacagcatgggaaatacctgcccccatgattcaattacctcccactgggtccctctcacaacatgagggaattcaagatgagatttgggtggggacacagctaaactatatcacctataatcctagagtgcccgtagaacatttttgtgttgcttctgcaaataaattttcttacttctagccccaattttgaattctcaaaagggactgaggtgcctgtagaaatattgaaatagtaaagactagaacctctgtgcactcacatctatctagccactcaaggtacaaaggccagcctcagctatgtgtatcacggatcctctgaccaggctccaaagacagaggtcaaagggagcaggagttaaagaaatacagccatccaccagcctgcctgactgtttgcttaagtaatagccaactggcttttttacataaagaccagccattctaccttccttttcagaattttaataatatctactgcccagtagcttgtagagtcatagagtgccactcacaaagtcaccaaccaagtttctcctgctcagagcctggcattatatttaactggctgtgtctaagtttcctgtttctaaacttccctgggcacattgtcaagactgtactttcccatgcagcactctaccctgcccttcacaggcccaccccttatactgtggctccagtaatatttcaattagcaactttcagaggtgccaaagacgcaagccctaggctttagtctgtttattcttacacaaatgaatgtacat

SEQ ID NO: 36606 - DNA, 2264 bp, Homo sapiens
tgtaaggaaggattgtctctgaacacttgagtacattcccttggcagtacacactacatgctctccccaaacatattgttcttcttccaggacagtttaaatattgtaattttcttatccagctgaataatatcatttaggagggcagagtaggggctcttgaactgagaacagatgtattaggagccaaattctaggccagtcctctgcagattggtaggggaagaaccatcttatttgcagagagaccatttatttagaagtccaccatttggtgaagcattcaacacactcaatgtatagatgttttattaatatttccgggctctatcaaaatagctctttcaaaccaactcatgaccaggttagaggaaaggtgtcatgagaaaaaaaatagaaccacataacaatgacttcaatgactttgaaaactgaactgtcacttggcatgagcagaggcctcagaacatgtggttaaaggagaatgctcttcaaagtaccagctctccccaccccaacacacacacacacacacacacacacacacacacacacacacacacacacactcgtctcttttcttcctttattaaggcatgtaatttaagtgtccttcacagaagcagaaatggcttttggtagggtgtctcaaaaccttttcaacatttcttctctttgatgtcaggattaccacctcaaatattagacgtgtaacattttcattaaaaccaggttcagaatttagaacaaacaagagcgagttccctagggaagtcctagagatccatttttggaagagaatgtctgtgtttatacttccagtttataaaacatttaccaatcacttggcctcaaaacatgtttacagagggaaaagcgcacccacaaaacaaacaaactgcttctttcacagtgtggaccaatagtccttggctcttcccttttgagcattattttttcctgcctgatagagggattcactctcccagtcacgtggtttctgcacaacatccattcttacagccacagttaggttctgattccctcctgtcttatgtactgacaactggttaaaattagaaagaaagcttcttactgatgagtgtccctcactaactagcaaatcttggatgtttcaccctgaggtggcatcctgggcagtgtggacagttccctgaggctgttctgcagaagaacgtggaagccctattatcatggttccagctctcggtctggtcctctgttcggattagcagataattgaattagtagtgcccactttgatgcagtccctcaataggagcatggaatccaatttaccagtaatttcaacaataaacttaagtcctactttgtgggtcctagcgaacagattgttgggggatgcattaagctggtctcatccaatagttagtttataaaaacaaacaaagaaatagaagaagttaacctgtttcttttctgtgagcagaaagtaaagtcaaatcaagatgaaaacttgtgagaaagatatcaggaattagtgacaatgaagttatgtaggtaagagagtaaggttcaaagggaaagttgtgaggactaactacagagtaatcagagttgtgcacaggaaaaagtgaggatgcccctagcctgggtagttcacaggtctttcatgtcagactcagcagctctaaccttttcattaaccagagttagaattttgagcttttagcatgcagcaatcagcaactctcccaaataaattgcaaggagtcatgctttatgcaaacctgtcaccttcatgagtcattaggaaaatatcttgtgtcaaccttgccagctgtatagcttcatatgaactcacaaatctgtactatttgagaccaaatctcttctgtagtcattgctgctggggcatattgttaaagtttgagtaacaactgtttaagaccattcaaattcaagcacagggacttatgtatagttgggattcagtctgtgtttattaataaattcatcaattaaaataatcaatttcatggtgctggaagaggagccatgtgtaagtggtgtgaagtagttaccaatgtctttatattttctataaatatatcttctgagcgttggtttggtatgctatgctcaggtatctatgaatttgttatttattatcaacttggatttgttttacagaagtcctgctgaacttacaattacacacaggaagaaatttaggaagactctttctttccatttccaaagatgaatgttattgtcctcat

SEQ ID NO: 36607 - DNA, 2150 bp, Homo sapiens
cctgggctaaccatgtttgatgaagacagggtggatttatccagttcttcaggcaagggctatgtgtattctatctctctaaaagtctcattttggagaatcctcaattcatcaataactcctgcagctattaccaaaaccttccccctcctttttttaaacctgaaaagaaagtgaagcccaactggtgggggttatcaggttatctggaagacgaaactatggagatttgtattcttatgcattttttgtctcacaacaatggaaatccttgaacttccagagatattatgttctaacatcttaatcctcttaaaaactaatttgcattatctaacacttacttgaaatgttgggagcagaactttggaaagggttttaggtctggatcttccattttaactttattgtgtttttaagacccatttttgagttttcttacacacacatactgctcccacatttttctacatatatatttgaatataggcaattagccatataaactcaggaaaataaagcagttatcgatattagtatattcatgaattatcccttcattcacagaatcctaaaatcttaaaattaaaattgaccttaaaggaagctaccttaaaccactcttacaaactactgtactattacaagtattgaatgcctgggatcagaaatgggaagaatgcttcctttttcatgttttgctccttttattttttttccaaatgtccaagtagccaaatctctggtatgtatcagaggaacagtcaattttcagagtgaagtcaagtgaaaagtatgcagatggcagtgtaaatgttaggaaagtttggggagaaatatgccaactatgtgctgttttgttacagtaactatagaatcgtctctccaatgccacggacaagacccttgccaaatggaataccctatttataaccctatcgggaagaggaaatcgtgccaggaacaagataaaactattatctgtattaagaaaaatacttagaagcatgtttgtatttgaaaataaatgttagtggttaagaaaaaaaataatggtagttgtagatctgggtgttgaaacctgttgcaagactattaattagtcatcatcttatcttcactgccatgtctctgccaacttacctgtttgaagtcacaaatggagctcataaatgggttctttgggagatatgtagaaaataaacaatttcccccactgggcaaatagttaagaaatctccccgggctcatatgttttcctcctgttggcactgttgactcagtgcccatgtgggatgtactcccaaactgtcctgctgctggcaatgttttcagtgccaagtatttagcctgcagtcccagaggcaacaaaaaaatagccaagtccaagggagtgccatgagcatatggaccctggtcacaagagtgtcacactgggaggggcttggacatatgccatgggctgcatcaggacatatgccatgggctgccaccccaaataattccctcttccccaggacccagtggaacagcttgttgaataaacaagagactgaaagagtggttgaactggcaccaggccagtgtcccttgccttacccactgaatcaatgaaaacttggcatatactacattttcaaggagcagggaagcatgaaggcataatctctttgtccctcctgtgttttgtcactttgtcttttctccacctacttatctgacttggtagaatacaaacactatatcatttggaataagacaaaataagggttgattcctggctcttttgctagctctgtgcccctaaaggaaaaacaaaaaaaaagaatatttaactgatatatgcctcaatttcttttcagtgaatggtacctaccttgctggtttgtgggaaggtttaaaaaggtgatatgtaaagtgctttgcactgtttctagcacatggtaggcaataaatgtgaacttgtgtatggccagatgcacacattaaactctggatagtccagttaattactccataatattattagttaataatcaaatttattgattgagttatattgtaatatagaatattgtcctctaaggatatagttattaaaataaataaatatgtcctctaaggatatatttattaaaataaatataaaa

SEQ ID NO: 36608 - DNA, 615 bp, Homo sapiens
taaatctctttgctcatgaagatggtaagctgtgtgtttcaggtacacacatgaaacatcctgaaacctgatcccatttcaatgaggccacactttccctgctccagccaccaagaactaagtccagaagatgctgcttgaagttcagatatggaaaccagacaaatggctttagactacaagcaaaaaatcagtcattaagtgctagttgctgttttcccacctgttttccttgcttgagccttcccatccagatcctccacctctacacctacctggttaaaaatgtcagcactggggggcatatttacttagccatctacttcctggctcttggattctgtttgctaggtcctgacgtcatccccaggctggaagccaatgtttgcactgggtgggagtaaagggaggcataaacagaatcaacccgcttgtgctttaaaaaatcaggctagaattatatacatatttcatgtcagaaaaataaaatgtgtcttggcggtggatgggaagttggagcacttggactgggagtggagagttggcagatgtgttccccttttccttggccccccgcctgacaatcattcaaccttttactcttagagtcagctc

SEQ ID NO: 36609 - DNA, 622 bp, Homo sapiens
cttgtaataaaaatcaaggcatgaaaaataaaataaaaatgctataatttctattttttctcatccagaactaagttcctaaagtggaatagttgcattaaaaatgtaccaaaccatttttatggagagaaacaaaaaggcaaactggcagaaactgctggcaccctccctcaaaactcaattctggaaataagaccagaaggatacggttactgattgtcacagacccagtctcaaaaaacaaactgaaaaactgtgacaaaatcttttcagaggcagagatgattgggagagatcttgggttgtgttgtttctccctctctcacattgccctgggggggagcaaattctgccttgctgttgtcatggcataggaatgtacctgagccaggaaaagcaggagagctgaagctgccagttggctgaggtagggatataacagctatgctaaaggtgggcagctagccccaactcattacttgctcccacctcttctcaccccaccttaactgcctccgtaggagagaagagattagggcagaggtactgagagattccctagggaaaagggcagagaacaattgagccctgatagcaacaccagagggtctccaccctgagg

SEQ ID NO: 36610 - DNA, 1131 bp, Homo sapiens
tgtactcacataagaatttaaaattaaacttcatttcggatcccaagctctgagggagagggtcctgagataatgagattacatagtctgctgatggtagaagacaaaaatcacattagttggtgccttggtcctatctcttcttgtgctgaaagtatgtattctggctgggcaaggccaggaacttttgggggtaattcactgtgcaacatggattcccagcaggcactattgatctgacccagaaagccccaggcccaggtctcatttgtagttctcgaaggcctgttggaggccagcagctggctttggcttaattacctccctagccagtgaagtttgtgtggctttctacagcacttaagaacaactgacaccaaagggtttggtttcatgtacttgaacttgggtgacacgaatatttcagtggtgaatcagtcctagaaaggggaggtgggtaaggtagggagtgtttatagaagacatttcatcaccactagtcaaacatatctcattgttggttcaggaggcactggtattttcctctttgaaggggatgctcagggagccaagagcttccaccctggagctcagctccagagaagggcaatggccatttgcacacagggaacctgcaggactagttgctttggaatgttgacaatcttggggaaagggttttatgtctttcctcaggggaagggaaaaaaagctggtagatctatgtaaagaaaggctgaggctttctctgggacttggggctgctggtgagagcttatctttctgcctggctttcttttaaagaacccactagttgcaggaccccaaagataaggtcaaaaaacttgtaatttcaaagagtcagtactgccaatatcagtgataaaaaagttcagctggaagatgagaatatgagatttctttggcttgagtacatctcttgcactgtaaatgaggaagctccagaccctacacagttgtgttccctacagccctcacccctcaggtacaaaaagagaaggcatcatggtccttagtgctctcccaagccttaggaagtggaaatcatctgaaagcttgcagacctcctggaggtgtggcattatgaatggcaaggggtcccaagaagat

SEQ ID NO: 36611 - DNA, 607 bp, Homo sapiens
ttcacagttatatagatgttgtacatagataaaattgagacataaaagttatactacggtttataaaaacaggttttcatcagcttgtgttcagcaaatatcttgtgaaaagaagtagaagaccatttgttatgtggcaacactgacagttgcagtgcaaggatggtcactcagtctgagtcaccaggactggaacactgaccatggcacgcatcctcccaagaaatgtctgctgctacactgtttcctcttgccagctctactgttctgcatccttcaccctctgtcctctttacgcttttggctacagtaggcacaggttaaagtcctccaactggaaacatttgtgaaaactgttccaagttccttgaacttttgtcagttttgtggtatgcatttcaaacagtggcagatgtttcccctgtgctattcacagcctccctccagtttcaaagcaggaagagccctgaagcaaatgagggctatctcttgctaaaagcaggaatatcatacccaaaaagaaaattcagcttgaaaggagtaagtcacaagtttcaagatcctttggtggatttttaaatgatggtagtaaccctgatcacacaaa

SEQ ID NO: 36612 - DNA, 1770 bp, Homo sapiens
aggttgggaggcaggctacgtcaaaatgctgagaggcatttctaagcatcatcatcatcaacatttacaaggccttcatacatgccaaagttgttctacaacacattagggtagtttttggttcaagcagtgaatacattattggcaaaatgtgtattacttttaactctacacaaagtgaatgaggtaggtaggaaaagccctacccccattataggaagaaaactgaggctagtgaagcacagggacttccccaaaacttgtgcttgtcagaaaaacctagagctgggtcttctggcccttcccctcaatgaaagcacagcttcgaattctttctctgccactgacatgagatttgtctccaacctagcatctcaagtccgtaatgaatttttcatctgaaacatatgccaactgggcccaactaccaactgggctctagagacggcccaggaagtcgggatgaacgggtggagtgggacaccagggcgttccaccgggctgaagaccgtctgagagctctacctcagagaggctgcccaaaagagctgggaccgcagcgaactttctggccttgggtaggacccgccgcgccaccctcgccagctcagatcccaggggcctctgtaggaccgcggcgctggactgggcactccaagtcaagggctccagcccgcattagccaagcgccacccactttctcgtctgcattttctgcccacacatacgccaacggctggatgcgcccgccgggccagtgtgcccctgagtttgtgatccccaaaagcaaaacactgaactccgcgacgatttccacgcaccgccgtcagcttccggactccggcaccagcagcactggcctgcgagttccttttgcgcctgcgcgtggcgcttgcgcagtgggagaggagggcggggccgcagtgggcgcggccatagtgggcgcagaagtgggtgggatgagtacgccgcggcaactgctgccctgaaaccccgcgggcagggagaccactctaaaccactgattcaagaagaggacgctgcagggcaccgcccttcactcaggacagctgccaacgcttcgggtctgcggatcgtgttagtggagacgaaccgattcgtggcgcctgcctgggccgattcgcggggcggggcggggcggggctgagaggtgtggatatgttagcccgaggcggggcccatctgtgacgtcacgaagttacgtaatggaatgcctctgtggacctcattcaagccttgtgttccagcccgaggcctctgtgacgtcacggtgtctgcgggaggagaccatgacgtcacagaggcttcgcgctctgagaggtgggacgggactcttttgagccggctatggggacaccaagattctaggggatttaggatatcaggtcctcaggttctgggagctgaggtcacgtcagggagtcccagagcatcacattgcgtccctccccacaatgtgagcagtgaattccgcggcaaggaagtacgcgggaaaacattttttagtgggtccctaacccctaactacactctggaaatagggggtagaacctgaaacactctctcccaggaagaagctcctgcaagctgttcttttccctggaagcacctgatatcttaccggagacagcatctggcagttccgggctgtgcccagggtctctggcaccttccgccctccctgcccaagaggctgtcctaggccagatagcttccccagccgtacacaaaaacttcaggcctagcagc

SEQ ID NO: 36613 - DNA, 1847 bp, Homo sapiens
tcctcattttttcaaatgaagtttgctcagcacttgcgaatttttgcttccaacgcaactacttcctgtaactactttgcagacaattgggggtctgctcgttagaaacccccttacgcatgtacagggctttcaaataacctggagatttaggcgtccctctgtattcatttagatgatggatagtaatggctcaatagttcctctggaaccattacggtcaatcaggtcaaaatccagcttgggggtgggaaggatttttaagcacgggaggtaggtaacaggactcctgcgcacatttgttcagataacacctctgataacgtaatgcaatccagggtccttaagagaacagatgccaggtgaacgcaagagcgggtgttttttgttgtgacagcgacagacaagttacagtatcaaaactgaaagggaaagtgaactgtttttccaggcagttcccgtttggtaagttctttacgggcacacaaatgtaactctttcaccttaataaatgtaacaatacatacacacacacacacacacacacatatacctttggtttgtaaaaatatgtgtgacatgaagcataaatactagcatggaattgcatgggcatacgatcatcgggaaaatggaatgatgatgtcttctgttgtgaagatcaaatgtaaaatgtatgtaaaagacggcatgggtttttactttttacacaaatttgagttgtcagactattttagacacatccagatctatgtactaaggttaatgaacttttcctttttccaaggtgtaaataagtgcattagaaacaaggcaatgtctaatcagccggggatgttggagaacagtagtttgaacggaattgtgaatagttagggtggaatcctgcagatagagccacctactgcacccgcggcgctgggtccttccgggctgcaccggcggcgggtggcgctggaggaaggagagttcgcggtaattaaacatttccagacaccggagggttattatctgcagagcgatttccggcgatgggactcggagagagtccggctgcgaggtttcgagattctgggacgcaatcctaaagaaaacgtgccccctgctggcgagcaagccacatctcgggaccccttcttggaaaactcgcaaacccacagtatccttatttcactttgcccaagagtattttagtccttcagtttttcttttctcagttagaagtttgctgctactcatttaaaagtacgcacacgcttacccttccaaagagcaaacggaggaggaatttcttctcgccacggggtttctgtttccctgccccaaaccagacgtccttgctctcagatggatgagggcttttgtttgtttgtttgtttgtttttaaataatccgaaattcctagcaactatctgccgccgttcgcttctggtcctgggaagacgatgagcaaagatctactgggaccccatcctgcatttgcaagctcggtccgcgtgcccctcccggcacacccggaggtgagaagtgccctccggtgcctccgtccgcagcccctcgtaggtctgcacgtcctgcttcggatcccaaatcctggctttctgaagaagcgcgggaagaagagagagagtctgtttccgtgaatcgatttccctgaaacacgtgaggtttcctatcctctccttcctcccagaccattagattccagttcctctgctgcttcctttttttttttttcggatttccgtacagaatattctagcaggaccctcccttgtcatcatagctctaggtattcagatagagacctgaagagagaaatcctaagaatatacctattaacaagc

SEQ ID NO: 36614 - DNA, 1086 bp, Homo sapiens
tctttctttctttctttctttttttcaatttcaatggcaaaagggaaatagagcaatagtctttcctgatcttcccccaatctctctttgaaaacatgcaaatgctttagttagccatttagtattaacttaaaatttggcatgaaatgcagtaagaaacattacatgacctccgcacattaacttagtaaaacaactatttcctatgtatggcaactgtagtacaggtgcagaggagtacacccacaagtaagacacagttaggtgttcaagtgggataacaaattgatgtcgaaaaggaaacctgggctgtgaagttgtatacttggggtttaaatcctgcaactgccatgtactgaaccattatactgggcaagttatttttctttccggagcctctgttctattgattgtaagtggctagcttgttagcagtgccctctctgtggaccaagatacccttgtctttttctccataaaagaacccttctcaccagacttcagctgtggtaattgtcctgtctcacccatagatttggagaaggtactgcaatggattattcctttctctgcctctggtacctggcacatactaagtactcaacaaatgttagagtagatgtttctagaaaggataaaccagatgcttaacatatttaattccaaggggtaattttagaaattattgtaatcaatgagctaataatatgttttcatgtccctaaaggaacttgaagtctaaatgggcagacaagaccaacatacacaaagcagagagtggcacaagagccatgtctgatgcaacagtgactcaggaggatcactctgactcagaatggccaagcaaaggtattgggaggaagtgggatagaactgagctttgaagaccgtgctaaaatatttacagactccccaggttatctcaagttctctccaggaattagcttcacctctttgtgctttggctccacatcagttaaatagtggtaacgtttgatcgttaagaaccatgtagagatgaaacaattttcaaagttttttaattaagtgtactcattgccactcaaagacaaataccatataaat

SEQ ID NO: 36615 - DNA, 1945 bp, Homo sapiens
agagggggaaagaaaatatatgagatccaagcaaaaggtccaaataaacaagtgtttataatcagagttcttgtaaagcactctgataatttcatacattactatagccttatattttaaacattatctggctctactgaagtcacagcccacggagtgggactgacaaatataccagctatcggggttatgtaaacaaccttcagtgcactctgtagcctaatttactgtcataaacattgtgggaagcagaaatctctatggcagcttggtgtggatattctcactgtcagcagggaaaattcattgccttctcacaatgctgagactccaacagcatttaccaagacagatgacttggtgacagacacacaggccgaaagttaatatttagctcagtgagatgaaacatgagaacatcagaattgtgcccctgggccagtcccttgattctgcagtccaactgactgtctctgatgatgaccccaagagtgagtcctggagggccagcatgtcacattcagtatcagcctcagaggtcagggaaaggttcgatcactctggcttcccttaataatccatgctatacctatcatctccgaatggattgtaagcactttgcaatctacttgtattttagccagtaccacctttgaggctaaatgagttccagaagtgtatttacctccctctgctgaaataatacacaccttacatttattctaaacttgccattcttgaatattcaatatttgcatttgttaaacaagcctcaacttatcctctccattcaatcatgacttggtaaactttgattctgtccaaacacagtcttatctttctcaatgaaaggtcttttgtttgggactgtatttatatagctatctcttctcccacaacttcctcaatctgttaaattgtctttctggattaaaaaaaaaacaacacagatcttgatgatataaggtaccgtgctctcggccacagctctcttacccttttttatttctctctagaattgaaattgagtaacgtttaacagaaggtgtctgattacaacaatgccctggctgtgaagagaacaaattcagaactttctcctaaggagagaaggagcaaactgttactctcttgtcaaatccagttttcttttaatctctgataatgtttcacattgaaccaatgcctttaatatgacttagtgctttaggaaaatagtatcacctcaggatatttaggtaactaaaccagcagatccaataagtgttatctttcagagtcagccttctgaaggaggctagatgcacatgtgaatgactttgccatagcacagaatgcgtctggatcatacttctggaaattcctctggaaccactgtgtaaatgaagctatcaggaaatctcattgctttgtaatcatgctttacttttgactaaaaagtaaaaacaccgagagttcagagttcatttttcagacttgtttccaaatgaattgaccttttgtaaaaatccatgttcaaagtaagtcaccattgagggttagcctttctttccaaccttaccataaccatctctatcagcaactattcctggaaacctacaggaagtaggctctgtgctgcaaagagatagagcaatccattaaatatggttcctactcttaaagagattacagcccaggtggaagcaaaacacaggtgtaatatgaaaagcactagatgaagtataaggtatgtgaggcttgagaggagtctgagctgaaacagccttaggagaagtcctaatgaggaatgggacttgtgctcagcacaaacggactgggaaagctgaacgtgtatggatatccttcacaggctgactaatcacacaaagtgcaatgactagtttgactaaaagtaatgagagtgggacatgaactccactactgacttaaaccttgctttaaa

SEQ ID NO: 36616 - DNA, 1801 bp, Homo sapiens
ctttacaggtacagggtttcttttggggtaaaacaaattctagaattaggtagtggtgatggccgtacaccattataaatgttctaaaatccactgaatcgtaaattctgaaatagctaaaatggcaaatcttatgcaacgtaaattttatctcaataaaaaaaattttaaacaaagaagtgccataaaatctcagataggattgaaagaaaagtattttacagatcagtgcttttttcctcacttttttatttgttttcatggaaattaccatatgtagggaaaactatgcttttactacaagttcaggctgtgcgatgaactgaaaaaaaaaaaaaaaaatccagagatttcagagtcagttctggctctgacattaaagaaccgtatgattctggggaagtccctttttctcctctgggctgcattcacctcagatgacaccatggtgtccacctgtgcaatatatgggctaggcctggtctggatccaggaactacatagaaaggccatgagtcagttctgagcctgactcattacgagataggttaatggtaaagcaagaggagataggaaacaattcagagtttttcctacgtcttcccctgaattatcctcatctgtgggcaaaatgctcaagaatgatatttttaaaagggtgacgatatttggttaaaatgtccacggaggaaggggaggtaaggactgtgagaagcgtgcccaaaccacagagcttccaaactgcagtccacatcaccagcaacagccctaatgagctctgtgctggacactccccactgaattacataatacatttccgtttcatttcatgaatcacaacttgggatacaatgttcctgggttgcagttgatatattttagagattaccaaatatttcaaaaagaaaaattgattttattaaattcatatgtaaaatgtctgtatgtcagccaacttatttattttcaaatttgagattttcttaaatgttgtagttacagctcaatgtcaagagagttctcaataaacccattaatgaatagcgagactgccgttgcccctggattcttcatttcttttgagagttcagttcctggttgatgacggtgggtttcatttcagctgcccctcttgggtgagaatgagaaaaaaagtggtagagcttcagaccacggatcaggggaagtggaactcacataggcaactatgtaacagtgagttttgttcactataagactacagtacaagccgtatatacaaacattaactcctttgcggctgtcaatgttactggtatccatcaggactcactggtcttttctcagggcgacaagggagctagaacgcaggtctgtgaatcagaaagacacagttcaaatcttagctcagccactggcagctgtgcaactttgggaaggctatttaacccccctaagcttcagtgtattaatctgtaacgtgggaataataaaaatgcatgggtcatgagtgcttgcaaggactaacgacaggagatatgcagagtgattagcatagtgcctagcacatagtaagtgttcaataaatactagtcatgtgtaattgttgttatcctaccttagaagcagcaactttgaattgtaaattgagtttgggctgatctagtatgtcctgagttcattttcaaaacttatgatcaagttcacttttgtgaaggcacatactctttgagaatgtgaactggctgtacatcattcattcatttgtcatttctttattcagtcatttacttactattttgaccatcatctatgtgcctga

SEQ ID NO: 36617 - DNA, 1405 bp, Homo sapiens
taccacctctttatgctactacatattctataataaggcctaagtgattggtattgattagcaaatccaaagaggcttccttggtcttatgaactaatatacattgcaccaatcagcactgaatagtatacagacagtctaactataatttcttccagagcaataatgagcaggtgataattcactgcctcagcacccacaatgcatttggcctgcattctcacaccccaggtgaagtttttctaacaaaacgcaggtgcagtaggggtgttttcaactcttactagagaatacaaaaaacaatgcttagtttataaaagaataatgtaacactactagaatattggcttttttcactttttgacccctaaacatctgtaaatagaataatatctgttatttttgcattgttattaaccaggaagtttggtcttgccatagacagagttcacagggctgggagttggtgcttgtgtgccttgcagactctgtccctcagggtgacaccgccaacttaatgcttgcagagcatttgtggtttatcaagcactgcactttctctttctcatttgacgctcacagcaaatctggaagggaagcagaagagatatttccacctccaatgaacagagcttaggggacacacatggagtaaaaagggccagcgctgatccataattgcctgcctcccagtccagttctgttccctgcgctgtgttgtctcctaattgctctgttcattttgtacctgtgagggttaactgggaacacaggagttctgttaaatatcacagtagttagtacattttaatcctgatcccccagcctactgtagctgctgtaaaatatatggcaataatttcctgaggcagggtaatgtataaggaatgtcaggccagcctctgggcatatttgccttagttcagttttattaaagtaaaacttttattaaggcatgtggtgaattgagcaatcggcatgattcatgccgttataaacccattgctacactcacaataaatcaatgagccattgtcgtacatttgctgtggagttggtagaaacaaggaaaaaatcaatatggggatattattcagaccatatgaaagtattaaagtgtattctgtgtgtattaaacctggccaaacaatatttcatgtgtacttttttttctgtaaatatctccattagtatcgtctactctgggctgtttgctaatccatatgttattttgagataattataggaaatatttaaaattccacataggtctttgtgagtttaaaattttattttataaatttatgtaataaaattgtcctaaggaaaaagcattaacaataaatttagaacaatgagcttcttccttaacaaacacagtatagctgtaactttgcattattga

SEQ ID NO: 36618 - DNA, 740 bp, Homo sapiens
tctttcctctctgtttaataacaccaatcaattcattcttcctctaaatctttattttgcttgtattacttttttaacattttattctcttttctttaaacaaatatttttttctagacttttcctctaaattttctatatcctgcttttgagcattctggcctccaatactggcttgaaaacaaaccaaaacctaacattgtgcaatattcactcagtcatttaaccagtgtttactgagaattccccattttcttgccctggcaaggtactgggcatgcaaagaagcaatgtggcatactagaaagatgacttttaaaaccaaactgttctgggttcagatagctgctttgtcatgtataagttgtgtggactcggacatgccacttaatctcctgaagtgttggtttcttcaactgtactagaaccaaagcatgtctgtcatttaacatagtgcttgatgcataggcacccaatgcatggaacccattatgtctattattatttataagctttaatcaagaccctcatagagtatttgcttcttaggctcatgatctttttgtgggtacttgttccatgttgctgagtcatagtgaaagttgtttaaataattgaaaggacattattgaagggattttcagagcccattgacatataagtacaacaaatagcttcagtgttgattaaaaatcagttatctttttctctttgatcttgtctctcagagaccactttca

SEQ ID NO: 36619 - DNA, 2128 bp, Homo sapiens
ggtcaggagttcgagaccaggctggccaacatggcgaaaccccatctctattaaaaatataaaattagccgggatgtggcacgtgccagtaatcccagctactcaagaggctaaggcaggacaatcgcttgaagctgggaagcggaggttgcaaggagccaagatcacatcacagtactccagcctgggcaacagagtgagactctgtctcaaaaaaaacaaaacaagacaaaacaaaacaaaaaacaaccaatagagacctttagattttgggtttctatgttctcagtttgaaggtattttcatttcttagtttttaaacttattggatgaaataactatagttttcttaactttttatcaaactatctttctcagcttcagctaatgtccaccttcattccagaattccatgatttggtgaacaagacatgttaataccatctatacccttcacaccttcacagagaccagtgacactctctgttactctttgtttttacaatcagaagagcccctacccccaagaaagcactatagttctaatgtaaatggagcttagcacagcatcagaaaactggagctcatcaactccgcaatatggtacctgactctgaagacatctccacaaacagtgctcccagcctttttctcctcttggtgcacatagaaaatgatacctttttcatggctttccagggtaaattgaaggagctgctcacagctggaggtaactaggccacaactctggagagccccagaacctgcccggctgccccaagaattaagaggatcagtatctcagacacacctgtaatccatttgtagcaacttggcatgccctggcaccccgttgagaagctctacccaaaaggttgtcgtattgcctgagagaccaatagaatgcttattccattaaataagaccttctcttcagaaagcccaagtctatttttcacctccgtgttagcttccctgaaatatgtttcccattcactagttagtgctttgtcatgctcagcaaggaggatgatctggtggccacagtaaagaaagaatcaggagccatgtggattctaaatttatgattcagcagccatggcttctgactcactcacattagatgacctgtggagaaaaccactggactttggacaggccctgatgagatgagctggaaaataatatcacaatgggtttctactggcaaccaaacactatgtgaaagttgagacttcctgagcagataaattaaaagcaagctgtacaggagcatcatgacaaaagccatatgttgaacttcagcagatgcaggacagaaaaccacagagcctatcatgtcacacagcatcacctcttgtacacctataaactgctgagctgtgtcaacaaagtcacctggtcactgtcctttctgtgtgtcacaagtatactaagttgtaaaatctgtggactcggaagccaggtaggcctgaggtagaatcccggcttgaatacatctgagctatgtaatgttgggcatggcactcagcttcttgaggtgtcagctgtgttctctataaaatggggataaatgtgtgctcataattttctccataaataccaaaaaaaattgacagcaattcagcaatgatttttttttgacatagtctcgctctgtcacccaggctgaagtgcagtggcacgatctcggcttactgcaacctccgcctcccgggttcaagcaattctccctgcctcagcctcccgagtagctgggattacaggcacctgccaccacatctggctaatttttatatttttagtagagatggggtggccgggctggtaattttgtatttttagtttttgccatgttggccagcctgatctcaaacccctgacctcaggtgatctgcccaccttggcctcccaaagtgctgggattataggtatgagccaccacgcctggcctcagcaatgattcttgactttaggaaataaccaagacaaaagaaaaataggctacttctttaaaagaagttcaatggatacacatgagaggctgtccctcagaagccaagagaaaaacagggatgtccccccatcaccaaccatagtttcacacaatatcaaaagtattagcaga

SEQ ID NO: 36620 - DNA, 553 bp, Homo sapiens
ggaaaatgtgcattttctttacattaagtggtaccaataaaaaataatgattctcactccgtttatttctataagttagattggcttatagttttccaggacatggttttctatcaagctatatggcaaacacctgggcataaaatacactcagctatttacttccatgtgggaaaaatgggtcaccattcctttcttttgaatctagagcaaaggtcagctgaaaccagttagcatatttagtactcagtatctgccgagaatgagtgttacatcaacaatttgtggtgatggtgagcaagcccaggaagttccttacagatagggagggcaagtgctttccaattccaggctcggtgattctgcaatacatgctggtaagaacatttgactcatcctggaacgggataaagaaacacagaagaccaaataatgaagaaggactagaaaacatttttgtacgtacttcatatgtgaagctactgctctggggggagatccatccagtgaaagcacgggcctgtaaatgctaaagaagcagtggccgaggagg

SEQ ID NO: 36621 - DNA, 481 bp, Homo sapiens
gtcgcccctccctccgcaatattctgacaactaaaagtgtctccagacattgccaaatgtcccctggggaacaaaacggcccctggatgagagccactgccttagacaaatacagatagaaactgagatgacagagcaaaaggggactgccggcctcagggcccctctgaccgatgtaagattgctcaggcaaattctcacaccagcgagctctaaggccaagggaaaggagggcaaaggccaccggggctcatgcactgacaacaacctacactaatgctccctgagggccgcatgctcccagcagtgtgctgagcttcttacatgaatcatctctttgactccacaggaaccagtgaagcagccacaaatgtcatccttagcttgtaggcagggaacctgcgacttaataaaggacaaatgacttacttaagatcaaacagctggctggcactaagccaagatttgaactcaagccaac

SEQ ID NO: 36622 - DNA, 2020 bp, Homo sapiens
gtgaaatctgttttgagtcaacctatacatgtctcattgcaggaaaatgtctcggtaagagttcatggagaaaaagtctggcaactcattgttggctgaccttcctgggctcctaatattcagttccccaaaaggcatcttagccatgtaatttccaatatgggaacaatttgagttgcaattaggcaaatctcagaaggttctgccactgatttgttcattctctcaatattattctataggacacactaaaatactgcaccaggttcacgcagaggacaattaggactgctgcatgtcaggttacagaggctgggtaaacacatccatgtcgccattcaggaatggtgtcgttaggcctgcagagctgggcacagggccctctgccccaaaggacacctactaatggctctgtgggggacagaggctgttagcaacccagagctttgggctgtggtgatggcaggtccagagcaagtggagagggggtcagggtagctagcagccggaatgcaaccctggagattgtagatgaaggaaagctaacagacaacccctggcagtaacattagattttgttaaaagctacatctttcactgagcacctcctctgtgtcaggctcaagccagggcccagggacactgagatgaaaaagacatagctcttgacctcaagaagcccagtgggagggcatatcagcaagcccaattatgataaaagataaattacaatcaagatactattttcaaaagtgccaagaaagcacagaaaaggaagagtttgattcgcctgcagtgtaagaataagcttcccatcgaagggcatatttgagcaagccttgatgcatggctaagagtagggcaggtagagaggagagaaatggccattttagaggagaatgcttggttgggatgagttggcactttctgagccatgagtgcctcccaaggactgagtcatgttcctctttttcagtaagcaaaaactgctagtcttcagtttatctcaggcctgcctccagggagaagaaactgtcattccagtcccctttgaggcatatttgggtttccccggactcctgttatgatttgctctttgtccccaggtggctagtttactcccagcgaagaggaatgtctggattctcctctaagccctttgcacaaagtgcagaagctgtctcatcccttcctgaccaagcacatgactccgaccagattctgctagaattcaagcataggtgagggcaaagccagccttgactggggacctgcagagcaaggcctgagtcaggtttatctttgtttttcctttgcccccacacctactcaggcccagctctcaggatcaagtgtgtgggtgagtgaagaagcccaagtcaatagccgggcagtgcctggatggttaagggagcactcaaatctcaaccttgggatctggttaaggggccgaatcacaagcaggagagaggggaaaaatggggcaattagtctcaggaacgaaaggcagaggtaagttgtgtcagggccacgtgtggagtgagattcagggaccatataggtctggaagccaggaaggagagtgggtcgccaccgggcaaacccagcttcccagagcaagagaaccttaggaagcatgcagggcgactgcggaggcagaatcaacaactcagcatggctccgcgtggtgggcatcctgctaaaaaccaccttccgatcacagtgggagtcgatttgcactttgtaaacagagttcccttccctgacacaggagtaccccttcctccatgaatttcctttggcatcttcctgcaggtgacatggataggcagctgccactttccacccacgaagaaaccctgaggatgaaaactacccaggaacactgcatgacaactgcagcagccccgcactctatccctgggcctcttgctcaactgagaaaaataagccctatttgtttaaaccaactattccactttttcttttcaagcagccaaattcactccctgatacacct

SEQ ID NO: 36623 - DNA, 2049 bp, Homo sapiens
tttaagatgttcccaagaaaatctgcgtttaatttatgggcaatttataatggaaatagaccatataaaatgtatacaaatgtgtaggcctgtctatagggcttggaaggagacggtttagcttagcaataattaacgtgaagggtctcttccctgctgccaggtagacatttagactgcctggactttcattaaacttaaaccagaaagggctcaagggccaaggtccaaacattcctcaactccatggaggacgtcaggacacgtagctgacgacaatacatttcaccagggttgccaaagccctgcttaagttgagaagatgcctgcattgcgttatcggacacaggatgccagcctgtgtaccataatcagttttccagagaaacaaagccatctccaatgccccaaaccagcgtgaggccacagggtttgcaaagcagtcagcagagacacagggcacctctctgtccccacacctggttcttcaggcctctaaagacagctgctgctcccagcacagggccgccccgcttaagtcaaagaagagttacggagaaactcagggttgccaaaagctatttccaggggactttgatcatctgatgctgtaatctctgaagggaaacatacttcatttagaaggtattctttggtgtcattcccaaggagaaggcatacttgtttttggaatagcagagcacttactttctctctctctcgcttttacttgatctccctcccgctctctcccagccatgagcattctaactgtgatggtgcacaaacaaccgtgctgaacacagtgagaaatcatagaacatgctgtcggccaaaaaagcatgtttttgacagtgcccagttaggagccaaaatcctagatggcagcaacactgaagcctaagggccaaaggccaggctccaaacttcccagaactgttacagccccaccagcctcctgacctcactcagggtgagacccccatcgtgggggaggtggaacaccctaaaacccaaatgggtccctagaatcctctgaatgccatggtgaagggtggtacatttaaataagtttttcctggcatagtcaaacacagtttagatcaattacctcatttttcaacaatgaaaagattaaacagttgttaagggttatgaaatgatttaatatgttattaagcagagatgtaaactatcaaagtagaaatttccagagagagacttaaatatcaattatatgtgcatccaatttgtaggcagctcttccccacacccctcccagaagcccacaccaaggcccctctgaaggcagctttgaaaatccaattctgtactggtttcatgagaatttttcatggccaggggaaccaggttcagagtgttcacaacactttttttccccttgaaatggagaacaaaatcaaattttagagagattttgtggatatgtattcctgctgaatgatgggaaaggatcattaagtaccttatttgaaaccagagtaggactctaacttttgaactttcactggtttttactcattcactgctggcaacatttcaaagggtaattttttttttttcaaattactgttaaaggaaaatgagaaaacaattcttttcttcatctgtctcttcccctcgcaataacttttcaaaatattggttcttcaggctcactttactccccaaacaattttgcctaaaaacctgcagcccctgatattgacatcttctcaatttgcatagcacccgtttacataatcaatcaaacagagtaaagcacgcatcctgtctgagttcacctcttggcccctggacaggatccgacaatacaggccccatcacaaggacaactcaataacccattttatcgactccaaccgcaaaagggaagttaaggtggaccccgctgcgtggggagctccaggtcagctttcatagaacacagatgtgcccccacttccctgttcactccaaccagaggaaataatgtaagaacaacatcaggaagatagactcagcaacattcccatgcagtaaaacaag

SEQ ID NO: 36624 - DNA, 3103 bp, Homo sapiens
gatgaaaaactgaggctgagacattagccatgtggcagtgccaagactggaattcaggcatgatgaactcccttctactgcgctatgacaaactgtctttcctgtgctggtaaggcatagctattatatatgctacagacacttgtgttcttaggctgagaggtgcaaagaaggaagaataacaagactagacagcaacagcatacctgatgctgataaatactttttaaaatctactaggtaagtctactcttagagcttgaaacatgaatagtttcgctttctatgtttacttatcttttttatgggggaggtgcactgaggaaagtagatggtatcatcttattgcctgttcagaaacttctattattattcttgtgtgttattgaaatgagaaggcaattttctttctggtttaattccatgtagcgtaacaaacagggtaagaatcaagtccttagtgtttagttaagcctcatacaaaagacaagctggcatcctgtccagaaaactcaaatccacaacagacaactcacaactattcaaaaagctgttcaaccaacccctctgttcttttctcatcctgatccactccataccatcaacaagcccagtcgaggcaagacttggagtaaaaacaaatgctacacatccaggcacaagccgaaaagatgctttgggcaagcagacagtaacaggtgaagccgctcacatcacaaagagaaagtcagcgaatcgttatgtgcttcctggtgaaagtacacacacccacctaaaaagtattcttgccatgatattgaatctgaattcaattggatcaaacctcaaggtttaaccaccaattcacagcaatatgagacagatgaccacattaaacgacagaagagattcagtcagcaagtccaaaacacggaaattcaaaggacacaagaatcggtttcctcaacaaataaagaggggaaggtggagaagagacttaaaaagacttgatgtgtatcctgacttgaactaactgcgaaaagggaaccaaagaacaaaacaccttattagtcgatcagaatggttccaacactgacgacttgatattaagtaactatgtgatgatgacatggtggttccttctgaaacatccatggatgaatacaataggtaaactgataatgcttaagccaagtgataaacacctagacgttcgttatgctctcttccacatatttaaacgtttttcacaagtgaaaaacaccaccaagagcctgcgccgtgacactgagatgggagtcgcggtactgtggccctacgcagccgtgaccccttcccttcccaggtcgcggatttcccgccagctaaaatcacgagtggaaaattcctatctgtcctaagtctctgggtgcgaatgaggaacgtggaaggagagacggcggggtgagaggcggcggcccgcgcccgaggatcgcgcagagggcttggttcccggaaatctctccgcaccgtcgcggcagctggctcctcacgggtgggcttctccccgcgttctccgccgccctcgtcctaggcctcgcctaggcctttctagaaagacgaacgtccgcccgctcagtcctagtgctgggttatgacaagcgccgaccgtgagctccagaggcaaagataggagcccaaacaaccccaacgtcgcctccacccggggtcgccgcggccccaggtctcgcgatagttacctcccgggactctcgtcgctggaggccgcgcaagcgcaccggcgaatgtaagcggagtacagtgcctcggcctccgcgtactctccattgttgaaatgagcctgggcgagtgttagggttgcgtggctttcttgccgctgtccttccatagcagccaaggcctagttttcggtgtagaatgggggttgacctccgagcggttagaggtggcaccacaaagccacttccacaccctggaatctaccttgacagccaaccttggcgctaggtttgtgccttatggggatccgtcgtctcgcgagataacggttccgctgctggcggggcgtttgcagtggcccttgtgaactatgtttctgccgttaccagtgttggacccgccttcctcttttcctagaaaaggcgcagatgcgtggtcgcaaactgatttccaagtccgttgtctgatgctgcgagacactatccgtttgttacagcgaattgggggccgatgacgctggaggtggaagaagccgcggttctgtttcttaatggcgaattagcctgcggacgtcctgtcattcccttgccttttagcgtcccaacttagcaaaactccgcgtttagggtgttctgagtaggctttgtctaccctgaaacgctttgtgtcgacattccaccaggtctgttccacggtccaaacttctctaccttttttgaccctctagaattgtgttacgattagtagtatattgtgtcgagagtctgggatctttgatgttagttatattccctggctgtttatgccaaagggaaatccaaatagtaatttattacgtacattacgtataattcaaattaaaattttgtaagaacagttgccaaccacgctaccctacatgcctgctgtgtatcttctcggcgtccctcgattctgttttgcttcccaaagtacttgagccctttccgtcataaaaagtaaagatgaaaaatatatttggagcatgatacttacatgcggaagtcttaacaggacataaattgtgtgcttttggctgctttcattagatttttaattttttccttttaccaccactgaaaaaaatacaaatacagtggattaaggttaaattaaaaagcactagtagaaattaaaagattgcaagactacaaaaaaataaactggcatttctggtgtaagcaaatggacagctcaatagaacaaaagcccagaaacatacctcaaataggctgtattttgtaaaagacatgtaacatatatggggaaaggacagattattcaaatgagtgctattgggaggattagttaaccatttggggaaaaatacatttaagcatttaagctcccaattgacataatattcattccaggtgaattaaaagat

SEQ ID NO: 36625 - DNA, 692 bp, Homo sapiens
taaaagatcactagggtgactttaaccttgctttgacttaaaaattcctaagacaataagctgcacagacagaaagtttcagttcctacttggttgagatgtacgcaggtatctactgctgcctttggttgactacatttcaaaaatgcagtcactgcttgttcacacattccaactctgacaaacatttgtgctatttcctgtacaaacaaaacaatactatcagatttcacagaccaaggaaattacttatattttaatttaacaaaactccgtagggacgtatgagtattaaatttactggtagttacagatttttcttgtaaacagacgcaagggcagagggtacaaatgagaatggatgctaaggcatcacttctataaatccagagcttcactggctcaggctgtggatctgatttttaacgaggccctgaagacactgcactcctttcttatctcagttcagtagctagtatacagaaatgtcaagctccaaaacaaatcccccaccagtgggtgaaaaaagcctttatatcaattggtggtatactcagtgctaattattaactagagacttaagggaaatctcacattcacagagccctcaaatacctctataaagaaatgtcctagagaagtctgccattaatcagttcaggaagctagacccaaaacagagctctcttgga

SEQ ID NO: 36626 - DNA, 901 bp, Homo sapiens
tctcttgcccaatggctcgtggtgatccaaagagtttaaatcacgtggatcagcaacaagtggaggaggaaacatagggtagcacgtggcgacttatcctcaagccacccaaaaggacctagccaggggcaggaatgggagagtgctgcgagagggcagcaagctcggccaaagactgaggctctgggaaccgcaggaagaggtcggaggctggacccggcgggaaggatggctgcggaatggcgaagccacgaccaggaccgggtgaaggagcctggcttctcgggaaggcagcgggaatcgccgcaggctgcgggaatggcggagaaacgaggacgccccccaggaaactcactttcttgctcaggtagaagaacatcgtgggatccccgagagggtcacggcggccgctaaggccctcgacaagtaacggttctacgtctccaatcgggagtaccagcagctccggaaagctcccgtcgccctggcaaccgctgttgcccggtcgcatccggggcgccgcgggacacttccggtgacgccctcgcaccgggcaccggcgtagtgcgcctgcgcggacgtcgatgggtttgtgggcgcagggcgcgaggcgcgaggcggtagctgggctagtcctgttccctggcgtctgggcctttctgctctccgcaaggagctgggtcgcgacctgtcactgccagccgtgcgctcgccctctgcgccccgtctcgtggtcactgccgccctccctcccgccacacctgtgatgatcgctatggagccgcgcctcaggtggcattactataaacctaagaggagaggcgcccgttcgaataagggcaaattatttagtattttgtaagttccaaagttccaacattcttgaaagggaaaagccatt

SEQ ID NO: 36627 - DNA, 497 bp, Homo sapiens
acccactggggttcttagggtatatcccccacacataaggggggactactgtacaaagctcctttctaacagacagggaacaaagtcactctttttctggtttccaggtcaaatacttttctccctctccagcccttcctccagccattccttgctctcatacaccctcataatatttgcacagtaatttatggtctgccaacccttccgggtctgttacctcacttgatcctaagaacaactccgagttcataggtcagttatttgcatctttctgattttatagatgcaaaaactgaagctcagatcctagttaaatttcccagggtcagagtgtaatcgctgggtgaagacaggaattgaatttcaaccttctgatgccaaactttgtgttcattccaccatcccagtgttgcctctctcgtgtgcctggaattccacattatttggcaacactcatcttgtttctaaattattttctcataaccaaagtcatg

SEQ ID NO: 36628 - DNA, 3100 bp, Homo sapiens
aggaaacatgaaaataaactcagcacaagcaaacctacacattcgtgttgttttttaaatgtacatcagaaacaagacggtaaaaaacaacagggcaggtagcagtcatgtggagtcaggtagtcccccgggggtgggccatgaaacagtatctgcctcatttaagatgattctcatctggcgtttgtccaaatgcttactaatgatttcaagtcaatgagtggggagaagcagcaagtacagagaaaacagattgtgtctgggataactctcttcctcttttgcagttaagtatcaaaaactgcacagtatcaccaacgtcacccacacaaccacattcgcgaagtcattaaagtggccaagtcgaccatgtaggaagtttgtcacggcttcggcaaaatcataataacctaaaactacctaaactgaatcccatatttggaagtcatagacaagttaggtttaatgtgcatggatactataaatggtgaattacaaaagaaaaaatcacaaacttattactagtgaatcaccaggcaacaacagtgtcaacttggttaggacagaatcacacagatcttggaacccaggagataccggggtaggtggccaggatggagagggctctcaataaaggtctctgtaaaaacagccggtcggctacgaaaagcacctactgcgcagggaggaggctgcaccaggacaaaagctggtcaggcgtcaactcaggcaaaagctatcgcccccaagcgattctggagatgcaagagaggcatgaaacaaaacaaagtccaagaaacgcggacaaccgggttaccgctggatctttcgctttcccaacgggaagaccaatgtcgaaactagactgcgtttaccaaggtccgctcctaattatttcattagaggaaaaaattccagggagcactggataggaggaagggagatgctgcctttcagatcgtagaaatacaacaagaaccaaaacagaggaattcccaccaaatcctaccaccctcgtcccttcgcctgcaaagcctctgctctcccaagcccgcttctctcctcaaattcttgccaaagaacaatctccccatgcttaccaccgccccccgctcccccgactccgattcctgaacaaggttactttcccaaagtccttggacttcatccagagttggcgcgccttaaaaagcagcgcccctccaagtccccgccccacccaacaccccgtttccagtctcaccccctccgcaccaggccccgctccccaggccccccggacatacgcgccacgcctgcccgccttaccatgtaccaggtccccaggatgatcgtcccggtgcggacatggcaacagccgcagcaccgggtgctgtagaaccggtcactgcggttccgcttgaaactcatggacaccatcgtaacaggcgggcctccttcttggccgggcccctgacaaacgttctccacccgcagccaaactcaaacggctgtttcacggcctccaaaacccaacgacgcgtcttcaaacccgcccccggctcgtgcccctgccagcttcttcgcgcctgcgcactgagcgcagcgacttcggcttacccacccctcttcctccacacaggccaatggggagcggaaggctggatggaccggacttctgattggaagaacttggggattgacaagacctcacgcccaattagaagtgcaactcgcctcagcgagtctccgcctgttacgcgaaggcaagggctggttctcgggcctaggatagttggggataggtatgtccccgtagtgcactattcccgagatgagacccgcaagaaaagaggcatttaatggaaaaagggagacacgagacagcgcggatggcagaaagcgggcacaaggggcttttctgagcaatgtgtgccacgtactggatgggaagcgtcacaggctgataacgtgacctttgcgcgcagctcaattattgcgcgggctgggggcggggcctgcggggaagggacagagccaagcccagccttgagccatcctcgcccctgtggcggaaatgggagggtgcctggaggagtggagggattggatttacaccctcttttccctccgaagcctccttggtgggggcgaagaaagaccatccaaccctgccaaaggcaaaaggattaaggataaatgaaagcaagataatgtagaagaactacttagctgctgggtttttggagatgagtgatttttttttgtagggagaaattatgaaacacattgaaatggacaaaaaattactgaatgtcttcaatgaaaaaacagccatagtttggcacaccgtcccgggcattctgttgctagaggggctgtccgcttttctttgtggtgctctgcacaactcggtaagacccctcgtattgttatcttacccttccttgggaaaagccattttgcatcgatttgtaaattcattccccagtcctgattcaacaatatagatgggtgctttaaattctgcttagagctggttctaacagcttactggtccccgggttaatgagtaaataaattttttacacgtgttcattttgtatttctgtgagacctgtgacttcaccgttaaaaaatgtatttatcatttaatgctttggtaaacacacttcttttcagagaatagaaagggcttcccttctgccagggcatattcttagccagagaccacactgaattcagagtaaaggttatttctttggcatggcttctttgaacactgcctgaaattatgtatgtatttgttgattatctccccaataaaatacaaattttaggagagcagagactattcaccactgaaggagttgtccatggagcttattttcaaaccatctgggaagcagtagttaagcccgcccacgctaaaggatggggtgtggctggctaactcagaatgaattatgacatttctctacttatgtagggagtagattatcttaaccccgccccacaatttcgtatcccttattttgttctaggcacagatccaatcactttattttcaatcatttcattcctacaactaactgagataggtactcttacgttatttaac

SEQ ID NO: 36629 - DNA, 1200 bp, Homo sapiens
tttttgcttaagccagtgtgggttgggttttttgtctcttgcccagggaggagccctgactgccccacacagctggtgggcagcagggctgcactcattgcagggctgactagctccagggtccatgcactgaacctcagccagtcccagccagtccccgcggaaaaggaatttattgatgtgagacctgaacaatcaggaggagataaccaggcagaccagaagggagagaagatgcccagacagagaaagagacaggtgaaacgggtggcattcagagagctacaggtggttcagagtggctggagattgagtgaagggtgcagggtgtgcacacaccaggtgctgtggtttgcaatcttgatctttctgatgaagtgaccagagtttcgcctctgctgtgatcacaggtgtgattgaagagtcggttggcagtgtgccctgtgcctccccactcagggttcagtcctctgactcccgcctcctgtctccctcacctgttggccccaaaagggagtcactgttggaggcctgacatcagacatgccccctgggccgcacctcgggctcctgggactgccaagggtgagcagcctctccctggccccgcgagggagaaggccaatgaggagaaaggccacgggcatgctagaacccctcatgtgtgtgtgtgtgtgtgtgtgtgtgtgtgtgtcgttggtgtgagtgtgcatgaatagctgtgcacacataggaagtcaattgtcctttcccagttgagccgttgggaacattccccagaatttactcttcctccaaaatcattaccttatctcaggtggccctttggagcctttggcaccatagctgggtgaggcaggaagaaaaaaaacaagggcaggggagaagaggaatttgccctctgctgtgtttcagctctcaggcaggctatgccttcccgcattgccactagctgggtccaggccatgtcaccttctgctgcacctacagcagctccccaatgtcagtgtgccccagccacttcccaccagaccatcttccacagcacggatccccccaaaatactgctcccctcttcctcctgtctcacttggactgccttggctagggcaaattctttgctgtgacttggaaggccctgtgtatcccctgcctatctgtccagcctcatctgtccccactccacctctcccaccccag

SEQ ID NO: 36630 - DNA, 579 bp, Homo sapiens
cagggtttcaccatgttggccaggctggtttcgaactcctgacctcaagtgtttctcccacctcagcctccccaagtgctgggattacagacgagagccaccgcgcctggcctgagaaaggctttttctatgccacagagaagttgggctcccagtcacgggagcagctgcggccggttccagcagggggcagctctcaatgacagctgaagggcattgcatagccagatgcgcacatggcttttaggaactgggctctgcctcccctgaagtctgtctgaacctggggcatcaccgtctcaccgggctggggctttgatgcatcaggcccagagaaagaaacttggtagaggagaggaggaaggagatgcaaccttccaggaagcagaaatgttcaaggactctcaaaggaaactccagaaaacaaggagaggcaggaattgccttatgatcgcttctagctctatgtctcacctttgaaataaagcatcttcctggtcccagtgcagagacaggtcctggggggaagcaggagaggagagaatcagctcctgttctcctgtctgcctcaacttcccc

SEQ ID NO: 36631 - DNA, 1924 bp, Homo sapiens
caggacacgagggatggcagacaccccggtgccaacctctctggctgtcatgttttttaatgacaacaatcatagaaacatcggtggagcctcttctctgtgtcaggtgacccagtagctcaagaataattgctcctaatttacagatgaggaagccggccctggagaagaagagggacttcgtgtacacacagctagctgtggccaagccagaccataactgaggtgtgtcagcccggagcccggtgccctccaggaagaggggtcagcaaagggatgctggcattggtgcatctcccctgctttgtgagtcctggtttgggctgcccatctcagcgttgtgaccatcagcacaaagcaccaagggtcttggcaaaaggcagagatgacagagaagtgagaagcaggcatgggggtgggaagggctggtcagacctcagctccgcccctgtctctttccaaagtagcttttggattgaggtggatagttccctcagttcccatgaggagtccagcacggtgctaagctgggctgtgcagggggctacaagagcaggcaagtcccagtccctgtctcagaggggctgagagacaagcagaggtacagggacatgagcaaggcagccccaggaccaaagtcaggccgagggggtcaggctgggtaggctgcttgcaggtagggaatttgctgcaggtctgggttacagagaggcccaagtcccatgcccacatggtgctaggtcagggccctggcagccatccctctaggatggccactcccaacaagggcctatggctctccagagcccagaacctgaacacatccaggccagagccacgggatgatgcactggcccctgccccatgggtaagaggctgaatggcacattaggcaacctctctggctccaaaccccagctggctgccagcctcagcctcctagtcgatggtttgaccacatgactccccattaaagcctttccctggctctccatcctgcccctcgtcatgcccggtgactcacgctgcttttccaggcccagctcaccacggctgacatcaccttcagctccacccctttcccagcaaaccctgatgagccctctctttcctctgacccattgtcctcctcggaatcaagaatgctagagccaaaagctatctcagggaacatctggagcagcctcacttacagctggggaaactgagacctgagagatgccccgctggcgtttgttctagttcagaggctgtgattcatttagaactttaatgaaaggatttagggctcagttaggatcttagggcaaatcatcgctgctctgccagtaactaagcccttacccttacgcctgcccagcagggtcctggaaatcaatctccagattccgccgggtccagggctgccccataggtgctgaggcactggagacaacaggaggtctgggatggcccccagcccctccctctacccaaatcggggcatggctaattctttctctaagagatccattgctttaaagtccagagtagaagggaagaaacaggtgtcaatttctgccaggaaaatgagatcgagctgcaacctcagagaagcctggaggggtactgttaacgggaaccctctgaggctctggggctgaaaagaaaatcaaggaggaacaagcaatcaaggttttcatggaagccttgggcttcagaaataaggcatccctggaacgtggtttctaaagcatcacctgagaacttgggagaaataaaaaatgcaaatcctcaggccccacctgagacctaccaaatcacacactttgttttgggatccctcaagccctccagatgattctgatgcatgctcaaatttgaacaccactgccataaaggacaaccaaagcagtaagcaggtctcatagctggtcagccctgt

SEQ ID NO: 36632 - DNA, 807 bp, Homo sapiens
gaggaaagagaatatggaggatcgtgtagaagaattttatgggccatacctggaagttgcgtacaccacttctgcccacattctgttatccagacctcagtcacatgttctcatgagtatgcaaaaggagccaggaagtgtggtccttggctgggcagccactgccagcagcagcactacactgtgcaaagaggccgtggatttttggtggacagttgtctgtctaccccattgagcaaagacatagtgagaaaggtatgtgtgaaaggagatttgtttttgaatatgggaaatactggagcatgtttgtgtactgacaagaatgacagagtagggagggggaatctaatgatgcaggagagagaggataattgcaggagcaaagtcctcagcaaggtgatagcaggtgaagggattgtcctttgaaaggagcaggagggaggctgagaggttggcagggtgagggaaaattgttgttggcacatattcaaggaggattggcgatttcatcgtgggaggcacagttgtccctggctgagggcttctgggtttttttggttgaagtgttaagaaaggtcatcagctggatgtgacgtggggagaggatgtgggggatgggaagagcgagaatgtacgaaataatcattttagacagagaaaagaaacttagtagagaaacattttagaattacccggctgtgttgcatgaccatttgaggtttgtggttatgcatataaaatgaaaattacctccagaagttgtgtgtgtgtgtgtgtgcttacattaatggtgtctatcattctctg

SEQ ID NO: 36633 - DNA, 2954 bp, Homo sapiens
ccaggagacgagtgctcctccgacagggcccttaacaggagtctggcacctgtctctatggctgtctctactcagtcccagctagtagcagcaccgtggggaagcctggggtaagaggcagaaggggattctaggcctctgatctctgcaactcgcccccacctaaaccatgccaaatatacacacgctgaaaaaaatcacacaaatcaaacacagtgtgccgcttcaaggcccttttcccaccaactgcctccttgaccctgcctgtctgggggtcctggagccacctgggtctcagccatggtggtgctgggcttctgccgggcagtgaacagctcatgctctctcctcatccatcgagggctctctgggcccagggactgggctgggcattgttgatctctgtctttctaacagcaaactcagcccagagcctcctcaccacccctctacccacagtgctcagagaatgtcagtgaacatgggcagcatttaattgcctggcaagttcagatttgcacctttgatctgcaagcctggcagggctgggtgatgggaagaacatggcatttgggtgcagatgaacctgggcttgaaacccagctttgtcatttctatcttgtgaccttcagtagctgcttcacacgtaacatccctctccatccctctcctgagcccaggtgttctcatctgggaagtggggaaagttgtacctaattcacagcagaacatgtgagtgtacaaccagcccagcccgtcatctggtggccatgagctgggagccgtgatgagtgtttcagtcttggttcggggcgatgggcctagtaagcactttatatatatcctaatcctcccaacagtcctatgaggagggcactattatcatcatcaactcctttgtacagcccaggaaactgaggcacagagagattatgaaattcggccaagttcacacagcccataagtgacagggctatggtttgacccaaagcttttggactctggggcccaccctcatagctatggtactaaactgctgggtgtttaccccaaaacaggaaacctacaaaggggtgttctttgagtctatcaaaaatatttactgagttcctcctaaggaattaggagaggtggtctcagccccactgcaggctgctctctgtggggtcctggggagcggctccggccctgggcctgctggcagagctttgctgagacctggcagaggcagccctgccctgtcacgtctccctccacagcccacttgcctgccagggtgtttgaacaatgattaaccagcagcgggcaggccagtgcaggccaggctgggcacggcgggtgagctcaccccttgcacaatggtggccgcacccgccgcccgcacccaccacccgactcaggggctggcccagtggggcagggccaggcgggctcccagaagcaagagacatgaagctggagggaaacaagggacagcctagccagatgtgcagatgtgactacaatcacatttgatgccatcctcccactccagcccatgcagactccagcccctgttgccagccatccattgctgggatgagaccagcctcaagggagatgttcctcaaacagtgtcacctaagcctgtcccaagctgctcctgccacagagcatcagactccagactggactagaggacgcaggaggacccgcccacccaggcccatgacagacagggagccacgcctcaggcccctcctcccctttctccatgaaccctctgagccttgtggagcccggtctctggccctggctgctcggggaagcacaggcatgtgcccatacccacaccagcccctgggcccctccctgggagcatccggggtctcaagcgccagagcctgcatggtggtggtggtggagaactcacagctcattcggagccaaatctgtctccagattcgcggacgttgccacacctgtccaccccagcctcgcccgaggcttcggccttttatttgcttgttgagtggagcactaaagtcctttaccctaagtaaaccgtgtgtccatttcagatctggcttcactgcctcaaaagctaggaggactgaagaaggttgggatgtacatctggggttcgggggacagcactatgtgtgggggtggggagggggaaagataattttctgtgaaggtgggaggggtggaggtgcctttaccccactcccactccccctcctcagtgttccgaaaagtctgaaccctgctggtctgatgagggctcccagctgatctgagggctcagtcagccttgccgggtgcccctccaaaagaacctaggagtctgggtgcccaggtctgggcctgccggagctccctggcccctcctcacagccaagagacactgtgatcctcagactctctgaaggcccctcaacaatcaaaaaagggtgggctcccgcttattgagaagttgtgcctttttttgtcctagattcacctgcccagcctcagggaccccaagttctgggtcatgtgcttgggacatcctcacagcccggcctgagaagacctgggtattctggctcccatggtgccctcattctctcaggacacctgaggccctggccctgaggcctgtcatgcggccttcttgcagcatcgctgtttgtttcctgagctcctgtctgggctaagccctgaggaagaagagagtagagaggatgcgcttgctgcctcgggggcctgcaccctggttggggagccaggcatggatgcgggctgcatgggcgccagctaccatgatggctccctagcagcaccgtctgtataccacactttgttctgagcaggtcacatgtgtttgtttgtttatttatttatttattttgagacagagtcttgctccgttgcccaggctggagtgcaatggtgcaatctcagctcactgcaacctccacctcccaggt

SEQ ID NO: 36634 - DNA, 5989 bp, Homo sapiens
ggattacaggcgcacgccaccacgccagactaattttttgtatttttgtagcaaaggggttttgccatgttggccaggctggtctcaaactcctgaccccaggtgatctgtctgcctctgcctgctgggattacaggcatgagccagtgtgcctggccaatatgtgtttaattatttattacatgggcttcacaagcctgtgaagcacatagatcattccatgaccaccattttaaggatgagggaaacgctaaggcatagtgacagtaagcaacagcctagggatgtacagctagtaggtggcagagcccagctaagacccaggcagcgggtccagcacccatgctgtcagtctctatgagatgctacctttggagcaacatgcatcaggaagacagggccaggggcagctttcagagggtgtagaccagatggcggcagcgcttggccctgaggtgtgatgggattttgtgaaacagaagcagcacagggcaacgcagacagaggaagcagaagcagtatctgcaagcctcggaggtgttaatgacaatcacccgaggaaggaggtggggacaggggactcctgtactttcccccatacccttgccttgtttgaatcttccataatgtgcatatattcattaattacaggtgaaatttaaacgcacaaaaaaatacagtgaagactgagttgtgtgtcataaagccatacaactcagcaggagttggcaaacctttcctgtaaagggtcagatagtgagtatttgaaaatattttcaactactcaactctgccacggcagcacaaaagcggccatagacaaaaggcacacaagcgggcggggctgtgttctaataaaactttatttatggacattaaaatgccacattttcgcatgtcacaaaatattcttcttttgaagttttcaatcgttgaaaatgtaaaaagcatttttccctcacagaccgtacaaaagcaggcatggaggcaatactgtggcctctgggccatcgttcgtacacaccttccccaaaaggctcagataggcgagagagcagggaggctccagagttggctggagtctagttggctgagtccagtcactcaggttggctgcagcccaggagtcccaggagcgaggagcagcagggctgggccaagagtggagagggctgaggacaaacccatagggcctcgaaggccccaggaagagatgttgtcacagctgactcagccccgtgctcagactccagtgttaccaggtcctgaatgtgagacgcaggcgtctgcttctccgagcttcagttacttcagctgtaaaatgggacactggcattgaccttgaaggtcatgatgcatggaaagagagggttagatcttgtgaaaggggctgaggctggtgcctatcccgcaccagagacccacgggggtgacgatggtgtttgctgttcattcacacaattgttttggttattctcaggatgttaagcaggctcatgtccaggtatgtgttttagaaatgtctccctggtgctatgtgacgaatatgtctgcatgtctgtatgaacatccttccttcaccttccagaaccttctctcggctgccctgtactaggaagaccaacctgagcagacagcatccacaggctccctcaccctcctgtggacagacaactcagctactggggacccccagaaggagatgaggggagggaggagagcagggttctccctgactccctcctgcaggctgtgtgcaacctggatgcatctttttggaaaagtcacagcactctcccagctcacctcagagattcaagggggtctccctgccccttgcccacatctttgtacactcttctcaaattacccaaatttgaattcgacctgcctgattgatagagggcataagactgggtaaagataccagctaggagactattgctatcatcttgatgaaggaaaatgaagcagtaaaccaggacagtggtgatgagggtgaaggaagagctggaaccaagacatatgtagacattcaacaggtggaaccaggagcattccagagagggaggaatctccaggagcagttgcatctctggctcaggcaatggaggggatggagattctgagagaggatacccagggggagaggctggtgtttgggatggaaatgataactttgaggcagtgcctgcaaacatccaggtggataaatgcacatgtatatccagccttcctgaagctctgattttctaccatgtttagccaggatccatccagttctcccagacaagccatgtcaggaatggcctgggagccatggagaggggtcagtgaatagatggctgctggccttgtccttccccttcggatgcaggaacaaggctctcagatgcatgaactcagcctagagttcctgggtctcctgctgcacccacaggagaggtctgggaggactccatccctggaggtgccagcagttaaagaaagccagagctgccagccaaaaaacacctttgcccatcagccaggaaagctgaacaggctggagtgcttccataggggaggcactgggcttagatcttcctttagccatccattccttggggctttcagggggcaggaggtcagatctatgctttcctcggaggtgggccctggtgctggggcgggaccacaggtggcagagggtgggggcttaactcctcaggcctcactgctcattcctagttggactgacttctgattacattgttgtttcagaaacaagcactcgatggcatatttctcaattgagtcactgctcagtttgccttctcccaggaaagcaaacactctctggcttcacctcgggccatggctgtcattgaccttacttaccttgaagggctcagcactgggttcccaaggccctttttaagatccaatttccctggtgctttgaggagggtgggggacatcagaagaccctcttgctgggaacatccacttcccgatgcctcctcctttgacgtcgtgagccacaggccaccaagcaggttctgcggcagcaactcagaagagccctctggagtaggagagcctggatcccggtgcccaaggtgggcacagcctgcaagcagctctgcttggagaagtcccgcttcctagggctcattccgactgtgcacatgacactttcgggagtaggtcaagagccccaggcgtcatttgaacaggaagttctcgggtcacatcaaatgttccatgttgccaaccctccatgtaaccccttttcaggaagtcatcggtctcactggcagggtgggggagggcctgtcatgagtcccgtctccagtgtccctctgttcagtgcatttggcgtaacccccagctgtatgcactgggcccccagggctgcctccccctacgtcccccacagcagcccagcatggggagaaaacatcctaaaatcaccaggggctccagggaaaagccgagagggggcacgtggctggtatgagagccaggaatgcccatgtgttcaggatggcggaggcaatgaggaaagaatggcccgatcttctctctgttccctgcctgtcagtgtcattcccactgggttctaaatccccctagcatgttcacaggtagctcgctgcacccagagaccccaccaggcagataaacttctttgtcccacagacagaattcctcgacctagtcttgccttcttccccctgctgtcgtcctcatcccacttccagctgtgcctgaagagaatctgagggtcagactggagggcggggaaggagaggccgagctgccccattcacagcgttcaggactgtctctgccccaggttccctgactcctggaagtttctggagtcctagacaggtcctcttggcactttaggaaccagctcagggcctgcctcttcctggaagcccttcctgtgcgtgctgatggtcttggaatcaaagcgcagctgctgaggaagtaactgggaaaagcaaaggccagaactgcagggttgaggaggaggagacagtgaggagaagcccacagttcatctccggggctcctccaggtggctggcggagcggctgagtggcccgaggacttcctttcccaggaggctgtgccacagacttggagctgtggggtggggtggcgggtaagagggcaggctctctcctgggcagcacaaaggaagcgtccagggggcccaagacagctgtctcactgtgcggtctgagcacccccagcccgggcatgtgagcagagctgactaactcttgcaggaagtggcctcaagctgggagggaatggttggaaggccgactgggaagcggggctcagagggtgctccccagcctggcccctgactcatgagagcacactgtgccctttgagggtggcctgctttagccatctctgcgggtgctgcaggggaacagggaaatgaggaaccagcatctgcccacagcctcccttctcccacagaggcaggctccaggcctcagctcccacccttccaccaactcacctccccgcctcacctggttttcctattttttttgttctccaggcttttcccatgggaaaatcccacccaccattccaggccagccagaaagcctctccctgacacctgaccaagtgttccctgctggctcacaggtagccaagccccagaggtctgatatgtgacttcccggcaggatgctgtgatctccaagggcagggtccctggagggagccggggctgtacaatgttggccctcagcagggtctccaggcaggactgcttcctcaggccagtccatggttcctccaccctggctcccactccccatcccccctggcctcagggagctgacaaggccagaggcccctgaattcctgcccgagggctcacccctgccctcggtttcacagaccacctttgtgtaggtcactgttgctgagctctttctagcccagcacaaacctggggcctggtcttagtgactgacccaccggagagctcccagtaactcccagtaacttctctgccagtcatcggctgctgctcctgtccctttgaggaactaacgactgttctgtgagtcagtaactaggggcagagggaggggtgacagactcattgcagatatcaggtgatcactgcagatatcatgtgatcgctgcggccttggagccagaggcgtccctgtttctgcttccccaagaggacattctcctcccatggggaaggcccccactcactatacatttgcggcatctaacctagatgggctcgagaaagccactccgcacagcagaaagagcactggctgggagcaagtgagtctgggctccccacggctggcaagagactccccttctctgaacctcaacttcaagggggtggccctcagaaaccctaagaatgctcacagttttgtgacctcttgaagtccatgtacatgaagcagctgcgggctcagccacatcctgaaggatcccatgaggatgagtcctcgttagcatctgtctgccctggctcctagaagaacctgtgatgctgtgatgaagctttgaagtcaggcagtcctgggttcaagtaccggctctgcctcttaccagtacattttgcacctttctgaacttgatttccagatgaggagatctgaggccccaggagggaaggaaagcacccaagataccaggcgggaccctgggcctgctggcctgcagctctgcactccttctccagagggcttgccctagaaggagccagggtgctgggaaggctgttccactttcaagggctgaaatgaaggtggttgtgtctcacagcctggctggcaaggctagttcctccaccctggagcatctgtagatacaccacagacacagtgaggggagcagacaggctgggaccacctggccctggagggaagccctgggaaggctggctaggctgcctcctgggctgcctcctggggctgcagccggtcct

SEQ ID NO: 36635 - DNA, 2313 bp, Homo sapiens
gaggctgaggcaagagtattgtttgaacccaggagatggaggttgcagtgagctgagatcttgccactgccctccaggctgggcaacagagcaagactctgtctcaaagcaaaacaaaacaaaacaaaacatctgaaatgattcctaaccttatttgcaattaaattaaataaaagaaaatcaaaacaaccatgtgataccatctctaacccccactccagcagaacgaagaaaatggaaccatttgaaggtgtggtctctgagactcccacctgaagtttggacacagggacaggtgtggccaatgggtgacgtttttggagggcaattgcaaagaacactcctttccatccagagtccactgctagaaaagcctctgaggtgtttactgataatggcttcctaaaatacccacgcgagaccttcagtcctgcactgtgtacaacagcagaagcctggaaataaggtgctcaccaatagggaagaattgggtcagttacagtccgtccgcacaactgaatgctccgcagtcattatatgaatggggtagaactgtctgcacgtaccgaaatgaaactgggtcagaaaaaggagctgtatgtccccgtggatagacccacccctttggtgtaactttttaaaagcgtagacttatcctcacaggtatgtgcacggaaaaaatttctggaaacagcaaccaaaaacctattaaatgaaattgcctttggcaagagacaggtgaggagaaggaggatttcacttttcattttggacttttctgttctgcttggatttctaatcatgcgcacatgcatattttaattttttaaaggtcataaggaaatatctaggtggtgagatttgaggtcaatttaattttctttttgtacttttctatttaaaaaagaatcaaaatcaatgtgtttaaatgtttcaaaacaaataaaaacctccactgctctggggataaagtccacagtcctgagcattacacccaggagggaggttcttccggcttcacctccaacttcctcgtgctgaactcctggccccaaccccagccaaccccatcaactctctacagtacaaagctctgtgccgtcttacctctgggcctttgcctatgctgttccatctgcctggaatgctccttcccctctgggtcatcccttcatttcaccttatgtttcctttggcttgatactaggtgcctgccaagtgcttggtggtatgggcctgcctgatggctccccctggcctcacctccataccctcaatgctcctactacgctgccagcctccctcactacctcgcaacagccttgaaggtaaggacggggcctgggtcactggcaatgtccagggcctggcactgtgcctggcacatagtaggtttcataaacatttgttgacggaactgacagatgactgactgaatgaatgaataaacagtggcaccccaggcttatccttaagcaggcctgtctgtggggtgaggttcctggccaggccccagacgccgggcctgggcacctgcggaggcaacctggaggggcagacacagccgccggcagcagagccgcccgcttgactccaaggtggcttttatttcctcttatttgggtgccaagtccctgaacaaatattttcctggagtggaagaacggcttagatcccagccttaagtgctggaaacaccggctgggtagggcaggttccaggaaccagaggaagctagggcctggctgcagctgggggagggggtcccaagggctgccctccaggcagtgcccaccctcccgctgtctgaagagggggcccgctccgccttccccatcaggctcagggaagccgccactcgcttgctctgctcggcacacagctgtgagaggcttttgccctgggcctctctgcccataaatcagaatcctctgggattctgaagaaaacgtacaccatgtgggcctccctcatttttgctgaaaaagctgcagtgagatttaaaggaactaattagaatctcagaagcccttttataagcgtttttcttccctttaactttcttattgaggaataacatacgcagagtgcactcgtctaagtgtatagcttgatgatttatttacatatatgttcacccttctaatcaccaccgacatcaagccagagaacatttccgcaccccagaaggttttttgtgtccatgcctagtcaataccacaccctcagcccgaggaacgcactggcttctattatcatcaattagttttgcctgttcctgaactgcctacaaatggaatcatgcaatgtagg

SEQ ID NO: 36636 - DNA, 5685 bp, Homo sapiens
gcaggggcacaacagagtaggcagggccctcaccctgagaagctcagtctggtgagggagctccagacctctcagaagggcagacagggagctgttattgggaacagaggctgtggtccccatgggaccccatcagcccaccctacactgtgaaccagctcttgggggccatcagccagggagctttggggccaaagattgccgacccagccccactgagaggctttcaaaaacccccaagaacaatctcaggacaacctgggtgcagaggcagcctccaggcatgctggcccccaggtgtggataccgaggacggcacaaggggcaggggcagggctgggcacaaggaactgtctgttctgaggcaggtctgcccacacagggcaaccccaggcctggccctgatacaccttcccacacttggcccagttcctgtctatagtaaagactgggtgcaggccctttggtcagagtatcatcctccttggggaaggaaggacagggtgtccatcaggctggggacatataaggctaatctggaaggggccctgcactgacaagcctccaagaagtgggctgtgggcctgggacgggccctgctggcaaacagcagtcccaggaatgctgcccgcctgcccagctccaagaggcaaaggggccagagggcaaacatatacacatctctccagttcctgaggccggggctgactggcaggaccgggggcgggggcggggaggcaggatcacgccacacacagtgagcaggcctgtgcagaaccctggtcggcagggagggcagaaagtcaggactgcctctgcccttcacactggccccaagacctcaggtaaggaagagagaacccagcagccaggtggcgagaagtgtggctttgagagccctattcacctgcgagacttagacccaaggaccccactcactacacagtctatcttgagagggccccaatgtctgggaccagaacaaagaatgaaaaaatatgcagaacagcacagtccagagcactagctttaggaactccggatcctgccactcactagatgcgtggtcctgggatgtcattaaactgcttatggcttctgtctctccatctgtaaaatggggaaataataacatctacattccaggactgctgccaaaattcaatgaagctatgcctaacacagcctggcacccagtgggcacccacaaacagtggccactgtctaactaggggagcctcaaatgccagcaggcctgtctagaaagagggtgaaagggaggtagataaagtttcatgagaagacgggggcaggaagaagtctgttcaccagaagcctctgcactgacttgtcagagggggcccacctgaggctgggctccaaaggaaaagggcctcctcagcccaagaggccttgccaggccctggccacaggcccacgggtctcacttctgggtagtgcaaagcagagagggacagacaagacctcctgcctcctgaggcagccctggggcagagccagaccaggtggaggctccacgtccaggggcctaggtcagagggaagcgtcagacacgtgtagaaaccacaaggtcagaaataacactgaacttcctttgaaaggacaaaagctaaactgtatcttccttcccccaagagaaaggttttgaccctagaagggcaattcatagcccatctacagtaacaagtcacattccgccaaggctcacctgcaatgaacagtcacagtccaccatggcccatctacaataaacagtcattgacttgactggtgcagtggctcacgcctgtaatcccagcactttgggaggatcacttgagctcaggagttccagaccagcctggccaacatggtgaaacccccatctctactaaaaatacaaaaattagccaggcatggtggtgcgggcctatagtcccagctacttgggaggctgaggcaggagaatcccctgaatccgggaggcaagaggttgcagtgagctgagattgtgccactgcactccagcctgcgtgacacagcaagactccgtctcaatcaatcaatcaataaaaacaaacagtcatggtccatgctccccccgcctccacacaaggccacatccgatctacaacatctccatgtggtgcttcaaacacctgtgctgccttcccagagctctgaagctgccctggcctccctcaacctgtctccttcatcatcaaagaatactgcccaccgggggatcacagagtgggcacccccacccatactcactgggatcatggcttcactctcatccaaggactctgccctgccctctcctgctgcaccgcctcccccaagagaaagctcaagatggggcagggatggggcaaggcactggcacttcgaccccacgagcctctgctgcattgtagagtgccgaatctttcagcagaagctagaaccattggatccatgctccattcaacaatgaggcaaccgaagcccacagggaagacacacacactggggcccatgtacaacctgggagacaccgcccagtgagacccaggaacgccagggaggccccaacacgttagcagtttcccaagagcagggctttcctcctgactagataagcatttcagtctgccctgtccctaaaaacaatttgttccctcagttcggctggcttatccctctgcaatcttgtttacacaacaagctcttaagcaaatgttttctccactgaaaccagctccctggcctccgggggcctctcccctccctgggccttcagtctccactaaggggacaggctagagagacctcccaaatcttctccagcttgaatcttctgggacagcccctcagatgagaaggtgagatttcagccccctgaggaggaaattagcagaaactgctgagtttgaacttggattaccaaggtgccagctgactcccggagtttctggtgagactttcgatttcctttagcaggcctgctgtgctgacagccggcagcaaactccctctaggcctcctgggtagctctccccagcatcatctccaacctgggtgcttccgaggctgcctggccacggctcaaggctgctcaggaacaggtggcctcagcttggagactacctaatgccctgcccaggaaggcaacaggctaaccagcctttaacctctgtaagtcccaggaaaaccaactgttcatagaacgaatcaacaactttgtgctaggtaagatctaggcttccactcattctgttgttcaaagcaagggatgccttgccccttccccacccacagcgcagaccctagaagctcactgattagaaagcccaaggtttggctcgcctaggggctgggggatcaagaggcaactgcctggagtctggggacagggagtaagggagtaagggtcaggtcagcccatctccatctcagccatgctggtctcctggccataccctggggaccctggagagaatcctggggtcagggctctgacccagcaagaaagagagtgtgaaggagtgcggccttctctaaggctggaaacactttccacccattcctctttcttccctacaactcccctgcagatgaggcagcggggctgagatcactgtctctagcagataaggactagagactctgaaaggtgagggacttgcccaaggccgcccagacactacaactccccgtgcagcagcactgctctcctcacctgccatccccttctctctccccagccctaccagttgacccaatcagttttaaggaaaacctgtctaaggctcctcagtgggatggagtttcactgagctggagtcgctgagcctgccccagtggtgacgctacccagggaccagcccacatttgagaggtggagaggaaatggcgtagaccagaacgggacctgtgccaccagggatggggagtcatcatcaccggctgccagccattacaaagagcacatctgaagtctgtgggcagagagctggcagagaagcttccagaaggcagcctcaagccaactgccagctttcgctcccgtaacagaggtaaagagggccactctccttggcaacctccgtctcagcagagccccttgtcctggccagccctggggctaaggggcagctgcgctgcagctcctctgcaagacagctcagaagtgccttggctgcctcagaagccaggatgtccagtgggcatctcagacaggttcgacggggggcagcgggcccagtcgctaacccgagaggttgcccatctaccccccgccatcagcctgaggccaccaggtcagaaggcctttggtttccagcccgcaccctgaatcactgacattggtcacctgctgcttgaagtgagtgatgggtaaaacacaaaccccttaaaaagcattactactaggcgcggtggctcccgcctgtgatcccagcacttcgggaggccgaggtaggcggatcacctgaggtcaggaattccaaaccagcctggccaacatggtgaaaccccgtctctactaaaaatacaaaattagctgggcgtggcggtgtgcacctgtactcccagctacttgggaggctgaggcaggagaatcacttgaacccaggaggtggaggttgcagtgagccaagatcacgccaggagcttttggagaaaagagggaagaaacagtctggtcctggcccggcagagctcccagctcctcagaacatatggccaggtgtccggctccagggggatttaaaaagggggagcttcagaggctgaagtacagagggcttccctaaggggactactaaggccaggccttgaagcccccaaaccaactcaggagaggataagacaacgctcaccccaggcactaacttgggcagcgcagggggcctctgattcgcagtcattcgtggtggagcaggaaagggaagctgatctgtcagctgtacctgccccgtgtggccacgaaatccccggcttctgtgggagcccagtcactgaatcaacaaaccccaacaaaccagggataaagagctgccccttatcaaaggagctaggtcaccacctttgacaagcaacctggaccaggggccatggcactggctctggggccagtggacaggagagacccagacctgttccagaagcccaggctgcgaggtcatgaggcaggagggcccatggtcatggcaggctggacacccaccctccccatcccgagattccacacaatggcaaatgtcctcaggaggcttgaaacagggtcacagttgtttagaaatcttctttacccccttggtttctcagtcagatctacacatacaaggaaaacaggctgactctcccctcccctagacttcaggactcttgggggctgatatctctgagctgcagagccccagcctttacccccacctctgcatcaagacaccatactggctgagggtgataaccaaaccatcacctgcatccagactgggggctctcagcttcagggtccccaagaatcaccaggagaccactacaaatgaagtctttcgagttccccgcccagaggctgactctgtcattcacaagccccaggtcctgtagggggtcttcagactgcactttgaaaacaatgaggggaggaaaaggcatcccccagagtggcccagcctggaggaggcaagagctcgt

SEQ ID NO: 36637 - DNA, 7176 bp, Homo sapiens
ccagtgggagggcacgggagaaaaagctgcaacaccctctcccagtcccactgccttccgaacgcctcagtgccctgcagtgtggatctgtggctgccttccctctgtggggagccctgtgaccctttccttcagcctggactgaaaacggcctaagcactgagcaggcaggtcatatccgagcacccaggagcaagggtctctgggaaagggctggaatccgccatgcggctcccgtgctggggacctgggcagctttcagcctctctctagacctgttctccacctagacgccagaaggggcttggtggataacgctaaagtgctttacggctgacaggctggccccgcggctttagcacctggtgctgctctgggaactagacaggggttctgtcccccaagactctccaaatgccccctcctcagggacccacagcactgatcaccagagggtggcccagggaaaatgaccaggtccaacatggggatagtctggtgacagtctggcctctgtccctaaattacggggtggtgccagaaacaccttgcctcaggttgtccatctgtacaacggaggtttggccaaaatggtgggactcgtgggagtaggcagcagggcagggccacaggccaggagacactgggctcccccagcctcggggttgtggaggaagtgctagacacatcactcctctcctaaggctggtttccgaactcaggagccgggaaaacacagcccgccagggaggcaggctgaggctgcagatggggtctgggcctccagacccgaaatcccccactgaagccattcccaggaggaggggcctcactggggcctcaaggcagcatcagcatttccggtgacaggcacagcaatttatcagctcactggctctctactgagaacaaggcaagccggggcctgccgagggtatgacaggcagggagtgatgggcccggcccagggcaggagggagacagaaatgggcaggaagaggaggctgtccccagcagcacttctgagaggaggagcacctttcggggacactctggacggcacccccaagcacagccccaccctgccacttggagacggacccctcactgtcctgggggcttccagggcagggccagggtggagggacggcattcacatttggccttcaagactactttcgggtaatattttccatttagtgtgaggtcagggctttacagatgggaagcctgaggtcaaggtcgcagagccgagcctcccagccctgggctttttgccctgcaccgcactgcctgctcacagtacaccgggggcgtttattgaaggaggagggatcctggcagcctcatgccagctccgatgcccaagccaagccagtgctgcccccagcacccccatacctacccttccacagagctggcgcctgcctcagcagcccacatgccaggactggtctcagaacaggctcagctgagggctgggcgtggagccgtggagctggaagaccagttcctctgctttccccccctggcaaaacccgggccaggccaggcagggcaaggtttcatccaggcaggcgatgagcaaagcaacccaacccaggccctgcagcctcagtgcctagttctgctccgagagccaaacaagggatctgtctcccaagactcgccaaacaccccccacttagggacccacaaggacactcgatcacactgacttggtatcatcaccctcagcttcccaaggggagtcatggcttaggcaggatgccagagatatcctaaatcaaggtgaccgtggggcaactggcaccctatggggacagagggggcagccaagcctccaaagcactgtccctcccccagccctgtctgccctaaagagcccaccaaggtcagaatctcagccaagatttccccagtcggcccttactgagaagcccagccctgtcagtccccaccaggtcccctggaatgggtagccaccggacctggggaccggggcacctctgccagatggacttctagggacatcctcccccttgtacttgctaaataaagtgtcctcaagtttcacagaggcagaaactgcacttttgacacacctgcagccggccagggctccagctgtgtgtgaaggtgggggaggggaacaagctccaactttattaccaaaatctctcctatcagtgtccctgtcattgcacaatatccctttgaaaacaagtcctctgggaaggctaaagggtaccagcactcacactacagcataaatcacttccaggtggggaggggctaactctggaactaggccactgcgggtaggtgggagctctgggagagggaacaggattacaacagagaggctggaagatgtcaagggcaaagtttttaacctttgtcaaaatgtggatgccaacaatgccatacccaggaaaggaggaagaaattctctttgctcttcctggagtcacagatgtacacggtttctcctcccacgtacagaacaatgggctagcctgggaacctgcctctcagataaagaacaattcagattgagtaagcactgaggctgctgagaagcccagagacacgggaaggcagagtgtccctgaaggagtcccaggggagggtggggctggtcccttctggtttgggggatgggagacagaattttctgtgacggctctctctgaagagggagaagccacctgggaagccaggtggatcctccagattactggcagggccccaggtcaagtggcttgccctccctctgatgggctggcagatctgcacagcctccaacccccagcacagagctcctagccctctcagcctctgcacacggtgggtgttgagatggctgaaagggagactgtggacacagctccagtctgaaaagctcagcatgaccctaggaaagggaagtagccacatgccttgcccagagctcagggactaccaggggagttggtgggcagggggtgtggtggaagaagagtctaagcctctgatctggactggagattacttgaagaatagaaacaactgaattaggctctagggagaaaaagtgatcatagctaatgtttattgagtcctctgggccagaggagctggcaatcagttttttccaagcactttctctgaattaattagtttgatcttcacagtcaccttaggttctagtaccatgcacattttacagatgagaaaattgaggcaaaggagctatgtcatctgtcccaaggcacacagccactgaagccagcagtcttgctctggcagtcatgccatgaaccacccatcacagtgaagcccacagggctctctcactctcaggaagacaacagccatcatttccactggtggcaccctgcagtctggcccagctttgtcggcatccatagaaaacccagctccttctccaggacagccatcagtctgaagttctggggacaggccaccgtgccccattgctaggggtcctgcccagcaggcctgagcccctgccagggtgccccaatgtctggctttgcctggcctcctctcccatctgccagcccagcccataccttctcaggtcaggaggcaacccagcccgtaccttctcaggtcaggaggcagcccctggcagaggctcgggtggaagagagcaaagtctagcctgctagtgaaggctcatgtttctgagaagggcaaaagccatgtttgcaggccctgttaacgtcagcagcactggggtcagaccagcaggccattcacacagagtgactccacgctcaggctgggtcagactgcaccccttcccacaggtcagcctcagtgctcccctagacttgcttctctgtgctctaggcaaggaaggggccccaatcatatcacatatggtatttcatggaacctctgcaaaagccctctggggcaggatatgagaaactccattttacagatgaggaaactgaggctggggtaggtgaagaatcgtgctcacgatgacacagggaggaagcaatgaagtccggatgtgatccaggtgggctagactccgtgtcctgtgctcctcctggcctccacaacacctctccactccagcccgagccgggactaaccacgccagctagttctcggtcccacctcagctgtgaagccccaaggtctcaggactcaataaaggcaggaaggcccaggccttcaggctcaggtgactgccttacacagggaagacaggtgggccagagtgcccactgcatgcccagcctccagacaagatctctaagaatgaacctcattcacgggaggtggggagggaggcagggggctctatgccctttctacaattccctgagcccaagacaaccagtcactgctgcagattcacccgaggagactcaggggtgagcttcctggactttccaggcctgaccccagggaaactcctcctgtgctcttcccccaggccccaagtccctttcagggaggaaggtggggggcagggcctgaagatctcatgcagcccaagcacggcccacaatcccagcctggccctcagccccgcaggccctggccagccttgaggtcttgccgcccggaccctccccgataccccatcctggaagagatatggtcaccatcacagcagcactgcaccctgcggttttctctgggagaagctggaatgacaccagcctctaggaaggtctcagaggctcctgaaacgccccacaacctcgggccctgcaagcccaaacctgaccatcatattcgcctggaacactacagataagatgggccttccaaggcctcggacagtttcctgggcagcagggatgacaggaagctactggaggtagagtcaatgccactctgacacaatcaagtccccaaccaggtaaggtccctggagcatcagcggccaccactggtattggtagcatgggaacagcagggccagggcccaagttctaaagggctttctgggacccagttcatgacaaatgccatagttggccacgagctcctcggccctccagaagttcctccaacctccccacatcccaccctggcagacgtgcaatcctcaccgtacgcatcccaggccaggcgccagagttctgtctctcagcctgctgagtagcacagaagatccacagagagagccaggcagccccacgtggaaatgactatgaactcaagctcacgccaccgtggggaagagttccctgaacacctttggagatccatggtgcacacgagtggtcctagagcaggactggcagcctttgcagctccctcagggagaccccctgccctgacacttcccatggccagaaggcagccccacaggtttggagctccataaaatgtcctgccttacagcccaggctcctagttcgatactgctgtatcgtgggactctgggacaaaacccttcctgtggggagacgtgacaggtgctgaatcgcgaatcccgttcattgtcactgcagagaccacctctctcgtctggttccagtaacagccaccctctcttacaggaatcccctggaccagatatggaactctcaccactgcacagggctacgcacacagcaggtacccaggatctgggctttagatctggtcaagccagataggtctcatgaagccctcagaacttgaggcagcagagcacaggcaggcccccagatacccaccagtcacacgacacagccacaagaggccatgcacacccaaaagcattgcctcacctctgcctctcagccccttccccctatgtcacagatgggttcactgagaccaagagaggcctctgtacacagtcactcgagagagaggaggcagggccaagacagaaagccaggcccctgagccccggctgtgtcttgctgcactctctgcctcgtgccggcccccagagggcttgcagtggatcaaggttggttgggtgagtctcaggggaggacccgtggccctggcaccatgactcagctgatgagtggactgatcaacatgcccgccttccccactgccccaacctgcccgccacagccttcattcctgctgctgagcggacctcgggcaggtgccaggactcttgggtgtgtgtgcggagaacatcatacagccccagccctggcccaacgtcacccaggcacctctgtccactccagctcccacaaggagctcgaatccacccctcaagcagcctgccctgccctccactggccttgcccatcccaccgatgaccccttgggcaaccaactctccttcgagtcccaagaaagaatactggcagagaaatgtgagcccccaacaagtccttcagtgccacctctgcccttcccaggataaggtctctctgtaaccatgtggctctcagaactgaggacaggaagaacgaccctttggcagaggaggaaactgaggcccagagaggcaatggcctgccacagccaaacagtcggggctcagctgaaccaggaaggccaggtgacctgactgcccgtctctgtaggaataactcccacagatttccaaggccaaggccatgatggatgtcagagccacagtgaaaaagagaaaaggccaccagcagaggtgggaggcagaaaggaagctggtgtctgaaaaggaagctgcagccaggtagtgaccaggccccccaaaactgagactgcagcctgacaggggaaggcaagtcaggagtgcccaggcaaggcccaaatgcagtggcaacctgtgcagtaagcacccccccaccacacacacagacacacacacacacagacacacacacacagagacacacatatacacggacacagacacacacagatacaaatatacacggacgcagacacacacagacacataaacacacagacacacacacacacagagacacacgtacacacggacacacacacggacgcacacaaacacaaagagacagacacatagagggacacacacacgtacatggacaaagacacacagatgcatggacacacacacagacacatggagacacacagatatacacacagacatacacacgcagacacacacacacacagacacacacacacacagcatctcatggtgctgcaaccctcaggtgaatcactaggcagagagtttttcccagggctgacggccagaggaggccc

SEQ ID NO: 36638 - DNA, 6167 bp, Homo sapiens
aaaaaggtaaccttaattatatcgacagctaactttcctcaggcggtttcatcacaaagtactttcacatatccattatgaaatgaatacgcaaatgacagaatgaggacagggagaacaggtatcatgatgtccgctttacagatgaggacaacaagacttggaaggaaagtgactcaccccagattatggagtaaattagtggcagagttgagactcagtcctggggctctacttaatccaaagccatttctggcctgtcacacagtatggatgcacattatatagaaacaggaactaaaatccaaatcaaacatgtggtgaagagttgggggcatgaccgaagctgagagtaacagtcaaggctaaagaataatggccctcagctggtcagtccagctacctgtgaccagcaagtcacttacaagtcaaaccaggtcgaggaacttggaacatgggggtcagcaagcacttcccccaagagatgactcatttttctccactgagagaggcccctaaaggcctcaccttggcagcacctctttgttactctaggtggggtgcagggaggtagaggggagactgcaacaggtcccagctgaagttcatgaagggtacaaaatccacatatcacagatcatcagtctcactcacaggcaaggcccttacccagagcctaaaactctcagcttggaaataagcctaactcatctgattagtttcttagtgccactggagaaaagtaacaaattagaactgatcagaaaagctgctggctacactcaggcacataaatgtcacttctggctgctctctggaaaaaggagaaagaccagaattcaaaacagagcaacctggggcaccaggcagaggggcaaagtgctcttcagagcacagtaaatccaggagacaatgtcctaacccagcacaatgatgaggaggacgaccctggcaggcagagattaaatcatgcctagcattttttggttgataaaggaagggaaataaatacttcagagagtcatgcccagagtaagaatactcgagggtaatagggattcttagcttgatgaaaaaatatgaatacacaggacacctcattcccaagggatttcaggaatccaaaattctgctgcaacagaaaagattcctctaaaaaactgcagaagtcaagcttttcattaattctttccaggctctctcctttcttactgtctccctaccaatgtgtgttaatgaggttttactggaacccatcatgagccacaggtagagacttaaaccgctccaccctccctgtagagctgaagccagggatgacatcacttctagaaggctctgagcctgagcggaggcagctagtgcctccccccataccctctctgccaggctgtgggaaaatgtctctactagcccccataattagggcaaaagggattttatgcctttcaagaaagagaagagagaaagaatgaaaaatagcaaataactattccagaacaagccatttttcttacatggcagaaacaaaagaccacagtaaacacacacacacacacacacacagagagaaagagagagagaaacctttttagacaaacctgttttagtctcttgggagtggttttgagcaacctcctctcctagcagcctcccctcacccattcagtcactccttgcttccctggtccccagggggtttctgacctgcttcccactggggccagagtgaactttcagagagggtcagatctctgccacttgcaaataccttctcccatcttaaagcaaatcccagctgcctgatttcttttaggaaaggggtatcagagctttgggaaggcagtgcatgcccccacctttaacctaacatggacattcactgtaagaggaagagggcagaactgggaaagagaaaacaaactaatctttgtaagatcagaaaaagcaaaaagaacacctaagcttcaagccagagtctgaccccaaagctcaggtggggctttcaggctcagctcaagcacctcctccaggaagccttccctccctgcagctccagggagtctccctcctttccccttttgagactctcctgcctcctgggccctatgtccaagtttctgggcaagaaataatgcctcacactgcagcatctgccccagcccacagaaaactccaggaaaggcagttcacggggaagcccaaactccacctgcctccccagcattaacgggtgcggtgggatcccagggctctggaatgtctgctttaccccaggcaggcaagggaaccagcagccctcctaaatccagccggaaataggtggaggacccaacttcagccgcccctgctgaggccccatcatgtgcgagaatggggcagtgaggtgatgcccagcggtccagggaggtaaggcacccagctccattctcttctccaaactcggagcgaagactccaagcacagtctcagttccacagaaaccaccaccctagagagcagcttcttggacctgaaagccaggagtgcatgagacccagctcggaaatcatggccctccccgtgctcccagatacccctcacagtccagcccattcacagttcaataggcacagggacctctcctggaccggaaaatgtctggaagcacgagtcacctgggaagcagggagggcgctttacacatcggtctcagaaacgactgtccctacctcatctcccatgagacagactctgtaaagaaaaaaaaaaccaaagcgctcaataactggcagctactacacgaggcaacgcttacggagggtcagcgctgctgagacttgtccagatgccacattagcagtggagaacccgagtgcccaccccgcccccgccccttccctgcccacgtgcctccctttgccagagctggggaagtcgaactgtccagatgtagtggcgagacaccgccacttccggaaggggaagcgcccctggctccgcacctcccctctgcatccctggggatggccgagccggcccgcaggagggaccccgggacgccagcaccgggcgcgggggctggggaggcgaactcgggcggcagactcgggcaccgggcggcccgcgctgacacctggctgcggcccaggtcccagcccccgtcaaggccggcgttacggggctgttcccaggaaagggttacaggggccgagaacaaagcgcccccattggggaaggcgggctagcggccggtggccggggcgggagagccactttctggggaccctcaggctgctctttgtcggccacgtccctctttagtggagcgtcagccccgctgaaggtggatgctgcatcccacccaaaggcctcttacagccccgagctccacatctgcccctcttttctcccagctgcactgggcgggccaagggacccgccttccctccgcgcggcttcagcacaaagccgagccggggagcgggaggccattcccgggtcccctcgcgtggaaggcgcctgcgcctcggccgtgcccggcacgggaacgcgccctccggggccagctcaacttcagcagcccagaagttgggctcctccgggtctccagcgttccgaggccaacttcccggaacctcccgctgccgggccggctcagctcacctcgagccgcccacggcaagcccgagggccctgcagacgctcgcccgcgccccccacgcagccctggcccggctccccgggccaacgcggccgcctcccgctcccgcgccggccgcgctgcgcccaaacttgccctggcgcaaggggcggggcgcccgggctcggcggcgctggggcgcaagcccgcgggtctggtttgaattagggtctgcagggggggcgttgtggccgcggtcactgcatccccccgggtcaccgacgggggcccggccgccgcggtggccggggcgaggagggtgggaacgggcgaccccgggcgccgctgtgggctggcgggctccgacagatgtggagacgttttacataattgagcgcggggccccggccccccaccctccccagcgcgggaccggtgcggcacccaccgacagcggaggaaattggggctggagccctggtctcggggctcaccgtcccgggacccgctgggctagcgcgggaagaagggaagtcttcgctccccctccccctccacgtgcacccgccggcatccgcgggtgaccagtcccggcttcccgccgcctccccgcctggccgccggccgcactcaccggcagggccggctgcaggctcagcgccagcgcgcacagccagagccagagcgccgcgcgcctcatgctgcccggaccggcggcgggagagcggcaggctgcgcgggtcgcggctgcgggccggcttcgcgggttccgctgctcgatgctctcttgggcgcctgcccagcgcgccgctgtcccaggcgagggctgcagggtccgccggctggagtccgctctctactgccggattcctctccgctcggctcggattcggcccgcacctctcccgccgagctccgccttataataaacccacaggcccttccttagccgttgcaaaaactggccccccacccccagctccgccaggtctcccggccagccccagtccacaccccccaggaccccgccccccagccacccctcccggccccttcggaacgccccacccccggcccgctcctaaggttcttgcctgcttggctcccgctcctccggtggccgaacgtcgctttcgggagctgtggtccccgcaagccgcggttcccggcctttcagctcggctgctccctgggtggtggggccgaggcgcacccccttctgcccgggcccggagtgcggaggcgcagcccgggagaggggctgaaggggggcaggcagtcctcgggcgcgagtgtgcagcgccctctgggcgtggacgcggagcgcgctccaggtgcgcaggactcctagctctcttggggaacgctttctggggcagggcggggacccgggggcgatggggccttcaaccgacgggcaaacacacacagacacaccccggctgtcctccagctgcgatgcggctcgctgcgccccgccggcccagattctcccgtacgctcgcgttcttcctgcactccacaaagtgctggagacttggggccttagtttaaacagctgcacccgcacggaagggctgcaagaaaaagggggacgggggcggagttcgcagcgtttttctgtggaagacaacgccctctctcttcatctgagctaaaaggaaaaataagtaacttctttgttccccggtgacctcgggcacgcggatctgaggagcaccgtgcagttgctgctccttcgagatcccctgcgaggccctgggcctcagttcaaaaagctgtggaaggcctgcgggtgtaggggaaacggccgagagagcaaaggggaagaaccggacgggccctgcccacatctggcaggcaggagagatggtgccaaacgaccttcgcacctgggccctgagaccaaagatggcgtcgtcctcccctgtcttccctaggcggaaggcaagaacttgggtcggcctgagctggggaccaagaaaatatcgggaagtgtccagtgttcctctttaaaagaattaaaccttcctgggccacgcagggactgaccgtgggaccctggactctcctccaccttccaccgtggagcaggctctggagccgagcagcctcctgcgtccccatctcatccccccactcctcctcacagcactaaaagatgatggcctgcttgtacccctgctcctgagcacctgtttgacctcaaagagctctcgcttttggggtgtccgtctccccaagtctgtctagggggcaggaagaccttcatcagggttcttgggggccgatgtgggctcgctgagtgcctgagtgatggatggtctcacagcacggcaccacggaggtccagccgagctcgaggagtccctgtggattaaaaatgcccttttcgaaggttctacctctaccagagggtggctccacagatcccttcaacccagtatggtggaaaaataggaattttggaatcttacctttctctactgctcacaacagaggaaactggggtcagggaggatttgatggagtcttttcatttttt

SEQ ID NO: 36639 - DNA, 539 bp, Homo sapiens
agggcattgtttgtcgcccatttggtgaccataccgtttgcaacgccaacccaagcatcctttaatcttgttgctttaggaatgaattttccatcaccaagaaattatgaagcaatccaatgaaaagtaagtgcttaactttgacttctttctccagtggcatccaaagtcctttagttggtgtgtgagccagaaattccctggcatgttcattgcctggtacatctggtatgcagtcttctggcttagtgtcatcttccttgataagcccaggaggaggttttttcataaaaggactccaggtgcatgagctgcatcatgctgcttttgctcccggcgccactgccctgcaacttgcccgggaggtggccaaaatcctggcctccgctacttgatccccgcctccctgtggctggccccacgtcagtgcacggagccccagagcttagcgccgtcaggcccatggctgacagttggtagttttttttttttttttccccaaagatttgtttgggagtaggaggaatggcaaaatctta

SEQ ID NO: 36640 - DNA, 3369 bp, Homo sapiens
gcgtgcgcctgtacccccagctacagttactcggaaggctcaggtggaagaacagttgcagcccgggacgcggaggctgcagtgagcccagatctcaccacctgcactgcagtctgggcgacagaaccagaccctgtctcaaacaagaaaaaaagattcataaacaagtatggaatgcttgagagaaacaaaatccaagtattatttggtaatttatatacagtatttgtaatgcctgagaatttattctaaagtgacagctttgtaagagcaaagtaaatgtcagtaattaatttaggctcttttaaaaagttgaaatcttgctaaatgctgaaacacctaagagaactttggactcaaattaaggaaagcatgtgttaaacacagcttaaattgctggaaaatgcgtaagttactggcaattataactcaaaatagctagacctgtaaacaaaatttaaaaactggacttaaatcctcaagaaccaggtttctgaaataaaattttatttttaagattatcgtaaaccttttctgcatacaaaaactgccctcatgcacaccaagaaaattctacacaatgcaatttcaccaaaaatcggaattttaaagaaattcttgcagcacggaaaatgccatcatttttattcataatgattgagcaaatgaagtaaatcattgtttaaaaggaggctaggaagagaaacaagttgaaaatactcatttttgtttttttttttttatttacaggattccttaagtcatcttccaatactccaggtcacatggtgaagagtcacctgttaaacacgaaatctaaccattaaacaagcttttaaaatccttcggtaactccctttattaaaattgttttcttgacatacagtacctttacaggtattacatttctcttcaccgtttacaagcatttttctcatgttttccttcaccaaaacatctgccccgttttctcaacaagtaaaaatctcaaagtactaagtcctaacatgatgtcttattgcacctaatatgctggcaatacattcctctcttcaaaagtttacgtatgttagaataaaaagctaagttaagtaggttttctctggctgtgttttcagaaacaacactaacttttacacgtgtttgggcatgaaactttaaacattttccccaaaacctgacccaattcagatacaaaactactgctcaaatagtagaagccgctaatcttgtctttggttttaatttacatatttttctgaatatcgaaatccgttcctataacctaaacaaggcgaatccaagtcactgcttcatacccacatctgtccacggcaagcttttcccggacacactcgggcctttgaaaatgcccacacttgttttcataaacccactccttcctcttcacccacttgcaatccgcatgcttctctggggccacccggcctctcccctctttccgaaccctagggccgacagctcggtctctaacctccagcgcgccgaatcggagggagaaccgggtcggcgccccacgcccccgaggcggcggccccgcagagggaaggaagcgggaaagcggccggcgcggcgccccctcccccgcacgcgcacacccccttccggcacccctccccctgcattgtgcgagcgggccccaggccgcaccggcccgggcactcagcaggccctatccgccctcccgctggcgatcggctcccgccgaggccgccgcacaaagcctggggagccatcctcgacggcgccaaaggaccggagaaagagcgaacgcggactgacttacagggctgctgcggccgcgctgcctcagccggggacaccgaccgttgggcacacggcggcgtcgctcttggcggtcctccccctcctccgccttcggtggcggcaatgtcttctttctccacctaccaccctccccccccaccccacctcctccttctcctccccctcctcctccgaaccaccgaagtaccgagggtgagacacagagactcacaacaacatggctgccaccgccgcctgccctcccctcccccccgcccaccgggcgcgcgcagtgcaccccgggagaaaggggagggggagcgctcaccaaggcgcggctccttttaatgccttgcgtccctgctcccgcgctgccgccgcgcgggccgggggcgccctgcgcgtgcgcacgttctccgcgctctcacgtgtttggccgcctctccggcgtgccctcccccgccctcaccttgcgggctcgcgcttccctcctgggctccgccgcggcgggctcggagagcgcaggcgtactgttgccaaacgctgtgttcgactgtcttcccgcgtggggcctcgccttctgaatcttcttaccctcggcttcctacccggttgctcactgttttcccccaactgggtgtgcgggtgtctgcgcccgcgccgcccaccgtggggtactcctggcatttcgcttccagagtgctggcgcccacaagagccggacgttaattcaggcctttaactttcactctgtacctccccacaaccagacgagggagatgcatctgggggtggaagattgtaccctgcgagagggctgtcactcttctcgtggttgcaccccaggcaggtggagccagctctcagcaaattgtcggcccccagtgcttggtcccggtgcacacaaaggaaactcaggtcgttctccagctgggccagtgattctcactcgttggctgtttctttttctcgcgtactaagcgctctctccttccccgtttacaggctagttggaaactccaaatctgccttgctgtcctggacccccatgcaaagcagtggtgattccaggattctaacctaaccggctccaggtcacacagctgtaacaggcaccgtgtccgatttgttcttgatggtttgtttgcacagctcctggctctcctgacatgctgcacttcgtaaatattcagggcctcccgtatagtttgcttaatatatgtcttccctaggcgactgtgagctccacgagggcaaggaccttgtgttttgtttcacactgtgcccgcaagtgcctgttgaatacacatgggctcttcggtttttaactattactgaaaaatgtctgacattgaaatccatcccaagcccctaccttaggctcatatttcaggcttctagatattttcacttgaattttcttgtcaccaagcatgttaaaaactgaagtcacacccatcccctaccccccactcttgtactgtctctgtaattggcagtgtcaccacctattcattccccaaattacacctctgagaaccatccttgtctcttcctcttaccccgactccaaatataaat

SEQ ID NO: 36641 - DNA, 673 bp, Homo sapiens
atatttacattctattttatccatgatttccctgttgatttgtcttaatttcagtatttaagtatattcattgttcactgctctatttctgacctgttcattttgatttgcttatatagatttcatcatgtatcagttagcatttacttgtgttacaaactacccccaacgattatttgtttattcgatcacaacctgtgggttggtgaatttggctgggttcaactgggaggttttgtggatctttcctggctcacttatgcaataacagtcagctggtggcttaacttaatggttgaggtttggtgatcagccaaggcaccttgtagtctctccaacaggctagctcaggcttgttcacatggtagcagactaagaatggaagctgcaaggcctcttgagagggctcagcttggaactcaaatagtatcccttccaccacaatttattggtgaaaacaaatcatgacgccagcccagattcaaaagactttatcttttgatgggaggaattacaaaaaaatttttgttcattccatgatatcctcatattgcaagttatttcatgtttaaaaatgacctcctggccaggcacagtggctcatgcctgtaatctcagcactttggggggccaaggagggcggatcgcttgagctcacatatttgagaccagt

SEQ ID NO: 36642 - DNA, 2366 bp, Homo sapiens
gtcctttcctcctttggcctcccaccaaactgctcctgtgccatttgtgagcttttctgggtcctggatgctgggtttggctgtgtgtcatattgccctctgggctgaaggtttggtgagcgtgggggctcgttctcagattcgtctgtacatccctcagttcccatcatggttctgggctccttgctgatcaatgatacttggtgaatcaaaataatgaaatatttgttgaatgatgagagaatgactcacgtttctatttttaagacttgcactcgtgctcatcttccccatggccctggctccaaggccctgtcctgagaaggttctctaaggaggaaggacatcttccatgtcttgagcagtcccctctagctgtcatggacacatgcctggaggtgggaggcagagtgggtggctgaaccaggtacaggctaggttctgggtcatgcacctgttagaccgagtctcacttcattattcaatcttcccatccttccccagaccaactgcctttcggctcccactcctcttgtgtggaagaaagcaccaaggtggaagaaagtacccaaagcaggactctgtgatggcagcttcttaccccctcaaattacctggcacaccttccccgagctcctctcctgcccccagccctttcatgggccccgggatggtagtggggggtgatcccagatgggcatctgagacttctcagggaattagtatgttggactttcttgccccaagtgaagatcatggtctccatagttatttctctgctataaggtcagggatgacatagtaaatgtcacggttctggcctttggcctggaaaaaaatgttctgaatcttggggacaagattggtggatcacctgaagtcaggagtttgagaccagtctggccagcatggcgaaaaccccatctctactaaaaatacaaaagttagccaggcatggtgacacacacacctataatcccagctacttgagaggctcaggcaggagaatcatttgaacccgggaggtggaggttttagtgaatcaagatcacgccactgcactccagcctgggcgacagagtgagactctgtcttcaaaaaaacgaatgacatggagtagagccagcccgcagctaaccctttatgggcatatagtgtgagcaaaattaaccttttgtgatatcgtgatgtaataagaaatatgtatttggtgttagtccctagttcccttgtaacttcctgagtggtactggtaggaggagcatctttttctattcataataagccctttcaaccatgagcttatgctactggggtgactctaagaggagaggggctggttgccagaggtagcaaccatgtgattagaggggtggaactttccgctccaggcaccccacctccagggataggagaggggatgggaattgagcctgatcaccagtggccagtgattgactcaatcatgtttacataatggaaactccataaaaaccctaaatgagggggtttggagagcttccaggcatggaggtgctgggagggtggtgtatctggaaagggcagggaagctccatgcctctttcccacctttccctgtgtacctcttcatctggactgttcatttgtatcttttataatacactagtaatcataagttaggagctgggagtggtagtgcacacctgtagtctcagctactcacgaggctgaggtggaaggatcccttgaattcaggagtttgagactagcctgggtgacagagtgagaccctgtctctacaaaatttaagtaaataaataaaagcacacataaataaggtgttttcttgagttctgtgagtcattaaagcagattatcaaacacgaggaggtggctgtggaaacccctgattttttgccaagttggtcagaagtagcagaggcccgggacttgtgtaactgagcatgtaatgtgtggcgtctgtgcccactgtgtgtggataatatcacaattgaattgtaggacatccagttgctgtcaggagagttggagaattgcttggtgtggaaaatccacacatttgatgttgtgagtagagatatacagggttttcttttattttattgttttaaaccactgagagttggagggtgttactgcagcataatctagttagttcatcccaactgttcatttctcctctgttcaggagtcttagaagtgcctagagctgttgaccagctggtggatgtcagctgaggagttagtgatggagccacacttgatggaaactcatcctctccctggtctcctccctcacacttcattgattcctcatccatcttctctgcccttcatctggcaccactctgcctttttcttcc

SEQ ID NO: 36643 - DNA, 2190 bp, Homo sapiens
gtgctactgtactccagcctgggcgcggcagagcaagactccatctcaaaaataaatgagtaaatagatattaactttctagtacttcgggcacatctgcttgtaatgcccctgaggtgactatggtagcagtccgtcccaagcttcttggcaatgccagtggctggcaatgtgtcacatgcctggaatgaccagagaataagtgtctgatggtctgctcggtagtcactggaagccacccccatgaggtggtgacaaaagaggactttggaaggctctgacagtgcattggagctggggcttcttgggtattttttttttttttgagacggagttttgcttttgttgtccaggctggaatgcaatggcatgatctcagttcactgcaacctctgcctcccagattcaagcgattctcctgtctcagcctcctaagttgctgggattacaggtatgtgccaccatgcctggctaattttatatttttagtggagatggggtttctccatgttggtcaggctgatcttgaactcccgacctcaggtgatctgcctgccttggcctcccaaagtgctgggattacaggtgtgaaccaccgtgcctggcctgcttcttgagtgtttttgttgtgagttttaatccctacagtgaaaaagaacagctccctcttgttggagtggcaggggttggcaatgctcccttgcctttagagcggaagtccatccccatgagctggaggcagtgaaaggtcaacccccaagtccatgggtagtcccttggcagctgggcggaaaccagcgaagaggctgatattttggaatggccgacggctctatgggtcccaggaagatgagctaatttgctcacagcggggccaccaggtctgctgcttgcctcggtggcttcagatgctctttgagcaggctgtggctcccagagctgaataggagtgtaggactcactcccttggatggactcacagagactgaagtgcaagccaggtgccatatgacgaattcccagagaagtggagctgcccaagggagggcacatgcgctcggcctcagcggcattagtatgccttgatgggctcctcagctgtccgtttctgtccataacctggacgtcagtgtgactcctctcccccacctccctgtctccctcccttcctccttccctcacttatccccctctcccatctctccatccatcctccccctccaccatccccaggcccagtggagggtgacagctcacagcctgggtcctccgtatccatgctgtgttctttgtgccccgccctccatccgggagcagcactagaaggaaggtcctcagctctttagggacattcctgtcctggagccaaggccagcactggcaggggtccacgaaccttggctgactagtcctgtggtcagccttaccctgtggaggcacagagccagaggcccttgcttctgactggctgcattcccattgcacatgtgggaattgggaaaggccggggacctgctcaggctcgcctggatggcacttccccagctctctgatgggttgtggggacacggcacttctggtccagggaagtggcccaggacttcccatatctggggcacaatgctcccatcccacactggagaatcaagattgcactgcacggaggaatttttaaagaattttcctaatatgggagtgagaccttgatccatgatggctcccagatactcagaggatagagccagccccttgctgtcagcaccaacttccatccttagagctgccgcctctcctaaccccccactcagagtcctggccctgagtctggcttccccgggctgggagccacgatgatctctgaaaacaccatcagtgctgggaactcagaggaggttttgggtgctttagttccatgcatctgcaccagagctccctgggcccaggccccacctgatgggccccattctcccacaacatggggtcttggttctgaacctgccctggggctggcccctgcccctagctgcctctttctggtccccagccctgcacaggaaggccatctgcatacccgaccttacctatcatccatcgggaagctttccgatgctacatgctcactggtttaaactgttgctccccccacagcaggcatctcagcctccagctgtttgtcagctgcttcacatg

SEQ ID NO: 36644 - DNA, 3237 bp, Homo sapiens
gccctactcctgcatagatatttgctacggcctcctagattatcttcctgagacaatttttgtttcttgggtccatccccacgagacaaccagggtgatttcttgggagcataaatctcagtatttcacaggctgtattagtctcctagggctgccataacaaagtatctgagactgggtggcttaaacaacagaaatttattttcttacaacctggaggctagaagtccatgatcaaggtgccagcaggttggtttatactatggcttttctttttggcttgcagaaggccattttctccctgtgtcctcacacagccttgcctctgtgccgcagctgtcttggtttctattcctcttgttatgagaacaccagtcctattgagttagggccccaccctatgacctcatttaactttaattatctccttaaaggctctgtctccaaatacagtcacactaggagacagagcttcaacatataaacttgggggcacacagttcagtccataacacatacctacacatttctgttactctcaggatagaacaaaaccctttatttacatggtctataaagccctgcacgacctggagccttgcctgttttccaatctcatccggtcaattctcgcctttcttctgtttaattctcagttcctcagacatgcaggcttcttgcctctctaggaccctactacataatgtttctcttgcctgaagtattcccgtttaccaccctccccactccctcagcttgcataatgcctatttgtttttgaaaatctagctcacatatcttccttgggaagtttcccatggcacaaggtcagagcgcccacttacatttcctctgcacacctgttttgttcactgttgtgtgccaggcaccgagcacaatgcactgtatacacgaagtgcttaaaaaataagtatcaaagaattcacaaaggttgaaggtagttgccttgttggacttctgataaagaggaggaccagcagtcctgtgaaccaccttctagccaggaaagccaggctgatgagttatatcatcctgatttatttaggaaattgcatagaagactctagctaaaatctcaagggtgaatgttaaagttccatctctgcccaaattgctcaaccatgggagactgttttcaaagacggcagaagcaattcatcccatgcttctttgcaatgtgtctttcctgctccttccgacaagaggggacatccacttgtcttctccttaaatctggactggtcttgtgacttgcttgggccaacagaattcggtggaagtgatgctatttaatatgtgagttttaggtcccaccttcatctgcttccgcttgattggaatactgccctgagaccaccatgtaaggcagctgggtttacttcttggagggtgagaggccacgggcagtggcatcacagtgacctagccaacagccagcaccaacttctagacatgggagtgagaccttatggggccttcctgctcagccaacctccagctgaaactaaccacacaagagtgcccaggacagaccaacagaggaacccacagaattaagagaataagaaatctttcctgggtggttgattaccccaaaaaggctaatggccattagtcctcctgatttccccatgataaacccatttcccctcctctaaacagtcacaccctctcccccgctctctcactatcactcagtgtgactcatcagaaccctccaaattgtcactgtttccaactgtagatccaaaaggaacacagatgagatagatgattcacagcagagtctacaggtgtgactctgcagggtctggatataagagcactgtcacggaccacattcttgctgaaacatgaccacattcactcacttaggacatggggctcctgaagtggaagctggaggcagtcactgtgctcatctcatacccccttggctacaatttctaaatttgaaatgcaatccagaattcttgtcatatgaaaagttccttcctatgacacatgtacatatcctagaatctcttccacatgctaacacacctatccaattgcaatattggtcattctgcactgtgcgtatcagaaaaaacttgcaaatagcccaaatgtccaaccacgggaggatggataagtgttacaaaatggaatactatccaggcaaaataaataagcaagagctacatgtatttgcattgctaatttcattgtaacataccattgagtagaaacagcaagttgtagaagttatatatagtactattcacataaaagttaaaaacatgcgaaacccaaccagatattctttctgatatagtcatatgtggtaaaggtataaatatatgcacggggatattaaataacatgtttaataggattggggagaggtacacaggagtttcacatgtacctaagtgatttgaaataaatgtgagaaattcaaagattggcaaagctgggtggctgatattgttatctacatttttcttatacttgagtcattataggataaaaagtatagaagtttccgtttccctctttttactagccaggcacattttccacaggccaatctcttcaacattgcctagcggaagcccttctgacccttggtggcaaaagaggtccatggtgagcttagttttatttactgacaagagagcttttaagtcagggagggtttcagagggcagcagagagcgttgcctccaggaagggctattttccccgtatgggctcagtaaatgatctctaacggagtgcatggttttggcaagacctcctataccaactctcctctaaatgcctaccatcttctgatcagccatcccagctgctggctttaaggtacaagggcaaaccttgatgaagacctcaggaaatgtccactcatacagacagcacctgtgagaggcccatacagaggctgtttcaggaagggagtgggtggttcattgagaaggaaaaggaagatgaggggacaatttgggaaacatacttcaaggaagggagtgcacaaaatggcattcactgtccaagagctctacagtcacttgtgtgtgtgaactggcaatttgaagaccctccacccaggctgggtgcggtcgctcacacctgtaatcccagcactttgggaggccaaagagggaggatcacttgagcccaggagtttgagaccagcctgggcaacaagcaagatcacatctgttcaaaaaa

SEQ ID NO: 36645 - DNA, 4254 bp, Homo sapiens
tctgtaggttgattcaggcagttcttcttcccatggggttggctgcggttttagggtggagggttcaaatggccccagagttggtggtagttggtgctggccacctgctgatagcttagctgaggctatgagtcaggggcccaattctcctcaatatgggtttcttcacatggctaattgagtctcctgaaaccatggtgggtattctccaggaagaagcatttcaaaagagcaagccccaatgtgcaagtacttatcaagcttcagcttgcatatccatgcaatgaatgctgatgttccattggctaagctagttacatggccaagctgaagatcatcacgggaaagaactatgccaggagatgaacactggggggtgcagctcatagagggccacgaatgtgcaatgtaccacatagtacaagccttcactgacctccttaagccccttcccagtgcgtactcattacaatacttgccacactcagttgaaatagtttaattgttgagtattgtgcttctatttatggactggagctccatatttatggactggagctcttctgagagcagggtctgtacctaatttattccagtatcccattcctgacccagactgtgtttgcagaatgagtgcttgaatcagagcagcaactatcatcacccacctcgtatttgccaggttcaagccctgtctctaccttatttaggcttaggacattcaatagctgtgagatgccaactatacacagtccctaagctccttaaagcatggcagcctgtcccatgctttacagaagcatagcctgtccctgctatagagaaggcacctaccaggcattagtggaatgaataaatgaatgagcgaactttctaggcatgtcgttgagatttccaagctataagaccattcgatccagcaatctcgccactgggtatctacccaaaggcaagttacctgcactcttaagtttatcacagcattgttcacaatagcaaagatgtggaatcaacctaagtgtcatcagtggatggtgggataaagaaaaggtggtgtacatacacaatggaatacaactcacccattaaaatgaaaaaaaaaataaaacatgtattttgaagcaacatacatagaactagaggccattattttaagtgaaacaactcaaaaagccaagtactgcatgttgccacttataaatgggaggtaaataatgtgtacatatagacatagactgtggaataatagacattggagacttggaagggtgggagcgggtgagggataaaaaattgcttgatgggcacaatgtacattattcaggtgatggttacaccaaaagcccagacctccccactacacacacaatatatccatgtaacaaaactgcatctgtaccccttaaagttatacaaattttaaaaatgcatcaactgctttcttaaacatacactgtgatgaagctgagcagaaatcacatgaccccacagtccacaaataaagcaggtctatcaaagagctgtcaacgaaagagattttctgtcctctcctttccagttgaggaccctgaggaaggagagttgcccttgctgtgccacgttgtgctgagcagcccggctggagcagaagcacagggtcctcccaccaatgcgtcctctgctcccctatttcctggtcttgggcagtggctcctaatataggttctgtctcatgctataaacagctacagacacatcttcagtagtaacgcactggagtgtggaaatcaattgtgaattaaactcctccctattgcaatattctgacatcataagagaacacaagtgaatcatccctgtgtaaatatactttgattagatcatttgctttcaaggctaaaaaaagggaggagaaaaaactggatgttctgttcccctctggataggcattgggggtaagattttccgcccctctgtgtggtaacccccctcagctggaataacaacttcttacttaagaccacattcctctaggttccattctttgaaatatttcattctttggacctcagtttaagcaactaaaataaaagatggtcttgaataataaaactaaacaaaagaatgtgtttgctttattaaagggatttttttcactttatgaaaggactgacagtattattttcagcaggtgagatcccccttgatctgttcaaaatgaaaatgaaattcatctagttcaggagctatggactggttctgttggccaaatctagcctgcgctgcccatgcattttctctctttttctttctctctctctttcttcttatatcttgtttaaagaaatagagacagggtctggctatgttgcccagaatcgatcccgaactcttgggctcaagtgatcctctcacctcggtctctcaaagtgctgggattacagtaatgagtcacagtgcctggccgcctgtgtattgtttgaacaacacagtagttgatttttaaattctgagcttctatagctgcattatgacatgttctccagttcttcacaaatgctgccactacttgatgtctcacacacagttgttacctgcaggacccctgagttttacctctcattttacaaatggggaaactgagacctagaaaggacggtttgctcaaggtcgtgaagctaggacatgccagggctaaaaagcaagtctccagctccctggcacaagactccctcccttctgctcactgcatctccacaccactttcttgtagctttcgttaaattaataaaagtgcaatttcagcatacgccactaaactggcaagcatttgcaggggtggattttgtagcgacagcacttacccaatgggaagttgttgcaaccttcctctttcctttctgtcctcccaattctcagggttggaggaacctcacactttgctgtcatcaggcaaacctcatgcatgggcaaggagcatcatttttctacttctacccatcacagcttctcctttctatcaaaccacacaagcagaatctttctccatataaaatccacacagtaaatgtttcagatggtacaaatgggcttgtctttcattttgaattttttttttttttttttgagacaagacctcactctgtagctcaggctggagtgtggtggcgtgatcatgactcgttgcagcctcaacctcctgggctcaagtgatcctcccaccttagcctctcaagtagctgggaccacaggtgcatgccaccatgcccagctaatttatttatttatttatttatttatttatttatacagatgaagtctgcctatgttgcccaggctggtctcaaactcctgggctcaagcagtcctcccacctttgcctcccaaagcgctggaattacaggcatgagccactgcacccagcaaagcttttctttctggaaaaatcctacttgttattcaaggcactgttcaaatgttgcgtccagtgggaagccaactccactattcatttacatatttttaacatcatgtagcatagcgtggggtgtgcggtgtgtgggcctacttgcctcctcacctttccctccttcagctccccttgtctactctgtcccctccatctttgtttactgacttgaattgagaggattgaggctcatagaagacttcctgaaaacaatccacacccaccacttttctaccaaaattgaacaaggactagattttgattctcttttttggaaaggaaaataggtcaccatgcaaaaaggcccaagcagcttctcctgttcaagaaaatgctgtctggtgttggggatgagttggagagctttggggagggagttgctataggggaggagctgaaaaggacagaggtggcaggtatagaaagcaatcagtcaatgcaagagggcagtctccaaattgctccaaacctcagtgttcatctgtatctgaacctctctgaaacccagtgatgagcttaggacaaatgaaaagaagtcttaccagcagaaagatgaacgaattttaggggactcatgtcagcactgactctcccttgggaggatggtggctgaaggaggagccagggagccatctgaacttgtagacattttagcccagtgctgtccaatagaaatacaatgtgactcaaatgcgtaattttaagttttctagttgacacattaaaaagctaaaaagatggctgagtgtggtggctcatacctgtaatcccagtgctgtgggaggcagaggtgggcagatcaccta

SEQ ID NO: 36646 - DNA, 11789 bp, Homo sapiens
acaggcgcccgctaccacgcccggctaattttttgtatttttagtagagacggggtttcaccgtgttagccaggatggtctcgatctcctgacctcgtgatccgcccgcctcggcctcccaaagtgctgggattacaggcgtgagccaccgcgcccggcggaaatatttttaaattaaatgcctgtcaggaatgtctattgcattgctggttcctagtacatgaattattattacttctaactataccagagtatccagcaatggctttcttaactggggcaaaaacggaatgatttttgtggctaaagttgttttaaatttctgtacattataataaacgaaaagtgaagtccattagtctgtaagttagtgaagatccatagactttatctttctcttctaatttcttttagaagttactatttaggaaggaatttttttttccactgaatggcattttcgttaatatttttgtaaagtgtatatgaaaaagttatgtgtgtataaatacatatgaagaatttctaagaatctacttgtaaaacattattcagagttttatatgctctgaaatattttaaaataaaaatatccataaaatgcatactttttgaccaaaggttttcttttcttttctttctttttttttttttaagaaaaagaccccataaagattgccgcaaggtggcactaaaatctaatgaaaattccaactctgctctggtctttgaggagtgtagaatgatttacaggagacacctggcaaacaaacaaaaccaaataaattaggttaaagattagagatagattaatatcctccttttgtctgaaatacaacttccctgtctcacaggtgtggatatattatgtcataagatgaatatgttaataaagttaattgttaacatgacttgttcttggctggtggcggtggctcacgcctgtaatcccagcacttggggaggtctaagtgggtggatcacttgaagtcaggaatttgagaccagcctggccaacaagggaaaaccctgtgtactgaaaatacaaaaattagccaggcatggtgtcacacgcctgtaatcccagctactcgggggtctgaggcaggagaactgcttgaacccaggaggccgaggttacagtgagccaagatcataccactgcactccagcctgggtgacagagtaggactctgtctcaaaaaataaaataaaataaaatgacttgttctcatagaagaatcaaattttatccctgtctgaggaagtgtattatgaagggcaagggacagggaggggcttgtccggcatatcacctagttgggaaaagtttatcctgtgtgtggggcagtcttggaagcagccagtctctgcagagcttgtcaaagtatcctggactaaaaaaaaaaaaataccatgaaaagaagttactaaagaagttactgcagaacacagatctatttgtttactttggcatttttaccaactgcatagttttagaaattattgcaatattgagatttgagcttggaacacctcatataatattcctggaaatcagaacacgaaggagttcaatccgttttccggattctttgttttttaaagaaaaaaacacatggtacaaagctttgtttcatatttcttggtatttgaagtttaaggacatagccaagtttcccaagctatattaagaccaaggaaagcggcgttaacaatacagctataaaaggttttgactaaaagaagaaaaatttgtgtaaataagacttttctaataggaaaaaaaaaaagcttccagattgcatccttaaatcaatgaacagaaaaactatttacttgctgacagatcagttccttagatctgaaaaacaaacccccgccccccaccgccccggccaacaacaacaaaaaaaagctggttggccggttgttgtagtgatgtgaatccagtctgagggaagcacagcacttccagtcgtctaaataagacgttccctctaggaagggctctaggcttagcagcactactgccttatttgatctgatttcatctgtggagccatatggggacctagctcttaacatatgaattacatgtgaaaacaccggggttcagtcacagttggctgcatgggtttgcttaatgattttctttttaatgtttactttttttttttcttttgagccagggtctcattctgtcacccaggctggagtggggtgttgtgatcatagctcactgcagccttgccctcctgggctcaagcaatcctcccacctcagcctcctgagtagttgagattataggtgcaggccactctcctccccacgccatcccattttatttttctcagggacagggacggggttttgtcatgttacccaggctggtcttgaactcctgagctcaaacaattctccagcctgggcctcccacgcccagggatcacaggcatgaggtactgtgcccggcctggttagataattgttaaagcgaagtgtggaactgaggtaagaaacccccagaaaattccacctgcgtttctgagcattcgggttaattccccacagtcatttactgatccttgtaaatgccaggcattgtgctgggtcttcaagatgcggagataagacagaatcctggccctccaacaactgacagagaccgagacagagacggagacaggaggcaaccacctcccggtcatgtggtgggtccctcctttgctgaaaaaacagtttgcagacatttcccatgcaatggatagacagagcccagcccatgctgttaatactttagcactcatgagccccagcatatgcagctcctagagtttgccccgctccttcccaccttcctgcttgtgttcaggctgtttctcctgcccgggagccctccccgactcccctttccccctatccccttcttcctcttttatccgtagaaatcggttgacttgggtctttccggatcaccggtactgtcatttcatgcaggatctacaggataaatgagttcagtcctggcgtgcatcaggaggctacgccccaatagaggggacaccccctaacccgctgtgccccatttgctagccccttactcctcccctcttctccagcctcaagccttttcgtctgctcaggggtcttggggtggttggattctattgaacccggaatattgtacgttctattgtacaatagtgtatattctattgtacattctattgtacaatagtgtatattctattgtacattctattgtacaatagtgtatattctattgtacattctattgtacaatagtgtatattctattgtacattctattgtacaatagtgtatattctattgtacattctattgtacaagtgtatattctattgtacattctattgtacaatagtgtatattctattgtacattctattgtacaatagtgtatattctattgtacattctattgtacaatagtgtatattctattgtacaatttatctcagacagttctctgttttaagaaccgggatcagagttcatagtgaaaagaggggccgaaggggcttcttcctgtccggtaacttcctccaagtgttcgagcctcgaccttccctttccgttgtcaagcttgggccactccgcacctcttcccttaatcttcacctagagacctaagctgggggttgggaagggtaggggcggcgggacttggaagagccagtttgcagccagccggtcgcctctcgggtccaaacccgaggctggcccacggcgagtacccgggtggggccctaaaccacaggaggggccacctccaaaagaaaagagaaaacactcttgtttgggaacaaaagtgtgtgtgtggggtgtgtgtgtgtgtgtgtgtgtgtgtgtgtctgtttatttaaaaacaaaaccacgttaaaagagctgcccctcccccacaggcccgaccacccgccgggagtttgccaggaagaggggcaattctgaatgggagtcgccaacgccccactgagtgaagcctgtctcggaaccgctcgcccagaccctggaggctccagacagccagctcccggaccccgcgcgcaaacgctgcggcgaaggaggggacccgggtaccgccagagccccgcagcggcagcagcagcgcggactccccggtcgctgcctctcccagcccggcggcctgggccgtcaatcaagctggccctgccccgccctcgggctgcagggggcggccaatcagagctaagctccgcagcgatgagctcagccggctggtttcccattggacggctatattaagaaagtggccggactctttaaatagcgggcgctagggccgcagccctcatctgccaccgcagtctggttggagctgttgtcttgtatgctcagcgaggcccggagagacccgggagagagctaggccgagtccaccgcccgagtctgctgcccgagcccgcgttacgcacaaagccgccgatccccggcctggggtgagcagagcgaccaccgcccgggagcagcgcggcgagacgcacggtgcgccctatgcccccgcgcccccaccgcccccgccgcggcagccgaagcgcagcgagagaacgcgccaccgcggggcccgggtgcagctagcgaccctctcgccacctgcgcgcagcccgaggtgagcagtgagcggcgagcgggagggcagcgaggcgttcgcgggccccctcctgctgcccgggcccggcccgctcatggcggccatccgcaagaagctggtggtggtgggcgacggcgcgtgtggcaagacgtgcctgctgatcgtgttcagtaaggacgagttccccgaggtgtacgtgcccaccgtcttcgagaactatgtggccgacattgaggtggacggcaagcaggtggagctggcgctgtgggacacggcgggccaggaggactacgaccgcctgcggccgctctcctacccggacaccgacgtcattctcatgtgcttctcggtggacagcccggactcgctggagaacatccccgagaagtgggtccccgaggtgaagcacttctgtcccaatgtgcccatcatcctggtggccaacaaaaaagacctgcgcagcgacgagcatgtccgcacagagctggcccgcatgaagcaggaacccgtgcgcacggatgacggccgcgccatggccgtgcgcatccaagcctacgactacctcgagtgctctgccaagaccaaggaaggcgtgcgcgaggtcttcgagacggccacgcgcgccgcgctgcagaagcgctacggctcccagaacggctgcatcaactgctgcaaggtgctatgagggccgcgcccgtcgcgcctgcccctgccggcacggctccccctcctggaccagtcccccgcgagcccggagaaggggagacccgtgtcccacaaggaccccaccggcctgcctggcatctgtctgctgacgcctctggcttgcgccaggacttggcgtgggcaccgggcgcccccatcccagtgtctgtgtgcgtccagctgtgttgcacaggcctgggctccccactgagtgccaagggtcccctgagcatgcttttctgaagagccgggcctcagagtgtgtggctgtgtgtctgttcgactcccctcgccccattttcaccccacccccgcctctgatccccgggggcgagattggcgcgggagtgtggccgcgccccatcagatgttcgcccttcaccagcgggagcttgatatcccttgtctgtaacatagaccccgggtactgcgggaggggagggctgctggggaggatggggggatgttatataaatatagatataattttattttcggagctaagatggtgttatttaagggtggtgatgggtgagcgctctggcccaggctgggccagactcccgcccaagcatgaacaggacttgaccatctttccaacccctggggaagacatttgcaactgacttggggaggacacagcttcagcacagcctctcctgcgggccagcccgctgcgaaccctccaccagctaccggagggaggagggaggatgcgctgtggggttgtttttgccataagcgaactttgtgcctgtcctagaagtgaaaattgttcagtccaagaaactgatgttatttgatttatttaaaggctaaaatttgtttttttattctttgcacaattgtttcattgtttgacacttaatgcactcgtcatttgcatacgacagtagcattctgaccacacttgtacgctgtaacctcatctacttctgatgtttttaaaaaatgacttttaacaaggagagggaaaagaaacccactaaattttgctttgtttccttgaagaatgtggcaacactgttttgtgattttatttgtgcaggtcatgcacacagttttgataaagggcagtaacaagtattggggcctattttttttttttccacaaggcattctctaaagctatgtgaaattttctctgcacctctgtacagagaatacacctgcccctgtatatccttttttcccctcccctccctcccagtggtacttctactaaattgttgtcttgttttttattttttaaataaactgacaaatgacaaaatggtgagcttatgatgtttacataaaagttctataagctgtgtatacagttttttatgtaaaatattaaaagactatgatgatgacatttataaaatggctcttgtggtttaatagtgtgtaaaaatacccttgtgaatttggaacaagggagatattctcctaggcgagatcctttcttgccaactccgtttcccttatagcaaatgtagtaaatgaggatgaagtccctttgagagcatgtgggggttgggtgaccaagggagaccaggttgttcctgtcacattcctagaggaagatgagtggataccccgacacccagtgcaaaaacttttgacctattatgtactcagttcaattgggtgagaccgaagatcttgatttcattcatctgtgtgtcttaaaaacacttgtgtctttaagtctattatggggctttgcttattctttgagtcttggaaagttatcatttgtgcattttaaatttagaaaacctttattaatcgttggtgtggggtcacgctatcaggaagcctgtttactgggttcccttcaggccatcaaggggtttacacaatatcccaggaagttgtaggttgttatctttgggcctggagcttccagaagtgggggagttcagataaagaggtgattttttaaaattatcaagctttgatcccaatatgtcctttattaagtaacctagaatgatttattctaagttcagagaagggccatattgtggaaagaacattggatgttttggtggttcttaaagttggagctgccactttttgagagtcatgataaactctaatcgtagacacttagctttgctgtaatggttcttagaaccagacgggctgatttataggtggagaccacattaaaattctgctgcaggcatgatggttcaaacctgccagctctcgcagcttccagggaaggtagctgagagtgtcaactgcctgagaagtgtggttttcattttttttgaatcagcattttctgggtttctagcacttagttgccaccttctccttccccctcctccccattcccaggacaaaggtggaggtctcctttgaagttgtttgcttcaaagcttgaggcttctgtttcctggtcttaccccagactccaagagcttttgttgagtgaataaaacctggttggtggtgacctttcacccacttaaatgctggcagtaactggacctcctgctcagctgggtgggtgcattgactaacagaaggggattgtctgggctcctccaggagcagaggggagaggggtctatccaggctgcctgctttgagcaactgcctaactccttcctcagtccctcggccccactcacctccagactgcagtctcctttttcattttaaagacaaaacttcccatcgacaaacagcatgtttatttgcagcttttacagctagcaaatcctttggtaccagggagcgcaggacccagtgggggaagagttcaggcttgggctgaatgcccaggactcagctttgcaaccagccaagagcctggaggcccaactccctgaaagggccttttctgggttgctctgatctgcctggtacccataactgtctgtgttttatattatgggcagacaaacactcagatgacgcatggcagcccaagttatgcttgtttgaaaatgcgtggcatttcataatcctgccggaacacactcttcttgctgcattaggatccaactggaaaacataaagatgaattgctgtaggctggaaaatcaattaggaaaaagaggtaaaacatctggtgttactcttagaatatgaaaattcattttgcacatttaaaataaatgtgttgagttgatttaattgcctgttgaactgtttcgtggaaaatactgggaagttgcattgatcctgggcattttgcagtaaggggcattgtcttgagttctcctttaatcttaatctttaatcaatctggattgtatttctaaggtctttttcacgtgagtttcagtagacttggaacttcagttttcaaagtcaagtgtgtattagaattacacggagggctggttaaaacacagatggctgggcctaaccccacagtttctgatccagtaggtctgggctagggcttaagaatttgaatttgtagcaaggttctaagtgatgacaagctgctggttgggaccacactttgagaactactggcttcgaataagggagagtccttgtcagtgtacagagtagggaggtggtttcctatgaaaatagattaaattccacagacttatggtgctatgccctgcagtcttgacttccttacacaacggagtacatagcttccagagagctttccttctaagataagccacacataactcctatcttctcttccctacattcttctgcaaaaatgggtttaatgcccttctagagattcatttctttctttcctttttaagagacagggtcttgctctgtcgcccaggctggagtgcagtggtgccatcatagctcactgaagcctcaacctcctgggctcaagcaatcctcccacctcagtctcctgagtaggtgggactacaggtgtgcccagctaacttttaaatttttttttgtagagacaaagtcttgctattttgcccaggatggtctcgaactccagggctcaagcagtcctgttatatcctcctccgaaagtgttgggattacaggtatgagccaccaggccccaacctatttctgccattcctgaattcagaatgcaacagcactctaatttaatcagcgttggcacctactttgtgaactctgatgaggtgggaatacaaaagcaataaaacacagtcctccccctccaggagctcattcacagcctggtggccccctggcagttgcaagaaggcatccaccaagaccacaattatagcatgatgtaatggaggcattaggcaagggcacgacaggagcctagggcacaggtacctatttttgcccgggaagatggggaaggtgtcatggaggaggaatcatttgagctaaatcttaagcaggagtgggtgatgtgtaggtggaaaaaatcttgggggtggggtggggagggagataattgggccattggcacatcgaggatacatacagcttctttatgttactgtagggcctcgcctctgggaataaagctgtcttgggtgagaactactttctacttttagtccctctagcgtatatttcttcagtcaagaagagtggtattacctagccaagtaaaacacagcctctcctcttcgctccctgttcacaaaacaaggagcatctatctggcaggccaggagagggggttggtgatgaagatttcattgtttcctctgtgccttccagggatgtgattcagacacaggactagctttgtgatccctgtgctccggagaaacctccaccctggcctcaaggaggctgtgaaaccaaaagggaccttgggtgccagcttgctgggtccttacttacttggtccatcttctggctggaaggagcacctgggctctcagagtgccccccgactctcagcagctccttttctggcccaagaggtaagagtctggaggaccccagttcagtttcttcctgtttattcttttatcgttgactataagattgtgaacctagcacaatgctaagagcttgagatacagcagctaaacagacagccactatccttacccttttggagtttttagcatagtggtgtgcctaaacaagtcataatcatgatgatgatgagagggtattacacagggcatgactaccagaaggtgggctcattggaagccattttagaagcagctgaccacagtctctctggggcgggcaccattatcctcactttactgatgaggaaactgagctacacaggggtcgagcaacttgcccacggtcacaaaacttacacaggtttgaacacaggtagtctggctccaggaaaacaatcctacatgtatggtgggattccagtttgagaaagcaaactgcagtgtggaggatggattagagcagggaagctggaggcaggaagatcagtgaggaagacttttccctggttccagtagagatgagaaggcctgaacccaggtgcagatacgggaaggagatggcaggttggaaagatatttaggagaaagagggtgtgggaacctgagtgggaggcaccagggtgatgcccagtactctgatttgggtgactttgaggatgctgacgccattatttaagataagaataagcaaaagatgagtagatttgtggggagggtacccacgaatttgggtacccacaaaagatgagtagatttgtggggagggtacccacaaaagatgagtagatttgtggggagggacatatttatttaaataatgatgccattatttaagataagaataagcaaaagatgagtagatttgtggggagggtacccacaaatttgggtacccacaaaagatgagtagatttgtggggagggtacccacaaaaggtgagtagatttgtggggagggacatattgagtttggttttatagatagtgcaaggtatctctgcaaatagtcactgtccttctcaacctccttccctcccccgacccccacatcacaatatgtgtactttctctacagagttagactacagtgtactgttcagcaggcagaaaggccacaatctatggatgaaagaagtccccctgcagggagaggacctagtcagaacaatcttcctaggaagaagaaaatcctgggatgggaactgtggtcttagaaagcagaccttacacagtggctcacacctgtaatcccagcacttcaggaagctgaagtgggggcattgcttgaggccaggagtcgaagactagcctgggcaacattgtgagttctcatctctaccaaaataaaaaataaaaaaagtatctgggcatggcagcatgtgcctgtagtctcagctactagggaggctgaggcaggaggattgcttgagcctaggagttgggagtctgtggtgagatatgagagcaccactgtactccagcctgggcaacagagtggagaattaaaaaagaattaaaaaaagaccagaaacagcagagaaagggggcctccttcc

SEQ ID NO: 36647 - DNA, 1305 bp, Homo sapiens
ttcaaaaagcactgtttcctcttccttcactatacatcatgactctgggaattaaagtttgtgctttgagcgacgtgtgtgtgtgcttatgtgtgtataaattgtgtgcctccatgtgtggatttgtgtccctttatatgtgtgtgtgtttgagcggatcattatctgtttgatgacctgagagaatgaggactgtgggtctcagaagcccatgttcaggtaggcagttgcaggaagcagagatctgcaagctggggcaggagtcccagctccactgtcttgtcagatttgaccattaaccaccagttctcagggttgtatctgggcaagaggctgaggctggggcaaggccggtcacagtgcagctgggggagtactcagggcagagtgtgaccctgaagtcccagaggtgacctcatgaggactgtatactggtaggagacctagaaaaagaacgaaatgtcctgtccctaagcccaagcccaacttgactagtgtccctaagccgaagtccaatttgacttattctgctgatcacccctgccttcccccaaggccaacaatggcattggactagagcaaacaaaatgattcagactttgggaaatagactgttctggattctggtgtcttccagattgcctgactggggaagaaaatggaaagggtggagcacactagggttagaccatttgctcagggaggtggcttggagtttcacactgaagagatgagaatgtggagctgctctaagggaatgtcatacaatgaggacgagctctgttcagccctggggctgcatgaagaagaaaagctgaccagaaatcagcctctccctcagatggggtgaggatgctaccccaacttgggaccctccttagtatcatctatcctgtcttgctctcagtcactttcagcccaaggctatagtccaggttgtaatcttcgtggcaacttcataaggaccttcatccataaggacatgtatggatgaaaccctttgggccctgctggagatctggatatctgcagcctcagatgggccgtggatggtcagggccagagaaagagcaatttcagtcactctgaagcctgaagagttggttttcagggcttcttgatgaatttatttcccaatttctatcccatctcctagaactgaagctggcgctgagtagatactccacaaatctttgttgaatggtttattagactgttcttgcactactataaagaaatacctgagactgggaaatttataaagaaaagaggtttaattggcttatgtttctgcaggctgtacag

SEQ ID NO: 36648 - DNA, 1902 bp, Homo sapiens
ggcatggagatggttgtgggaccagtcgccatgctggtccgcgaggagtctcagggggttatggctgaggcaatggcactggtggtcctaaggaagaatttaggtggtctgggcttccatgccatggttgcccgggccccaagctctatgtgtacgtgatgtgaagccaggaaatgcaggcagtgcagctcagcctcctgggctgccggaggagctctgagaaacctggggccagggaaccaagcagactggctctatcttgggatttggctgcagacactgcaggaactgaatgccttgcgaggctgggactgccttcttcagccccgtttctgtgtggggtcccacgtaggcagctgtcacaggctcccagagggatattcaagtggaccaaggcaggagaaaggctggggaaggctgaggtcagcaacgccctcttcggtttttgataattttagccacatagggaggaggccagttgttctttatctgaggcaattgtcttcagtttaaatgagtccccggagaggctcacagctgggacaggaaagcgggcagaggcggaagtggggagggctcagggcttgacaacggcctggctcggtaggctgactcctccgctaggaagcagcagctccagatctgagtgcagggaggacaactgcatccccaggaggcccgggaggtcactgtctgatctggaaggggcaagagatggatcacaggaacggaagtataggaaacatggccagagttagcagcgtgggtgcaactggaatcgattgttagcccatccacttggggactttccacaagacaaagcaaatgctcccctccagcctatgaggtcagggacctcaggacgtgtagagcgttcagtgtccccgctgcccttctggcctccctgtgtgacttggatggatctgaggtgcctgctcctggacaccgctctcctgcagggtcagatgtggagtgtcccctgcaggcctgaggactcagcactagtgaagggctctcagcagcttgctcaacaggcactgtcccctgggatgttggtttgtttaaacgaaggtgttctggcctagtgggcggtggctgctatgagtaatcctgctccacaattgacatctcagttcaaattcttcagctctgtctgtttttcacccgatccatgcaaccaaagggctcacataagctgacacccatcgcctgctctcctcaggggaagcatgggagccagggacaggaaagcctctgcagggcacagccaggcactgtgtcgcccagcagatctggacacaagggctgcggggccaaccagacactccactgagcatgcgggccaaggaggcctctgagagctcagtgagaggacacagctaggaagtggcagaactggaatctggatccagatctgcctggctccagagtctttctctgggagaaatattatgaagcactattagagggtgacctttgcccccaaactcactgttccttaagcccacagcccagacagtcatgttatttgctaaaaacaaagcttagcagtttgatatggattccatttcataagaaggcaggaggacgctgttgataacacatggtctttagagccagcgcaacttagctctgtcactgcttgctgtgtgaccttgggccagtcacttaacctgaggtttgctttcatttgttaaaaagtaataatagttaccttctatagttatcttgaaaaccacaagagacatgtttataaaataattagaacagtctctggcacatggtaagttttccaaaatatgcggctcttattctaataatatatttttcctctctgttattggggataagtatagcttgattgatatatacatgtgtatgtgtgtatgtatatatatagct

SEQ ID NO: 36649 - DNA, 549 bp, Homo sapiens
cagggagctgtcagtagctatgtctaaggtgtctcagcctttgttaaaaagccagtacaggaccaccctgggcaacacagggacaccaagtctctacaaaaaaaaaattaaaaattagctgagtgtggtggtgcgtaagctactcaggaggctgaggcccaaggatcacttgagcccgggtggggggttggtcaaggctacagtgagccgtgattgcaccactgcattccagccctgacagagcaagcgcctatctcagaaaacaaacaaacaaacacaaacaaacaaaagccaacacaggagaagggggcaggatggggactttctacttctctctacccttagtgagtatgcattttgctaaggatcaaggattcgtgcccaccatggacaccataaggaagggagcgactcctgcaggcttctttgtgtagctttagggtctggaaggaccaattctggccagaaacaacaagacctctttcttgggcatgaggctgtggtaggggctcctctaagcctcttaagaggtacctggggccaggtgcg

SEQ ID NO: 36650 - DNA, 5085 bp, Homo sapiens
gcttgaacctgggaagtggaggttgcagtgagccaagatcattgcagcctgggcaacagagcaagactctgtcgcaaaagaaaaaaaaaaaaggtacctgggaggaggggagtggagagttactggttaaggggcagagtttctgttttggaaatagtgatgatggtttcacaacattgtgaatgcaattactgccacttaattatacacttaaagatggttaaaatagcaatatgttacgtatctattttaccataatttaaaaaaaattgtcaaggtcataagaagcaaggaaaccctgagaagtggtcccaggtgaaaggagaccaaaggacgtgacaactaaatgcaacgtggcaaccgggattgggcctaggcaagaaaaatgacactgtaatgtcccttaaggaaaaactctaaaatccaaataaagtctgtagttcaattaatagtattgttccaatgttaatttctttgctttgacaagtgtaccacggttatgtaagacgttaacactagcggaagctgggtgagggtacatgggaacgaactctctgtactatcgttgcaacttgtctgtaatgattccaaaataaaaagttgaaaaacccaaagacaaacaagggccaggcctgccaagaagagctgggacacgggtttggcacctgggccttgggctctgcctggaaaaagccaaggagtcctggagctggctctcagctggcaggaggacctgctgccaactctgcagagatgggccagttctggaaagatgagacaggtgggcgtgggagctccagggtgggccgcaggcagtgcctgagccctggccatggctgctctgtgagctctctgctggtgtttcagtactttcctaggttcagcaggatctcaactctccaaagggagggctctgcatcccctctgggttggcttagaaacctgtgtctgtcactgagggctcaggcgggccctgcaggcagataaggccatgggtctggctgcagccctcgcctagccacacatggacaacagagggttaacggccctctccaggtgctgctccgtccatccagaccctgcaccccaggctgtaatcactggaggagttcttcctgcccactgcatgaagaaaggtcgtggaattgcagtaaagaaagaattgaacagacccaaggcccgccgtgccatgtgggagacagagttagtactgaaattatcttcaaagcttgtaggttaggggtttttcaaaggcagtttgggggaagagttgggggtggccaggtaacaggtgcttgctgttggcagagatgaaatcttagggggtcgaagctgtcctcctgggtgctgagtcacttctgggtggggccacaggggcaaggttggcgggtccaggtggagccatgggtgtcagacatgcaaaaggcctgaaaaggtatctcggaaggccgaccttaggttcacaacattggcattatttgcaggagtaattagggaagttgcctgtcttctgacctctggcatcgtggctgacagtcttttatgtctgcgccttagcaggagtcagggccctctactcccccaggcctgatggcctctcattagctttacaaaagcagctgcgttttgggacaaggcctgttaccatttaaactacagcctaaatgtcttcaaagttagctcggcccaatacccaggaataaggaagggaaaggaaagattgggggtaggttagctgagatctctttcactgtcataattttctcactgataccatttttgcaaaggtggtttcaaggcctcctccagaaggcatttctgctcactccactccctgatcagagatggctccctagtgctgaaaatcaattcaaacgtcgcctgacacctgtgtcttttccgtcttttccggccgcctccagccttctttctctgcctggcttctccccgtggggtgggccctccatgcctaccagctgaccagatacaccagccccaaagggccagcttcactcaggacctttgctcctgtggtgttttgttttgttaatctccacaatattcaaattctgtttctcaaggtccaggtgaaactccagggtccgtggatctttcctggcatttgcgactggcctatctggggtcattgctttgtcttcacgctcgtctcccacaagtctgttaggtcccctttctctcactccctggagctcagctcaagccctggcacaagggagatcttgttaaggagtgacgtgtttggtgtgttagcaggcatctatctgaaaatgctctcgaccctgggctcagccaagccctgaaggcaacaagataccatccctcctgcccaagtgtttggctgagtccacgcttggctgaggacagagccctgaaatatctcccaggcccctcatgggagcagaagggagccactgtaccagctggtggcaccagcccatgcacctgctcacccttgagcaggagcacgtctttgaccccaggaagaacaggaggcaggagagactgtccccagggtgggagctttcctgatggtggctgcagggaccccctgggcacagaagccaacagtgatggtggcctgatcagcttgtgttgctcggcctctgcccctgagctgggcccgctgggggagtcaggggaaatgtggcagctccctgtgggctggggattaggggaaaacaaacaggtggaataacagacagcaaggacctttggttctccctcctcctggggcccctccccttcccggtcatctgggtttccattttcacaaaggtctcacccacagtttctctgcccacaccatgagcctgggcacaggcaggtcagtgtcctgagatgcaccttcccagcacaaaggggtcatgcagccctcactggccacggagttctgagggcaggcagaggttcttagagtggactcctgtccccagtcacttactggagaaaaaaaggttaagacagggaggggaaaaaaactgtaaacgagtatttagtgagtacttactacatgcgaggcacagtgccagacacttctcacgtgggtttccttgactctcaccgcaaactgcaaagttagtgtggttctccccattttgcagatcaggagattaaggctgagtgtggctaaggcaatgactgcctagatatatcagaaccagggattagactcctatgtctgctgactccagatttgatcttctttcctctgcactagggcaggaggggaggtggggagcatctacctccccaggccaggggcagtgtccaggctgagggacattctgtgcttccaggagctccaagtgacaggacagagggcacacttggtgatgtcattctctggaagggcacagaatatgtttgtgagatcaaagatcttacagatggaggggcagggctgggtggaggaggagaagccccggtgagtcacgctgggaagacagcagccctgggtactggctgagcctccttggagccccccaccccttctcccacactccatcataaggttcctcactcatggctttgtccctggagaaaccacacccatcccagtagaggcctggatgtggactctcccctctgtccctctccatacctggcaccctttagggcttgccttggtctccccacacctccactcccttggaagacactcctgtgggtggctggggctcgctcccgcctcaggaaaccgcctcaccgtgagtcagcagcacaccatggtctccagggcgggtctccctggtggtcttctcattctctggtccccacggcaggaggcatgggtaagcttggggctcagcacatgacagagagcaggctggggccggggttctttgagaatcctgggcatagatgaatgagcctcatgtgggaggtcccggctggagtccaggcaggccgggacactccggctcctcactgagccctggcctgggtgcagaccgtcatgtgcctgtgggtacagcctctacgctgagcctcacttccccaggccagagaagagggtgagcccagaacattctgtgactacaggctgtgccggctgtgaccgtgcaaagcgaccagtgtgtttccagtcacacactgagtaatctagaaagcagtagccaccccaccagctttcttcttagaaatctcccagcaagctgtcggctgcctctcccttagaaacggggctctagcaagacacgaagtgtgtccactggaggcaaccctgaggtccctgggccacgagcagtttgcgggcggcctgaggaggcaggcagagcttcccccaggctggaggggccgtctgcgggcactggggctggcagggagcatttcagtggcccacagccctcgtccctgccacgggcttctgctcctgccccagagcccctttcttgagaagcactcctgtgccccgtgctctcttcgtgttttacgtaatttcatccagtgtacaccctgctgcggtctccctgcaggctaaagggatcactttgaagactctaaccctttattccttgtcttgggtgtcgaggaaggtgtcagccagaccacaaccgtgctcgcctattcactcagcaagtgcctgaggggaagggggtgtcgccagggaatgaaagactcagcattggtgccctggggagctccagggggcaaagtcaggtgtacaaataactccacagcaacaagggtgacaagggcctggccaggatgcaagcacaggcatacgtgacagggagggagaagtttggcaggcttcctggaggaaggggcatttggctgacactcgaaggaccgacaagattgccacacctggcatttctgtcttgaatattgaaagaggagcaggctgagtcaagtccctggcagatggagcagctgcagagggggagcggggagccccagactgtgttgagcaggacctggttcattgggagataatgaggattgtgggatatcatgaaacactgtgtgaaaatgcctggcctgccgtggaacccacaggcagtgctgaagtaatgcttacttaagcctgaaactagtgatcaccttgcgggcagatgctgg

SEQ ID NO: 36651 - DNA, 8889 bp, Homo sapiens
aagggaattgccgtttgagttgggttttcagagtaaacaagggcttgtcactgggcctagatggagatgtggggtggcccagggcaagtgaaggacttggggttccagggagattaaggactgggggcatgacacactgatattcatgtacaattgagttaatatttccgtatcggggagggcctgggagctgagtggggagagggtgggaaagggggaccctcctgatggacccaggaggttcagtcccagcccaaacccagcccttcagaaagacccaaggctagtaggcctggactccttaaaaagcttcccaaccattggctggggaagagcatgattcttggggttgttttaccccaagggccttgtccagggcttcctttgaaacaagtgcagcgatctcccagagagaagttctagaccatgcaatcttcctgtctccctgcatttcctgtgacatgttagcggcttggaggtgtccccccagctccaccaggggcataggaagaaagagcctccaggcccaaggtgaggggcacctcccagcaccgccatctgggagcgtaagagtgcctgtctgtggctgcagcctgggagggagagagggtccagagatggaggcaagcagaggccagaccaactcaggccgggtgcatgagctggaattgccaggcctctgaacctcaggctaggtcgcattcttggagcagcagattaaagtatgagggggtattgtctaagctacactccccggcactggggctggatggggattgggcttccagggttctgttatactgatcagatcaatgattcatatgctgatgtatcagaaccacctgcaaacacatttccaggcctgcctcagggcactcgttcctcaagcctgtccagtgtgacttcaacccccttcacagctgagtaggttgtggccaggggccatggatctgcaaagactgagtaacgtgcctgatgtctcatcatgatccagccggctggggacctctggcatggaacactccaagctgcatcatgtcccctcaggcaacttgctgatccctggcaaggggtgcaggaagcaggctcacgtggctgtgcccttgaatcagggctcgggagagtggcacagggtgggggtgggaacagcctctcttgaccagtgcctagcgtcctacctgtggctcctaagtggctccagggctgccctcagaggcgggatgggatgcagtcttcataggaggggacttggtctccatggttttcagggcagagccccacacctattacctgggccctgaggctctaccctagcatgtctctctgggctgtcctctgaaaagttgctcaccatggtaaccaaccagaagtagagccccagctgagggcagtgatgacaccatctttggcccttggacaaccggggcagttcttgcccggaggctctcgcaggcagccccacacaccacctatatcccgaggaaagatgggcattcccaaggaacatgttcaggccagaccctctgggaggtgaataagaatagatgcccagccaagaacctcttcaaagctcaagaggaatgaagagaagagagaggaccaccattcactgagggctggccatgggtgaggcactgggcgtaggcaatctcctacatgctcatgacagccctgggagcagtactgccacctgcactggacaggggaggaaactgaggctcagaatgggaaagtaatttgctcaaggccagagtccctgggtgtgtagctgtgactctggagccatgctctgtatcaaccagtggggtgtacatgaaacatcaacagtaacagcaatgtccaggttcaaaacattaaaaatagcctcagtactacaaggctttctgtttctgaaacctctgttgaaggcagccaagtggaaagtcaggcggtgtcccctcccaagcctcacaggctgagccaggtttggtggccactgaagcccttgacttccttccggtctcaggtcagtcctccctggggcactcctaatatgctcatctggaggcttctgttaagtccaggaaactctacaggacacagctgaggctgggcggccaccagacacgtgctgtgtccagagagaacaaagcgggggtttccctgggttccatgagcacaggagccttttcctccaggctggctccatccgagctggctgagggttggcggcagctgcccagcatctatagggtgcctccgggaactgtctcaaggccagagcatccagcctcctggctgttagtgggccgtgagcctaccgggacttcgagagacagggcttccccagatccagcctgatgagatcatctgccatttcaggctgggctgaaagatcctccggcacaacaaagctgggcccaggagatatcctgcatgactcatcagttggccatgcattggagacttccggccctcagagaaaccagacacagagagccattgtttgccttggaagccccccggcataccaggctcaatggggtcatttgtgttttctccctagtcctccataacccatactctttctgggaggtgggggcccactgagctgcctgggaccctgtgacaagaggaaaaccaataccaagtcacctacccacaagtcccacgggaataccctccctccaggaccagggcctggctgggaagcagaaaacctgggttctgagccatggtttaagtctccaagactcactgattcttctgtcttcatttttcaaatggagaaaatcattcaaaaaagacaaagctattgtgaggatgacctaacgtaaggcacataaagttccaggctcaggccttgcacctacaaaggttctgcatgtgatctttccttcccacttctctcttcctcctgcctttaaaatgtaagtgaaaatgttttgtttgtggatctgtttctatcctaatctacatacccttatctagggcagaaactccctgaactcatacccacagtctacccacaatttggcccacacccagggacacagccccaagggggcaaggactggagcagagggcacacagcctagtggctaagctgggcagagatgcaagaataagcaaggcaaggctgagggcctgcccctgggtttcaaacaagctggaggcctttagaaacttccaagggggaagctgagtgtggtggctcatgcctgtaatcctagcactttgggaggccgaggcgggtggattgcctcagctcagaagttcgagaccagcctgggcgacacagtgaaacctcgtctctactaaaatacaaaaaattagccaggcgtatcagtgtgcacctgtaatcccagctattcaggaggttgaggcaggagaattgcttgaacctgggaggtagaggttgcagtgagccaagattgtgccactgtactccagcctgggtgacagagcgagactctgtctccaaaaaaagaaaaaaaaagaaaagaaactttggtggggtggggaagcaaaaattaatttgttaaaaggaatcaaaggttataaaaagaattcacagaaagggaaatctaaatgactaacaagttcatgaggatgttgtcaacctcgctagttatcagagaaatgcaaattaaaacagtgagattctcctttacacttatgagattggcaaaaattaccaagtcagataatatcaagtgctgacaaagaaagtgggggtaaaagaaaccctcaggagctgctggtggaagtaaacacccaggcagacaagtgatgagcaacctggaagttattcttgaaaatcaatatttaagttcagtgtgcatggaccatgtgaacaagagtcccatgcctgctgaactcacaccacggatattggcccagacccaaggataccactgctgaaggcacagccccaggttagtgtcccatgcagatgccagcttgtcaggcatgcactccaggcaacatccttcccaaagagcaggctgtcttccgcaaaagttggaaaacaggccccagtgcaggctctcacacccggcccagctccagtcctcagtctcagagcatgcccactgttcagctgctgcctctggcctgatgggggctttggatcagtgttctgatcttggagaagtcaagacatccactccctctccaagctccagcctgacattccgaagccttccatttatctcactgtctgtattagtgttctatttagtgttctattgttacattaaaaattaccacaaacttagcagcttaaaacaacaaatatttatttctttttctttttcttttcttttttgagacaaagtcttgctctgtcacccaggctggagtgcagtggtgtgatcttggttcactgcaatctctgcctcctgggttcaagcaattctcctccctcagcctcccaagtagctgggattacaggcgtgcaccaccatgcctggctaatttttgtatttttagttgagacagggtttcaccatgttgcccaggctggtctcaaactccagacctcaggtgatctgcctgcctcaacctcccaaagtgctgggattacaggcatgagccaccgcacccagccaacacacctttattacctcacagtttctgtggttgagtcgtctgggcacagcctacctggatcctctgctcagggtctcacaagactgtaatgaaggtgtcaactgggctgtgatctcatctggaggttcaagtggggaagaatctgtttccacctatgcactaccttgcagctgtatgctgggggccctagcttttctgctgctagttgtaggccaatttcaggttctagaggctgcctgtggcctttaccaggtgggctttcatgagttagctgcttactccatcaagcctgcaaggagaggtactcgactcaggaagagcccagtccctgttacaagggttttcacctgattgagccaggcctgcacaaaatagtctgtttttattaactgaaagtcaactgatttggggcctcaattacatttgcaaaatcccttcacctttgccagattctgttggttagaaataagtcaccggtgcccccacaccaaggagaggatttatgcagggtgtgaccaccacactgtgggctgccttcctggaggcgaaggctcccattccactgaaaagaaagtgaagccccaggcagtgtagaatagccttgagagacacagcctcctgtgctcagagcctctggaagctcagcacagccttccagggctcacagcctctagaaggagagctgacatggatggagctggggactggtctaccggaggtgtgcagggagtggctgagagagattggtaggggagagctgtcctagggggagggtgggcctctcaggcagcacagataagtgagggaggggtgggggtagcaggctctaagagtgccctgcagatgtctggtgtggggaggaagtcattgaattcctccatttccagctgagaggtccccagagacaggcagtgctccccctcatgtcagcccattacatcatggtccctttctctgcacccccatccttggcatcaggggaccccacccaccctctttccactcgggtttcacaggcatctaggagatcagctaaggggcagctgggatggcactgtatgtcccaactgagggacagtgggaggattgtcatggggcagacgtgacctcagctcgctgggctcagctcatcctgctccagggaagggcagtgtcacacaggaacaaacgcccactgtgctgggtctcctcttccctgaggggttcagacacaggcagggacccttttggcagggtcagagcctccagtgcctacaagcctgcctgctccagccaggccaggaggagtcccaaccctctgccacttaccaggccctgggcctgcctgcacaccctcctcacaccctgggcctacctgctactcagcctaacctgagagcccaagcccaccctccacccagaaccaagaccctcagccacccccagcctctgctcaggtcctgagcaaggaggggcgatggagcaggcatgtgccatgcactgtggtccctcacttctgaacaacccctctgagctgtcctgagctgagtttctcaggcccccagcctgggcacaggttgtcccattgcacttcaccttccgatgccatccacagaaaccagctttggctaactcacatagaaaaggattgtaatgaaaggatatggggcagcttactgggttatcaggaaggctggagagccaggcaggaaccagggaggggcgcagttggttctcactatgggggcagcttactgggttatcaggaaggctggagagccaggcaggaaccagggaggggcgcagttggttctcactatgggggcagcacacctggacctgtcacccctggagggacgctgctggattcttgagttcttgtagccccaccaattctcagcacctctccctgaagcctggcaccgctccttccagcttcaaagtccagagagaaggggccagcgggtcaagcccatgtcttatcactgtggcaaaggagtggggaggaggcaccagcccacatcatctctcatggtgggaggacctgggctctcctccgtccctgtgagtcccccagtagaggaagggtattcagatgttgggcctcagtgtggcccccaagccctcagaggagcctctcatcatgacacctggggctcggtcctgccagtgctcagtggaccgtgctgtcagggtcatggtctccctgactggtctgagatcacctggaaggaaggtcactcctgggacctggccagcatagcacctgcacaatgtcaaatatatggagatggcatttcctatctgtgtcccacggctccgggtttctgaatgtcaccatatttggtgccaggctcacagactcgggcataattagtgttttgaccctccagcaacagggccaccctcagaaccattagatgtgggatttcttctgcgattgtaagagattgcttattaaattgttctgtggcactgagcgaggacacagggctgtgtccccagagactccctgtaggctgggccaggtggggtatagataacatggagttgcacccttcctggtgctgcttctagaaagcagccagtttcccagaggctgtgctggggaggccagtaggccatggcccagccatgctggcagaagagagatgttctaatcaccctatatctagaggcatctcttcctcccactgctcagggaatgggctggggaaggactggggtgtgccggtccctgccacagttctgctccagcctcctgcccttgctgactcagcctgcctgctccagctctctgagcactgaacctgcacatggaatgggggccattgtgcaccacttctgcccctgcaccaccatcccccgccaactgcataaggctcttcgggtcagcaggggaggagcagaaccaagaggtggcaatggcaagaggtggtttctgctggagccagtccagacccctgactctccttgaaagatgcagaagctgatccagggcttcttggtttggtccgctaactgctcaccttaggaatttgccccccaagtgacatggatccgattgcacattcctgaagcctgagtcattcctgggtcctgctcaggctcaggaatgtgtttatgctcatggggctggagggacatgcacaccacatgtctgttcactttgggtttggaagggatgagggctcttctcaaggataagagggatgaggtggtgacctctggagtcgctaagatgctgcagtgtgtgggccacagaggagcaaatgaagggagggccagactcaggctggaaccaaagcctttggcttgtgtagagttggttttaacttgctcccaagggacagaaaatggagagggacaatctaagcagggcctcccctgcagtgaccttgggaaaggtacttgctccctcatcacctcctcccaccaaggacaacctccaaaagggcacagcgtggcgaggctgtggctgccacctcagagccgtggctgaggagctcagcccctcctcccactctgtccagagctctctgttgacaagtcgatggttctcctctaggtccaatgtgggcctctgcagctgtggagagagctcacaagcacggctcacatcactgagggtttattcagagctcagcgctaggctgagccctttacatagtgtggccatatgcccccatttgcctgggacaatcctgggttactaatacaatgatcaacagtgcctccttttactctcgagtgtcccggtctggaagataactatatatttgccttaactctacaagcataactgaatccctacaatgcactacaagaagagcactgctaatagtgtcattttctgatgaagaaacaggctcagagaagataagtaacttgcccaaggtcacacgattagcaagtggcagacccagaaacataggaattcagctcttgacttcaaagcctctttgctttgccacaacatcagatttcctgttctaaaatccattgcttcatgctttgaaggaccgagaagctgctatctccaaatactagaaaaataaccattaacgtcctgcagtgatcccagctcttcttccagccccacgcttggccattttgccttgttcgtttcccaagtgacagcgtgcacaataccgttcgcttgcaacagcagccccgtcatgggatgaatacataccatcatgcctactgtgtgtcaggcacggcacctactgtgtgccaggcacagcacatgttgtctgatcctgacacaaccctgcatggtgggtgttgctcctcctttcatggaaaggagacccc

SEQ ID NO: 36652 - DNA, 8811 bp, Homo sapiens
atgcctcagcctccaaaaaatgcagacatgcgccaccatgcccagctaatttttgtatttttagtagagacgtggtttcatcatgttggccaggctggacttgaattcctggcctcaagcaatctgcccacctctgcctcccaaagtgctgggattacaggcccgagccaccgcacctggccctgtgtgatctttctgagagtttctgagcagcgaacaccccaggtggttgcatgggggaggctgtaaaatctgacagcagctagtgggtcctagggggacggttcaacatcacgtcccatggatggtccaaggacagaacagccccagcatccaggccagaaagctggccctggaggaagttggttcctatcctgtgcttctaggctggggtgaaggtttccaggaggacacctcccttggtcacactattctcctgagcccctctctcacatacgtgccctgctgctgcaacccccagagggctgcaaaaattagctgggtatggtgatgcatgtctgtaatcccagctttttgggaggctgaggcactagaattgcttgaacgcgggaggcagaggttgcatcacaaaatccgccacaacccctggatttcctcaagggattccctgtctggccatccacctcccccgccccgccccgcccattcctacttcccctttcgggcctgtccctctcttctgacctcccccatccatcacagttctagccttcactcacctgcatcaccgtagtgactccccgacagctctgtccctgcccggctcagactctcctatgcagctaggagtaagcccaggagagcatgtccctcctccgctcaagagcttccaagggcttcccatcaggatcagtttcccagggcagtcatagcaaatgaccacaaactggatggcttgaaaagtctcctctcacagccctggaggccagaagtctgaagttgaggtgtcagcaggaccctgcgccctcagagggtccttctttgcctcttccagttcctggcgttcccccgctggtggcagcaccacgcccatccctgcctcagccttcacgtggccttctcttctccactgtgtgtctcttacagaaacacctgtgattggatttaaggcccacctggataacacaggatgatctcatcttgagatccttaatttaatttcatccacagattccttttccaaataaagtcgcattcacacgttccaggggttaggatgcgaacatggcttttttgggggcaagaattcaacccacgatatcacctccttaaggaaaatcccaagtcattactctgtgcttcaaggcccttcaggatctggccttatccatgacctccaacctcccgctgtctaccccaccacccctgacctccagccctgtccccccactgtccccccagcacaccatgttcctgcttcagggccttggcagatgctggcctttcccccagggtccacacgcttcctccatcagcatcgtcaggtttagtcaattgtttggtatggccaggccctccctggccacattgtctaaacttgcaaccttcccggaacactccctcttcctcacctgccttctctcttccttaccactcatcaccatcacacgtgccggccttctcctcatttatgttgttcattgtctcccctcccctaggccacaggcttgttttgtcagttttgttcactgctgtgtcccagcggctagaacaacgcttgacactagttgaccttggctgaatgaatgagtgaatgaatgagcaagagtttgctcaggctgaactctgagctgccggaagcctttgtagacacccccagaacatgctggccccacctctgagctcctggtgtacctcggttctcatgaggcccccgcacttcagcctctggtgatcctctttttcgagccagacatgttggctcagccaacactccctgagcccacatcatgagtcaccagaggcccttgacccttcctcccacaaccttcccccactgcgcccgctctcaccctggtcacagttagccgagtgtgtgcagggaactgtgtatgaaggtcaggcctgccctgctgcccctgctggtccctggagccgccacggggatggaagagtgggtccttttgatgcactcaagcctgggatatggtcctccagggccggcattgaaggaatgtacaagggctgccccagggcctgcaacactaactgtgaagagtcccctaaaacttccctgatgaaaaccaccacagcctccatttcagaagagggacgtgggcttcttgccatgtctctgctgctgatgggctctgtgactggcacaatttccttcctgttgctggtccccagttttgtcatctttaaatctgggcatcgacccatcggggatggctacaatagcttgcatcttacacattccaactcagatggctctggctgtgccactgggttgagaaggattctgaggttcaatccaggcttaacaggaagaagtgcagtgatccattagtgacatctgccatgggtgtggggagagtgggggcccaggtgtgctaaggctgggttagatgctttgtgagtgggctttgggcaacacgtccacgtgagtctatggatgcctgatgatagagaaaagatcctggaggaggtgaatgggtctgaaatgagtggctgatggcatcacaaatcctttttgagcttactttggtgcattgaggcagctggcatggcctgcctgctgggaaggcatcaatgacccaatggagagatggctccttccctatgctggggttgaagttgcagggcagttaggctagggccctgctctgtgttttgtctctcaggtggccatagtgcttggtagaagaggctgtcctctggctcaggatttgcagcaacaaggccagcctctagctgggcctagccaagtgccctctgagactcgctggaagtgaggtcccctatctcaatccattcaggctgctacaacaaaataccgtggatggggtggcttagaaatggcagacatgtatttctcacagttctggaggctgaaagttccagatcaaggtgtcagcagcttcggtgtctgggagggctggctctctgattcctggagggggctgtcttgctgcatcttcatggatggaaggggcaagggggttttcctcaggtctcttttataagggcattaatcccaaacaggagggctctgtcctatgccctaatctcttccaaaggccccacctcccataccctcaccttgctggagagaatttcaacatacacgttgtcgggagtaaaaaaacactcagatcatagcatctcgggatagacagagcccggcatgccacttccctgaatgagggagacattcttgtagcctgcacagctggagcagggagtgagagcctcggcagccttgggagaaggtgccctaatgtgacatggcctcagtttcccagctgtgggcagagatcacagcagctgtctccttttcagtctggacagatggctgtgacccacagaaacgccatggcccgggaacagagctgtgtctaccctgggacacagctgtaactaccctgggacagagctgtgtctacccacgggaagggggatccttttctaatttgtacaaaggtgccctgggggtccaggtcatgcatagaaaattcctcaccaggcactcaccaggagcagaaccctatcatcctcctcctcctcacagtgactcctgctctaacagaggcacagaggcgcagaaagagggagttcccctgaggcagcaggagggcttcctggaggagggagggtttcggctgggccttgctgatcctgtagcaaccagtgattctggccacagcccgtgcctgcctgcctgactctctgcgaagggactgcagcctgctctgtgctgcggcccttcctcgacatggctggtttcttccctaggtctatctttggttcctgctgactcttccgtgacataaatgcaaatgagaccacagacaactagcctcaaagccaaggaagccgctggctggagttgtctccacagtcccctgctgggcagggaagtgggcagaggtgatggtcacgtccatccatcacggcccatcaggggagcaggcctcttggggcccctgacacctccaagtggccaaaaaaaaggtcataccaggagacagagccttagactaaccaacaagagcttcccgcatggctgatgacagtttcccacgttctttcttaatcactgggaccttagttcaaaggtgatcctgtgtggagtcctgaaatgtaaagcagagtggtccagagcttacctcttgccctgaggtcttttcatcaaacctagggctccttagggcacagtagcttgaaaaccgctgacccacaggatgtgactcaaatttctaaagctctcacaactctcccctccttccccgtgacactgctctaatcccacctctgggtgtaccagatacctctcgctcctgccttggccctttagtattttgatactagctgctttgtcaaaactccttcaagaccccagctaggatactgcctcctccaggaagcttattctactatctgaatatttgtgttcctccaagattctattcatctgctcaaacctaaacccccaaggcgctggtattagaaggtgaggccttagagcagggattaggtcatgagggtaaagctctcatgaataggattagtgaccttataaaagaggctccagggagctgccttgccactttcacatgtgaggacatggtgagaagacagcaatctgtgaaccagacagcaggccctcaccaggcaccaaatcaactgatgccttgaccttggacttctcagcctccagaactgtgagctatacattgctgttgtttataatcacccagtctatggcagtttttatagcagcttgaaaggactaagagaattacttttatctcttccccccacccacatacatgtgagcagagtggtcccttcttcccctttctgtgctgtactctgtccttctacccatcacagccttcctcctgctgtgtctgaagcacccatttctccgtttgtcctacacacaaatctcagctccttcagggcctggtgtttttccccctctgcatttcctgggctggaccctcataggtaccccatcagaatctttcactgcagacccgtggcagccagcaggtgccatggctccctggactctgtgggtaggatttgggcaacttgaatgtgtttaggatccagccatggttcccattaaggccacataaaaggcctgagctggagtcatctctaatccctccttaaaagggaggcccaggggagacacaggccgccactccagggccccagggtcccctctgtgtttatgacatggcctcagaacatgcagtttacaggccagaagcagcatgaggcccttggccacagtcctggccatccccttattgaccttctctctgagcccagcaggaagcaggcctctgttctaggactttggagcaaaaggtcacttcctgggccagagtaaccacggcaacaccattcccctggcagccttggactagcaaagtgtcctcatagctctgattttgtctaaatttatcatttcaggctaaggaaggccttgtactggttttagagccctggacggagctccaggtgacatgggccttcctggttctaccaccgacctgctgggggtttcagcaagccttcaccttccacgttggcgttctcagctctaagaaaaggaagttgatttccatgagaggtgatcaaactgtgctgtagaaacctcagcgattccacagaacattagagtacctctgccaagcagaattctccacatggagaaacctcccctcttactgattttatatgccatgcatgtcaacgctctggggaagattttttgcttgagaaaaaaaaaaaattcttgctgattaaagaaaaacaaccctggaaagtgctgaatatggtatctatgcatttattatggaaatctagatagtttgcactgagatcatagatggttctcatagaatgggactaggaggattcaaggaaagaagacctgcttcctgtttcccagcccgtaaacccttgctgttgttttcaagatttttatgatcctttctgggctgtgatgagagggcctggcaggggagccggctgcctccttatcgaagactccctgcctcagtgcctagagccaggctcagccctggtgaggagggacaatcctggctgggtaggtcaggcagctaaaagttgggggtcaggtcccctacttcagcggtccctaacctttttggcatcagggaagacaaaaatcggaagacaatttttccacaaactggagatggagggatggtttcgggatgactcaagcacattacatttttggtgcactttatttctattattattacgttgtaatatataatgaaataatgatctaactcaccataatgtagaatcagtgggagccctgagcttgtttgcctgcaactagatggtcccaccttcaggggatgagagacagtgatagatcgtcaggcattagattctcataaggagcacacaaccaagatctcttgaatgagcaagggctcgcatgcacaatggggctcgcactcctgtgagaatctaatgctgccgctgatctgacaggaggtgaagctcaggcagtagtgccagcaatggggagtggctgtaaatacagatgaagctttactggcctgctgctcaccttctgctgtgcagcccggttcctaacaggccagggaccggtacttctttttttttttttttttttttttttttttttttttttgagacggagtctcgctctgtcgcccaggctggagtgcagtggcgggatctcggctcactgcaagctccgcctcccgggttcacgccattctcctgcctcagcctcccgagtagctgggactacaggcgcccgccactacgcccggctaattttttgtatttttagtagagacggggtttcactgttttagccgggatggtctcgatctcctgacctcgtgatccgcccgcctcggcctcccaaagtgctgggattacaggcgtgagccaccgcgcccggccggtacttctttgaatatataattgggctctttatattcttcttgtaaacttccccctttcttctccagggagtactgagatggtcagctgagcttctccctgacaaggggtcccgggagggaagggacagatgctagggagggcagtggggagtggggggaatggggtgaggtcggtggaaaccagagacaagcgcaggagcccacaacctcagcaccgcccctgggggcctgtagcctgctggagatactgctaaatcctggtggaaacgtgtctattcttttcagactcccggcaaccaatccgggccagtagctggggctgttgggattctggaacaggaactgggacaagaaggtggaggagctgtcctggccccagggggagtgaggacacagcagtacccacaggtcccactcttcctcccttcccctgccctggagcagggaagtacatcccatgttggcaatcctgccagccacaggcagccaacgggtgcacgctgtcccagcgagctgcctgggctcgtgcccagttagggacgtggcctgtgtcaccccaattgtccaggccacccaaggcaggcaaatgagctttaggtattttaaaatcagatttggatacacaccaaaccgggatgctatctctggaggcaggctgggattgtggacagaggtcaaaggggctttgagccttatctgccatgttccattttattttcaaggaaaatgtattcatggacttcttgtgtaacacacacacacacacacacacacacacacacacacacactctgtttttttttttttaaagatctgactttaaaagcttacagtaaaaataacaattgttttacaagagactccaaacatgttcttctttggaggtgggaggtagggagggactgcctgattagcactgtgcccttgatatgccagcatcaggtccagctcctgtgcctcagtttccccatctgttccccagggagacaggcctgataatctccaaggttcattcagccctgccatcaagtgacaagaagttccactctgtgaagtcacaggcagcctgtctgcctgcgttccttgtgagccttagttacagcagtgagagctgattccagatgcgagccctcaggggcctgagagtggtcccagggggacccctgggggctctttggccaaatcagttaagcttccttcctggggagagtaatgccaggcctcagaaagcttcaacagcccagcctctgtgcagtcggaccaaatgctggccttgtagcctgttagtcccttttcttgccacgcttgggaatgaacaactgtgatctacgggtgtcattaagacagagatggtctggttagggacactggcccagtgaccctgcccctggcaccaatcactatgacaacagctcaatagggtcccaagggcctaagaatcctgcttccactgagggcgaggttggctgaggtcagacaaagagggattaatagagccctgttctcgttaaaccacaaagcgccattattacaagtcgcaacggccctagcaggagatgtatcatgctttcaagtcacagagaacccagcaaaccaaagagaatgggtccagcatcagccacaaagtcaccct

SEQ ID NO: 36653 - DNA, 847 bp, Homo sapiens
accactcctgtcctgcccatccccagcccctggcaaccatgggtctgctttctgtcactacaattttgccttttctagggtttcatatatgtgggatcatacaagatatagttttggggtctggcttctttcacttagcatgtttgtgatatccattgtggtatgtctgttagagggtttttcctttttgacgctgcacagcattccgctgcatccatgtgccactgtttgcttgttcattgaccgtttgtttgatggatatttgggttgtttcctttgggggaggaacccttatgaataatgttgctgtgaacattcgtgtctaagtctttgtgtgtgtggcttcttttcgaaggaagggggaacgctggctcactccctcccaaagtgattgagggttgataaggaagctgggaaatcccaaggggtaaagagaaagggatacaggccagcctgaccatgggccgctgggactgccagaaacctctctccacttgaccacatcgtgcgcaaagttcagggaccaggagagggaaaccgatgtgtttacttcctgtctccatggtgctgggagagctgttgttgctctgagtgtggggtgagctggaatgtactccccgctgccgcagtcctgttgacattattccttgtcagaatggctcatttccagttcgttccatctaccctccctttggtagacctccatgacccacctggatccagtccccagtcacataccagggccccctggacacagggtccctcaatcccagggcccctttctgggtctccagtggttttgtatgtgcccattcccatgccccccaccccacggtgaggcagcaga

SEQ ID NO: 36654 - DNA, 5413 bp, Homo sapiens
tgccagccaggatagctctgagtgtcaccagctctccagtttgtgccacatgttatctaaggagtcatttcactatttaataaagagatccagcttttgatagagagaatttgacatgtctggcagcagctgcaaaggacagaactttataatgatggcccgtggtgggtgtctacacacacaactgcctgcccagcttcctcctgacacgtcccctcacatgggagtgaaaccgacatggcactgctgaaacacacagagtacacagggatggcacagggggcatgccttgcagaatggaatgggcctctgcttgctgctgaatgccacgtgctcaggacaggtggtaactgtactgggtcgaattgcgtcccttcaaattcatgtccacaaggacgctgtgaaggtgctcctatttggaaatagggcctttgcaggtataattaaagggaaatgaggtcatatcagattacagtgggccgtaatccaatgactggtattctttcctataagagggaaatttgggcacagacacagagaagacaccgtgtgaagacacagacacagaggagagaaactcatatgaagacaaaggcagaggctggggtgatacagctataaaccaagggaccccaagtgttgccaggaaacccccagaagccaggacaaaacaaagtaggatccttccctagagatttcagagggaccatggccctactaacaccttgattttagactcgtgacccccagaactgtgagataatacattcctgtggtttaaagccacccagtttatggtgctttgccaaggcagctccaggaaatggaacaaaagctgagcccaggctgcaggtaacaaactgtccatgctggcaggtggcagagggggaaggacaggcagagagggccgcatggaggaggcacctcctttagttgtgcctgaggttcaggcagaaggcccagagaacagaagtgaaactagaggctcagcatggctcctggtagaattggctttaatggctcaagttttttcatctttgcttcctccaacttgcctggaacaggtactgcacacggtaggtgcccattacgtgcttagtgtttatggatgagctctgcatgtgggaaaacaaacgacatgattggccagttggcctggagagagctagcccagctttatttaaaaagccattcagaggcggctgctatgtgctgagttggcagagaagcatcaggcctctgaaagtcagcaataaagagtcggcttaccgaggccacatgctgagcccataatcccacttcagaagctgtagctttagcctgagcatgacccgacacatgaaattgcttggctcttcccagtagccagagccacggagcacaggagtgagaggccagccacagaggagggtggatatctgtgtaccgcgtgggattctgtgtgtcgcagcgccaggcctggcatagaagtcagtggtcagcactggggctggggacttgactgagctgttgacaggcctgttgatcacttgcccagtggcctgccacctcctgttaggagctagctggtaccgggcagggaagtccctctgtgaggatctagcatgaccagtccactgaaattccttcaggcacgtagaggactttatagtctacctggcttcctcccaggacccagggtgggtaagtctcttcacttggcactgtggggtgaggggatatcacacagccaagctggactggaaccctggccgtttgtgcccacagaacctggctgctgcttcacaggatgctgtgggctgcatgagaactcaagggccagtccctactgctcctccaccggcccctggatctgcttccccaccggcccctcagtcagcttccccaactgcaaggccttagggtgctgagcagggaatggtttggagcgatcagagtttgtagtgagtgggaccattcatagcttgatgctgagacttcagctccttgaggaggctctgagcattgactatgtttgctctgggcagctgtgaacccacatgaagccaatagcagcaggcaggaccactatgtggggacatgctggtagctctgttaccctctctgtttcccaggattggctcagctaggcagctggtgagctagagaaatgggaatgaccctccacatcagcctgacaccgggtattaaatcactgcaccaagtatgtcaacacaacgcccaggtggccgctggacaataaggccacagggccccagagagtggctggactttgctgtctcgtctgtaccttgtgtgagagcttgagactcagaggagcccgtggggcacatggaggtgaacttagtcccagatacattgtatggacgtggtcatgggacaccagtactcaacaggtaggtgctctccaggggggcccatgacacaggcctggccagggaaggccctagggactttccagaactggcctgagttcccggcttcctaagaggaacaatgccgggaggaagggagcagtgggaccccagccatagacagtacatcctgtccatgggctcacaacaggcttcgaaataaacaagtgttgttgtccccagttaaacttctgtttcccttccacagggaactctcagctgcaggctcctggcctgagcagaccttctcagaatggccaaagtgcctgtcctcaggagccaggactccagctcaatcttagctacaagactccaaccaaaatcttgggggggatagaggccacattctgtccctgcaggaggcctctcaggctccctgagaacctgtttctagttctctagtggatttcagttgacagaactctctacttcagcatccctgggtcccagggctgaagctgcatctaagaacctgagccctgaaggccagggcgggtttgctgacagaggcgcagggccatctgatgtcagacctgaaagggccccagggccagtccaagcctagaccatctccactgtgggagaatagggggtaggtctggagacagaaaggggtcctctttctttctacatgggtcttggctgtgcagttactggcccgatgaccacactgggcctgggactctatgcctcctctgccttggttggcatagtgaggagtgaccagaatcctccccttcccctaccctaagcagcagcctgggtgactggggcagggcagcttccctggctgagtccattgttttaaaggacaatcctctccccctctcccctccctggtggtctgccatcagcctaggcacagaaaagaacatcactaacacaggctggaatgggtcacaggcacaggctttatcaggcgacaaggatcattgattggccatgagtcgcagtcctgtgggtgaagaacaagccacagatactggagcatcaatatctgggggtctttgtgatggtgtccagagagtccagaccactgaggaggtggcgtccacagtggatgaatacacaacgggcaggccaggttctgccagtgaccccaagcagagcaccagcccctgtggccacctaccccgctgtgccctctgctcctatgtcacttgacccaaagcaggtggggagcaggaggcagggagccagcatcagggtgcagaaagggcagggaggggacaaagcccagaggagagctggagccacctctcggaggaagacctggccccatcccctccccactcctactgagaccttccgctgcagtcagcaagggatgcagggcccggggctgagtgctgggaaggaggggcgggtgtgaagggggaaggcaaatgggtggagccggtgctggagctgtcccagagctggctcagagccctggggagggagctgaccctctgagcctgggttaagacggaggaggagggagtcagctctcgaccccaaaaccacctgtttcctctcactctagcactggtggaggggaagctgctcaggacagggcgccacagctggagagggacgtgatcagatgcaggacagagcagacaggtcctggcacgggccaggagctgagacactcaacactgatggctgcaaaccacccgcaccatcagccgggggctccctcagggctggctttggtgtctatcagaaaagggtctgaggtcctagtcccacccgctcaatgcttctgccaggcaggacagggccaaggagcaatagtggttgcatttcctttaaaactactgtttcattaaaaaacaaaacaaaacaaaacaaaaaactagctctgaacatgaagaattatatccaagaaagacaccttgacattttttgctttattaaacatcattcactgagaatttccaaagcactgtgtggtgcctagacctgtgtaccagcgctctgggggtcgggagaagtctaaggcacgggccctgccctggcgcacggctccttctccctgggaaggcagctccactggtgaaaggccactgaccaagtccagaccctgaggacgacgaaggcctcggggcagaagcctgagagaatcatgccccactggcagtgggaggcggtgcaggctgggagccctgcccaggccccaggctgagctgtggggaaagctatgacccagtttgctgagagctgcaatgacgaacattggctctgtgcccagaggcccaagaaggccatggactgggctggcctttcctgggaaagggggaaggaggaagaactggggcctagcagggccgtctataccctggagaggcagggcctgacttctccctttagagcttgcatcaagaggaggctcaggagagagagacttgcatcagaacactccagacagccgatctcccactcagtattcctctcctgggagacccacccagaccctgcaggcccctggcagccacgaggagcagaggccctggagtaatttggcttggggacgtccccaccccaggcccaggccagtcagtcacccaggctacagcttagggtaggggaaggggaggataccggtcactccttcttactatgcgaacagaggcagaggagggatagaggcccagccccagtttgggtctgtgctggggctggcagaacccgtgggcatgaagcttccctgccccatgtgacacctcgctacggccccacatgtcttgcttcatccttggggctgggcttctggttggcaaggcatccccacaccctccctccccttcatgtccacggggaataagacacattgggctctggctcctagggtgagagccgctcccgcagcccgcaggcttctactttggccccacagccccggagaaaatggaaccatgcagttctgggtgctgtgacccaggcttctgcctggcctcccctgggggtggggaggttctgaccctgcagggcccagtcccttcccttcacaccga

SEQ ID NO: 36655 - DNA, 933 bp, Homo sapiens
ctgctgcgtccggccacggcagtaatctggatggggaaatgcagttggcatgcacactgtgctgctgtgatcactgtgacagcctgggtggagtgccgcctgcgtgacgctgcagggcagctgtggcacctgcctcctcctttccttatggctttgggtccccagccaggccagggctaagtgctgcacaggtgcagggtgaggtcgggcccagccatcctggctcgtggcccccacatgaaccccaggatggcacagcagagaactcgtccagcaggtgggtcagcagacgagggaaagcccagcccgagcaggagttgctggggagcagacagtaccggaagtgccttctggacacgccctgtcctcagccccctgtgggcggcagactgtggtgacggctgacctgccactctccacacctgtttcctttctggcatttccaacactttaacagaatttggtttctgggaattctcaaacaggagcttgcggaagaaccaactcaagagcttgttaaaacacagattctgggggccctacccagatctgaggggggcctggaatctctatctctgccaagctttcagtggcccagaatccctaggtggtctctgttgcactggtggcatcaggggagccctgggtgcccaggctcaggctggaatgaacaaagaggtgccaggcccatgcgcagtggtcgggatatttagcaagaggcaccctcggggaagcagctccagggcacctcaggaggtgggactgaggccctgctgtccccacagagctcccctccacggctcaccttaagggactgtcttgctgctaaatcttgggttagcaaatctgggagcacctggcaatgtgccaggagcattcaaaaccacagaatcattccagagaagtgatttcatccaaatatagagtaagata

SEQ ID NO: 36656 - DNA, 2443 bp, Homo sapiens
ctccatagaataaaagctttgtatatgtagaagttcctcaggttattgcctgtaatagcaaaaacctacagaaaaccccgccacgcccacaagcaagggcctggtaatgccacttacagcccatcgagctgagaaaccagcagaggaaggagggagagtgcagctattgatctggaaggacctagaacatgtaagctggaaaaaagcaaattccagaacggcacacaagacaatctcattttggcagtaagatgtgaatattcaaaggtgcattcagaaattcacagggaaaggacttttatctgtgtttgcaatttttctatactaattgtgtgttatttgagtcacaatgaaaaaggtttcccgcagaggatttccagcataaggcagaactattagggtagaatgtcaattttctcagcaccgtgacattctaaaatagaaacttaaatacaaaacaggggcgacatggagcagcaatcgggacagaccatagggtggaaaagcagagtacgaaaaggcacgtgcattgtgcctgcggttgcatggatgctgctgggacggggtcagaagagagccccagcagatggagagagcggtggtgttgggatgggccgaggtgagggctttttctatctttaattgctctctaatggtgtaataacgctctcttgtccctaatcaaaaccaggtttaaaagacaaagaaaagccaggccggcctgggctccggctttgtgctggcgactcccaccctcccagcagccctgccgtggagcagcccttcagcagagcagcagcgcctcgccgcggccacggcggggaaggaccgaggctggttgcatggaaatggtggccgctccaggagagcccagagctaagcccagacatggggcagggcaagctgggaaacgggtgccgctgcatctgcacaggaaccaagcgcacgggagggagaggggtgcacaaacagcctcccgagaagaacagaaagtcccccaccaaagggcaggtgggtggcaccaagagagatcaacaagcccacctgggtgtctgtgaaaggccgaggtggaaacccaacttcaaggtacggctctgccacacacacagctctggaacacacacggctctggccaagatcctgctcaactccttcctcgattttaccatctgtgaaagggggataatcctggggccctgcccacctcccaggctgataaagactggactggagatggcgtggggtcctggctctgccatctgcaggctgcaggaacgtggacgaaccacctgaccctgaacttgagtttcccaccacacagaagaggctgatgccagtgcaggcctccagggctccgtttcttgacctgtgcccacagtggatcctgaaagcagtttggcgagtcatgacctttccaaacgttgaaatagaatagaaaatatcccagtacaatacacttagtaaggttttgtatgagttctgggaacttttgcttcagttttatgggatgtttatacatgtgtgtcctgggtcatggcgtaccatatagtttttactatgggttgtagcaagtagtttcagaaatgctgtcttacagatataatgagatcatgcaagcaaatgctaacttagttcccagcatttcataaactctcaaaaaatttacttattattcctgacagaggtgataacgttgattcatcagcaccttgtcacacgggtccttaaaaagaaaccccagcaggggagggtcttaagccggcaggattactcttaggtgctaagctttcccaggattcaggggtgagggccccagagtacagagctggggagggggctgcccccgccccccccgccccgccaaggggtcccaggatagctgacacatctcccctgacaatctgctaatgaagtaagtaggaagttcaaggcagcacttgccagccacaaagaacattttcctacccaaaaaaggagccgctcggctaagtgtgttcttcagccaaaggttggcacagaccaccaaagtccatctcggtttggcactacgtgtggttactcagaacaacagagaatgtgagttcaaacaaagcctcacccttaccaaaataaagcccaagaaaggcctgccgcgttgggccaggctgataaggagtgactattacaggcttgtccccatatcacccactactctggctgcctctccctcagggccgctgaccccactcagggacaaggccagccacggagggccaggaggagcgactgcagggcacttgctgtgcccaggtgccgcaggaccccagatctcaggcctgtttctgctgcagctccctgagcgccgcgtaccctttcccagtgcaaatcctcacccctggacgctggtctcatggccaccctgcagcccaccctcccataaccctccccacgaagaaggcctttc

SEQ ID NO: 36657 - DNA, 1383 bp, Homo sapiens
gtgctcctttctcaccccgaccaggggttcccaaggcccagcagccaaaggaagtgtgccaggtacgcccgcctgctgcccctctgcctgtctcccagcctcaggctccagtccttaacacgcctggccgatagcagattcaataaaaacatcttagtggcccagaggaaagatgcaataacggtgccattctggacactgtcacaggtccagttaacaagatttgatacagggacccctgcccagcctgcacgtgatcagggccactgtgttcattcccagctttctgcatatcaggagggtgatctcaccggctggcaggtcatcttcctgcaacaccgtgaatcatctgttctcagcaccaacctcattctcccgtgaaccagtgtggccttcggcgggccagccaatgcaagcagtggagacagatatttccaaggcttgttctctgccctgcgtcaggcaggacctctctgcacgcaggcacccgagtcaagcaggccaggactcttgctgtcatcagaaggcagccttgagcaccatctgactcagagagggcagcactcagcttcccgtggggccagcggctgactcccgctgcctccttggcctctccccacagctcctgggcagctaagccttcaccccttcactcacggagctcttgctgcatgttcactctgtacagagacaccccagcaggctctcagtctcacagtggtttcagtgccatcgccgtgtctgtaaccatgtgggtgctcagcgaagtcacctgctgtatacacacaccatcggcctggcacctaccctcactcctagctcctctatcacctgctgtatgcacacaccatcatcctggcacctaccctcactcctcgctcctctgtgctttccccatagactgggcctgtctcccccgactgaagtgtgggtcactcactcttatgctcccaggcccggactgtgcccacagtgtgccactggagtgctggcgtgcaggggctgcgggcatctgacgccctcgggctcggggagatcccttggtgcagggtgtgtctggaacacacatccttggctccagcaacaccacccagaatgcccagcctgtgaagggtcaagataccaggaggcagctggggggatttcagaacctccagtggggagtcacctgggacaggtgctgcttgcagttgtcagcacaagagcctggctccagactttcctgaaaacagccctcagggaaaggcacacggaccccttcccagagcgattgctaacacaggctccgacagcagctgtgactccagcccggcccgcagagcaggccacggtgggggccgggcgccccctgctggcccgactgctcccctcaggctcagacca

SEQ ID NO: 36658 - DNA, 2127 bp, Homo sapiens
agaggaggtgacgtaagtggcagtagggaaacctcttctgcccatgaagatacaactgtaaccacacttgatcatgaaagaccaagcagcctccgacatcagggtttacaaaaggaatcatacctttctagacctgaagtcacggggaattcctgattacaactggaagatcaacagttggctgggtaacacgttcatttatgtcataaattggcatcttagcctaagactttgtgtagggagagcaagggtgaagtgtatgaaaatatttgaagtaaatcactttacagcgttttaaaggcggaaagaagtaaaagcacgtgcctcccagccttgccaggatccaccttgggctgggtcctccaggtctcgatcagggccgacccattctgcatcctccgcctggacccctccaaggcttttgctgtaacttgcgctctcctgagctgcctcgcaagcagcaacgacctctccctggtctctcatcaaactcatcctcccagaaaccgggttcctgccctgtactgtgttcccatggcaacctgagcttactacccgctgctggcatcaccccctctccgctgcagccccctgcagggcgagcttgtctgattcgcctctgtccccagtgcccagcaccgggcctgggactcagggagctctgaaaggatggggaactagattttcgggctcaaaagagaagaacccaaggcggtaggaaaggagagcagagtccccactgcgcccgcctgcactgaaccagtcagtcccagggctcccgctgtccttggctagttctctaccctccagagggcctcggtttcctcatctgtaaatcggggtcgccacctctcctgcagggcggtgcaggggcccagcccggataagccaccgagggcgctggggagacctgcaccaggtccctggcctaggaggcggcggcctccccccgcctctccgcccgggcgccccggactgcgagctgtgcggtgtggggcgcgggggtctggctcacctggaggtgacgagcaccgccggggactgcatgacggcggcggggactccgggcggggcgcgcagtcacgggacccggcagtgcccgcgtcaccgcgtccccgccctgcctcccgctgccctggcctgccccctggtggcagcggccgcgcagttcgcgcctgtggccagaggcggggcggaagcgcggctgggcgggtcccgcacggtcgccgtcggcctgcgctgctcggagcttccggagcacccaggctgagccgcgcccgccgcaaccacctagaagaagcccagcctggccctggcacacggtgaaccttaatcggtgtgtctgttttgcgctaaagtttagccgttagagagacgggactctgctgtttccgccgccagtccccattacaaaaccactccccctctgccccaagaccatttcattcaaccgatcggtcaacaaatatttaccaagctggggctctgtccaggcttcgtggggtcttcttcaagctgcacagtgaacgccacgcagcagcccagtccccttgagcttgctgcctccagctagctcgcctatctggttcctactgcctgcccgctccataaatggcaggcactctcccgacaggggatctttagagaggcagcctctgctgcttggcagagccctggtggaggcctcccggggccgggcctgcctgggatggctgcacttgggtccccagctggagcagggcaacggggtccaggagccagttcccctcagaaggggaacgtacagacatgcagaccctaacagacccactcattttagattcacctctccatggggtgaggaacagagagatcgtatcacctgccaacgtagcccagggaaagaaaagctgagtctgcaaacagggccagcagaaggtgcaaactgctgcccctgttctgttactccctccacccagagccccagtgacaaaaagaaagagaagctgggcttaactataccagaattcacggcagggcgatgtcagccatgtttcctgagcctatcaaccaccgccaccagcatcaccaacaatatctaccagtttttacagattttagtgaagaaatcctacagtaaaagatttt

SEQ ID NO: 36659 - DNA, 2686 bp, Homo sapiens
gagtgttatgcggctcaatgccccaaggtgagcaggcgccgcgtctccgcggtggccgagagggcaatggctgaggagttcgtttgggacgaagcagtggagcaggggaactggggagcctgggccgggcctctctgtgggtcccagcgcagcgcagccaggcaggcgtcgggacctaggcggctttggattcggcgggcgacctcgctttgaagctgatcacccgctcaaggtgatcacgacgtgccgacccagtctagattttgagttctgcagaaaatgcaattttaaaggaaaaggacccgcctgcccttcttcggcagttcgtttggcccaggccttcgatcagctgaaagtttccgatctagggggatgtccaggctgccggcggagcagagccgataacccccctctcctgcgcgttcccctgagacttggcctccgcaacctgtcccagccgcggagcaaactgctctgcggcccgcgcgagtgcgccccagggcttcgccgctgccgggcgtcccctccatccacctcgggacccgcgccatcaccgcggcggggtaagaagctcggaggcgccatcccggggctctgcgccgtccgctctcccggctcctggccgctcacgcacacagccggtagctggttttcgttagccgctgccctcgcccagaaggcgggtggaaggtcgccagttggacgcacagccaaactcttagcgcactcccgcgcgagatcccccatcacccggggctgccgtcctcatttcgagctctttctagagcttggctcccgctgaagcgcaacttccgcgcccaaaccttgcttttacgacgggcggtccgcgtccaaaggtctcttacaggcctgccctttcagctcctcgccctcccttcctcccctaccggccccctcccctgctctggccgcccgctgcaatcctttggggtctgtggctgagtggggaaccgccgacccgcgatccggaacgcgactttgaggccgccgggagcatcctgtggcctctctctgcgcggccacccggccgcggcgcgaagcggtctggagggcgagcccttccgcggccccaactctgccgccccgttcccggcattgggaaccagggcagggagggggcgggtgtttctctgcgggggagtggggaggaagctgggcgggtgcgcgcggtgccccgagcctggaaccacggagggcgcgttggtcttgggcggatggagggggtgtcgcactgccgcggggaggcgtgtcgggaggctggggccagtggcagtcgcttggcgagggtgggggcgtagcgctgcggtgggaggaggcggctccggccctggtctccactctaggccggggtggggggcgcatagcggccgccggagctttcagcagggggcgctgctccgggcgttgggcgggggtggggtgggccaggagggggggccgcgggctggccgcgcacacttcccccattattaaacactatgttcaaaaggcgccgggggacttcccggagccacggagcccgcgccgcccgcccgcccggcccacggagcccatggacctgagcgccgccgccgcgctgtgcctttggctgctgagcgcctgccgcccccgcgacgggctggaagcggccgccgtgctgcgagcggcgggggctgggccggtccggagcccagggggcggcggcggcggcggcggcggcgggcggactcttgcccaggctgcgggcgccgcggctgtcccggccgccgcggttccccgggcccgcgccgcgcgccgcgccgcgggctccggcttcaggaacggctcggtggtgccgcaccacttcatgatgtcgctttaccggagcctggccgggagggctccggccggggcagccgctgtctccgcctcgggccatggtcgcgcggacacgatcaccggcttcacagaccaggcgacccaaggtacttacgcctcttctgtgcccgcccatcccgtcaggtcctgggctgagaccagccccggagccgtgccgcagctccgttacatttggagccgcggccccatgcggcccaccctcaggtgatagaaagaaacttcgccgaggccaacactctccagcccgctgcacctggactgtggcgagagtcgcggcagctcccggggcccagtcccagagggctgactggtccctctcccaggtctccctggccttgcaggccggctggtcccctcgaggaggcaggcggaggccaagattcgcttcttggggaatggtctggagtggcctcggagccctcagagaagaaaggagggcaagagctgtgttcccgggagtcacggcgagagggactgcacggtggtgagggtgatggctccttccttgcagcaatttctgcagctcccagtctcctgcgggccacacaaattgggggaagcccagggaaaactagggcagaggcaggtatcagactaaagtaaatggccctggagaggctggtggcataaccaggtatgaggagtgccctgctcagcaggttggtctgggtggtggtggtttgtgtgtgtgtgacatgtgcagctatgggtgcctgtgtctggtgctgggcccctgggagagccagaggtcaaggatcctggtggtgtggggaggagaggcctgctggggaccctgcaggaatgcagg

SEQ ID NO: 36660 - DNA, 2451 bp, Homo sapiens
gtaactagatccctctggtggatggtatatttgagctgcaccagagtcagagcccactgtgggcttccgagtgcccagaggcagctgctcccacagcacggactgcgcccgccaggggaggccgctcaggggccagggcaccacaaggcgtctcctgagagacgtctgaggcaagttatgggcagtcacctccctgctggagcttcatcttctgccctgtaaaatgatgccctttccagttccaaggttctaggattttaccttgcctcaaaacccactcagatagcttgaaggcagagcaaatgtgatggctcctggagaaggtcctctcccaatcccagtcccagagcctcatcttaccggtttcgcagctcttgcctgtgcatgtgcatgtgtgtgcgtgtgtccattttactcctatccttaataggtgcctcatggatgtgctttgaattcccctgggctgaggtaggtgtggggagggcccgcaccttgagggtggggttcagctccccagagccaggagctggctgagggcactgcccatccagctgcagttcctcctgtgctcagtggggtgggcggagccacactcaagctgagactgtctgagagacctagtgctgggaagggctctacctgctgctggggcctctgcaggcagaagggtaaaggcaaggctgtgcctggttggtcacccaaacgggggcctgggactgtcccagaagccctggatgaggcaggcaggactgtcccagaatggactccttgggtcctcaccccctcctcaccaccatgcccatgtctggctctgaggtccccttgcagcttcccaggggagtgaccctggggtagcatcagaagagcttgtctctctcttcctttttgtggtctggagaagttaacataaagaagcaccagaagggaggacccaaaaagatgtttatttctaagttttcagacagcttggcatcttgtacctggaacctcctgaccatgtaggctgcagcacagctgtcttcctccctctgtgctgttctggactttaatctgtgtgcacagcttagtgcgtcacaaatagtaactgagtgaggctgttgtgaaagaagcctgtttttttcaggagggccaccgtcctagcctgaggagacacctggtggacacagactgcagggagagggctgaaagttggcctagtgaatcagaggggtgactgagggcctagaagttgccgcgtgagctctgatcatcattaggggtgctgtctgcccatgacctgcaggtacccaccttaaccagagcttggcttgtggcctgcaacttggcgacaggcctttggctgggcaaagtttgggctggtgcttcatggcggcaggaccaattacagcagagcaacccaggatgggtggtcattgaaaaatgggtgtgaagtcactgaaaaatcagactgagtttcaagttatgctcacagttgctgaaaaagcaaaaatatgcccttagagcagcagagcagcgtgcgatggtccacttcctcctgcctctgcagagcttgcaggcctcttctagcatctgtgcatggtgcgcatgtgtctgtgacaacagaaagggtgggtttctctcacacgtttccctgacagtggcaagggggctgcagcggtcacagaaacttccggagagaggtgtttctgtgcagtcaggtgaatttgttggcaggacagcttggtgtgatgatacaagaagtacagtttcactctttttttgtcagatgaacttccttctgctagtttagaaatgcttcactccagagagggccacctgatagaagctgtattacagaaacttttaatctcttttctatgtcagtaaggggatgctgaaataaactgtctagaaaaacaagaagcttctgtcacacccaggccactttcggcagagtggtccagagcggccagggcacggccagctgctttgcatctgcattcccgtttcattaccttttgtgttgtgggccaacaggagtgctacgtagtgggggctggagatttgtccaggcaggaggtgggcaagtggctgtcttctctgcagaatacctgcactgctccatctgaccagcagtggcaacagccacaaccagttctgcatctagctcctgcccagacctttggctgccagaatctagaaccatggctgaccaaagcgagacttccgagtaaggttcgttaacaggcatcctgctgaattagaaggaaacaggaacgaatccaaagcaaacggggctaaacttccctcgaggacatttcctgagctgcaacatgggaagcgacagcaccgaagctggtgagctggtgcaactgcacacaccttttctctggtttttagtactcacaggtcatcctggggagaccgctcatgggctatgggcagcccatgcctggattttttggtgaatga

SEQ ID NO: 36661 - DNA, 752 bp, Homo sapiens
ctatttgcaggtattaattatctaccaatagtgctgataacattaggctctctctaagctactccctatatttaccaccagcaatcttttcgattgtattcagggaataggatagggaacagtcgctatgcagttactcagcacttcctcagagcagggaacactgctgagaaatctggaaagtcagacttgggttcatacctgtcaggtctgttcctctgctgcagggcatgctctcgcctcaagatcactggaccctgagaaagctactctaggaccctcactccagtacaagctacagtgtgaagtcctatgataatggcagtcagctcaaaggaaagccagacagaaaagacctcatctaatacagtttcctcaacaagaaaagcgtcactgtacgcaccgctgttgctttctgtctgacatttcaaagactgtttccatgaagaacgtaccatttacttttctgtgatgcaattacaacttgaaatgtttccaatgagaagtccagcttgataagccctcagcactgagcaaacaccatccccgtacatgcagttaaggcagtgatttgagcaggggtgatcaacatggattaagggacccgacacccacctcagggtatcaagagacaaatatgtccaagtaattatggggcacacactgtccaaggcatgtgctaggaacctcaacaaagagtggtgtcagtgttcaagacagcagaacagtgaggagtctagacctcccgtatg

SEQ ID NO: 36662 - DNA, 1105 bp, Homo sapiens
tgttctttaaaaataacatttaaaataacctagttaacaaaatgacattgatgaacactgtggtaaagtttataatgtacactaactgatgtagggctactcttctctgaatgctggataggaaatgacatttcactcactcatactagagaagaacgctaatgccccagaactcaagcctacaggaaaggatgtgccatctttgccaaaagggcagcaggatttgaaatatttgaatattttggttcctagaatttttcagagcttacaacaacaacaacaaaaatgtgtgtataaactaaaggatacagaaaaccagtttctatctagatagggcaggatttattatccactgcttggactagcaaacttcctccatttgtttccgtaagatttctactgaagcacagacattacataatctgcaaacactgcaaagcctcctaaaaggcatgctggcaggttaaaaggtcgttgtctggatgatagtcaagccacagagaaacaggtctgtgggggccagggggaaatatccagctggaccagattcccagctgggaatgatctctgacctgatcttcttttcccttgataacccctctctttgtgtaaccatgaaaattatgccgatgcaagtagctggtatgaacattagttatgtccactattcatggagtataaactctagcagagcccactgatcatctcccaaagtcttctgttgagtgttgctctctcagttgggactttctctttgtgggaagcaaggtactaggaatcaccatagtgatggtaagggcaagcctgggcgaaggcagcttctgtgagggttattgcaagaggaggcaggggtggcactggggatctagagggaagaggctggctactaggaagtgaactatgaacccaagcagggaatgaaccaataacccaaagaagaaagaagacaggtaactaactactgcctcattttcctttacccaaggttacacacactgggtaggttatggggaaaaaaaaaaatcagagaccactgaagtagtagttatttggctatcagaaggccagattagagccaagggattaaaagatcagaaaaggaaag

SEQ ID NO: 36663 - DNA, 1693 bp, Homo sapiens
taaataataattgaatcaaatatgtatgatggtagtaagtcacaagtcctatgacggggcagataaaataataaaagaggactagaaattgctaggggtggtgggatagttttaaatagggtgttcaggaaaggctttgatgaaaggtgacatttgtgcaaaggcagttagggggtgagctaagagatgcttggaaaaataaattttgtggggagagggaagagcatgtgcagaggccatagaaagctaaagtggtgtgtttgagtaagagccaggtgaacagtattgctggagcagagtacttgaagaagagagcagttcaagtgtttactaaaatgtcctcaatgatttaaagaatataaatgattaattcagttaataccaaactagaagaatgtaccacacagattccagactggttatgtaacccatagtacataaggaacttcagattgatcaaatcagctggcagaaacaggaaacaatccattacttttataaacgatcctttactgtgacccatgttaagcaaaactgcatgtaagggaaactctaaaaatatataagcaaccacagggttatatttgattgatctatatcaataacaaattgagaattaaaatgcagtctgaaataatgggaatggaccaaaacaataaggaagttctaatatgtacattgaatgcgtcactgccttgtaaaaatataagaagaccaaagaccttatcacaactaatacttagttgatgagactggttttcctctcttgcctttggagaacaacaattattacctgctgggtgacacttttcctagatattgtaatgataatttcaatgaaatttgcagtccaaatttgataaatcacagtaataaaaatttttcattcttcatattggtaaaaaaaaaaatcacctaagtcaaggaagtatgcctaatttgataacacagctgtgtggtgaaggtttccaaatctgtgtacacgaccaaacattttcttatgttactatctcattaaaaaaagaactcccatgttagccaattcattctatcctaagaaaacattttcgcatatttcacattctcttctgttatctaccagaatgaacttttgataatgaagcacaaccgtgttttcttgaacagtacaggaaggtaaatatgcacactgggaatttttatactggatacatttgcaggggttagaggaaagtattttgatgcttatttttcttgaatttattattattgttgtaatcattttttagaaaaggagctaagaaacaatttgaggtatggccacaaggtaagaagtatggtgcttaggtgtggattgtgcacaacctgtttcattaaataggctttaaaaaaacagtaaatcttcaaaatccttgaaagacttcacctgtttatatagcttattacagatgcatccatttttctgggagagcagcaatggtgcctatgtgttatgactaagtgaagctgcgacaaatagtacttcaacatcttcaaaaaaacattatcactgccaccctgcctatttgtttattagtttaacccacccaatgtatttatggcagggtgcttctccaccgtacaagcagaaaacaaacaaaaaaatagcacacagtttctctttttatgtgactgcaatatttgtaaggcatgtcttagccaacatgcaatgtca

SEQ ID NO: 36664 - DNA, 835 bp, Homo sapiens
ccaatggcatcaaagtgacctaccctaagaataattgcaaaaacaaaggtaaatcctccctggaggaagataagattctaatattgttttactaatttttcacatataatgtcaggtattcagttaaaaaaaatacttgccaagctgtgatggtcaattttacatgtcagcttgactgggccacagggtgcccagatatttggtcaaacaatttggatgtgtgagggtgtttctggctgagattaacatttgaatggtacactgagtaaagcatattgccctccctaatgtgagtgagcctcatccaatcagttgaaggtctgactagaaccaaaaggtttaataaaagagaattccttctgcctgaccaccttcaagctaggacttttttttttttctgtcttcagactcaaaatgaaacatcagctcttcctgggtcctgaggctgccagcctttggactggaattaaaccatcagaaattctggctctcagacctttggactgaaactacaattacatcattggctttcctaggtctgcagtttgctgactacagatcttgggatttgtcaacccccataaacatgtgagccaattccttataataaacctctttccatgtgcatacatcccattggttgtttctctggcaaacctggactaatacacaagcatacggatagacaagataatataaccaaagcaaaggaaaaagctgaagtaggaatgcaaccacatgagacttagatgttggaattatcagacacaatctttatttattttcatgtcaaatatatgatctctgaacttttataaaagtaatgataatttta

SEQ ID NO: 36665 - DNA, 669 bp, Homo sapiens
aacaccacatataactcaatgagagcaaagacttaatgcaacacagtattcctagcacctgggataaaagagtgagggaataaatactatctccaggtggggaagtgggtgggttgtctgtcccacttactatttcacctcactattacaacaacctcttcttctttaagactcaagccatctatttccatctatcaactttttagtcactcacactttctctgaaagccttgacccttaaatgacagtttcacttgtcatgtcatgtcaggacatttcaaaatccagttggactgactgagccaaaaactttgtcccataattcattattatgatgaaatccaaagaacttcacctacattaaacttaagcaattcattcccatgactacaccctggatcagatatgcgtatcacagttccctgcagggcttgttaaaacactgattgcccaacccccagactttctggttcagaaggtcagggatagagcccaggaactgcatttttaaagttctcaagcaatacttctgatcctgacaccaactttaagaaccacaggcctagtatcttttcatgagctggaaatgattagcattcaaaacatggtctcaactctcaacagaaaaaacagtagtcaggaagcaggagacttcacttccctctgata

SEQ ID NO: 36666 - DNA, 1936 bp, Homo sapiens
gaaggcattaagttatcaaaaagcaaaatattaaaatataaaattttagatgggcacccactgtgttgccctgattatccccctagaatgctacatgctggaaagaggggccttagcaggtttctaagtctttaaccttcaggtggaaaaatggggaaacacacaagagacactcctacgtatagtttcagaaagaagtttaattaaaaaacagcttttgagaataaacattctggagatgcttctaaatcttctgggtttcttttggttgtatctctttctccatacagatttgttctttcaactcaaggactatcaactctttttttttttttgagactgagtctcactttgtcgcccaggctagagtgcagtggcgccatctcggctcactgcaagctccacctcccgggttcacgccattctcctgcttcagtctcccgagtagctgggactacaggcgcccgccaccacgcccggctaatttatttatttatgtatttatttttgtatttttagtaaagatggggtttcaccgtgttagccaggatggtctcgatctcctgacctcctgatccgcccgcctcggggtcccaaagtgctgggattacaggcgtgagccacggcgcccggccaggactatcaactcttgtgtttggtacacaggacacaaagcaggtgtccggtaactacttgcgagggaagatacgaattaaccaaggaataaagtgttccaatctgcattctgtcttgcgtggggaacaaaaccaaactaagacccaaggatgagggtttacggttaaggtcttcagcgtgaataaaaggcggcgtgagcactaaacgccgggggcaaagaacactcccggcccagagtttgacccctcctagcgagttcttcccggccagctgcccaactttttggcctctactcctccgcgggggcaccataagactccctacaggtgggctacacttaggggttcaaatgctgcattaccgcgctcgggtgagcgactgcccggcctgcaactcaagggactcccaggccaagtggctccgaactcgcgagctgtcggaacagtattatttttgctgctacgggccatctggcccagggcaacaggggctctgcgaggaaccatagagaagaaggggcgccagatcccgcgtgcctgcccacccgtccttcctttgggcagtcaccctgagctcggcaagctgtacctcacctgtccacctggaaggctgcccgctctccctgagggtcctgggaaggcggcacgagaccggaagtgcccccctcaggtgacgtcacagtaccgcgccggagctgatccgggaagccgatgtcagcctggcgcgcggcgcacagctggctgggagatttcttactggcttggagccggtggtccagatcagagagacctcttggagggtgtcggggttttcctttctttttcatttgaattttatccgccttttattttctgtcatccttgatgtgcttctggcttctggcttccctttccttctctctcatttgttccatgtctgcccctcttttctccctcttcccatttccctctttctgcgttactagttgcatatcttccccacatacacaggaaagttgattctcatttgatcatgttcataagcatgatcaataaagtatttttttaattaaggtgttgccaactttaagaaaattcagagaataatattaagtatagagtttatttgggctcagtgcttgagaatggccactcaggagcttagattcaagttgccttgaatatacactccaattagcagcagtcggagtaggtttttttttttttttttttttttttttgagacggagtcttgctctgtcgcccaggccggactgcggaccgcagtggcgcaatctcggctcactgaaagctccgcttcc

SEQ ID NO: 36667 - DNA, 1210 bp, Homo sapiens
cctcctcggcctcccaaagtgctgggactacaggcatgagccaccaggtccagctgtgttttaactttttttgcttggctcatccagccctgctctgttctccacccatatcagtctctttgcccatcctccccatacggacacccgagtggttgttccatttgtttctgcacactcatacaatcctctgtaaacatgggtgagtgcaaacagagtcatacaaagattttgccattgtttgttttatacaagtggcattgtattatgcatacttttatcttgtttttctcacttaattatacttcacaaaaatccttctgagtcacttggtacagctctaacagatttttttaaaagctgcatgcagaacattccattccatggctaaatataatttattcacacattgccccatttgatggcatttgccctctctctttctggattttttttaaaccacacaaacaataccaaaacaaacatccttatgtgcctatcttcacacattactgcttttattttcatgggctagagtcccaaagactaaaatatctgtgtcaaagggtattaagtattttaaattacagtagatattgcctgatggctctcgtttccaccagcagctcaggacagcacacttttcctcactggcctgccagcaacaggtgctatcactgttttccagttttgcagtatgatgggtaaaagcagataaatatcttgttgttacattaattcgcatttcttgactaccagtgaattggagcttattttcatacacttgttggacagtcattcttttgtatggtgtcaggccatggctgaagcccatgctgactttggtcttagggatttcccactgggtactctctgagtttctgaggacctggctgcagccactctggttacatcaggaggaaaaggtgacggacttatctcccacagcctacactctctcagaaagttcccaacacgaagaaatgataaatgtttgagatgatgggtatgctaattactctgatctgatcaccatacattacatgtatcaaaatatcactatgttctcaataaatatgtataattattgtatgtcaatttttaaaaaagacagttaaagtcatgaagatgcaaacatggaaagccctccttttcaagaacaggagtctcttctgtatttggagaagaccaaggaccaaaaaataaaccactc

SEQ ID NO: 36668 - DNA, 4919 bp, Homo sapiens
gaattcacttgtttaaacaaagcatctcagttttataatctcaagaagtttaaagcatgagatttttagaaacacatgaaaatgataattaaaggaacctaactagggaaggttaactaatgcttctctctttttgatgattgtgaaaactcagtaattccctgatccacgatggatacggaatacaaatacttacagtcacatccgtgcctggtgcaaacacacaagttcatacctcagcggacacacacacatgcgtgtgctcatgtacaacatgacttacctggacatggctgcagcaaactcctcagagttcttggttttcttcagcaaggctttgccctcagggttgaagccatacacctctttcagggtgcactggctggtcttcaggatgaagctgcagagctggggaacctccagctcaacctgagaattcagggtagcagagcattgaggttgtctatcaagaatgagaggtggcccctgaagcccagggcttaatctctaatcagagcaccaaagggaatggtgctgggaacaccactgcctgcgcctcaacaccacatgccttatcaacatgcctcctgggttctctgtgcaccaacctagacttagtcctattgctgacgttttccccctcccgggtaacacatttcttaagtttgcccctaggcatgggaaggaggatgtccttttattggttctaaagttactcactttaattataaagagctgtggttaaatagaagcgctgcagactaggagtgaaagtgaagaagaaaaacagaaagcaggaagagggccatccttcgtttccacagcaaatgtctccttaatgtcacccaaaaaactggttatatctattagggcctatttagagctttgcatatagctggagtttcaacggattcctacttattatccagcactattcaaataactttatagaaatgttgtacatgtgtgctgttcaatatgggagccagtagccagggtggctgttgagcagttgaaatgcagctaatgtgacaacgaatatgaatttttaatttcattccatttaaatagcccaatgtggctcatgtctaccatattggacagcacatacaagagctacggtactctctaaaaaaaggtgactgctcagcttgacttctcttccccacccaaaccccaatagcagcctgtagatctgctccacatgtatgtaacatgagtacaaccagtctcaataataagcaaagttttattttagaacaaactgtatgtttatatttttttcttctttccattcatttttcagcaacagattctgtttgacttaaattataaaaactgcatttcacagtgcgattccgagttgcctgcctcccatagctcacctactgggcctctctcacgctgaaatctacagacccacactgctgctaatctagatcatggattcctattgcatctgggaagttaacgggaaaatacttctgacttgcgaaatttggtgggggcagaccacatctcagcaatgtggctgacttacaaacagaggcaaagtcccagtgctttgatcagattacaacagttctgggatgttctgcgtttgctcagtacacaccctccgggaaggtcgcgtgttgggcgcccgctggaacagggctgggggaaagctgtgggctctaggtccctcctgcctgcatcctccataccttgcagttgatcctggtggcacttcttgaatcagcagtcccagggactccactggaactctcagcctcatagttgtatgtgtacttccggaggtgcttgaatcgggtcgcatcttctaacgtggggagaaatacgtcagccacatagcagaaatagctctcccaaggacagccaattctgggcagagaggggcagtggcatagagaattaaaaatggtaattcaactcaaattattttttaattgactttatacttaattttcctttatagatttgacttctccattatgtttttgctgaggctaatgtttaaattggctggcatgtcttgaatatctcatctgaggcacagggaagggagtgacaagtgtcaagtaatggggctcagaaaatctgcatgagagaccctctggcaaattaagagatgacaacattacgcaaatagtactatctctaatgcttttttagcttgaacacgccgtaattccgtgactctaagactaccaaatacttaaggcaaagttcattaagcattaagcgtaactaacttaacaaactcctagaaaagaatttctggaggtttccactgtagttgagaggaattttctgaacaattgaagaaaaagaacatctgggtcctgagtccagctgcagtgatgacagacggccactagatggcggtgctgccccatcagaagtccgccccgcggctccagcacacagggtcgcgcttggaggccagttcctttaacccccaggggtcaggtaaataggaagggggtggaggttcgatttcttcacaaaggttaaagtcagtatttcctcaccctcacatgcttcgaatcaatgactagtcactgataaacaggacagtgatgtttcttcaaagtgtgcacaggccagcggagagacaatcccttccctcccccgcccccaggctgaacttttgggacagaacagaaggccaggtagaagagagttggcatcccttgggtgtgggcagaggctcagggaacttgcttcctggggtcagagcaaggcacaccacgatgccatctcagccctgtagagtgggaggccctcagggacccgggtgtaggagagtgcacggggctgggcgcccttccacgccccatgcgcagatgccttacttggacagaccaggctgacattttccagcatttcctcttctgtaagacaggagaaagaaatctgtgagcttcccacgtcttcccagcgggtgctagggcccgacagggggaccaccggcacaggtttcacctttcaggagggaggcaggctccggagaccccctcctcagcccctccatcccgcgccccccatcctgagcctgcaggggccgccagctggtccaatccccccactcgccctggaccctgtggctgccctccctctggcctaggcccaggctgccccggccaacctcgtgccgccggctccctcccgctccctctgcgcccgcagagcggccgcgcactcaccggccctggcgcccgccagcagcagcagcagcagcgcaggcagcgccagcagcgccagcagcgcgggcctcggcgggtccatcgccagctgcggtggggcggctcctgggctgcggcctggcctcggcctcgcggccctggctggctgggcgggctcctcagcggcagcaaccgagaagggcactcagccccgcaggtcccggtgggaatgcgcggccggcgcccgcaccccatttataggaagcccaggctgcaagagcgccaggattgcaaaaggtccaaagggcgcctcccgggcctgacctgtttgcttttctacactggcttctctttgagccttgaagagcctcggggagggggcccacctgggatgcagccgcagccaccaggggctgggtcccaggtgggttcccttccccaagcgtcttcagtgctctggcgcggcccttcctgtgtctcagtggggccatggccagcgcctcagggtctgagaagcctgccctgaccaggggtgccttcttcagatgacccaccatggggacaaaatctctgcttctcctggactgaattgggagccacgaggagaaccagtcctgagcgctgtcttggtggagacgtgttcccatcggttacttcttttccattttggtggaccttggatttgcacccacaccctaatcctgatcagaatctgtggctgcggggttcagcccgtgctgggggaggagagagaagggggatgcagggaggtctggtgagtgaccagtcactgcccctgaggatgggtggcctgcctggtcccagcaggagtccaagtatctgtcttcaagaaaccccagcgaggagaggcctctggggaagagcaacctccgagggcgcacccctcttgtgcaaagtgttcttgggttgttgagaggaggatttcctgcaccagcttctaggtttcctccagtggtggggaggcggacgaggaaaagcagagtagtggacaggacacgtcatgttcctcatagacatctggaaccttctcatgcatcgtttccttctcttctaggcactgcccatttcccaccggaagcttcagccagcgctcgctgcctctgcccagctggagggaatcagcggtagtggaatttcagggacactcggtttactaacccaggatcactcagaaggggttattgatgggatggcactatgatgagctgagtgaatgtctgagcctggctgtgtccccaaggcacctccactctggttagggagacaagctgtgtacgcaggaaaccgctagtgagcaattgtggtaggatagagggggcgacaaccaggtaggtataactgctgggggaccacccaggaaggcgagtgggaggcggccaggagcaagccggtagagtgcggatgggaagtggacagcgcctgttgcagaagtcagtgtgtgctcattgttacaacttgtcagctttgtttgaattatgagataaccccagatgtaacaagctactggtgaagactgatgattccagaaggatcaattctgaaacagtaactatgtataaagacccagttccctcagaggagactcacagaaagaccttcgcctgcttcctgcacctgggctccacacctgtccttattcagatattgtcattagccatgaactcctatgggcagctaaactccctccagtgatcagttgctcatccacag

SEQ ID NO: 36669 - DNA, 1717 bp, Homo sapiens
aagggtcttggccaagttcagggaatcatggaagctaataaaggaccccagcagaccaatattctgagtttagtgctgttcacatactgaagtaggtgcttagaacataatttgctgaatatgaatgaatgaatctgcaccattcagctataccccattttccaggatatttatgcatagcgaccgtgatgcttaaataaatatttccagtgacataaagcaaggaaatacagtctataccaattattcccagccatgctgctccaaaatctcatctggcaaatagggatcagtattgacaacgattaattagcctatctcgtttctgcctatgacagcattataattgcaaatgatgcccagaagctggaaagtaaacttcaaacattgtagatggaactgtgcccagggtggcctgtttacccagtgacagcatgcatgtgtgagcacgtgcacacacacacacacacacacacacacacaaatgagaactatcaggaaagaaatggcacatttaggtgaatggttcaggaggaagatgatagggtgagccattgtcaaccaaatgtaggcattccagatggatgattaacccctgcgagaagcaaaaagaaactttccttctccatcattctgctacccaagagataaggtcagaatgttgagtcgcagttcctcccgggagagaagccagaagtcagcagggttcaatgtgcagtgaggagctgcgtaagtgaattatcaccctcttgcctatgtggatgtcatccttccacccacccagggctggctgcagccccacctactgcactgaatctttctctgggaacagcccagttagacttcatagcttgtgactctgattccctgtcattcagtttctaggtaggacaacgatgatgaaaggccttcatacaaacctgttgttgtcctgaatacatttttctcttatagcattatttgatttttcatgtgtttacctgttgccttgccaatgggagagagaagctgggagagcaagaaccatgtgtagttcacagattggtaccccttgtcctctcttcctcactgacacccttgctaggccaggcagatggtagtcaagcagtaaacactgtgattataatgtaatatggtccatgtgaataggtttctttcatatgcacacttcatttttactcttgagtgttgctgcttatgtttacatcttcatttagaatgcacagtgaacttggagctgtaggagagaggaagggtctgggaactggggccatgggacagtttctacggctctgggtggcagtccctcatctgtgtgatgagaagacaggaatggacggtctcttagccccattcagctctgactactttgattctatggaaattttggggctgaaaaaacaaacacataaattattttgggctcaaacctcatggctattaggagctgtggctgaggatccagaaccatcaagcaggaaggattttatgggaggccatcgacctctccaaagacctgtgcccacactgcccaagaaatagaacccttcactcattttacacagatttctaaatcagatgtgggcatgccctcctgaggatgctggggcacagggaattgcaactctccggaagttcttccccacgtctagctttaggtttcatatttgcctgaccttgggtaaactttcttagatataacttagcatttcttttg

SEQ ID NO: 36670 - DNA, 1282 bp, Homo sapiens
gattttgaatttttaaattggagtgcttggactttttattattaagttgtaagagttgtttttgccttctggattcaggtttcttatccgacatagcatttgcaaatattttctcttattctgtgggttgtctttctacttttctttaaaatgcaaaagtttttaatttggatgaattaatgtttttcctttgttgcttttccttttggtgtcatatgcaagaaactattgcctaaaacatggtcaaggaattttactcctgtgttttcttctaagaggtttatagttttaggtcttatgtctaaggctatgatcccttttgagttaatttttcatgtataaaggaatccttttgccccttgctgttagaaattttcaggttctgtgagcctgtaagtggccctgagttacctcttctgcctccttgctaatagggcgtgacctgttcccaatgcgggtgacatcagccctattgctcaatgagcagaatcagtccttattagggactgttcctccctggggcttttcaaagaagtgaccagagctccagtcactgagaggacaggccccgaacccttgccttttcagagaaaaaaatagagatattcttggtctccgaagctgaaatcccaagcttcttttagagtctgtaatgtcctgataagctttcttcccttttcattcagaaagaaagtattcagtggctagagacataaggcttcctctgtatccaaaacagcttaacatgttttataaggaaacatacaaaactagcaacaaatacaagtttaaaaaagtgacatcaagcaccttggaatgattgcttttggtgtgaatgagaagaataagagttgggagtggggatgcggagtaaggatggggaactagaaacaagccaacaaaatgagatagcacccttcacagaccaacaattacagtgtgcagatgttgaagatggtgaatacttcatctctgctcctcagtggcagcaggaaattggcctatcattgtaaatatatatatttgtaaaccctagtatttctcaagcaccaaaaaacggacccatcattgtgatagttaactttcataaattatctcattttacattccaaaaaatctgcaaaatagattttttaaccagccatcttacaaatgagggagccagggctaagttttacataactaaccaaattctattgtcttcattatataagtacaggtacctagaagaggcagttatgaatatgtaagatcaaatgaccaacataagattgagtctcag

SEQ ID NO: 36671 - DNA, 1092 bp, Homo sapiens
agcccaactttttcacttgttgtcagatcactgaatttagtgaatgaattaattttgctaatgttaattatctgtaagaaatgtattaccctaaataatcaggattaaaacaagcccatggtgtggctttcttttttttttaagttgaggtattattacacaaagaaaaagaagcaattctaaattatgtatggaattaatcttggttggacttgggtaagccacaatgggaaattaggcgacagttaatcttctgataaatacatctggatttagactacacaattgtttagaagttatttgggaacttagaggacaattcctctaggtaaattgtttcccctaagttcccagcaatggggtgattctgaggctaaaacaaataaaaccccccaagccccccaaaactgtcttacccacaacaaaagagaagcacaacagcccaataattttaaagaataaagctagatctgcttagatgcaaatttttaaaaatcagattgtatagacacaatatgatcaaatatacaattagcaaagataagcctctgaactgcaataagccaactcaaaaaaaaaaaaaaaaaatacacgacggcccagccggagataagagagtcagcccagtattttctctccatgtttttaagagcagcagttatggtgacagaatctaccacagggtgatctatgctctccacaccgatgacagaagtgacattcactgcattgcacaacaaattgttttcaacttacttgtttttggacatgctgctgcagtcggagggaaattggaaatcttgtacacaccttataaggagtaacatatgacactgcatttttcaggaaatcagttggacctcagatttggtcaaagtacttctagatcccattgaagtggtgatactgtgatgctgagaatctgctctgagcacttgtttagttgatattggggcagtaaaccatatggaaggtagattctgtcactctaaagattttctcctccttttcatccagggttatatgactattcttcttactacaagaatggcaaaattacagtggaggaaactaatcattaaattttttttt

SEQ ID NO: 36672 - DNA, 2469 bp, Homo sapiens
catttacattaggtatttctcccaatgctatccctccccccacccccctaccccatggcaggccccggtttgtgatgttccccgccctgtgtccatgtgttctcattgttcaactcccacctatgagtgagaacatgtggcgtttggttttctgtccttgtgatactttgcttagaatgatgaaaaccttatgtaattcttaataatcatactttcttcatactctatgcgccattcattaatgggttggcactggaaacatttcccaagcttatagggaattcttcaatgaacatagaggagctactgagagctaaacactctttggttcctgcctgtgattgagtttttcccagaactcaaagagagaatttcagaaaggccaataaaagcccccaacaggagagtttttgtttttgctagttttcccaaacagctggcttccctaaggctgtaatttgtaagcctggtttctaccagactctaaatccataatcaatgataagctatcaagcatatgccctaatttatattactttgggccttttctagccaaaaccaacatccctggggaaataccaaaatacatctgtcctaaggtagataccttatgtctggggaggtagggggtggacagctaagacttggtattgaacaggactgagtaatcgtctaatgaatgaatgagtgtatggataatcaaagtgcaaatgcctgctatacatatgtaggtattcagaatattttatatgcatttatatgaggctcttttccctgatgacctaggaagggaaaagacggcaataacatagtcttgtgggtacttggggaagaaaagtcaggtggagagagagaaactgaggggagcaaacagaaggtaaggagagaagaataaaagaatgagagggaaacatctggccggaaaagcaggaaggccagcagctctgaatgcagatcacaatctttgttagtcatctttatcttactggttactttgctactcaaagtacacatttcctatggtggaaactcccttgtttacttattcttcctgacccaggtttaaaaggcctgcctaaccatctcagtaggcttttcctagctgatatccttctgagctgtggtagagaaaggggaagcagtgccctcatggctcctggatttacagttcctgaggaagaactgacaaatagaggaagacttccctaatatcaaatgaagcagaaccttctgggcagaaggaaaacaggtgatgttgcaatgacagggctcacctttccacctcgtgtttgatgagggtttgagaaaagagccacattctttccaaaagtcaggtcagaagcctttccacactttggtttcccaattcagcacccgtaatgtcaaataaaacgaaggcccttgccccaagtgaagtcatcagcaaatatctctttgctttccgggggactgtgttctctcacaacatcttttggaattatcacttcatactgaaacaagggtttgatcttttcatgagatgtatggtgatgaaattaaggccaggggctctggggacagaagagaaggctggcgccactcgtatgccctggagaaacagtgagatgaagagcacagcctctagagccagagtgtctggatctaaaattggctctgccaacaagcatgtaagtcacatagcttttatatgtttcatatgaaaatggaataaaagtcttatctataggaataaataagtcaatagaagtgacgcacttaaaacagtgtctgcgtatagtaggcattcagtgaggtgctggctattactggggtgtgagaacagaaacagtcatttgctcaatcccaagtttattttggtactttgtttctttcttgtaataaggaccagtagtttcaagaatcctagaacgttagaactgaaaggaacgttcattttatggctatgtaaggctcagagagagtggagccctccaaggtcacgcagctacctggtggcagtttcaagaccaaacaccaggcttcccattttctggaccactctccactctaccaccctccttccttggaggacgatgtccaggaccaagataatgctgttagggcaatgataacaactggaactgtagtagcccctccaacggctcccttgtcactacaaagacaatcttaagcgggttcattcattcattcattcactcagcactgctttttaagctattctcaaacagtacagaaaagcgaaacacagttctcattcttaaagagcttctattgaaattagagcaataagatatgaagataaaattatacaatagtacaatcacttacattatacaatatttatataattatattttataaatataaatatattttatatttataaattatacaataatacaatcatttatgttaagtgtctaagtattagacagcttacatatattctatctaatcagttgctagtaa

SEQ ID NO: 36673 - DNA, 968 bp, Homo sapiens
gcaagtgatagaagtgacatttgaatccacatttgtctgtcacataagtctgtgctcttctcattatattacccagcctgatgtcaccctgtctacaaaaacctactttcataacctctttctgccatcagcaaagcagaggttcatcttttttggcacactgaaaagactgtgcttagagcagcaacgttgtaccactgtgccgcaggattgaactgcaggtctttagtgacattaatgatttactgttgcttatctcagcttaccccaggtaatttgtcaatcaatacctggcctttggattttctctatgtcatttctccctgttcccaattttaaacatgtatttaagattgtctagctagaatttctctagctctctgggcagtcccttggcatgaaggggttatgcaatataaaatgctcatgaatcaatatttcacaggatccctggagttcaagttggtactggaggaaaatggcgattttccagggtgaagcccaaagtactagttgctagaaaaatgcttctgaggcctgaaaataatcaaggatttttgttgttgtttttgttttattttttgtgcctatcaaagacctgtgtataacccaggtctgcatgtccatgaagcaagccttcttttttcactccaatccagcatgctcactaccccacctttcccctcttacagcagccttgaatcacaaagtagttgtctatcagtcttgattgttttatgtatttatccagtatccctaacaaaatggtaactcctgtatcttttcttttgtattggtatcccgcagtcctctgccaagaaaggactatgcagtgaccattgcttccttttaaaattgtggcaaaatatacataacataaaatttaccctttaactattttaaactatctagttaagtggcattaagtacatttacattattgtacagctaccacccatctctagaac

SEQ ID NO: 36674 - DNA, 2192 bp, Homo sapiens
aatcccagatccagggagccaacatctttaagtagacttcttcagatggcctgtggggtaccacagagcttacagaacaacttaagatcactccaaaccaggtaacatttcaataaatacatggatttaaggccaatagaagctggcttagcaccttgctgatcctcattcttaccagaactcccgtctaaccccaggtaacttcacaagttgttagaaaccatccttcaaagatctgcctctttccttctgcgtggcagctggagactcctgcttggtcctaatcagtgcaggatcaacaacagaaatccgcaaatgtcagtcatttttctgttttcactacccagttgttttctcttgagtttaactgcctgaattttagtgtctgtgataagcactcaggggtaatatcatacacctctggaagccctctactgattgtgggctatgatctgcaagtgatgaaagcaggatttggccaattaggagtacaagaatttcttggcactgccagagcttcacagaagatgtgtgctgtgcacattcccatggagctggcttgatttcacaatctttcacagcctattgtaatataccacccatctcaaacaaggtccctgtccaagtgtgctttaatgttttatgaaatcagctgcaaatgtcaggatttaaaaatccaaagttgaaacccacattttattcttttttattctgtaagatttagcatgtcaattacatctttaatcataaaagagcatgacaaacaaaatgtgttgtgatgggagtatgaaaatttttttctaatacttttatattagtattttatattttatatttatattaaatgccctatgatgaaagtatatttgtgaaccaaaaaatatgtatgtatattaaagaatcttgccaaatatagtgggaatttttggggctttgtgatgttgatgttggatcttcgtcactcactcagctcaacaatgaaataaagcaccagggtgttggttggctacttcgatgttttatgcgtctatgaaaagtctaaacttatcatcattaaaagtggacttgtggagtctgggggatgattttgatactagttttattgttcaaaaccccagagttggagctagaactctcagagaagcttctccttgagaaggtaaaagggaaggcagggtgctcttccagtgcaggtggggtggcctcaacactcccaggctttctgcttcttcagtgttttcctcagcgtgactaacgaaaatgctctttgttctttattccagagtcaaagacatccctgccacgcagcacatagatttataactctggtcaaaggtttcgacaaatacagatttcttcaatccgaagtccatctgtgtgtgttcccagaaataaagaacagtgcatgtctatctccctctctctaatccgtagaggtagcaagggcaggagaattgaattcccaaaaggacttcttatagctctggtgacaattaccatctcaaacaggctggtgctaccttggggacacatgtggactttattttttgctctcttttttcaaactgaggtagtgtcagcactgacacagacagtccagagaaaagaaactgtgtctgctgtcatgtttatttagttggtataagtggaaagatcataacctgaagttttgatgaaaacacacttcttgctcagataatccattatgtcattgattagttctgctaagagaaagcgaatgggttaaagaaacaaaaaagacaacaagatgtgggattaggtctggggatgtggagcatgtagggaacatcataaaatttctgatttcatatctgggacctgggtacatgatctgagacataaatttgaatgttcaacagccaaattatcctgccccctagacataacctcccatgatgcaaagcaacagggaaggtgcatgaattctttcaggctctatgaatgtccctgagcaatctgtttctttagcatcttacataaacatggctggaatgacaaaagctcaccagggtgcctatggggaaggggtgcagttccaatgcctgaagtctctgtgacaacaccaagggaaaaacattggaatggaagccaatataatgatattgaacccgctcaagtgagcagttttgtggaaggcatccattttggagctgagctcaaatactactgga

SEQ ID NO: 36675 - DNA, 1192 bp, Homo sapiens
actgcaaaaattaatttatatattagcttttgtgaagagggagtttaaaacaccccagactctctggcggaatcaaatctgggcatattttattgagtaatatattaggaagtaaaataactttgtgtaattataaggttttgctcagatatgggtgactcttctcttgcttttgtcttgccggaattaaaatgacactttgtatctttgactatttcttcttcttctcctcctagaagtgggtatatgagaaagcaggcatggacaagagggcagaagctgttgccattggggaagtattctctcctgcgatctttttctctttgtccttctctctggtgcctggagcctggcatggactctccttccttatgttaaagtagtaggaggcaagatcccaatccaggcttaggagaagcagagaaggtagggcctttggtttccccagcacaaggaaaaacagtccttcctcttgctcattagagccacatgttagggcttgggaccaaacatcaggtatcagtatgatctagctgcaccttaccctctggatgtatttatttcactcggagacctttcacattgtagtgttctaggacaggattgggtggtttaagccttgatctaatactatcttaatctcatcagaatttctctctgtctcgtctctctcttgagaaactgattttacaaatagagaatggccagaccgtatataaaaatagaactctgactcgcaatctgtagcaatcagtccagaaggacaaaccacaacctctgtagcaatcagccccaaacagtcaggagttgaatcaataactgccagctgcactatcttttgccctgtttccagtttagaactaaccaggggaagctaaatacgctctcctttccaattacacaggatgccctgattctagtgagcctacctccagcttcccttatgccaaaaacctccaatagtggcatatctgaatcttccctttttgttcattataaagcttttatactccactgcctacctttagtgtctctgaactggaagtaatgtccttgctctagcaagctctgaatgatctttgcttgttctcatttgagtggtctttgtttccagactttatctgtgtattttcctataggtatatgactatatatacagagaaatatataccataaagggagaaatatctag

SEQ ID NO: 36676 - DNA, 611 bp, Homo sapiens
gactcatctgcagtgcttgtgccactagtgagatgcgcctaatgggggagttcatcccccacctcaccctggtgtaagtagtttactggatgggaatttgggctcctagaagtcttcatcttactatttatgtaccacctctgaattgaacaggtgttataaaagggtaaactgatgctaaaagctacctcaagaagatgcctggagcagggttcaagatcaatctagcttttagtctcagccataaaccatctgagctttgggtaagtcacttgaccaccaggccggtttcctcattatgacagaatggaattctgaattccctttctgttgtaatagtctgattgcacaattttccattagagaagtttcatacctgttagatctcctgctgccaggaactaacctcctgggagacaggtcttatcgtcatccaggcatataggagggtgttgggaaaacacttgtagtggatgctggattgtgccattcagagccagctccctttgctattgaagaacttatttccctacatgtcaggacttctgctggctgatggcccccagctgtgagctctttcaggcatcacctttggctgcaaaaggctccct

SEQ ID NO: 36677 - DNA, 790 bp, Homo sapiens
ctcccttgccacttccaccctgtgaagacacagacagcgggtacatctatgaaacaggaagcggggccttaccagacaccaaatagacgccaaatctgctggcaccttgactttggacttaccagtctccaaaactgtggggaataagtttatcttttttttaagtgaaccactgtatggtgttttgttacagcagcccaaatagactaagacatgcttagatccacagggagatttcatgagttttcagaattgggtaatgatgttctaccatattcatgtctctccttctcagtgctcctgggaaaggagcaggagaaatgcagcgtggctttgcagtccaggctcaccttgtgcatgcagaatgacccagataaagcgttcacatggtaacagagacactatgtgcacaacacttagcacagcatgtgaccactagtcaataaacattagtttctgctgctcatttatccatttggtaaacatggatcggggcccaccctgtgctcggaactggggttacgaagggaaaaaacaaagtgtgttctctgccctttgggagctcaaaaggttatataaacactatcccagtgcaatgaggtaagtggtcaaacgggtaataaacagagagtttatgttgtggaaacatggcagagggaagactgactgcctcaagaggtcaggaaaggcttctaggaggaggttacatttgagcttgttcacaaaggataaatgggtctatataaagtcagtgaagaaaagggcaatctggtctttggagggcactcca

SEQ ID NO: 36678 - DNA, 695 bp, Homo sapiens
tctacaagtaatacctggggagtctgaaaaacaaatgcaaattctaggagcactgctgggagcaaagattctgattcagttctgttggagaacccaagaatctgcatttcagcaagaataattgacgactctgatgcaagggttctccaaggggcacttcatgaaacactgtttgtgtttcatttccaccatggctggagttgccccaaaaatggtgacagggaaattcccaaaagagactgccccaaactgtcccaagatagggtcagttggggttctaaagaaagaatttctaaatgccagagtgatgagtcaaagtcattggttaaggggatttacatacagtttgctgcagctgtcctcccaacagacaggaggaaaagagctattctacccaggtatgtccacaatgaaggggtcaggtcacggagtttatataaaggtttaaggaatttggctcagtgtgcatgtttagcaatatgtctgatttttctgtatttcaggtaacaacctaaacaagtttatcaacgcctaggaatgttcagggccctggcttgggttcaagcctgcaggagaaaacatgtagctagccaggccacagaatggtcagggtactctgtttttttctatcaggacaaagaaagaaagtagggttaggggggcctaagggaacctatgtactgagttaagaataa

SEQ ID NO: 36679 - DNA, 1565 bp, Homo sapiens
tatatctagatatatatgatatatatctagatatatattatatatagatatatctagatatatatagatatgcatatatatacatatatacacatatatattatatatacatatatgtatatatctatatatatatacacacacatatatacacaagcaagtgtctttgctctcaatttcgttttggttttttttttccagtcaatagagaataggtcaaagagctagttagagagctggaatgtgtaaaagtgtaattccaaaagcagtatgatggaaaagaattgatagggaaaaggagcttttatgaaaagctttgagagcacatgaaatgaatgattaaattttttgtagtaggagtgacaagaggaaagagaagtgtgttaatatgagacttcacctgttgagtgatatcagcaaccaaaaccatttcgcaatatgagggacatacagagagcgaggtctaaagttcagtagagactaactgaaggtaaacaggggcccagttccagcctgactataactggctccattcatgagaccgagaaagatatactttctcctgtaatcaatgagaagagaaatattatcaagatttgaatcatatggtacgttttcattttagaaaaactctatgaaaggaggcaaggaaatgaattagaatactctaagagagtaaggaagttttggagccaaataaaatgttcccttcactctttgaaggttcactgaaaatcagctgacaaaaggcagattaataggagaaaaggcataccaaattaattttaacattggtggttgtgggaggatcacagaagaatgattacccaaaactcaatggggtacagatgtttatatacctttcctcataaggcaaggagaaatggggaaaatttggcaatttgaaggatagtaatgaatggatttggagaatatgcaatggcctagatcaaagtctgttgagcctgcagagcagataatggctggtaaatgattctctttgaaatattgaatgagactgcaagacagtggttggtgacaaaagactgtacaagtgtattaacagacctcagtcttctcatgatatgagttaagtaagcaagaactcagggaagagaccagagataattgctctcttctttagaaggtctgtgctttagtcagataagggaatttcagtatttcgttggtttctttgagcgagacggagaattgaaagtctgaagaggtgcaggaatggtcagagagaccttgagattgcttctttagtctggcatatccaagtgctatattttggggtatcagttgctgacccccaaaaagggcctaaaccagaagagtgccagtgggagaggtaaaaaagggggagctgactgagcagctctgtaactcacatgaaccactatgactcagtaacgaattatgtgaaaaagtgtaacacaaggaaaagaccaggataacccagtgatttccaggtgaatgattagctcatgtcttagtctagaggtaaaagcaacagtcttcttagaaaagatgatgattttgtttttgaccgtggtgtacat

SEQ ID NO: 36680 - DNA, 1024 bp, Homo sapiens
tgctgctgctaacttctccatcagaaggctggcctctgtacaaaccacatctctgaaagctggagcaacattctccagctaatagcaggctttttttaattttaatttttattttttttaaccgtgaaatgtcctcttttagcgggtaacttgaaaaatgcccttccaaagaattgagttgtcagtataaacgtctaaatggacctttattagaaccgttaaaaaaggctacttaacatgtaattggcccattcttcatgcttaaatacactgttaaaatcgtgccaatagctaactttgaaacccatggtaaaaggcaaacgttttatctacaggctccattttatagcctggtaagatgagatcacatcaatctttgagtctttcaaaagatgatagatagaaattgccagatacctttacaccgttcactttttcctcttggatttactgaaattagctagtggacaagtcactctaacaagatcatcccataaatgctcgcaccaagcagactggagatatgaactcaagtcccccttaccccaatgtggctctgcttccttttccttccttaatcctaatgctcatcatactgtttataatcaaccagtttatagatctctagttaatatttgctcagggcttatgctgatttctcaatacatgcaattttctggtttcatctttatcttcaaggattagattggatcgagctgccttgtagtaatttagtttttatcttatgccttacagttttatgttcttgtaatagcacttgcttttccttttttatttaattaaatatatcttatttcacaactacagcatttttttcgagtttatttatttaacagctggcagggtgctggtgttttgtagagggaaccacgctgggtatttttagacattcagaagttagggaatgctccagctgagaagcgggaagaaaaatctgaacttgagagatgaatgctcagagattaaacttggattgctttggttgcatgatggagctccatag

SEQ ID NO: 36681 - DNA, 743 bp, Homo sapiens
agcaaatgtgagcaggaagaccttcctggaatcaaaagtagaataagaacaggtgtaaaaagacaaaaaaagccactgcctttcttcagggcccctctagggtcctggagcccaacaaccagcccagggtccatcctctgaaagcctcaatgcattttctccctttgctgaagcaagggagaaagacaacaaagagcttctctctttgttgaagcaagaaatccaaagggcacttgttgcaagccctcgatccaaagacccagcagttctgtttttgctgagtcaggataacacagaaccagtcacagaaagaacatggggacatcagggcctgtaagtgagcacagagttcaatgctgggagtccaggtctcccagccacagatctgtcattcaccaggttggagacaacatccagccccaacgcatgcccagatcccagggtctggacttcttttgctgagtttacgcataatgaggtcaccaaatcaacctctctctaaaggcccatctgatatatgtgagcacagcatactggagaggcaaatcccttctgtccccaggcatgataaagtggtcacctgaagtttcagtatctacagagaaattgctattaaaccaatttccaagtcccagacggggtccctgctagggaccaccatccttccctgctggggttcagcatcaactcctgctcttggggcggtgaggggagagggccgcttttgaactttttttctgata

SEQ ID NO: 36682 - DNA, 803 bp, Homo sapiens
acacaatgtctaatttacttggctcacttttcgccagcgacttatcaagagtcaaaattgtgtcacaaagagtcactcaggagagccagactgagtacaagtctcagtccctccattttccagttgtgtaatttcaagtctttctcagcctctgcttcctcatctgtaaagtgggaataagggcagaatccacctactggagatcctgggcagtttgaatggattgataataaaacacacttagagtaatacctggcccacagggagtacaagatacatgctagttcctattcatgttagctctgggaatcctccacgacaagacatgcatggcccctgcctcgccaccaccactggagctgacgctaaacacataattggacaaataattcattagagtgagatgagtgcgaagaaaaaggacaaagtgcaaagtgcaacagaagcgcgcaccagagggtcagaaggagcagaaaccggccagaccagggtcggcaaacttcatacggccaagctagttctaataaagtctattgcaacacagcctcaccttttcattcacagattgtctgtggctgctttcactctacaacagcagagttgagtgggcaggacaaagaccttccagcccacgaagccaaaaatacgttccacctggccctttaagaaagtttgctgacccttgagctagaggaagaagaaagggaggctgtccacacagatggtggagggaggctgggctggggtggaaggaacttggaaaatgtgagtcctttgggcatgcactccctaagaacccgtgt

SEQ ID NO: 36683 - DNA, 1897 bp, Homo sapiens
aaaacagaaaatgttccctttgaatcttatttgcagtcaatgccagcagaggacctgaaagaaaggaaagagtgggatagatccggttgggtgagtgagggttgccaggtgggcactgcgggtgggcctcacatgggggctggaggaaacccagccagccccaagcattcgagggtgatcacagttggtgagtggtggcggtgttgggtgtggtcagtgatgggggtcctacgatggacaacagctcacaagagacagaaaaatgcacactgactgacctaaagccaaggtcagagaggctggcttggtaatttcctgaaagcctcaactggcctgtggggctgggcctgctgccagaggaagtcaggtaggtagagacatctaagcaggttgttctaataaatgagactaattagtcataggacctaggatctcagtccttttgagcagccatgtcaaacagctaatggtataaacacttgctcctagaagtcttccctgactcccccatctctcacagcacctcatcatcccagttcccattgccctgctttatcttctcctctcacctcttactgccagctcatacagctactgatttgtatggcgtattgtggactgtggattggatcacatcatgatagtagaatacaagcagtatgaggatgatgtcatgttattcactgctgtgttcctagcccctagcttctggatcagtgcctgagaccccacacatatttattaaacttgtaagtaactatattctgaactaaaactcctaactcttttcacttaaactgttcataggctaagtagtttacttgtcccatatttgtgcaattattagcttttttttttttttttgagaaggagtcttgctctgctaccaaggctggaatgcagggatgccatcttggctcactgcaacctacacaccaccatgcccagctaatttttgtgtttttagtagagacagggtttcaccatgttggccaggctggccttaaactcctgacctcaagtgatctgccagcctcggcctcccaaagtgccgggattataggcatgagtcactctacccagccaattattaacttttagctaagaatgcagcattttatctttcaggttttagacctttttccagccttttgtggttcatacgtcttgattccaacacagtttcagtttctctcaacattggtcagttcccccaaaaccaaggccgcatacagtcacccctctatccaacgggttgacaaagactgaaaatgcagaaggagcttcctgacaggccagcagataggtccctgcaggccttgattaattgttccaaatcatttgagttgggagtcctgaagacagaggctctccaccctggaaagcagcttaaagatcaagtgactagatgcctcgattttacagatggggtagtgacatctgccatcatccaaagtgcagtgatgagtttagaagccgtgcccaagtgaaacaatgatttccaaatcctgaaaacagcctgtttgcgttgagtgggagcttccatagtaacaagcttccagggtggtctggacttcgatgggccaatccagagcctgaatttgccatcacccacgctggatgggtgggatccattcacaaagttcgtctcctctcttttctcctcctgaatgtggtccatgaacagcagtgggaagcttgggaagcctgcacagagattttgttctcttactttttcaccctttcctttcttctcccccttcctgaggtggccaacgctctcctgatctctttgttttccaccctgctaatattcgtaaacttatttcaatggggtgcatatgtctggaggcactgacgagctagggccagtggatactcaaaaataaaacagagg

SEQ ID NO: 36684 - DNA, 1293 bp, Homo sapiens
tgctggcaggtccagtgtctggggagggcctgcttctgggtttgcagatggccatcttctcattgtgtcctcacatggcaaagagcagacagagaggaggcaagcactctcatctcttataagagcactaatgccattcatgaggtctccaccctcatgacctaactacctcccaaaggctccatctcctaatactgtccagttgagggtaagggtttcaacatatgaatttagatggggaagacacaaacatttggtccgtagcatagggtaagcacagcctctagtacaaagtggggcacatagtcgacaccaaagaaatatttatggagtaagaattgaataattgaagggacagatgaatggcaaattggcacatggtagttggcatatggcattctggccagagtcagcgctatcaacactagattttgccattatctattgtcaaacatttaccaagtacctcccatgttcaaagtacaggcggaatgggccgggcaccaggtagacagatgcagaagtttcaattcctatactcaagtccctctggggaggcctaacactgaggtacaaaggacaaactcccagcagagtatgaacagatctccccatgcccagggcctgactaagcctgggctgtgccccacagagctgcccacaggaaccaggcgctgaggaaagttctcactcctctgccctatgtttttccagatcccatacacccattccatctgctcagccttgagcccgtgggagaatgtaccatgactagggtcagaggctgtcctatgcccttaaaggaaaacatgagggtgtgcaaatgtataaggagaaaagcaggggagaacagaattgggttacaaaaaagaaataaagagaagaaaggggaaagggaaaaccacttaagtcaacattgctcatctctcctccaccttcccagccccagagcccagcagggctcacttggacaatgcaatgtccttctcatcaaattccctgctcccacactccccagctgcaacccaagctccagccagggtctgcaggaatcttttaaagcatacatcaggttgtgcagatgtgtccctcccctgcttaccatcctccttggcttcctctacattgaaaataaatccaaaattcatgctcactctaaaaaaatccctatctgacttggtttctgcctctctagacactccagccatgctattctgctttttgtacccggaaaacaccaggcttggggcagcttcagggcctggactgctctttcccctgatcatcgccagg

SEQ ID NO: 36685 - DNA, 1244 bp, Homo sapiens
gctcagggtgttcccagaaataagaagaggccaaagcatgtgagatttcctttcctttttctattttttagccacatctgccttgcagcagtggccaaggtcctctataatctcaggtctaatcaagggcaccttagacaagaaagccaagagcagctgcagaccacagcagagatagattatgccctactctgcaaatcacccagacaacaagggcacaaccgcagtcctctccaaggagagctctgcatttaacaagccatgtgaaaatcttgatgccccacccaggcagaagcaacagaaaacctgagggcattctcaacctgccactgcccactaggatggccagaagggctgtgttggctccagctttcccaatatcatgcttccacttcctgtcaggcatgtgacaggcctcctaggacgccagcctgtgcccagctgttcacccttgaggaccagagaagaaaagaaaaggatatgtttttagacatgatgtggccagacagtgtggatgacgtggtgcagaatgacagtgttaggcgcgcagagcactggctgccacatcccagaaagcttctctgcttgtgcagggctggaaggaaggggacgatttgggtagacagaagactggagagcttctagagtgcctttccaaagtgcttcccaagtatatgaaatatttaagggccacagatgatgcaaggttttctgcaaaccaaaaagccaaagaatgaaagacctttggccttccggaaactagagttgactctgtgcagtgttcaaagctacagataaagttggaaatgggtacagcttttactttcaggtctattcctccaatgaagaaaaaccttcttaactcaaccctaataccttcacagagcttgatctagaaaggttctttattcctgctattgctttcttaaaacacagctgatgtctttcagtgccctcttcttgtcctccacatctgttttcactcttctgagtgatttttctccaggaccatccctgattcctaccattcagaacttgataaagtgtgttagtccattctcatactgctataaaaaaaaaaaaaaaaactccctgagactgggtaatttatgaagaaaagaggtttaaatgactcacagttccacaggctgcacaggaagcatggctgggaggcctcaggaaacttacagtcatggtgaaagggcaaaaggaaagcaaacacgtctaccatagtggcaggagac

SEQ ID NO: 36686 - DNA, 823 bp, Homo sapiens
gccctggggccagttcccttcacttcaaggatggccttccttctggagcgttaaaacaccagccctctgtacattcctacctagactgcaccaccctcagcatgggatggagctggagcaaatgaccatgaatatgtaggaaaaaaaaaaaagcatggaaatgtattattctgtccattgcattatactagaaacagaaacttgttgcaaaagcacattaagcatgcaatcagctgcattctcatgcccaaataaagctattttcatttcataaaacaaaagagcaagtcaagtcattagggaaatagaaatggggaacttaaatgcctaattggaagctctactgcgcttgcaaagtacctttggtttgtctaaaaattcaagggaaacacattgagcttataattgcagatagatcgatgccatgttccttcctgcattagcaccaaaggaaagtcccttcctgtgggttcatctcagtcccagctacactgtgtaaacagcagtgacagcccagaaggaagtgagtgggctcctggaagcagggaaaattgagaggagaccaaaaatccctttcctttccactgaaggcaaaaacctaggttcacagcacatttctggctcttttagtgtaactcttcacctcacagttaaaaaaatggatgtgtttgatttatttgttgatcatttcctatgtgtaccgtgcaatgcaagctaaagtagttctcggagcctcagtgacttcatctgtgaagtgcaagggtaaagcgtggcaagtgtgtttagccctaggattccacagaaatgccctgggagcagctgc

SEQ ID NO: 36687 - DNA, 990 bp, Homo sapiens
acaacagtgcaagatttctgcttctgcccaagaaggaataagaggaaactttattctcttacctaaaacaaaacaaaacaacaagacaaagagcacagatgaaggaatagctttcaaggcacagtgcatgaggcaatgaaggttggtgatctctgagagtggaggagcaaatgagaagagttttatgattgccctggtccactgccttgagagagtctctaggccatgactcaaggatagggaacttaggcatggcccagcagatacctctaggtacagcaggtggagctgaaagtccagggagacctagattttaccattacaaggatttttttccatacttgaagtggtataatatacttgaaggtatgctataataactaaaaagtgttctgtaaaccttaaagaaaccactaaaataactcaacaaagagttatagctgtaagtcaaaaaaggagataaaacagaataattttaaaatactaaacgatccaaaataaggtgagaaaagaagaaatggagacataaaaatagatagaacaaatagaaaacaaaaggcaagatgatagatttaaacttaaccatatcaataatcataatcaataaggtaaattatctaaatactccttttaaggacacagattaccaaaactgacaaagacagtacaaaaaagagaaaactacagacaaatgtctcccatgaacttagaaacaaagatcctcaacaaaacatgagcaaatcaaatccaatgatgtgtaaaaataattatgtagcatggccaagtgggatttagtccaggtatgcaaggctgactcaacattcaaaaactcaagcaatgtaacccataacactaacatgctaaagaagaaaaaccatatgataatatcaaatgatgcagaaaaggcatttgacaaaatccaataaccattcgtcgcaactctcagcaagttagacattaaagagaattcaacttgataaagaataccta

SEQ ID NO: 36688 - DNA, 4183 bp, Homo sapiens
aaaaagttaataatgttgataatctcctcagtttgaatgatcaagaagtaaaggagaaagtaaaccacaaattgccagtatcagaagtacaataaggaagatcttcagagatcctatagacaaatataataaaaggagcaactttatgcctccaaatttgacttagataaaagagaaacatttgttgaaagctcaacctaaaatgtacacaagaagaattttaaaatataaacagccccgtatctatgaaacaaattgatttgtcatcaaaactatgaattttgttaaacactaaggaggaaggagtgccaaacttaacacaaacacttccagaaaataaagaagaaggaacaaatcccaccttgcttgataaagccagcatgaccctgatatcaaaatcatttggtatcagtttttaaccaggcgtatttttccaactgctttacctaaactaaccctatctaatcctcacaatagccctaaactgtaaatattcattattatccctattttacaaatgagaaaacagaggcacagagaggttagaaacttgcccaaggccacacagttattaagcagtgggaccacgagactaatacaagccaactgtttctcaagtctacttcctaagcaccacactatacttcctccttaatactaaattagatcaaaacagtgagcgtgtgcagcacaacgcttgggacagcatgaacttattaaataaactgaacgtccagtgggaagctagaaatacaaaactgaagctcaaactggaccaacacatcgcagccgaggacctgtaagcattccacttcagttcttgaatatgaattcatttgacccagcgcatagctgtgtgcacacccatgcacactcatgtgtgcaagagtcccagtgaggcagtttacaatttgaaagtgcaagcctaccacactggataaggaaacggaagacaactgtccttatctctctctccagccctccctgatccctgcagtccttgccaatgcactaagagacttgtcacacgataatgaaaaactgaaatgtgatggattcaattacaatttatattttcacttaacaatcaattaccttccccttgttggtggaacatcattaagcgatgataccagctctggagagaaatcctcttggggaggggagcagctagcccagagagagttgaacagggttttgagtctcccaggaatctgggcagagggaagagaggcacggagcaggaatagtggaaggattgacttcctggggctgcccaggggtgagaaaagaggtgttctctgcctgtctgtgccaagaaagaaggggttagggaatccccacctttctctggaccctcttcgtctacctgtgggggcgtccctgggatctaaaataaacaagaaagttgaagctcccccttggatgtcacccagagaagctgatcctgaagttaaatatttgcaaagcgggggtgagcaagatagacttgctgaggacccagcaagggtgcactagggcacaggcagcctccactaagatccttcaagaggttgggggaggctccatgtttgcttgctccccaggtgggctttgtagaacttaagaggctctctggggctcggcctcttggaaacagcagcgataagccctgcacagatggagcagcctccagacagcagccgcctgggaggatgaaaattgaaatcccagctttccttcagaaagatggaaagaagggagggaatcccaatgcagagttctccatctctctcactttctctctctctctcttctccacaagggggcgcacagcctgaagcagcttcccttctaacaaccccccaattttgcattttcaagcatgcaaatctgactacgtcatttatgcttaaaacctctcattgctataaaataaagcctaaattatttagcatggcatttgaaggggatcagaatatgccaccctgaaatatgtccctttggcatgtggattattttgagctgaaggcaattgagaatcaacagatggaggaagagttctctgacccccgaatctgtctaaaagcagggacaaatttccctttgtgaaggtgactctcaccctgcactaggaagggagggcagagtgactcttatcaccagagatgggagtcaataccaagatgagttggcataacagaccttactaaaataaccattgtcttccactagttccccaatatatttcctagtcacttccccataatttatcatcccttcaaagcccgaattctctttcctttgttaaaatggtatataaacccctaagtctaactgcctctttgagtttcgctgatttttttctgtggactcatgttcacataaatattaataaaaattttgtgccttttctcctgttatctgtcttttgtcaggcatgtaggttcagtaactgaacctaagagggtagaagaaaagtttttcctccctgacacattcaaagtcttctcaatcttgcttctgtctcacacaccttccaggcctcctaaacttgaccccattctttaaccactaagtgcctcctggaatttacaaacattttttgcattttcacatcttctccacttgaccgcactctattaagcttttgaagttcctttgaatatttccctctcctgaagccttccttcaatgtccccaggagattgatgcctgctttaccttgttctgaaggcacttttataatcccacaccattataataattatggcataatgaatgttcgttcctttatttatatcctctcttcacaatgttcacattctttgtttcattaattccaagttgaaaagcacacagtaaagagagaaagcctgagagcagtaagttctacttctatccagctgtttgctcagacaaattgcttaacaattcagcacctcagtttcatcatctgtaaaatgggattgctataacctatctcttcagttgtagctacatgaaatgagttgctgcatgaaaaccccttggctcaaatcctgactcacagtaagtgttcaataaatgctggttattagctatttgattttttgtttacttggaatttcatgagcgtgtccattaaatcttaatgatctttgtacccaacgtcaaaaaggctatcacagagcttggtgtttcataagctctcgaaagaaaaacaagatgtgtaccgaatgaatgagcagtcactatgtacagatattgtgaaaacagtcactgctggtattcagaactgcaaatacatagttttgtgtaatatttcaactgctgatcctgtcaaatgtgcttacgtggaagtattgtgaaacattttaagggctgatactgtcaaatgcattgaggaaccactgtgaatgttgacattgtcaaatggggtgtcaaacatggttatatgaaaacaatgtaacagcagcgtatgtgacatatagatttatattaaagatattgtaccaaagagcaaggttaaagcatagcacagtcccagtaaaattcaaagtcctacctttcagctcattgtgttaaaactacaatggatccagaaattaggcacatattaattattttcaaaacattatgttgttcttgtggttggggggggaggcacgtaaaatttagaattaagggctcctaacttaagattgccctaggaggagtggcaaaggtgtccctcttgccccacagtgaggcttctgcacaccttttagtctaacttcatggagctggggactgctgtgtgagcaatgaggtagggtggtctaggtgttcagatggcaatctgggtctctggtcataaaggctggagtctgccattactcaggcaagccccagtaagggtcagcaatgagatgctctctgtccctttgcataggggttctgatctggcagtgacagtggggatcctctaggatggcctggatgacataacccaacccatgcctcacccagagctccactgtgatgacatcctaatttccaagaccctggaattggctttcacacgttatattattttctctttctcaaaggtagccattgttttccagctcaaaatcaaaataaacacaaaagacaaaaaaaaatcctttcctttacattgcattaacttgtctattgtatccaggagagaaaaattatggttcttttttacatctactggtca

SEQ ID NO: 36689 - DNA, 3696 bp, Homo sapiens
aggtgaatggaagggcgagaggtttgcctctcataatgaaccccatgctgcaatgactttagcttacactttctctcccctccaatcccttctcatatacacactgggagggacctggggcagagctggtggcagcaaggctagtgctgtatgcgagtgctggcagttccctccagcttgcacaggacttaccatctctttgtcctcaatttcagccccagtgaccaattctagatcaacaggaaaatccactcaagtttttatttcagatgtgagtttagatgtgggtccatatcagccttctctttcttttgagcttagttcacatttgagaaaaggataaaatcaggtttcacctggctctggctttagttaaagagtgaagatcaaagaccgactaaacatgaaacagggctgagctgagccagctggagggcccagctgcagagggtgggtactgcatgggtcgggtggggagtgagggaagcaccagaagagctcctgtccgtggacccacccggcatgtggacacaccaagagatctccagggagccatagcgcctccatcctcagacactccccactgactcacagctgatgtctttccattgttcacctctttggacttcaacatctgtaaaatgggaagaaacatgtcttcctcaaccggatgccagagaacttaacgagacgatactatatgtgaagcacataggacaatgtttagcacataaggagcacaatgaattcccaacccaccaaactccctagagagaccacatgagtaggaagtacatggtccttctgccttcatagctctcaatggtccagccacttctcagcagtgccactgcaccaggcccactgcaacagtctccgctctgaatccctgcttccacccttgctcccaccatctattagaatgatcctgatgaaaggtaaggtggatcatgacactcctctgcacaaaaccctgaaatggctactgtcctcatcagagtggatgacaaagtcctcacaatcaccagcaaggcccacatcttctgtccccaattgttgtcttgtcctatgactcctccttccctttctccatcacacaggccacttcagataaagcagacctgtttctgccttagggcctttgactgaatcatccctctgcctgcaatgttttttctcccagtatttaccctgccatcccttacttctttccagtctcgcctcagatgtcaccttctggtgcagccgtccctgaccaccctatttataattgcatcattcccccacctgccccatgacatgccccaccccattcccattttatcttctgcatatcattttttcttctaacacaccacataacttgctaatttattttcttgcctgtcttccccttcccacacacatacattagcatgtaagttccatgagggcaagaatttgtatcagtgtgattcactgctgtgtccctagcatctagggcagtacctggcacatagtaggtgctcagtaaacatttgttgaatgaagggctgaatgaacacaaggacatgagtacttgtgagccggaagtgtaagacccagttaactgctcaaaaagccagatccagtctctctgcagcttaggatgatgctgagaatgaatcagaggaaggatgaagtcagtttggaagagaatctctgagctgagtaattgttctccacccctgcctcatctcaatttagacccaacactgaaaattcattctgaaaacatcctctttagtcgctcaatcatttatttcctctgaacgccaacttgtctggggaccaaagtccacagctcttgcaagtagaagctgtgccaagcagaagaaaaagctaaatgattctttaaccattttgacttcaaagaacaaacgtgctgcctcaaagcctcccagctactccccgggctctctcaggtacctgccctctcagacactttttgcccagaacattgactcaccccttggattgaagggacacaatcctttcatataggtgagtctcttctctcataaactgcaagcaaagcaacagttaggtgcaagactatgattaactgtcaagtgcttgctccatctaaaggcatttaaactaaaataaataagtaaattgcaccgttcaagtcaaacaaaacactctacacctgcaaactgccagtcttgattgcaagcttagcccctacagcaatgtggaaatatagcaggcactacataaatacctcctgactgttgactgactctcttggtacaaagtactcacccaggtcatggaaagcagcctagaccaggattaaaaatacctaattcaggaagagattctcccattttgtagacatagtgtgtggaatgtttgtttcccgttcctctttcccctggttcctaatccagagggtctgtggggtatctgtgaactcactagtcagcagacagagcatgaggatgtatctgcatgtatgcaggcaatggtgaacacaggaatacagaggagataactgggggtagggaaggaagagtcagctcttcccattctagtggaacctctatcctaggttgagtttttaattagtgttcaaagcccttccatcaagttcatacagtccctgcttaccaatcacacatatgggtactgacccacacacccacacacccctacatgcctctctgaccagccttccttctttcctttcctaaatccactttggcttaatctactcagtagcctttagaaatcctcaggacatttgtggtgttaaaacaagtgtatttccattgtattgcacctgtatttcttgtaaagagcaatttcattttgtgtctccattgtattcaatctgacttttgcactctgaaacttcttcaaacaaagctctacttgtgaagcaggaaacacggctgacagcctcatgatcacccagtattttttttttcagaatgaggaaattcacacagggctcagcctagagcaggccagcccagtagcagcttcatcccagtgaaggggagaaacacagcctccatcagttgtaagaagagttttaaaggctgtaggaggcattaccccttctccaactcctcatctccccacaacacagagaggagactcaggagctggagagtgaatgagtgaatactaaattattacaacaacctcttcaatcatcttttgactctaatcttacctccattcaaataattctccatttcaaatcattcaaataatttccagagggatcttccatgtcactcttgtccttaaagctgctcagtgtcctcagggtaagtccagtcttctcagcttggactttcctcatgtaggtgcaaaataatttctgtagttcatctctggcacttactccctccccctaccatccatccagccagccagatccaccttctttcatttgaggcatagaccatcttccctaccacctttggccctgtggccctgtgcctagaacattcttccttcccccactccatcccttttttggtcaatcttgtccttggttgaatgaagacaaaggtggaataagtgatgggctcaagtggacgtgtccagtctgggagttcaggggaactatgtctgtcccaggttggccttggggaatcaccatgtagcccctgagactttcagctcaccattgaaaaaggagtgcctgctggtgggcag

SEQ ID NO: 36690 - DNA, 4638 bp, Homo sapiens
tgagcccagaaggttgaggctgtagtgaactaatatcacagaactgcactctagcctgggtgacagagccagatcctgtctcaaaaaaagaaaaaaaaaaagagtttaaagacgagctgagggtcccactcagtgagtaccaagcaggagccaggtgtctgctccagtccctgtcttatgacttttcaccatgacgtcttccacccctactccagccccaatgccaatcacccacttaatcaatatatgctcaaacctctaatgtgccaaagtgattgttcaacacgagtctgctcgccgctttgctcaattaacttcccacctcccttgataatcagacccatgttagaattctatggtgttaacagttttataaactaatgcctttgttaggtccttcaaaataggtgctggcaaaataaacataaccctctacattgtacagccctctgcattttacaaaacacgatcatggacattatctcacttgatcaagtaagtcaataaaaggtttatttgtttggagagagagcaagaggcagagaaagctaaacagcagaagtgtccatcagaaaaaaagaaaaagagatttaaaatataggtggggactcaacgaaaacgtagtttttccttctcaagctgggagctgaaaagcccccagtcacttccccatggtgatctctttttctgaggagctcaagcctgagaatctgcctgaaacagaaatcactgacctctcctccaggcactgacctccgagtctgtagagttcccagggctggagttagcaaactgtgctcccaggaatcctgcaatgcttccagggagggctgggcagggcaggggtgctgtatttgtacaaaaagtaatgacttttgatgacagagactggaatcctaggagaggtctccactggccaggagccagatccagcctcttgtaacccaaggaactcattgctctcttagggctagttggagctcatggatctgaaggtcaaggtatcttttgttcattatgataaaaacgtatttatgatgtcagggaaaaattatgacaccccaaatcccactatctactcatgtcaaatttacatttctccatcatctctggccctctttatcttcacatccacattttttacagctataagaaggttctatgtaaattgtatatccttttttctatggtattacgtttggtattttttccaagtatttactgttctgtcataatggtctcttcatttttataatcttcttagtgtaaggtgaaaaggtcaggttatccctaaatttgtaaataaaagggacttgtaggtataaaattaatgagtcattttaccagggaagggctaattctgccatggaaggaagccatggtcacatttgttgaatggagcctgagatgctggagaccccaacataactgggtagcctcaggaacttcaaagatccagaatgcagatcagtgcctgtgggagagaggcatggcatctggggacatggacatctggccaccagggaggggccttcctctatgagctgggaacagttcaacagactcctccaggacccagatgaagtatccacctcagccctcatgcactgcagtcaccatctgagagtttgccactgcaaatatgtgatctggcctatactcacacaaaagtgtcacatgggcaaagtcagtgtcttcacccctgaggacctggccacctctgggcattaagacgtcactgagtttcagggcacacagagaagaacaacagtgaccgcatcaagttgtgtgatgtcaagggcaggatggccttccctctagggcttggccttctctccctgtaacatgtagcactccgtggagtaatctaaccagaatatggttatggtttcccagggctgggtatcttgctcgttcattgctttatggtcttctaaataagactgtcatcaatacccttgtgcctttggcttttgtatctgagggatggttaggacagtggatggtgatatccccacatctcaggggctttttcctcacaaggctgaaaaaatccaggatggtgatttacagtgtgccagaggaatctaggagtgagtacagagcagtttcatttttgtggaggtcataggaattccatgggcagtacctttgataccatgggcatggcaccagcttccctgcctagggtatcattgatctgaactcctccctcccctatcctcagacaggcctgggcctagcccagaagaaaacataagctgctctagacctacaccctggaaacgtccttctcatcatcaaattcccatcccctattaaatttaaattatgtattttttgctttccctccagataacattgtcttcttcaatatgaaattagattgaggtaagagaaatgattgctgagttgtttgaattttaatcattagactcaaagaaatggtgactcaactaactcttcattaaaagtcctatatttcatccaagatagaacataccagaataaaaagttttggggcactttttatggcgcatgttcttaaaacactgtaaaatccaatgacatttattttcctaagtatatttcaccttttaataagatttaaactaatctggctgattgtctcaaagaaaaagccatcctttcatatatcagaggccagcagcccgtgaccagcctgccaaagttgacccgcatggggattcggagggatgccagggaactcatactgcattgattttcctaacttgactctcagcattactaaggactttggcctggactcacagctctggctctttcttctcctggctcactcacagaagaacctggagtcccagaggaccaactctctgtccacaaccgccttggctggagactgaaccacgcctgtcctggcccaagggagggtttggtcaatgtgtacttacaaggtaacctatccaaaatggaatgcattgtctcctcatcccctacccacacacacacttatgcaacacatacacactcactcctacattctctagctcaatgaaaagtgtcactattctcctagttactcaaaccaaaacctggataattcagacttttccctcctctgttctccaataaccatgacctcaaagaactatgtattctaacccatcaaagccttcttctctactccatggccagaattctcattgtctctcatctgaactattgcagtatcagacatgctataaccaaagcaaggggattccaaaatacctttaaattcaatccgtccagtaatgagtgagtgccctgtgctgagttgcagggaacactcctgaccttgagtagttcacagtttccttagatatgtgctacctgaccatgcagaaatgagagaaggaagcagcgtaatgataaagtgacaaccaaatataatagcatccccaaatgagttctctggaagggaaaagactaatggggcagaagttatcaggaaggcttcctggaagaagcaggaatttgagctacgctgccaagactgtgtaaaacttgaatctgtgaagtaaaaggaacagtggagaaaagtcttaagagccagaagaactcttggcaatacagagacagaggagagtaggctctgtgttgggggtggtaaaaaatggggaaaagcgggaagtaggtgcttctgaacagatcaaagaccagggagctaaagttcctggaggaggggagaatgagtgtggcctcccacatgctgagtttggaaaaggcaaaatgggtgagtagccagtaaaattcaccctgaaattaaaacgactgcttctggctaaaccacctctttggccaaggctccagtgtcttgcctagtctgctgccagcctgtccagtctgctgccagcctgtccagtctgccaggatgagtgtcggggcaggctgttctgttcccaatcagtagccaatttctcccaggactcaaaaaagcatccacttaagctctgaagtctgcaagttccaaggtcaatgtgtgccacattggatagtatgtggggttaacagtggggagttcaggaaggaactcccaatataaaagctctttattctcttaggagaggaaagcatgcttccccctgctcagggaagctgcacatcccttctgacttggaaaccagctatctaggcccatggcattcaagtcagtatccgagcaatcgcagagggacattgagaatgtacttcctggagcctggagatgatgagccaatgatagaggccgggcctgtttttcaagagcaggtgcacacttgtgtcttctgacccactgggcaaataaacccatggggcagcaccactggcctccagagtcatgtgcacacctttaagccggagagggaacagtcgaggcagctgtggccagaggctgaatcaacaaggggaaaggaggaacaagcaagctcaggccaaggaattggggcttgcaactactcccctagtcttcgacaggacagaggaaccatggctagcccttgggttacctatattctaagacctgctgtgacatttgctggctcttgtattcaaggaagctgcctatccagcatcggcctccacacacttccctgtgaaagagataatagacctgctctccccacgaccgtc

SEQ ID NO: 36691 - DNA, 1978 bp, Homo sapiens
gtatatatttatgtcaatgctatactttcttgattattgtggctttataacaaatttgaaatcaaactttgttcctgttttcaatgttgctttggctcttctagattctgtgcatttccatataaattttaaaatgggcttataaatatttaggaaaagaaagctgctgagatttctttggacttatgatgaatctacacatcaatttggagagaactgacatcttacgactattgtgtcttttgacccatgaacatggtttatatctctatttacctctgcctcctttaacactctcagcaatgctttagagttttcataatttatattcttgctttgtttctagtcttaggaagaaagcattaattctttcaggatcaagtatggttttgctataggcttttcatagatgtactttcattgattatccttactgttttttatgtcattgctttctgcttttatcttcattatgtcccttcttctgctaactttagatttcattcgcttttttttttatattctaaagtagaagcattgatcagaagtcagcaaatttttttcatgaagattagaggataattattttaggttttgctatgcatacagttaaccaactttattgttatagcatgaaagcagtcataggccacgcacaaatgaatcaacatggctgtgtttcaatcaaactttatttacagaaacaggcagcaggttggacttggctcatctgttatactttgacaacccctggtttagatcactgatttgaggcctttctttttttctggtgtaggcatttagtactataaaatttcctctaactattgctttatatgcattccacaaattttcatatgtcatattttcacatttattgagttcaaaatgttttctaatttattttatttcttctttgactgaagaaatattttaatgtattatctagtttctaaatatttggggattttccagatgtcttgctgtgattaatatttaacttaaatccattctgatcacagaacatgcctggcatggtttggattcttttaaatatattaagacctgttttatggagcagaatataaatctgttgaggtttgttttatgggccgggccagaatatagtttttcttggcaaatgttccctgtgcacctaaaatgaatctctattctgctcctgttgagtggagtgttccataaatgtcaattaggtagttgattgatagtgttattcaattcctctatatcattcctgattttatgtctactttttctataaattattgacagagaggtgtgaaatcttaggctgtaacggtagatttgtttacttctccttttagctttatcagtttttgcttcatgtattttgaagctctatttttaggtgcataaacattttttattgttattttccattgatgtgatgacctcttttttgttaggaaatggccttactcatccctgatactattctttgcttattttactttgtatcttacaatatagctattccagctttcttttgattgttgttagcatggaacacctttttttccatccatgtgcttttaatgtacttgtgatttttttataaatagtatttttataattctattttatctcccacagtcatagctatggctttcttttgtgtcttagtggttccttcacatttcattatatatatctttaatttatcacaacctaccttcaagttatatattaccactttatacataatataagaacatttatcctccacctcctgggctttgtattattttacttctatatacagtatgttataagccccacagtaacatttcattaattttactttaaacaatcaattatgttttagagatttttaaaatacaaaaatgtcttttcctcttttccacgtggttttgatttcccatactcttcattcctttgtgtatattcagatttgccattggtatcatgtttcttc

SEQ ID NO: 36692 - DNA, 2647 bp, Homo sapiens
ctcaattttcagctttggttccaaaactctagcccctacctgataccaggagaggccaataagatagaaaggaagatccttagaatcatagaaagctcttagagattgtattgtcaaacacctaataatgctattgagaaacataaaatgcaaaagggaaaggaacttgcctagggccacactgagataaaaaccagacttagaactgaagcctcccagctcccaggccagggctttgtctagcacttcatggccttacaagtttggtcttgcaaaatggccacacattccccatgccatatacatcttgaggatcctgtatgtgtccatttgtgtgttcatgtgtgtacatgcacacacaggaaaaggggatggtaaagagaaaagatatgaagactttcagaggacatttacagggtatagcacaaacattcctccagcctggcaatccccacctagtcaaagagatgagaaagaactgtaaataaaaccgcctctctgggcacagggacacaaagctgtttctaacagaaacccaaaggaattcaacccttggattcctgaatgcatattcctaaaaggcctttcctcccctcctgcagacatacttcccaccctcacagcagtactcaaagggtcaggcaagtaaggaccagtggttagtggcttgggagataaggtgaaaatctgtcatgcccttttttccaatgtctctgtccttatttaaaagctattttgtcaaattaagagacccaagatacttgcaactatattgaaaatcgaagttacttaggaagctagaaaatggaaatgaccagaacctggtttggagaaaggatggaaaggtacaatcaccaaagctaaggtggttgccagtgtggctggtcatccctgccagctgtggctggaaattgagactttctagaaccatcattaactcccaggggccgatgagcggatgactaggtcctaattggacagtgactgctggccacacctcataatctcaggattatgcctctctctagacaagaattcgcagtgtactgcatgagcctcctcctttattagattgtcaattccttgaggctagggatcgagatggattcttctctttgtctccctcagtccctgcagaagcctttaccaaggatcaaagctcaggaaatgttataggtagattaccacgtctgcttcattctcagcatgcaacatcctcttgcccacgaacccagagactttgtttgtgacacctttgtgctgctgagatagaactctgctgtgagtacgtacatcttaaatccatgtgtgtttaaactcctaaaaagtagactatatttctttattactcatcagtgcctactgcagtgctaggacacagaacacccaagcacgagaatgaacaaatgaagatgaagctgttgtctcaatggaggctccattttacatgcccttcatagagtagatatcccacaaatgtttgtctatggaaatgtttgatcagccccttctttcagaaagcacagattgatcactgccatccctggctcagaggcacatagactgcctaggaaaatccaggacaggaggtgaaggaagccagggagaaggcccatgtctgtaggagtgacagattttctgtctaaatgctaggaaagggaagaagtaaattctagttgattccaaagtaacatcaggcaattaaactcagggggactgttgtaaggtcagaagtcagcaaagccaaatttccaaacaaagctggaatacatttaaagtagtgcttaaaaatctccaaagacaaaaataaatagctgaagaatgatgtttcaaaactcagatttaactcggcaagtgacagttcagcaagatgagctatgagccgggcagtgagacaagggcatgagctcatcttccggccacccacagcctgacccagcctgctgcaggccagagtggtgcaagctcaggctggctttttaaaaggtggagagaaatggatgtgactgaccccagggtccagagtaaagacttacttggatatctaatgcagctggttccagataagacatggttttgagatgggggtggtgggggaggaggctaaagaggaaggatagaaatgcaatttataaaatctttgtattgtgataaaaatccaatacagtttggctgagtgagggcttgaaatttcatcagttctatgaaccattcccacagtggaagggaaggggctgggttttatcatgtcaaaaagccagcaataaaagaactgtcctgcagtcaaggcacagccaagctgacatttcagcccaagatgcattccttttaagggccaagattttaaagaatgtgctttccagcctctcccacaagctcacacaggcaaagccgaggcagaaggagctgtgtgcacagtgagatgtgtttttctcatcaccctcagatgccttctgaggcttgctcatggactcttccctcctggcacctttcccagacagagggggcttggctggagggctgtggaggggagcacactttgaaaggagggtgaagggcgatgttttcaaatctagctatactgaggactcactgaatttcatctggtcaggtttacgacaaatgtggaagacaaggagagagggct

SEQ ID NO: 36693 - DNA, 4249 bp, Homo sapiens
agatggcccagccaggcacagctggggcttcagagaagtcatccaaagtccagggggcttgtcaatcaatgctgattgacactgatgttataaagtgccatgatattctagaagtgacatggaaaaaaatggaattactttggaaatgtaatttcactcaaccagtttttttcccttttccctgaatctcttcttccagactagaataaaaaagtgtgctgcccagagaaggtggaggaggacagtgatgaaggtcacagagtttagaagcagaatatgacataaagatgctcccagctaaccaaaaacaaaatagaagatccttccactgctagtggaagagccaggagagagaaaatgaaagggaaagaggtcagataggaatttctggctctctccagtggttgcaacctctgggggtagaaaagaaattgatagtgtcagacaggtttgcagggaaaggccagcacatagctgcttacgcctggcttccctgcatatcccaggaaaatcagaggggcctcaaaaaaaccttctgttgggcaaggtgtctaccacgatacagggtggcaaattagaaatgaccgagggagtggtctgggtggccacagacaacatcccccctactgtcctcctatcctaggagtgcgacataggaatctagaagctccctcatgccaagctcccaagatcattcaccaagctgggcctgcactaagaaaacagactacaggatccacccagcagtgggcacttcagtggtggagctagcgaggacagagctgccctgggacaagcaggggtgagcaggtcagccagaggacagctcccaggcaggcaagcccatcaaagccaggagacagaaagacgccttgaacccagacatcctcttgggaaagtggggcaggaggagaacagcctgcttgagagaggaatcacagacctgaaaaagaatatgaattttcattggtttatgatttactgggtcatgagggctcttttaaactagaagaaagaatgctaccttcccttgtcaaggcaaaagacagtttttggtggtagtgctggtagtggtatttgtgtttttgttatcattgctatttttcctgccatcagcaagaaagtaagatcaaaccagttcgggaagattaaaacagcaacgtttttctgcatatgccaatatttaactgctaaatttgagcccccctacaacctataattgtcttttttttttttttttgagatgaggtctcactctgtcacctaggctggagtacagtagtgtgatctcggctcactgcaacctctgcctcccaggttcaagcaattctcctccctcagactcccaagaagctgggattacaggaacgcgccacctaatttttgtatttttaatagagattgggtttcagcatgttggccaggctggtctcaaactcctgacctgatctcaagtgatccacccacctcagcctcccaaagtgctgggattacaggtatgagccaccatgcccagcccctacaactatctaaagggtctctaaggaataggcacacacagcagatggactctcaagacagtggcaactcacaaagtccagctggtagcagccacttcatcccagtgtgagtccagctttgttgaaggaagactctagcagcagccacagctgaaggacagggcccagcacttagcagagtggcctgcaagggctggaaaggatgtccagcaccaactaagtgttcaatccaaggagaaatgaggttctgggcaggaaaaccagtgcagactacccagcttctggtctggagtggcttgctgaaggtttcatggaagacattaactcaggggattgtcctctgctggacattctcagcaagaataacttcagcccgcctgctgccctataacccacccgcctgaccaggcttgacttcttggggaaccacggctgctcattctccaaagatgccagcctcattgctctcccacttcacacaatgagaagagataatggactcaaaagcacgtcacgaactgcaaagggccacacaaaagctggcatggttattaatattagccgtgtttctttttctccaagagagggagatggcagcatttatgtgttggtaaatctcgaaaggcgtcctgcctgggccttcttctccttccgtcctttggcctgtgaacttctcagtccgacccaatgagtcattctgatggccgtgttgttctttatcataaacaaacagttcatgcctgtctcagcgcccaggacacaggaggcctttattcagtacctactggtggaactgaacagaactaaaagagacgctactcttgtactgatgtgaaaacgcctgggcaagcagtattctgaccacaagcaggtacttcatgagacagcatttcatcatttgtctgtgaaccttacctctggagtgttccggagggcaggacccatttcttctgcatatctcaaaccaccggcgtccatcccaggcctccagccttgtttggtgaaggagtgttcaatcgatcatccgagtgattgctcaattgaagatatgttagtcaaaatccataaatcaatccatgggcccacatcccaggtattgcagtagaggtgtggggctgagggccaggataccacagttctggctcttaactgccacaggtttaatgtgtggctttggaaaagttgcctcccttctttaggctcttgttttttcatctgtaaattcaggaaagaggatttttaaaatcttttgagtatgtgaatccatattctgtgatttttatctacccccggccccccgactctcctaggcaaggcgaacaaaaccaaaccagataaaatcatctccaacaatttcacacaaaaaaagagctgccctcttcttaatgagattccagtgaggttaagactggttttcattagattctgcagttgtttaacgccattagaatgttgtttgtagaatgattttcaaatgtgagtaaaatgtaagtaaatgattcatttaaatctgaatccaaagaggtgacaaggccactaggaggccccagcacgtggtcaagcaggagagggaggggcagcaggaaatggacccagggcacgaggggttgcatcagaagacttgtcacgcgcagcctcgagggtgggagcaaagaacagaggctgatgaatccgggcctctgactctaacggcagcaacctatgagtccctctaattcacgtgaaatcctaattttcaaaaaacagcaacacaattcatgtcaaaattttactcggcatagcttaatcttgaatctttgacgatttgaaatcatgcaactttcaattattgtggcacatgcaggtttatacacacacacacacacacacacacagacacacacagacacacacttctccctccctctctagaaatcattagacgttttggtcttaatgatgtggagaaataaaaaaaagcactagacttgagctgctacccagactctgccatgagaggccatagtgcaatgtctggaatgcagtgtgagtgcatgcccagcgaatgttagcaatgatgatgatgatgatgatgatgatgatgacgatgatgatgatggagatgttgatggcaatgtttacaactatgactgaagaagtacagaagtaccagggacacccaactcagactagaagttagtgagccctctctggagggagtgacattttggccaagcaaagaggagagaaggggcccactcacatgcaggccagggtggctgtgcatttctgccagcagaactcgccatgggcgtcaccctaacctggtgactgagtgctcctcctagcagctgtctctgtccaaaattttgacttcggcccttcttgccccatttctaggctcacctcaccttccccacttgactgccagcagtgctgaatgtgtgcttcctggaagcagtttttaaaaataaatctttgaggtgagtttgtttcctgggcatctgtctctttctccaatagcaactcatttaatcatgaacagccttgcaaagttagcaacattagcatcctcaccgtacatgtaaaatggttaggagtgccatgagctggataactgaatactcatctaaagaagaggaaactgaggcatgtgtaggtgaagtatgttgcccatgttgatatagcctagagtaagttgcagggctgaggtataaacccaattctgtctgtctcctaagtctgtaagt

SEQ ID NO: 36694 - DNA, 3213 bp, Homo sapiens
aaaatagctgaaaccactagatacttcacactgcaaaccgaggttaatctcagactctgaggctgcatgaaacttgacccccaacacttccatctccagggagaatagagaatgtgtgtcttggaagacaggctgtcatttgcttgtgaccgtgacaggctacttcagctgtggggcgggggggggggggggggggggtacggtgattaccagtaacacctgagacagagccctggacccaggcgtgttcaataaatagctgatgaaaatgagattcactgccaagtcaccacgaggtcatcctgtctcctcctgctgtgctccccctgtagcccatgtggactgggtcccctctcaggctgcctgggtcccagcagagggcagaggacagtggagggtccctgtcctggggacggtcaaggcagagcagtcaccacctgtgctgggtgagtggtcactggccttcctctggcccaactgggggctccaaaatgaccataattacaaacctgatactggccctacgtcctaccaaaaacccagagggagatggaaacagtggcactgatggattctagagttgaacaggaggtaggtgggacctttacctcttttttcttaaaaacagcttaaaaatacatttatgccaagagctatcagggctcaatcctctctcaaaagtctcctgaattttggccgggcatggtggctcaggcctgtaattccagcactttgggaggcagaggcaggcagaacacttgaggtcaggagttcaagaccagcctggccaacatggtgaaacctcatctctactaaaaataaaaataaaaattcgccagcgtggtggcacacacctgtagtctcagctacatcggaggctgaggcaggagaaatctcttgaactggaaggtagaggttgtagtgagccaagatcatgccattgcactccagcctgggtgatagagtgagactctgtctcaaaaaaaaaaagtctcctgaattttatcattagtgaacatgcttcagtgagtgaaaaaacactctaaaattcaaactaaattttccttgcaatctatcctaacaatcgtctgggtcttatttttaataatctgtcatagagaaacaccggccccttctttaacattgaaaaaggaaagtgacattttgatcactgtcaacaatttaacaaccaataactatatactgagcaactcttcagtccattcctccggacaccatggatgaagaatcccattaccaatggagagagcggaagctgctctcttaaacgcccaagcagtgtctcatgtcagtttgggaatcagagccacccaggaaaattgttagtggctctgtctaattagcactcctgccacctgcaaacaagtggtactaaaaaaaggtgctgaattcttgccattgagaatgccaaaaaaagacaccactggtttcattctgactcttagaatctaatatttcactgatttggcgggctgggggtggtgggaggaggggggaaggaaatacactttcactttcacccaaaggaaatgacttaacaacaagtcgtgttttagaaacgatcatatggtaatgagtcctccaatccagcaatcctccctcccctgacctcctggcccctgccttcccctctgcctggtctaggctccctctgcctcccacagaaactgccttgtcaggtccagtcttagaccttcctcctccaggaaggcatcctgaccagcctagctcttagggaatcgtccccttaaccccacaacacttgagagtctcttccccacaggtgagcacgaagttatatttcttgataacaactgctgttatcttaacccttgtcaagaacaagagccaagtattgtattaggaaacctcgatcactttttggaaaataggcagggtaaaaatgattggcgtataagccgccttataccttccctgtcttcctgagagtcgccagcacagagttgagcaacaaagcaggttctcagtaaatggttgattgcatgattggcaaatgcctttgtgacacatcacagagcacggtggccatggtgaaaatttggcagctgtgactccttacttcctgctttaatcaacgtcatgggattgaaatgctggacacacagtaggtgctaaatagatttttatggattgattaaccactggagggactgtgccttatgtgggatttattaatgcttttgatgccaaataggggtggttttaatagagtataatgtgtttaaaaaaaaaaaaaaagaaaaaccagcaaacacaaaaccccaaccaggacagaggctggcagctgctctgtttacacccaccgtgctcctggaaacagatgtcctgtcaaacccgaaggtttctgatgaggcttccactcttccgagtgacctgagtgttcagtaatcaaagggacctgtgcccttctacattagtgctctctgttctatgactgatctccagttatgtgtctggggtaaagacttttgctgatgaaggcaaaaatcagcatctactgtatctactccaagggaaaagcactgggctaatgacaaaagaaactgcatttgtgtgtttggtggggtaaaaagaacagaggctttgggacaatcaggctgaaattccagcactgtcacttactgtgtgattgcaggttctcatctaccctctctggaactcagttttgggggctgataacaccaattccacaggttgctgtgaggattaacaagatatcatgggtagagttcttggtacagtgcctgacatatagtagccactgggtaaaggtccttttgttgtggctattatcataaacacagacaaggacagaagtccaccttggccactgtgggtttatgtggcaccccaggtgttcctgatgtgacttcctctggttcctccttgggtgatggtggcctttccagtacaagtccttgtctgattgactgcacagataatggtctatgatctgagcggggaatggatgtcctggagtgttccagtccacttccctatgcactatgagtccgctccttcactacccatctgcttggagtgtacacattagtcctgatcccagtgcccagattggggctcaggacagggagggttggcttttggagaacacaccaccaagtcaatcctgtgtttcatggagaaatctttgaccatggtgtaagaggtttc

SEQ ID NO: 36695 - DNA, 2879 bp, Homo sapiens
gaagttagggtctgtgtagacagcatgtgtagaccgagaggtggtgggactgagaagtcagtgtagacagtgtgagagagagcgagctgtggtgggggtgagtagtcggtatagacatcaaaggctggtcaggctgttaaacagagaaggcttcctggattcctaagggtcagtatgaacagaaaagtcgcgcgccccaggagaggcagggctgactcagaaggctggtggacactttgcagggctctccctggtccttcagaggtgtggacaattcctgctcctttccaaggctggagtgtcataaagagggcggaagctgaaagacgattggactttttccttctcaaacttttccgccagtttcctcaggtgttgagagcagacggggagctcgcctcagtcccgggcccccaaccctgggccagcaaggccaggaggccacggcggagcagcccgtgccacgcgccgtgcgtctgccgggcgcggccgcggagccaggcgagccgggggccaccgcggggggcgggggcggcggacggacggaccgacggacacacccgcgagcactccaacctcggacccggcgcgcggcagccgggaatccctcgggccggggaaactgcgcacggggcccggcctggccgggccgggccagagggccccgcctcccccacccgccacccccgcccactcgggcgcccgtgattggctccgcccgcccctggctgcgcgccgaagcccgcctccctcgcagctaaagcagacggtacccggagcggagcgagccagaagggagcatggtccccgcgccgcggccgcgccagcccccgcgccgccgccgccgtccccgccaccgcggatctcgccgcagctccagccccggccccggctccgcagcgcccgtccgcagccccggcggtcgccgcgcttgagcgcagcccccgcccggagcccgagccgcgagcccggagccagccccagccccgcggccgccgcggctgcggggagagggcgggggcgatgctgccggagccgccgccgccgccgccgcctcgatgagagccgcgccgcaccgctcatagccgcacaggctgacaggcaggaggaccgacttccctctcccgggcatcctccctgggctgccgggaggcggcggcggcggaggaggaggaggaacgaggggagaaggcggagagcaggaacgcgaggaggaggacctggatccgtttcctccggccaggacccgagcggccccagccaccgctacccgccggcgctgtccgctctccatcagccctcctgcgcccacccgcgaccccgggctctctgcgcgtcgggccggggccggagccgcgcgccggaggtaagagccgggccgggctggagcgcctcggatgcggcgccggagggagacccaggtcctggccgccgcgtggggccgggccgggccgggcgtgggagcggggccggaacccggaaccctgggctcggcttcggcggcggcggcggcgacaggagcctcccgcgtctggactcgcaggctgcaggagcccttgcgcctgcgctgctccagggggaaaaaaagggggggaaaaaacttcctgcccccgggtgtgtatgcaccggggctgcctggggccactgtcacggtgttcggaggtgctggaggcttgtgtgacccctggccggagcagcccccctgctgggcccggcggcgcgcgcccctctccaggccacgttcccctgagcggcccagggccccggccgggcaggagacctggaggcgacggagggctggcccccaggggcggccgcgcgcactgtcctttggggaggtgcgcgcctctgtgcagcgagaagccaggttggggttttctgcccctcgcgtcctctgatctcgcatttggggactgggtctctttactcaatcccaagtaactttcgaggtagatgagctcgaaaaccgtcgggagggaacccgcacagaccttattgtgacccaccccaccccgacacacacacgcacacttcccttgacaccttgtgggtgccagcgtgttgtggggggacgcggaaaggagagctcacggggacggcgaagcggccaggaggtggtgtcgttggggaggggttgttgatgtgtgggacagggtggacctggagatgtgtagtgtgggagtgtgaacgcgcgccccgatggcctcggggggccgggggagcccagggctcgcgtcccggtctccgtggcctggagcgggctgagagcgctagggttatctgcggtcgccgcgcgggtgcccgcgctgggcagcgtcggccccgggccccaagggagggacgtgctcgcctggggccggagcgcggggctgggagccggggtaggtcggaggtggctcttagggcaggtcgcctctgcgttgcctggggaaggcggggacgcgctgcctgcctgcggccagccgtctcggaggagggggtggcggccacgcgcgagtctcggatgcctgggtccacccgctgagaagccagttgtcgtccctgggctgtggaaccaagcggcagacgcggtccgttggcgggccctcgcgcgggcccccagagatgctgatgggtaaggagctgccgccgccgccgctgccatccccgccgctctgcaaacgttctcctccctccctcccgtgcttgcgccgcggcgcgccccgggcgaatcgtggacgcaggtatttatgtagcattaggcgagacctcggcgctggagggaccagaccgtggaggacgccgagctgctgctgcctgcgaaacttccacttcggcagctcagcggcatcccggcccgctgctgcaggttccagcctctctccagtccagcaacgctg

SEQ ID NO: 36696 - DNA, 752 bp, Homo sapiens
tgacttgaccatgtgctcctgtggaaaatgatcacctcaccttttatttatattctgttgttgattttcctctaaggatctaggccagtgctgggcacattttgcactttcaacagtcgaggggcagaaaaagagaattaccatacctgaggcttgccagtcaggggcagagccagaactggaatcccagcagcccagacgtgggaagagcatcgaggaccggcaggaggaggggatgggagggccgtctgggtgaggggtcatctaagagcccagtgctgtttcacactgtcccgggtggaaaatgcaaaccctgtggattttcaccctctcagtgttgactattgtcctatggaaataagggtgatttcctaaaatgtgtggctcaataaaggattccttcaccggggtgtgaaatgactgtgcatctgaatctgagccagaaaagataaactttgctccattttcccacacaccggattagaatctttccaggacactaacctagtgtgtgcttatctaggtccttgggcctaggggcccctggtgaaagcccaggccatgcaatccgagtcccagcgcccccatccttccccctctctcccgtgggtttgtatctccctggcatcccccagcagactgctctgcccagctgtgaactgaacagcctggcttgtcttggggcagaacctgtcctcacaggtgtgtttgggcactgcaggagggttggggaaaagtggtgtaaataaccc

SEQ ID NO: 36697 - DNA, 1171 bp, Homo sapiens
tactcgggaggctgaggcaggagagttgcttgaaagtgggaggtggaggttgcagtgagctgagatcgcaccactgcaccactccaccctaggtgacagcggaagattctgtctcaaaaaaaaacaaaaaaaaactacagatgcctaggtccttcccccagatattctaattgctgtcatgaggatatcagtgtgttttaaaactttaaccactactttcaactcataggtgttattaccaagttcctgaattctatggcttgaggaactgagatgggagttataaagagtttgcaaaacaatattcctggatgatgtgtaatttgtctcatctttcagttcctttaaaatctaccccctggatcaagccatccaaaagctgggtaccttggctatgttgtactatgttcatcttgcgccaccccacatgaactctacgggctgttagaatatctgctgccctccatccaggtcacaacagtgcaccctcgtttaggattctgtggcagttcatgtttatcctgtcacttgtgactcctttgctaggacccttgggagaggtgtctctgattccaccacagacatattcttctcccgagccactgtcataggatctcatggacccacaaatcatgttgtaacagatttgcctcttccatgctctcgaaacggtaactctcaactctggctgcctatgacatcacccagggagattttttaaattctcatacccaggctacataccagatctgtgagatcacagtcagtctctgggaggtggatccaggcatctggatttttgtaaagctccccaggtggttctgatgggtgtggccaaggtcagaagcactgccaagcctggaggcagatttgtggcccacctgtagcctgtgtatggcattttctaaatacggtttcatgtaggcaacattccctcctccgtttcctgctcctacacttgtgattctctctcctacttttgatttatggtgtcttaatgtatccttttaagtcccctgcaatcctttctggaacttagcaaagtgaaaacaaatagagtagaaaggttcctgcttttctctggctgggatctgggcacagctcccaccccagtcagccctcgctggaaagagggtaggagcctcctgtttccccagccacagtagctggt

SEQ ID NO: 36698 - DNA, 637 bp, Homo sapiens
gcaagtcacctaagcattctctatttcagtttccccttctcttaaatgggaccaacaacagtacctacctcccacagttgctgtgataattaaatggttaatgcttgtaataatacctggcactcagttgtctgctgctactaatactactgctgtatttattgtcatccaagcatttaccactgttaggtaacatgttgtttgtttactctttgctgactagactgtaagctccaaaaagcaaggaccttgctgtcctgtcttcagctgttaactcccttgccaagaacagtgctctggcacttgctttatttggcagttgctcaaataaatctgtgaaacagatgttgacctgtgatgacagagaactgcctgtactttcccctgcagctgtcatgctatttcacttctcagcctatgcttctgttgttccttctgcctggaaatcctttcccaccttgatgcctcagctcaggcaaggaaccagaaaggcttccttgaggttaggttacatgctcctcctctgtatacctacagtgcctaatataaaattcaatcttaacacatgccgtattagactgaaatgatgtttgttatctgtctacccccacaagaagcagtcaagcatagtgattaa

SEQ ID NO: 36699 - DNA, 642 bp, Homo sapiens
ataatgaatgtgggctttgaattttaaaaaactttcaagtcttggctatgtcacttgccaacaagtctgtttcctcaactgcaaagtaagaataataataatgatcctacaaggttgataagaggatcaaatggaaaaaacagtgtattgtggataaaggtacaaataaaattatagatagtctcttcattccaaaaaggggggaaagtatttcttttcagacttgccaggggggaggaatgtaaatgctagctcattcttcctagtaacagatgaggtaatggtttcaaaggtatctgctcaggtccaaaagcacagatttcacaattaggatacaacattaaaccctgaatcacccataattcatttttttaaaaaaagaaatgaataaaaactaaaaacaccaaagctgttcaaacatggagtctgaactataagaaagaggccagtaaagattacattgtgttcatccacacactacattatcccaggataaaacaaaaaccaaaaatgtagttgatagtattagattcccaaatggaaaatttcttttctcatcatcacaaaccatgctcccacaagcacacaaaataatacacatataaagtgagaaattttccactgggagcagagaaaatcctt

SEQ ID NO: 36700 - DNA, 1043 bp, Homo sapiens
aatggaagaatgtccagttacccaagtcattaatgaatgatactacatatctagtaagagtcatcagataatagcaaaaaggatagctggttgtaacagatggcaacaatctcaaaggcttttacattaagaggggaaaagtaattacttcgaatctataatagtacagctggaagaatgttaacattgccatctcttatcctcgtatttctttgtactccctatccattgacttcccttactgtgctctttccctaccaagtctatttcactgtaatctctggaatcctggttccactgcaaagaaactatacctctagtctagtttatgctccatgacacactccaaaaaaattaagccaattattctcatatccttcagctccatccacttggtgattactcacctcttctgtttacctactcagactttgaccccaggtgtccaccttccaagatatgctgtttaaatgctctttacctcatccaaatttgtctactatggcattaaacactgtatttaatttttatggtttttctagaatgtctaccttctaccttctagacaccaaactccctgagaacagagaccacttcttattcacctatttttctatacctatcccagtgcctggtatttagcaatgcctaataagtatgtactgaaagagttaaccttgtgatttttgttacccagcccaaatcaaacaggaaactgcaaataaaaaaagggagaaagtcaccagtatggaaagatagaccaaccatgacactgtgaaaatatggattagaatcaaagacatcatattcctgcccaaatttagccacacatttgtggtaaaatttgaataattcattcagtttgtcatttctaaccacttactggattaaacctatgaaatgaacccttaaaaattccataaatatgatatcattctaccttcataacaatgaggtaagtattatttcctcattttacagatggggaaactggggcttagaaagatttaagtaattggcttaaggtaataaagtgaataaag

SEQ ID NO: 36701 - DNA, 301 bp, Homo sapiens
tagaaaaatactcacctatagggtgtcttggattggtggatgtgcaaggtgtagtagaaaacagaaaaactgttatagaaaaaaaaaaagacagtaggccaaattactgaaccaaccgtttcaaaatacctctgacatgaccagcactcttgcacaagtaaaatgaacaaataccagcatatgtgaactgttcattttgattctttattacaacattatactccatttccttctgacctccttcttgccacagacatcataaggaccttagataactaatttttttaaaactttctttatt

SEQ ID NO: 36702 - DNA, 2538 bp, Homo sapiens
taaaatttcaagatctttcaatcagttttttaattcaatcaccagcgtctttaaatgtcatttttgcaactgcatgactatggtgttcattcaccttttgtaatatagtcccataacaaaaatgtagacacccaagaaaccacacagttttggcatgatggtgctgactatccgaaacattccacttgtttctttcgacgtgctccttctgtgacctgaaagctctggttcctactagcaccttggtgagctagctggctggttccccagctataatatcatgtttgatctctcctgcctggagaggcgatagcgttgattttgtttttaaagttggtgtcagagcagctacaaacttttttcagcatccctgcctggctgccaactggagctctctgttcacttcctcaccaacttgaaccacccccaaactgagagtaagctggagttagacagcggcaggaactgacacactttcaagaagggtttgacaccgcagaaaactttcacttctccaacccttccacccaggggctctggcccttcgctcttgcttccccgctagaattcccctctggggcaggacaaggacacggacagcagatcgttcgaatgacgccgaaagggacccccaaagccctctcccctggactcaagggctgttcttcacacaaaagagccgggccagcttgaaaagcaaaggggccagcgtcgcggcccttctctgggtgccaccctccaccgcgcccgcagaccctgtctccagccgcccgagcggtctccactgtaggcttcctacccccaacccggccagacaaagccccggcagcagggccggcacttccgagcctccggactcgggacgccgcgctcttaccctggcctcatccagagtgacgccggcgccaccgcttcccccggctttggcggcggggcagctggcggcgcgggtcttggaggagcgggtccgagaggagatgaaatggctgctgcctccggtcgccccaggctctgctccggccccaggcccaggcccgggaccaggagacttggacccgagaaggcggagagagctcttccgggtgttcaccatggtccagccagggggacggagtccacgccgcgcccgggagagccgagcaaggccggcccgccggccggtcagtcagggccagcggagccgagccgggcaatgagagacgagccggcccggagcgtgcggagcgcagacgagcacaagagagagccgggcagaggaagggaagtcggcgtgagcaggcggcgtgcgggaagcgggggcggtgctgcagaccggcagcacagacactccgccggcttcgccctcctcagcgggagccgagcggagccgccatttctacccctttctctcccgttctcgctctcgagctccgtgcgtcaaggctccagcgccgcagggccaacgagaccgcttccggccgcagccacggcggggcgctgcgaagccggccagcccttcccggctgctcgctcctctccctgccgcctccagctgccccgcccccggcgcggcgtcagcgctcggcggccggggagcgacgctctaggctgtcagctcggtggtttccagctctccccgaccgcagggctggggcgaccagaaaagccagactaatcaggacgagttcgggcgtggaattgggcctgaagccctcatgcccagccaggcctgaatgccccagaccccaccgtcacccccgtggcctggatggagcaggggacggccggcgaaggcgcggggtggaaggggagcggcgacgaaggcgcgaggagctgactgggaatccccaagctacccgaggcaagacactgaacttgagtcgcacttttcatgcctgtagaaatgagaatgacagctgtgataaaaaaaaaattcatctgggcggtatctggaacttggtaagcttaagaagagaaggggggggggaaacaccatgctagaactctgcgtttttaaacaaagcgaggcagggtcgttttctatccccttagccagatctaaggcggagccaaagaatgagtaccctgtaagagccgcctctatcgccgccccctgcccccggcccgctgaagaattaagaatacaaaaagctgaacccacagataaagcatttgcaatttaacttccaaagaaaaaaaaattaagccacacaattcatatgaaaagctctgctgtaggccgggtgcggtggctcaagcctgtaatcccagtactttgggaggccggggtgggtggatcacctgaggtcaagagttctagatcagccttaccaacatggtgaaaccctgtctccactaaaaatacaaaaaatcgatgggtgttgtggtgggcacctgtaatcccagctgctcgggaagctgaggcatgagaaccacttgaacccagaagatggaggttgcagtgagccgaaatcacgccactgcactccagcctggatgacagagccagaccctgtctcagaaaaaaaaaaaagaagaaagagagagagaaaggaagaa

SEQ ID NO: 36703 - DNA, 1445 bp, Homo sapiens
agcctggccaacatggtgaaaccccgtctctactaaaaatacaaaaattagccgggcgtgctggcaggcgcctgtaatcccagctactccggaggctgaggcaggagaatcgctcgaatccgggaggcggaggttgcggtgagccaagatcgcgccattgtattccaacctgggggacaagagcgagatttagtctcaaaaaaaaaaaaaaaaaaaggtgggtgggggtttcttcaacttcgttgtccacagggctcaggtcaagttcaacattgtcagaatgcagggatgtctctccatggtttctgaggctgaggaggtacccaggtaagcacactctgggttctctggtgagcacacaccgagctgcctgcatctcccctacccatgaaggcagctagccgccgggccagtggtgggaaggggaggcggccattagcgccgttcccgccgggacttgaagcgcccggccgcggcaagccccgccctcggcgcgcccccgcgtccgcgcgcgctcctcgggtctgcgcggagccggcgtcggcgcgcgcttgggcgcctggcgaagaccgagagaggctggcgggatctcagcggcgcggccgcggaacctgaggcggtctggggcggcggcgctccggctctgaagggctccagccaaacggagcccgcggccaaacggtgcctgcggtgcctgagctgagtgaggccgaggccgggaggccgtgcccggaggtgagcgtcccggggccgcgccgcgtccggcggggtgagggcggggcggggcggtcgcctgccggctggggccgaggggtcgcggcctgtggcttggccgccgcggatcgtcggtgtcggggggagtctcgctccggagggccgcgtgtttgcgactcgggaaggggcgccggcggcggagcccgagccagggtcccgcccagcccaggtgagcggcgaccccgagcccctgactcgcctgcggcttgacttgcgagctagctgaaggcacagctcctggttctctcgcagggcgttccgaaacttacagttatgcgcaacacaatgtttctattttcaaaggcgaacgctgcacgatcgcagtccagtgatacaaagtatgcctattagtgacttcacccgactcccaccactcactttctctgatgttttgaaggcctggtgttcgctgatttcacgtttccttaatttcttctttgtgccttttttttttccttttcgctgccagtaataaaagagtttattacttgtcagcaatgatgaatgttcgtgtggcatccagcgttgagttcctatgtacgtaatttgagataagtaaagataggaaactgctgatttgttttgatgcgaatgcagaaaataatgtggtagtatgaagtctggccggttgcagtttgtttttaggggggaaactttaaaagttcatgttg

SEQ ID NO: 36704 - DNA, 1503 bp, Homo sapiens
caaccgcctgactgtcgcctgatggttgcctgacgtacctggttggaagcgtggccctctcctgcccttttcgaggctgactagctacctgctgtcaccccccttcccttttaaggacttttctggaatgttggcctgtgccacctgcttttattcgctggccagaacttagttactggccatccccgtggtctgtataggagactcgacaatgtatatttcaggcgttgggcatcatgtgtagccggcggaatgcctgttcagccatggtccagcctgaacgagcgggcctcttgcttcattttgcaggggagctgctgcttgcccgcggtcaccccagcggtctggcggagcccttagcgcgcagggccgccgtctgcgggcgctcacgcccccggggatccaccccaaggagaacggtcctgagggcctgccgggcctttccccccgcggattttggttcttcgctgtttccctttggggtgcccttcgcggtttctgcgtttcccccgcgttgccagcagccactcgcgccgcgcccctagcccagaaccgcccctcccaagggcgataaccccgagggcaacggccgcgggcggcgctgcggtggcaatggcggcgccccctgcaccagccgccaaggggtccccgcagccggagccgcacgccccagagcccggcccggggagcgccaagcgagggcgagaggtgagcggggcggcggggaccgggaaggggctgcgtcctcggggagctccagggcgtcgcctcgcagccccttttccagctgggggcagcccggaggggctcggcccaaacctgccagctcaggggctgccctcgcggggttacacggctgggagcggggaggctggtaggtgccggcgccggaaagagactaggacgggaagcctagccctagccaaggaagtaacttggggatgcgtggtcattgctgtcctgattcccggcttaggggtcttgtccgtgccaccgcaggtcctcccggggtccccgagctctgggcaggcagggctttctgaagcgcctggggaggctgcgtccttcccgacctcaggcagctgctgtggcctcggcctccctcccagaccctggcctcgcccaggcaccaggctccccttggaggcagcctcagggaaggtcctggccatgggctccgacaagaagggaggagggcaggtgggagcggcggggtcttcggggccccttgtcccttgcccgatgccgccgggccgtgctggccagtggggctgtgctggacggagcaaggggcctggggcttcctgggcctcactgaacgcgcctgctccctgctcgtgcccagggcattctgtggcctcccctgaccacctcagcccccagcctgttcagggcttcctacgaggcacctgggagcacaggattgcatcccacaagaaagtgaggtgagatgaaggggctctccggggactctcacttcccagggaaacttagaaattcagg

SEQ ID NO: 36705 - DNA, 2153 bp, Homo sapiens
acaaaaaaaaaaaaaatttaaaaatacaaaaattagctcggtgtagaggaacgtgcctgtggtctcagctacttgggaggctgaggtgggagaatcacctgagcccaagaggcagtggttgcagtgagccgagatggtgccactgcactccagcctgggcaacagagcgaggccctgtctcaattaaaaaataaaataaaataataaaatgaggtatccacgaatgtttaagatgacagtctgatatgatcccatttatataaactgatcaatctcaagcacacatgaagaagcctatgaaaggctgatcatccaaacgattctggcagttgtcttgggatgctgcgatttcagatgagctttgcttagtattttcctgcatagtttgagtgtttttctaataagtgtattatttacatagtcagaaaaaacaatgcatcctttccattgtgaaacacagtgtccacctctgtcagcccagaggcaccctccttgctctgagccagaatgtttttctaatgagtgtattatttacatagtcagaaaaaccagtgaatcctttccattgtgaaacacagtgtccacctctgtcagcccagaggcaccctccttgctctgagccagccccagatgagggccctggagtcctctccgcagtggctgacatgagtactaatgggagtgtgcagggcggcagcactcagctccctcccctggactcagccccgggatcagcatcctggggaaggctgaggagcccttgacactgtggctctgccctccggtcccggttcccaggcctccctcttgatggcaagcaggcctggatgggctctctgctgctgctgggcctcagctctctatcccctcccctgtctgtttcagatccctgccgcccaggtgtcacttgttctgtttgggggaaaagtgtctggggcggctgctgaccctgtggctgggttcttcatcaacaggagccagaggacagggtctggacggctcatgccttggtgagcaaccgctcagtccttaggatccaggcacctggtcctggccctgaggtcactgtttgtcacagccctatttcctagcagaaacccactgggtggttaggagacaagactggataatatcgcaggtgcactggggactgactgtgagtgataaggagttcagagacattcttggggactctccctccccagatggcacggggctggatgaagcctccaagactcccaggcctggcctggggcactgagtgtgggaaggctgggctgaaggccatgcgaggcctcacggaggaagtacagctcagtgtcccaatgtccacacagggaagggcaccagcagcgctgagagtgcagctggagctcccacgaggagtggccgcccattccccactgcctccatgacccatcggccacttctcccctgctcctggctcccacccagggcgccccagcctagggattctcaaggggcagagaaggggtggggttcctccaggctgggccctttgtgttcccctgtctgggtcggggggccgctccacctcggctgtgcttccgcagggtgctgggctgcacccccttcatcgccctggcctacttcttcctgtggttcctgccccccttcaccagcctgcgaggcctctggtacacgactttctactgcctgttccaggccctggccacggtaagcagggccccttcctgggcctgtgctctggcgaagcccattgctggccatggccactctgaagtgtgctgtgggggcagggctgccgccctccccacccgcctgtgcctggaccatgccattggcactcgccagccttgcgcgggactggctgccccctcctgcctttgggaccctagctccgacttcaggtggccagctgggatatgtcacgttggcctgtgggtgtcgggatgtgacacccaggatgggggaggtcgcccgctgtcaccaggcaaagctgggggcggttctaagctctgccgacgccccagttcttccaggtgccctacacagcgctcaccatgctgctgactccctgcccaagggagcgggactcggccaccgcctaccgtgagtgcagccgtgggtttcgggttccagggaggcaactgcccctgggaccccactcc

SEQ ID NO: 36706 - DNA, 461 bp, Homo sapiens
aataaaaattagctgggtgcagcgtcccacacctgcagtcctagttactatggaggctgagaggatttgagctcaggagttcaaggttacagtaagctatgatcacaccactgcattccagcctgggtgacagagtgagaccctgttggggaggtgggggtgggggcagtaggggaggaacgtgtgtagtatgtgacaaattgaaattaacatgtgcttcatgtaagatgtctacatggtaccaatgtaccttaggcagtcagaggtaaggatttggaaatcactgacatagggttaatcattaaagtcaaggtagtggagaacctcactgtataagatcagagggccaggaggaccaaggtttaaatgctcttcaggcattccccaacgctactgattttgcctgaaactaattgtatacctattgtttcacaatctccagagtataagttttttggaga

SEQ ID NO: 36707 - DNA, 822 bp, Homo sapiens
acaagaaaaaaattaagaagagttaacgaaaaaacattcatccaaagaaaattatgactaatccctctagactcttctatgcatagtttggctgtcaaactttttcagttatactgtgcaactttgtatcacggttttcatctaacattatatattagcatttccctatgttatttaaaagtttaataaattagttttagaggccacttcacatacactcagtgaagtgacataatgtactgaactgctcctagctgtacccaactttatcccgctacccgctataaataaagctcggaccgaggtcttaaggcttaaagcatttcctgactttggatgacttccttgggacatattcccaggagtgttattcacgagtcacggtcataatccctcatttacacccacccctagctcgatcctcatcccgcgacccctcacacgcggcccgccccattctcctcatcctctctgcacgcctgaatctcctccttcccgccccctacccaccaagagccgatccacttccctcctgaccccctacagcctccccacacccgccaggcccggcagcagtggagatgaaataccttaggtctcactgcctcacaaaaacaccaatctctctgtggccgcccaacatcacgccgccgcacataagaagttctgggcagccaccggaagcaccggccctcagtcctctgataggtgggcggtgatatcggtcctctgataggtgggtggtcctctgataggataggcacgctccgagatggccccgtctattggcttttgaatatgcacattagcagagggttcgtc

SEQ ID NO: 36708 - DNA, 1225 bp, Homo sapiens
ataaaaataaaaataaaatgatggtttaatcgccggcctttgccccttctgccccccaccccccacaagtctgtaggactgggttgacttcccagagcttactacagattagatgctaaataaatgtctattggacggatgcgcgaatgaatggatggatggaggatgtggttgtgcttaccacgctccctggtcagtgggttaatgtcgtcaggcggggccaggctcgctaacagccgggcggggtcccttcccccgggccccgccccggccgaccccacctttccgcgcggctccgccccgccgcccccttgccagtggcccctccccgcgcaggtcccgactccagccgcacctcctccggctctgcagtggcggcgaggaggcgagccggagcgacggcggggctggggccggagccgagccggggtcgggcagcagcagggaccccccagaggcggggcctgtgggaccgctatgggcgtggagatcgagaccatctcccccggagacggtaccgggctccctccggagccaggggaggggaggggtcccggggcggagcccggagggcgggggtctgattcggaggtggcgtggagggtgctgaagggtcggggggctggatggggaaggcaggcggagacgccggacgggattcttgggggtctaggagaccatcctccgccatcctcttccgcgctcacctaggggaatgtaggcggcagctcggaggcgggggtctgcggcccggaggcgggggtctgcggcccgccaccgccccgggcttctcctgtcgcggctgcagtcgttcggttatccgctgctgctgataccccagcctgggtttcggcttcgctttccctgccctactcggcgagctctggaaagcaggacctgctctcggatacccgctgctcggggacctcctcctagcgcgtcccccgccgggcctcccctcggtcgcttccctgcgggccgggctgtgagcggctgtggggacagacccaggctggggaagggggaagcgctcccttgcccgcttccggatctcgctttatcctgccgccgctttcagactccctggccaccctgtccactcccatggcctccacattgaagcttctaagcccagccctgcgacctacggccgaacctctccctggacgtcccagggtgctccctggtcagcaagtccaaaacagaactctcgcttcccaccttc

SEQ ID NO: 36709 - DNA, 1366 bp, Homo sapiens
ctcagcctccaaaagtgcggggattacaggcatgagccacctcactcggcctaacttcatcttacacctctaagcgttttactgttgactaatctcttttttgagttttttttttttaaaagtttccgtaacactgtactctcaaacactagaatgtaagcagaaggacttgttttattcactgctgtattcccaatacgtaagactagtgtctggcacatagtagctattcaataaatataattgatgaattatgtcccacatggcaagcagaatacatagtaggtgctcaaaaaatattgttttaattaatgtgttaatgaaggatccgaaaagcaccatgatctgaggggaatcccaggtcctagttgttggtgaaccattaagttagttgaggactcttctgagatatcgactttaagtcaaggagataatcctaacgccaggtccttaggtgcgggtcaagcaaagaggctataggggtaacactatcactgacactagggtagagactgaggaactctcaaaaggggtggggacagaaatgtggctcaaggagcatatctctgaggatggggccggatagtgtcttcgctgacaggataggaattctggagttctccgctctggggacggaggaggagcaagaatgctccgatccacgccgctaagaaagtcaaacccgaagttctcccaccctccgcagaacacccgatactcacgttcgccctcttggccgcttgcatcgccatcttggcgggctgatgaagttaccgtagcagatactgaaattcctccggagctcgctcggcttcgggggttacaccgcgttagatgcaggacatcaacatccaggacccgccggaagctgttacagcggaatagcgccgtcttacgctgagacgcgctgacgtagcagcccccttcgaatagactccggggtaaaaccgagcctgagcgagactcgaggccggaagatggaaaggcgagagtccaagacacttccgggctctgtaccgtaaagggcggggcgtagcctccaaaaggcgagatgttccggtcggggaggccctgagcagaggaacccgggtggagagggcggggcctgaggagggcggagagctggggcgggtctcaggtgagtaactggggagcggaggaggcggggcttgagcagggttatgacaggtagggcgggacccaggtgagtagcgggagggggcggggcctgaggagggtgcggagagctggggtggggcccaagtgagtatccgggagggagccgggcctgagcaaggcggtgagctggggcgggacccaagtgagtaatggaaggggcggggcctgaggagggtggtggcggtgg

SEQ ID NO: 36710 - DNA, 2394 bp, Homo sapiens
cctggccccccttccaagatcccctcttttttttttcaaaaataaatttcagaatgaagtcaggtttttgtaagtaaggagaagaaaaaggagaggccattagttttatgcaaataaactggaggtcacatgatcagtggatgttataactggtagagtccttagctatttacctcatctgaaccccttgctttacagatggagaaactgagtcccagacgggaaataatagtagtgggattaggaaccttgacgatggttcccatgcatcaagcgctaggctctgtgctcactcaccccagtcctcagaagctgtagagcagagggacttaaccaggagtgtgtggcagaaccacctgaggagtatttcaaagtacacgtgcctgggcccccatcacgtttcttttgtgccccgggggattctgatgcacatttctgaatgaccccaaccaatgcagctggcccaggtcagtaaatcagcatcagacagaagaaaattcttaagagtactgcccgctgtcagctccgggactctcagagtggaaagagttaagaggtctttggagccacaaagacctcagcttgaatcccagctcttctgattgctagtgtcacggccttgggcgtactgcttaacctcactgaacttcagtttccttatctgtagaattaagatggcgaacagggtagcctggggagtaagtgtgcccacaccccacaacaatgttagttccgccctcatctggaggcctgagtggctatggattagctcggggtggattctgctttacaagtactcccccttgttttgcatgaacaaagagggcgccctgggtttaggtctgggaagccccagcgcagctgcctgctgggtgtggagcggtgcacgccttcacgtctggtcaatgtccactgagtgctgttgagagggaggctctggagtcccgcccgccccggcgcggctgagccctgggtacctgcattaagtccgcccggttcagggcgctggccgccaccttcaggaggacttcaccctcccccgggctcggcttggccacctccttcacgtagaggttttccggtcctcccggcttgtcaaagtgcacggctaacatattgtctgaggacacagggcagggcagggcaggacaggacagggcagggcagggcaggacaggacagggcagggcaggacaggacagggcaggggccgctgtatcctcgcggagcagcccagcctcaggctggcaccgcagcgccccctgccggccagcgcctcgctgccctggtctgccgcggacccggcctccgccccgagctcctgcctgggaagtcctcggccgcctccagaccgatcccacccggaacacagatgggaacggcgggaagtgggatggcggtacagggctggatgcggcagagcaggacaacgccgaagaggatcaggcaaatcacactccctctgagttggaagcccccagcccgacccgggtccccggcgcccgtatgagttacttactcctggcccggctcccctcccatgcaccaggcggcgccgagtggttctggctcctgcgggtcccggtgacaaagcccgagccccagagccccaggactgcctctgcctccaccggaatggacggctggacctggggtagccggaggggtggggctaagcagaaccaccctccccctctttcctttcctccttccccctttaaaacgcaaagttagaagcaagcaaatcagattttcttgtccttttagcctctggaaaagagtctttctctcagcttgacagaaagtgcgattctagctctcacttcaaggagaggaaacttccttctctctagggaacgagacccaacctcttggcgggcggattggtccattttccaggcatggccaggcttttggcacatttatgtaacaggctggcatcccgcccatcttgagcatgggtgggcaagctgggtgctgctaagagaagagaaaggagccgttgggagtgggggtggggaaggaaggcaaaacgcagtcctgggatccttatcactcgcctcctcctgacagtcctgggggagaggttcagccccaggagaaggatgctggcgattgggtaaaagctgtatccgtaagctacatgaaggtttctcaatctcggcgctattgacattttggactagctagttcgttattgtaggagatcgtcctgtgcatcgtaggatgtttagcagcatccctggcctccccccactacatatccgtagcactccttgtaaattcctgttttagtaagaacctcccatccttgacatctgatcaccctcaatatctcatcctccaccatcccccaagtgatatccgaccaccctggcctgtcttcagtgagaa

SEQ ID NO: 36711 - DNA, 1560 bp, Homo sapiens
agctgagtttggaaaatcacagcctggtgattttctggctatgtcaatggtttacatcaggattatctgcgatttaaaaacaaacattacacactgagaaaaactctgtaaaataaaaaataaaaacaaaaaacaaaacccagccaggatggagagctaccctgctaagttaaacacgactaaaagagattatgcgtggccataaacccacacattcccttcccggtgacctgcatcagcgccagctatgaacgctgatcaacatcccaatggactaaaaacaccttgaaggcacttaaacccacatttcccgcacaagtccccaagccttggacccccctcatcaggacctccggcacaggcgcccgtttcccgccactgccttccagtggtttggtccccgagcaggacccaaggcggggcagggggtggtgagcggtgaattccctggcaccgaggactcgagggagcggacgccaccccgctctgtggtgcccgcaaggacccggcgaccaaggacccgaccgtcaacggacgcggttgcgggtgggtggcggcggcaggattggccgggccacgcgccggtcaccgagaagcagcgactccagccccttccgcaaaccaagacccgccacctagagccgccgcccaatcccctttgggcctgaagccgtcctccgccgccccggcaccgcccgcgcggactcgctgtggaacccgcggcgcagggggcggagtgctcgcgcggcgctgcgtccgggagacggtgggcgccaacattcgcgcgttccgcagacgcgggcgggctcccttccagccgcagtcggacggctccggggtcgtcgggccgggcccgagtgtgtagcaggacggccgcgggcctgctggccttgggagggcagagaggtgcctgtcgcggccggcgacctccccgccaggccgggcggtccccgcgcacgacgcgcctgcgcgggaggcccccggcccggggctggcgtggaggccgcaggcgcccggcctagtgggtgggaggaagggccgggagtgggcgcgatgagcgagagcgggtgcggacgcctacgacatccccgtcgcacccgtgcctcggggaggacttcgagccgctcagagctcgaagactcgcgcagtatgaccgaaagcccctccctgccttctctaagcagctcagcctgtgtttctgtggccagaaagttgcagttcttcccactcgaggccaccaaagtcagaaaagtgttgcaaatgggactccgagaggccaggctgaagctgccacactggctggaatgggctgccttggagggggacgtgggaatccattccaagggacgggggattctttcaaagagcatctcgcctgcttataaaggaggctggctctgaagccgtcatctggagtctgtagtgaaggcctcttgttagggaaactggatggttagtgttcaaaatccattttgcgtgtgtgcaaggacacaggtggtattaaacagaagagaaaatcagatgactgtgaaatgttcaatactaaataagatgattttt

SEQ ID NO: 36712 - DNA, 2378 bp, Homo sapiens
tttagttgttaatttacatactgagttaaactgaacattttatataaattctcacaggcctagcaaaactacttattacttcttcttaactacttattaattaatgttagcaaaatagcattaacagattagaaggctagaaaaacatttcagcttgtcatcgaaaatgtggccaagactcagtggaatttctaatccttttcactttcaatgaaacctccggtaacaccctcatccattaagttgatcagaccttgcctcctatcttaccgggaatttggaagtcctgggacctgacttcatcttctacttcagcaaaatttactttaatccctcccaccctttcttcctgccctctaatgacaaaggataaggtattcaatccttctaccactctcttccagggctccagattccagccttctagccttttcaagaatcttcctcatctccatctattagtcagaacagggaggtttgacaaggaacatgaagtgccttcctgatgctgtacgttctacacactgatctgaggggggcttcacagatacacagatgtgtacacattctttgagctgtatacttatggttgtacactttgctatatataaattatactttaataagaaaaaacaatctttatcagttatttatactctttccattatcattaacctgtttcctctctgcagatcctttctactattatttaaacttgctcaagcttcagccaactttaaaaaaaaaaaaaacttccctcaacccacatttctcattatttactaccttctctccttctccctttcaaagccaagctcattcaaagagttttatatattcactgtctcctcttcctctcttccaatttattccaactcactgaaatctggcttctcgctctactagtccacttaactgatactgctgtcctcaagttaacaacacctgtgctattgctaatctaataatttttttagtccttgttttatttcacttgcagatcactcttctcaaagttccctaacattaaactctcctgtttttttttttttcctactactagtcactccttttaaggctccacttcctctaataattccttcagtgtccatgtttctcaggaactgcatcctcaatcctcttctctctcacgttactactcccctggatgagctccattactctcatgtcttccaacaccatcacatcacactggcgacatccagatttacatcctcagcccagaccgctgcctgacatctctctaggtactctggagatccaactactactgcctggacatctgaaactcatacaaaactgaactcataattctacttatatattccccctctgattttccctcttaggaaatgacaccatcattaaccaatttgttcaaatcaggcaactcatgactgacagtagtaactcatgactaatacttcatgttaatgattcagcagagtacacaagcacccaagacacacagctaactttatgtttctgttgtcactgccaccagaatggctctctgaccatgggagaggtctgtgctaaagctggtagcagtctacaaccttttccttaccttccttcctctactgctttaggttgtcacgctttttcattagcctacaagcgtgttaagagcagagataatgtcttattcactaaatccctagtctaacatagtcagccctcaaaaaatatttgttgaaataaataaaaaatataaccaaaaatataagtaaactcttgaccaaacacgcccagagattggttgtatctcttcatccagacaccatcaccaacaaggagaggaggaatggtaggaagagcagacagtggacttgggctggttgtagaacaaacctctccccctgctcgggcacagctccggtactactaatagcggcaatggcaagagcaggaatgtgtgtttagggtttatcttgggtgctagcgttttggtaaatttttttccctagtatcattaaacatttgccacctaactgataaatcacactaactggtgacagtgcagggggagcgggggaaagaggcactggctagatactctggctagatactctggttaacattagtttaacaagaagaaaacagaagcagagactaaaatccaagtttgtgtgcttctaaagcctgtactctttccattatgtcctactggctctatcaaacactactcctgggatcttctcttattcatgtattttatatggattgtgataacacaataaagactttcgttccaaggaacaaattgcctgtatccagttagggctgtggaatctaactccttcaattcttttaacagttgctgtatggcatagcagaaacaacgctggatttgg

SEQ ID NO: 36713 - DNA, 588 bp, Homo sapiens
atgctaccagggtatcctgggaacttttaacatcaaaatgtttttaccacgtgctaggtgctaagcattcagtagcaattaaacccagtcactgccccaaggaattttaaatctagaattagcagtatcaagtgctgtcccctgtcttttcagcaagataataatacacacaagtggctaacgtgaaagaacaagatatcaggcacacagagtatcagaggccaagactgtgggccctcttgtactcccagcaggtgcagcacttcccactcctacgtgactgagccgtgagtagcagaagagtcaggcgctactctgggttcagcctgagtcaaggcctgtccaaaacaactcttacacaagagattacatctgccaacactgcctcagcaacagctccaactacaacaaaagccagccaaatgcagctagatttattgtcccactaggctttcaacataggacttgataatcaaagcaaccatgtattacaacatgcagctaaatgtttatattttataacttttaaaatattttcattctatttttttaatctggacatttaacataaatcacataaaaacactg

SEQ ID NO: 36714 - DNA, 720 bp, Homo sapiens
ggaaacctttatgcacattccactgcttatagtaaagctactggatcaatgaaggctcagatcagagaagctgcaagttgctggtgttcactgggctgcagtggctattcagcctcagaggcagctatgctgaactgaaaggagacatgggcagaacctggattcttgggctgctgccaatgacccagctgtttggtttgccacttggaaaattacagattgacagattaaagacaccctcctggggctacaaattgaaaacaaatctcaactgctaattgaattgtctgtgtcacctatgtagacacctacagtatgggcccagcctctgatttagactgaaatcaagtatgactaatgtgcagaggataccactgcatgccaaactgtgacttggggatggtgggggaggtctcattgcaggtggcattgttccctttgactcctggcagactgactatattggacctttgttccctctctcaggctatcagtggtgcctcaaactattgacagtatttttttgtttttcacatagactttttagagcagttttaggttcacggcaagattgagcagaaggtacaaacatttctcctataccttccaccccactgacacatagtccctcccattaaaacattcccctgttgacacttttttaggttaccaatcagcccacgatgcccacactgtcatggcccttgaaactaatctgtg

SEQ ID NO: 36715 - DNA, 651 bp, Homo sapiens
aaagataaatgacaacacactgaattccatcctcttcatttcagaaacaactaaataggtcaggtgtggttcacggctcatgcctgcaatcccagcactttgggaggccacagtgggaggatcacttgagcctaggagctcaagactagcctgggcaacacagggagactctttctctacaaaaaattaaaaacttagttgggcatggtggcacacacctgtagttctagctactcaggaagtagctactcaggaggtgaaaggatcatttgagcccgggagttcaaggttacaatgagctatgattatgtcactgcactccagcttgggtaacaaagtgagacagtgtctctaaaataaaataatgtaaaaaaaaacaagtagaagccaaagagattaagtaaccaagatcacacaatttaagacaaacagtaagtcatgctattgattttggacattgctgtgcaagtcatggagagccagtatttaaaacacagtataaagttgaatgtacttggcagggcgcggtggctcacgcctgaaatcccaacactttgggaggccgaggcggcagattacctgaggtcaggagtttgagaccaccctggccaagatggtataaccccatctctactaaaaatacaaaaatta

SEQ ID NO: 36716 - DNA, 2270 bp, Homo sapiens
attaacaatatagcaaaccagcacagggagagaggcaatttttcgaaacgcttaagaagctttaaactacaagagctatgctacctaaactgagctcactaacaacgtaaaatttcaagtcacaccttgcctatttctgagtaagcaagcaaacactagtgagacaaactagaagcatggagcaaagcaagtcatttctatgctaaccttaattcctatcgtaaaggggttggctccatcaaaaaatattcctatttcagtattaacacaagtttcaaataaagcacacttgccattggtaattctagagcgacaaggcgcataattaataaatccaaacggagcatctttctatagaatacaaagccatctgcagtttcagcctcggtttacccactcactatgcatatgcagacgtctttaaaaataaataaataaatacacaaataaactttatctggcctgagagattacatctctcggtgcttcctgtatattctggaagtcaataacgctgaaggtaaatttaacatttccaactccggaggaacgcgagcggtagacgccaagcatccgcccactgtcctctcgtgactcgggctactttgacgcaccgggatgcggctcacctgacattcggcaccaacccttgccaggaaggaaaaccaactccgcgaaaataaaatgggtccccgaggaggcgtgcgggtgcccccagagctctcttctgctcacaccccgaaagcgagggggccacgccacccccgaccctcgccggcgtccgccacctgccagacgaggccgcggccagggacccgggctcggccgcaaggaaggggcagcccagcccaggccccctcggcgtctgtcccggcccggcagcagaggaaggaacccggggccggaggtttccgccccgcacggccgagcccgccaggggcctagctcgggggccgcccgtactcccgaggacccgtccccatcgtgcggagcgcacagccgcctcagcccgacccgcagagcctccgggcagcgggcgcggcgcccgcacctgccccgcgccttgctgcagccccgctagcggcttcacccacctggcgccctcgccgcgcctcccgctcgtcacagcgcgactccgcgtccctcagcaccggcagcctgggcgcgggcaggcgcggggagaccctgctctgccgccgtcgccgccactgcagctggcttggtcgtcaggccgccgcccgcgaacctgttgcgtagcctgtcacagccgctcagggctccgccggcgccgcctcagccccacaacaacatggcggccgcggcctccgcaggaagccggggggcggggaggtaggcgccgggccgggcagctgacggcccgcccgctgccgggcaccgactccccaccctccggagcccgaaactgcccgggcgtggctcctcgccccaggagttccggggcattgaaccctgaaggtctgctccgagtcggtcgggtccgaagcgctcctctctgccctcggggaggccccgaagccccagacctggcagcccttcctggagttgcacagacccacctggctcctcctccccgaggtaacatgctgagcttgggtggtgcttttcctgccacggcagacgccggggttttggaaagtcccaagcagtgcctgccacatccctgttgcacccaccacggggttctccctggaaccttctcactcgccgaagttttctccactgatctgggggaacgaattctctgggaattggggggtggaaggtgggaaggaggttgatcccacccttgcccatgggtctgttacaggcctcttgaacccttctcagggacctggaggacttaaccataccctcggtcatccattcaccattcctcgccctcctccataacacacgcggagcgcccacgaggagcaccctctacgctagtcacactccgccgagcagtaggaagactctgtccccatagagcatagcacgacgaagctaaactttcctccccacccctcgccaagggacaggcgaagctcctactcagaatttgtctcttttctcccctcccggttcctggtctcctcacaaaagaccagacttcaactcaagccgccaccgtatcccaaaaccccaaaggtttgcccttgacaagaagcttcttcaaggggaaaggctttcttttgattggggtgagggaggagttagtgtttcctaatgaacgtaaccaaatgtcggcctggcacagtggctcacgc

SEQ ID NO: 36717 - DNA, 2487 bp, Homo sapiens
gagattgatttaggggagaacacacaggaagcgaaacagcaggaaacgccgggagacagcagcagcaggacaggattgaggaagggtaagagtgcgaaatggggtaagaataaaagaaaggaatggacagatgtatgctttacaaggcacttccacggcgagtgactcattcatgcttaggacaacccagggagagacataggtatatattgcattgccagcctttggaatgcgggatgcggtccagataaggccatcgcagctcagagaggctgttcagccgctgttcgattcctctggtgacaagaacactctacttttggaagtagcacttctattagagaagttaaaaaaaaaaaaaaaagaaaagggagataagaagaaaggtgtgggccccttgaggggaaagatctgtgaatgacagacattttagataattcatggaattgcagagccagaacgggtcaggcagatcttttcatctgtaaaacgaagggggcagacgatcttccttttctcttgtctaatagcctgtgaaatcatctaggcaaccacctcccaattttacagaataaaaaacgaggcccgcgggatatgtctcgctcaaagtaacagaacgcccgagtggagggacaggcccggagccgactccgccccgtccgcagggcctctcgccgctccgacaccttcccagaaagataaagaacagcgggaggcggcaggcccggcggcctagctgcgagcgccctggtgttcgaggccgcttcccggcagcagtgggaggaacgccccgaggggagggcaggagaggggcggggaggagttgagacgggcggggaagagttcgggcctcctttcccacacttcgttaggacgccggctggggcgggccggcagagggcgcggggcggttcctcgctcggcgggcccggcaggcccggcgggctgggggcgcgctgtcccgggcgcactgtcggagctcgcgggcaccgggtcgcggcggcccgggcggccggagccggcaggggaagtgcggcgggcgggcaggcgggcggccgggaacgggcggggcggggcggggcgcgaagggggcggtgccgcgagcggggggcggtggcggcggcggcggtggcggccgaggaggagaacatggcggccgcggagagcggctgaaatgcctgttcttcaggccgggcgagcgggagtctgacgcgatttgctgagctctgtcctccgacggctgcctcgcggccttgagggcctccgccgcctgttcgctgctgctccctcgagcggagcctgcgtcaggttccctctgcatccccctgcggggggacccctgctccggaggagggggccggagagccgcggcgccgggcccgaggagcggcggaggccggggcggcgccgccgccacggtcgcggacgagtgcggcgccggtgagcggggcccagaggcggcggcggcaggtgagtggcgggctgcgggtgcggagcctcccggtgggtgcagctgtcacgagccgcgcggccgcggaggccctagggggcggggagcagctggcgcccctccgccccctgctctcctttctcccgctccatcctcctcccacttccccgagttcccctcgcggcccggcgcggctggagggggcggaggtcgcagctgtcacgggcaccagctgggggctgctccccgccgggggaaatcgctgcagcagcgacttctctccgcctcttttccagttgccctagttagcgcggagagggcgagcatccgcggagggggtgcgagctgcgcggccgcctgcccggcgtggggagcgggcgccccgggccgccgccgagagggggagccggaagtcggcgcgggcgcccctcggccccgacgacgccgtgaccttggccggcccgctcacctctcggaatctcgcctgccgggaccgcgaaatgggggcgaccgcggcgtccctctccgtcggcgcagccctcgacggcgcttgggtttgaccccggcgcgcttgctcgccccttctcccgagaaggggtttcggaggtagacatgggatggatactggacatgttcctgtcgcggcccgggtttggtccccttcctgggattcagccgaaagggccgaggaagggaagcaaacatgttgacgaggcgattgggaggtggggttggttagtgggcagtgacagaattcgggccgctctctagtcccttgtaaaagacctgaaaaaatcggacacccagggtctccagtccttactacccagctgtggtggctgcttttttattttatttaaaagcagttacccccatgggtagacactgcccagtctgacgacgttagagggagacggaggggttgacaatacagcctgtgtgtgtgtgacaaggacaggccacggtgttgtgtccggagagtttcatggggaggaaaactttaagctggaggatctgttagcctctcatgcttggcc

SEQ ID NO: 36718 - DNA, 820 bp, Homo sapiens
ttattgtaatttggggttcactcattttctatactaactcttttttcttcaacattactttcttcattaaagttgctttctttctcctgttgacttttcttgaatgtttggtaaattttgactgtctctccatatatattgaaaaagatctagaattttaaaatactggtagctagtgtatttctttagctaaagtgagaagcccttttcccctggcagtgaatgtagattctgattatagaagccctacttctcagttgttgtgaggaataggccttggaggtggggaaaccccttgtggcagccctagcaccccctttgggagattccctgggcagaactcccattttgagtcatatgctcacaattgtaatcccatggacaggtgccagagtcagctgcactcagagcaatggcctggcagcagctgttcagccatccataattatccagcaattgcccatggcctgttcctttatttgctcaaatgaccactgagcctggagttgttctggtgttctgggaaaattcctctctttggaaaatctctttctcctgttgcaagtgttttagtttagttgaagtttcacaatcagtttgtttccatttgtgttttgtctttcagaaattcttcgttgttttagtcttctgccatgaaaatttcttctgcctttccttcggctgtagatttgtgttccccttttttctttcttgagttatttcagtggtgtttttgaagagaaaataaaatataagtgatatatctgccacattgaaccacaagtctccttgggttcgtttacaaatgagaaaacaaagg

SEQ ID NO: 36719 - DNA, 1496 bp, Homo sapiens
accaaaatctcaccatgcactacttaatatgtagatgtatttctttagtttttcctttcaaagtctggatcattctgtatatatagttcagttagcttcgcatcatgagcactcttcccgaccactaaatatgcttcaaaaccataagggctcccatgaatatccttgtgcaaagctctttgggtgcatctgattattttcttaggctacatctctagcagcaggatagagagtcaaagggtaagggtgagatttgtttggtcatctgcaaacagaacctgactgctattttaaaaggtgtaccgatttacacacctggtgcctggtctagctgaagctaggttcaatttatactaacgtttttagtatttattttcaaataatttggcgtcctacccaggtaaatactcagtttgacttcactttgcactgtcccttcgggctcggttttgcaggaggacagcactttggggcatggctttaaaaagtcggccagtgcacaggcggaacagcggggacacaggagccaccactttaccgcgagcccagcagggggcggaggactgctgtccactcttcacacagtcaggcccttcccaagggcgcacctccagggaaacagctccagtctaaatgttaacgatcaccccaactcccgccgcacccactccccgcagccaggccttcggaccgaagaccacacccacttccgccctcgatgtctcagcacctccccctccgcccgagtgcctcacctcgaggaccactttgcgcatgcgccccagctcttggaggtaagcggctgtgtgcgggtggtcgcggtgagtgtgcaaggccgcggtggccgcgtgacaagcctgcgctaccagtgcgcccgccggccaggagaacggagcttgtgatagatcctttcgtaacaccaagtattgtaccaggacctgcggctccgccccagaggccgccatcttcctgaccacccgaaaggccggacctactccccggtgcatcttgggatcagggcggggccctgagcgccgccatgcttttgtacggcaggatcgcaaagcacgccgggaccggttggtttggttttgaagacgtggatggcgggaattctcgcttctggcctgggtgagctagaagggagaaggtaggggaaagacccattgtcggaccggaccgtggccagggtggcgggctgaacggccttcttaaaactccttccgtggccgggaagcccgctggaccagagtagccgtggcctcgggagcgcgccggggccgcgggatgggcgcgggggtgggcatggactctgctggctcggacgatgggagagggcgggcggctcaggaaaggggatcctagccgtgacatttgtgtcatccgcggcccaggggttgtgcctgagtggtgtgtgccctgccgtctgggtttgaatgggactagatgtgatgtgactgttgccatttttcttttattagcaaggacattggagt

SEQ ID NO: 36720 - DNA, 2570 bp, Homo sapiens
tgaatactatgctagcacatacacacaaaagtagtacgggatcatgctacacagaaataaaaaacactaagtaaacatttactgagcatctcctgggtgccaggcactggactaggcactgccttaacagctctttcggagttgattttgaacgcatacaacgacggaaagagcaccgcagtgggaatgtgaagacttaggttctaatctttcctcggtcactgatttgatgaccttgggaagttcttaaccaacagattccacttgcccaaaaggaaagaatttgagtgaagaggaggccgtcttggaattcataagggaaaaggcctcaggttacctctggccttccctccccacgtactaaaggagagtttatagctgatgaaccacagatggggcagagagaagggcggtggaactaacagatatggggacaccaccaaaaataaaacacaacgcaaaacaaaacagcgcggaccccggccatcccttgcacctcccctgtgaaacacgtcaacgtcagttacgctctctcgtgacgggaatgcagaatctgggctgccgggcaccatttcgcgaaccccaaattctcacacgcaccccataacgttccgccggctcccaggcccggctgggggaactaaactttcatcctccatctcccggtcccggacggccccctagaacgcgggcaaggtatctaggccgacggcccctcatggggacccaggccttcttactcttttgggggtacattcaaggcttagaggccaccccagacaccatctccggaagagtgacgtcggaggacgagggggcaacggaaaggtcaaaaaggtcggggagtttcgttcgcggagccgcacccctcggctgagacccgggcctgctcgggggcggagaggaggccgggccccaggctgttgagtggccgcccttccagccaatggacacgtcgccccgccacgctggggcccgcccctcccggctcgctgtactcactttccccacttcggcgttgcccatggagatgactttgatgcggagagacctgccgggctccttccgcttcggcatgttggcctccatggccctggctctctcggggccacccgcctcggtctcttcttgtgcaccgctggcccgtccctcaggcctcctcgtccaatggcggagccgctgctctcgtcaccgcctcgcctccgctgctcgccatccccgccgctgcctggcagcaggcgcgggcggttgggagcgtggggagccgggggagggagacgggagtctcgcgatgctagcgcggggctgctgacgtcatctgcaggccctggagacgcgactgcagttaccgagtttctaaggcctcgtcccctgacgggaaggcggcgttggggggcggctgggtttacccttcgaggtgagcgcgtccttgttttcagggacgcccggacgggaggcgtttgttgctttcgcagccgagtggtggaaatgtattggctcttcagggcgggtctggtagtgtctcgtccgtttgggagtgtttttttttttttctggattctttttcggttccatgggccgggctgctgctcctcttccccctccaatattttgttccccttgctcgagatccccgagaggcagaccccaaagccaggaaagtggggaggtcggaaccctggttctggaagagggccttgggcaaggcgtgaagcgattctgaatctggttcctattgttttttattttaaatggagttgtctatttggagtcaaggcaagagtgtttagtcttggccctcctattacagatctctgatggatttgttgactcctctgtgggagaaaggcttggtctactgcaggtgttaacgctaagccaggctggagctgtggacgtcagtttcctcagctccccgctgttcgcttcgaacgtgacctcgacgtctgctctccccttccctttagctgacaatgtgacagtgcttgaataaaagtcagtctgacaggaacggtaattttttttcagtgaatatcttcagttacagaagataaatagaacttgacaatgattatttatagtgccctgaaaaaaaatggctgccaatttccctgtatattacaaagacaaaagtagcattgcttcttttctcacctaactttaaacatcttaagggaagtgcattacaggaaggcaatgagcaaaggctcaacatttcacagtaaagtcagattttccacattttaattttaaaatgtgttttttaaacattaagttttttttaagacaagtttattctggattgttttgataatcaaataatataacttaattcactgaagcttctaaaattatttacaaatatgaaatataagtcctggttagaatttggatagttttaaagcttaaaagaatccacatgctaacttctcagtatgatttaataaatcaaattactaaacatgtaatttcttcgacagttcacctttggccctgtaatagggtaactggtattgtggaagaataattataaaatgtcaaatcttcagctgttatgattgattaagtat

SEQ ID NO: 36721 - DNA, 2158 bp, Homo sapiens
ccagcccacttggtgcagaacacgcacccggcccggtaagggctggcggaggaggaaggggcctccatcaggactggggcagtggggtgggggaaggaagaagcgggggggggggtgggtgagcagcagggggcctgacgaaaggggaaggggcagccggagctgggtgggggaggggcctcactagactaggcctgtctggggcgtagggaaagcacccctttccctctgcactcctgccttcctccccaggcaaacaataagagaaacaggggtgaactcgaggctctcgcatttgggctgcgggctgctcacccccaggggggcggagaaaccaggcggcattcaagagacaccacactattccccactccctgctggctcacggaagcccctgggcctggagtccgtccagactgggaaagccaccgggaactccggtgactactgcctccggtccagtcccatctcctcaggcagttgtcccgcctccacctccccctgcgactgcagcgcttcccattccaaaggtcagaggtctgagcgccaccgcccccaagcccatgcggccttgggctaccctggtgtcacaggccggccccctgtcagggtcgcaccgtgctctcccgccccccaccacttctttctggcggcctgcctggaggcttccaggaactcgcaggagaggaagctgtccctcttaagaggccgcaagctggcagggccctgaggaccgcgtggtcccccagccagaaacgcaggtcaccagggaagtgccaggcacccatctgccagctcagctgaagctgcctccaacccaactcctgggccaccagctccgcgtgccccagcctgcagttaccactgcccgggctcccggccggctgctcttcctgtcccccgagggcgccaggtgccactggagccctcgaggagtggggccttggggctcgtgggcaggaaggcggcgggccagcactaagtcagcatctccagaactcgggccaggccgggacgccgcggctgctgcgggccggggaggcatacttcactcttttcaaacccggagggctgcggagatcctcccaccggccctgccgcctccccgcccccggtctccccggggctccgtccaggaacctacccataaggccaggtgcagcccctctgcagtcgcgctcaggtgtgagccgcggccctgaagctctggaagtagctgcccgtcttgggggaggggaagggggcgatggggctgggggcggagggggccactgggaggggaggggggcggcgggggggagggagggaacattttctttgtctaggactccaggtcacgtgggccccgctggagggcctggttggctgcgagcggcccggggagggggccggcgctccgacgctggcgctgggccagcccctcttctccggtccgaggggcgcggggccggggggcgaggccgttccccgcccgttcccagggcccgcccaggccgggctgcagggagcgccccgccttcgggaagaccgcctggcccctcccccagctctggaagagattagcgcggggccggggggccgggaggggagggaaggggctgctcccgagccgcctgcccggagggagccgggggtccgggcgaaagcaagccggagctttcggacggcctgggagagccgggagaaagttgtgaaaagtgagtttctctgaagcacaaccaaaaaaaaaaaaagaaaaagcttacagataggaggcccaggaagctgtaggaaaactcagcacacagacggagagtgacagcaggcgcgcgcaggcattgggagcgctccagatcggggattgtttggggggtctcccgcctccacactacaggtgaatagagaagcgggggggcctcaaaaagcgcggcgtgaggaggtcaggcttcgagtcccagggcccctgcgtcactctgggccttccctggatttctcattttcctgtttgcaaggttggtcgcggcgagggcgctccttcagaaagttcagcaattccttcattcccaggctcaaacatctgcagatcgagaagacctgactcctctcctggggcctccaggtgcggcctccaggtgcagcctccgccatttcaagcttcctcctcctgaacaaaggcacc

SEQ ID NO: 36722 - DNA, 3131 bp, Homo sapiens
gctcagaaaactacctggagatggcccctgctagccaaccaaagagggtccccgggatgcctggccccccaaatcccacaggccagtcctaacacccaggcaatagcaaggcgaatagctcccctggctgcagctgtcacatctgcccgcgagggaggaggcgacactggagcagcacctgatcccaggatcccttcgtagccgcccgcccaggaggcgggttcagccgctggcagcctagggtgaaacatgaagactgagcaggccctcagggatgctgatggcagtctctgggcacggcagtgaggggcaagttgggtcacagggcggacagcgcttctccccaaggcttctgtccccgctggtttggagggggggtagctgcgcggccctggggctcggccctgcccaccctcccgcctgccgcaggccagagctgccctgctgggtgccagacgccatgttgggtcaaggtgcagccgcagggggctcccctcaggagccgggggaggcagcccctgggaaccagagggcactgctccccgcccagggcgccaacacctcctcaactggccgtgcagcggagagagggtgccaggacggaggggatgaggagagggggagaaatggcagaggggcgctggggtgggagagggtgcccccaagaagggaggcttcaggaaagcgaaaagcagtttggcagccccagggccgcgggccccagcgatgaggggctgggggaggccaggggcgggccctggacccgcgccagcccggtccgcgccgaaggggagggaaggcagggcggcctgggggaggggaactggggtgagggcgggacacggacagccgccgcctgcggctccgaagctcgaggtctcccggggtgcggggacgtggggccgaagaccccgctccgcagccgcggcgaggcctcgtccttcactgtgcagatgcgaagctttcaaggacacgtctgcaccggcccggcggggtgcgtgtgcgtgagtgtgtccgcgtgcgtgggagtgtgcgcgggggtgctggaggggcgaccccgggcgtaccccccctgcgccgctcccggtcccggccccgctacttccacccccgcgttttccggcccccgcggcccgggcccgggcccgggatcctcgcccgcccccgccccgcccccacattgcggcgccgccaccgcggccgcccgggcacccacggcccgcggtggggacagggaggagccgggcacgaccacccctctccgtgccgccggcactccgggggaaggtgtgcccccaaggcgggcgctctccccggccccgccgcccctcccggccccgccggcgccccgcacccccagccacaggtggccggaggaggatcgcggcgcggcgctccccggcccggccccgccatcacccctcggcccgcccccgggggcctcccgggtcccccgccccgcggggccgaggagggccgggcgccggggggaggggcggggggccgggtcgtgccaggctgccattttctgccgccgccgcggagcctgcgcggggcccggcccccgccccctcccccgctcccccgggccgccgcgggggccgatccttctgggtcggggtccgcgccctccggcgccctggccgcgggctccaggcggggccgcggggctggggcagagcccggaaggcgggggcggcccggccggggcccctgcggcagcggcgagccgggcaccgcggcgcaggccggcggtggaggggccccccgcggcattgtatagacttgaacttgagcccggagccgggcgggggcggggaggggggtccgcgccgggagcgggcgggacgggagggggcgcctgccgagcccgcggggacataaacaaaccctcaaatcccccgcgccgccccggccagcccggcccgccgtccccgcctgcagtcccggccccacgggcgcccggcgccgagttgcaggggtccgggagcgtgccccgagccgggcactgccagccgcggcgccccccgcccggctccccggctccccgccgcctccgggccggccttccgggccgccagcagcggcgctcattaccgtatggccggtggggtcgggccggcccggctgcgcgccctggtgccgcggcgccgcgtcccggctcgtcctctgctctcgccgccgccgccgcccgcgcgccctccctccctcccggcccgcctgcctgcctcgctcgctcgctccctccctccgctcgctgtcgcgctccctctctccgcctcctccgccgggtccccccctcccaccccttctctccgccttcctccttccctccctccggccgcccgcgggcccaggcctccgcccgccgctcgccccccgcggccgcgctggccccggccccggcgctgcggagccggcccgggaggcagcgccgactggggggccccggggcgccgcggcgggagcggcctgggcgcgcggccggtcctagcgccctcggcgcgacttcccggcctctgcggccccgccggggtccccgcacgccgcttggcggaggtctggaccccgcaccgcccagaccgggggccgggccccgggcgccccgcctcggccgcgctcccggccactcagagcccctcgagtcgtagccgagctccgggcctcgccgcagccctccccacgctgggcgccccgctacctggcgctgcttctgcgctgggtccccgcatccagcactggccgcagggacagcggcccctcctctccccgggccggtgtcaagtgcctccccccgcagcccgcggagcccccggcggccttcgccctgcagttctcccgacctccgccagagcccactgcgctctgcctgcctcagcactggggctggggacagcagcgctggcccaaccgcgccgcaacccccagccaggtgccgccgcggagtagaggccactctgctctacagggccaaggtcggagcgccaggctcctcctggccgtcccgcaggctccaaagcctctctgagatgagctgccttgaagggagtgagttccccgtaccttgaggtgtccaagtagagttgggtgtcctcagttgggcactggaagactgaaagatttcatgaggt

SEQ ID NO: 36723 - DNA, 829 bp, Homo sapiens
gggaatagaaatcagggaaagttgtggggaaagtcatttcaagtaaacagattcaaaagcgctcgacagcccctcggcggctccgctccgaataaccccaccgcggtcagcaggtttcggagcggagtccgggtctccatcggctgcaaaaaccagcgaagtgggcggctccgccaggccgaggacccagtgcagtcgccgcatttcgctcttcaccctccaggtggcgctagcgggggcggagcgcatatttgtatttggggaggagcttcagaaatgctgactgttgattggctgggctcagtctcgctttcttttctccttcccggcagggctagggaggggacccagtcccggtgcctgagctgcgcaagaggaaacgtgtgtgtgggaatgggacagaggggacggggttggctcacttgacacagaaagaacatttggggcatggcccctgggtgtgttcactcctcaaggacaatcctgatttcctggtttttgtttttttaataaaggcaatttgttaagtgtataatgaactgtgttttccatttgtcattcctttataagacacctcataaatttacacaccaggaaaatccttggtgggacctgttgataataaagacatcgttatttacaaaagaacgaaggtgaggaccttctagacctccctttttcattttcttggtctctgaatgttgtgtttgtgttaccaatataacgatctgtggctgtattttatttgcacatctaacaactgattgttaagcttccgctatctggcaggcattgggtggggtttctctgagtcaagagtgaggaaaaa

SEQ ID NO: 36724 - DNA, 563 bp, Homo sapiens
caggggtctgcagaggtgggtgagggatgctggggagccagctgtggggcttctcgcttcattacagtcactgccctttataaatatttatagcagttcttctgctaaaaataacatcctggagcccagggaggaggaaaaaataaatgaaaatcaccgggaacgggacttgatcacgtgtgcccgagcccaatcgacccctaaggcgagaggctgcgagcagcgcccccggcggcgcgccccctggcggccacggagtccgcggcgcagagaccctcccgccctctccgaggaggctcagcccggctgcggcgcgcggctgggtctccgcccctccctcccgggctgcaggcggcggcatcacacggggcgggcggaagcctaaccagtgtgagactatttttagcaccgtggccagggtgtgaatgtctacagagccgagcaaggcctgacgctttctttgcacgctggaagaaacctgttggtttttaaaggtcaaagataaggaaacttgtgcccccacgttcaggagcaccccacgtgctggccagacgccaggaagt

SEQ ID NO: 36725 - DNA, 761 bp, Homo sapiens
aataattagctgccagtggccacagcacatgtcctcaccaatgtccatgttttcactacttccaatgtaaagtccaagtttataccagaatcaattctcttcaaacaagatttggaaatgatatttaacctggtttcatcacaaataatgttactcacttcaaatctggcctatgatagctacagagttgattggtaggtcaacatttgaaatataacgccattaacagtgaatacgaacccctctatcaagacactaagatgaaaagataaacaggtaatatttgttgagatgataagacagaagaaacttgtgattttaaccccactcaaatagaagccctccagggaatgtcctccttcagtaagggacatgatgatccctttctcagccttctctgcatgattcatttccatagccctatcattttacagtctgacaataaactatgcatatgacttctaaaaagagttattatccaacactgagaaaacaccattattagctctgtgccaagctaagcagacaatgagtcaccctgaataaacgctgttatgttttaacatgcaggtaccttctgaagcctctgaagtccccacctgttccctgtggatgggaaatcattcgtttcagttcaataaggtctcaaattctgtctttcaatatttaaaactaaccaaatctggatgacgtttctagctttacactatctagtaggagtttgctattcaaattaatacttttgaaaacaagactacggg

SEQ ID NO: 36726 - DNA, 2559 bp, Homo sapiens
gaaaccaagacctcgccgccttagccattgctttaacgtgcccagacctcagaaccggggttgcctcgcatagcaaaaaaaaaaaaaaaaaaaaaaaaaaaaaaagaggcagagagagagaacttgtggaacaggagaaatccagcaaccttccctaacactagagtgactgacactgctccatggcaaatgtggccaaaccttgcttgtccattcattcatgcaatagacacttatggctcaaccgctgtgagccaggcaacattctgaagatttagcagtcaatagtcatggagcttatttctagatgggaaggaaggaaacttcctttctttccaaacgtcttttttccccatctaagagccccctttaaatgttacccgtaggagccttcaaaactctcccaaatttctcccataggcttcttttgacctttctgctttatccccaaaaccacgcaatttatggctccaatttcccaatactgggaaaagacaaaagagaccgaaagtaaatagggcatgcgacataaaattcgacgctcctttgtatttcatgtgcatatcttcacagccacactgtcagcacctcaataacatgacggtgttccatactatttcgtggccccagtgctgactacgggtctctacctacggtagctggaaggtcttcctaatcccaaggcctggcacaggaatttaagggcaagtattcgtcaccggcatcctcgtctcgggacacttctttcctgtccagggtgacctcctggacaggttcgctattaggcgcctcgggaaacagtgatttggggtgatctgaaataaatacccttccctctgccagggcctgcccgcctcacctgccctctgccaggacctgcctcactcgccccttcagcacctaacgcagagccgcctccaggcgagccgggctcgggcagcatcagcccggcgccgggcccccgctcgcgcccgtgccccggcgcgttccggaccccgatacccctcccggcccgggatccgccgcatcccctctgcctgtccctccggggctagccgcgccgtcccacctcgcagccgcgcgcggtgcagcggccccggctccccgcgccctccccgactcctgcagcgccgcacccgcaggctcccgggtccccagtcccggcgcagcgcgagctgccgtcccgcacctcgcgggcgcgaggctccagcccagctcgtctccccacagccccggcggcggccgcagacccccaccttgctcacttccccgccggagcaggggtcgtcgggaaggtctcctgcggcctcactcctccgcacgctccggcccagccccctcggctgaggcagcggcagcgcctactcaggccccggagccacccccgcggcgaacgttcgcagcgcccggctcgcgccgcttctccgcccggcacgcgcagcgcccgcccccggcgcgagggcgcgagggcggagggcggagggcggatgggcgggcgcgcgcccagcgcgagcgcgcggccgggggcgtggcttccgcgcgcggggagggggcgggagcggccgagcaacccccctccaccccgcccccgcggccgcgccccgcccaccggtcgccggcgggttccgggcaggcgggaagctggctccatccaggcttctcccgctcgctggcgtcgggccgggtgtctttccatccgcaggtatccgtcggcggggtgcccggcccgacgtgactacccgacaaagaatgcaaagagccaccccgtgaatcattctccgcgcctgggtcacaagcctgtgcccgagtgacccccgtgaactccgcaagctagcccagccgcggcgtgcgccccgcgctgcaccaggtgcctgtgggcgcacgatcacggtcacggcgcctgggctcgaggcgccccaaacttagcggggaaaacagccatgtacacaaccaagtccgatgacccgtgcagagccaagccacggtgcgatgctggcacagaagctagagacgacttctgcttggacgccgcagagggctagaggcggcatttatggtcaacctcgaaggaagaaaaagaagtcctaggaggaaaaagggaggacattagggctgggaaaacagtttgggcaaaggagccggggcagccaggtttaccatctcagcaccagcttttttgtgttttactgttatccatcttttatagaattctttccaaactgtgaaatacaggagatggtgccaaattagaatatagcaaggactttttgaatggttcaaatggtcattctcaacgttacttaagactcaaaacagcaacgtcctttgggggctattggtcaatgatgaaggctgtaagctccagagctaagcgaccccaggcctgcatgctgggagtatggttttcactgctttttggcaccttacggtaaggcagatcgtgccacctcctgctgctgcctgcctgcctgcctgcctgcctttagaacaccctcttcctcctcctctcctctttttatttttaaactcctatggtgaaggaaatgctgataaccaact

SEQ ID NO: 36727 - DNA, 718 bp, Homo sapiens
aagctttaccttaaaggtagagaatgaaaaggataattgatagtaccatgtctgttccactattttctgtaagtcctggctggtacaaaatggcaaaaaaaaaaaagaaaaagaaaattgccattattcataaattacatatttgtataagtagacaatcataaaactatgtataaactaatatattttaaaaattaattttgcaatgttgttacatccagtgtcaatattcagagaggaaatccaccacaggccccgagtgctgttgtgtatacacacgaggaatgcaaacaatgttttaagtcccagaacactctttacctgagccatctttcagggttatgtttgcagttgcagagcaaccatgagatgaggcaatgtctcttcccaggcaaaatatgcttgcttctgctaaaagcagtgaatccctcaaactaatgtttcttggctgagatgcaaacccactgcaggaataggatacacctgggcctgtatctcatcacctgtgagtcttggggtaagggaaagctgacacgaaaagtatgctggtagccatattgcttactctatcatgggtaatacagtactttttctatgacccaggattcttgtttcttctgttaaaatccatgagaggctaatcgctttgtttacttacaaatcaggtaaaatcctagacacttcaaagacacagtcaatttataaaaactgtatttct

SEQ ID NO: 36728 - DNA, 1393 bp, Homo sapiens
ggaataggaaataaaaagtaggccagatgtggcagtgtacacctgtaataccacctactacagaagctatggtgggagaatcacctgagcccagaaggtcgaggctgcagtgagctatgatcacaccactgcactcctgcctgagacaaacagagagacagagacagaaacacagaaagggagacacatacacatacacacacacacacacacacacacgagggtttatcatctgaggtaaaaggagtattagtgaggaaaacaaaatacttatgaatgaatataaactatgggcatggttctgaaagaactcagctggagagagagaataaaaatcaacagattcaattaagtaaaccaaaagacagaaatttcgcaattttatacctttgtcctacttggtattcttgttgatttagcaaacagagcttggatatctaaacagctaacactacttattacaattattttctactttgaaccagagttaccagtcctgatgtagccatttatattgagattcagagttttgaagtagttggttgacccattaattttaccaattcctggcatttcccaactaagagaagtaacttagttatggtagatcttaggagattattaaatgactttcgttgcaagtttatgttccctcaagtctcaaaaataaagactagactaggggaggccaaatggcacaagcaagtgggagaagatcacaaaaatagtccagcccaggaagcctctttgtccttgtgggcctgagactacaacacctcccgctctcacaagatgctgagcagccaagtagctcaagcaaaggggatcctgccaggaagcctgtctgtccccacaggctgaagactcccttttgtccacatctacaggcatcaggcaacccagcctgtgaaaattcccaccgcctcaaacagaagcaacagagatcaataagaagcagcagaggtcaatgggagcctctgtggcaccagataaaacaagcagacccaaataccactgcaaaggatctgaaaattaaactgttattggaaccacaatccactaaaacagtccaggacctgcatggtaaacctaagtaagcacagtgaatgccagcttaaataagactggacatcccctaacatgatagccaaaatatccagggttcaatggaaaatcgctatctgaatcaaagaagacaattagaggacaccaacactgagacagatgtgaaaattgtaagaaaaatttcagagtaggccgaatgcagcggctcacgcctgtaatcccagcactttgggaggccgagacaggtatatcacctgaggtcaggagtttgaggccagcctgaccagtatggtgaaaccccgtctctagtacaaaaagtagctgggca

SEQ ID NO: 36729 - DNA, 2244 bp, Homo sapiens
catttcatttctgcatacaacatgcttttaattttttcttcttaaaatatggtaaaagttctcactaatcctcaatattccactttttaaaatctacctctaaatttcgtcataacacaattagggggaaaattgttttgcccactaattacaacttcattagggcaccatccctttggctagggtaacgtgaaggccgggtaaactacacgtcccaccatgcattgctgccttgttcagagtaggtctctacggaaacaggaaaaaaaaaaattctacaagtcccacctgttacttcgtttctaaacacctcctgcactttcggctccaacaccaaacaaaaacaaaagcctcgtgatctctcgtctgctccgggagccagacaaacagggggcccggggtcacaggcacgtccgctgtaacgggtaaattctatccagctccagcgctcccctctcctttccggggctggatgcacgcacaagccttctcctatctgcatccaatgggggctctccagccgcacaagggagaagaaccggttaccgtgcaagcaccacagacttccccgtgccggggcgagggctaccacagagcggaggtgatatcggctcgaccccaaaagacagcctcaaaacactgagaggactcgccgcagacgccgagggacgccacggccccgcggctatcacgttccgccgggcgcctccattcccacagggatcgcaaccccgacactaaccgccgccctctccgcgcggttttgtgccccttcagccgggtccctgggccagtgacctccctttccctgcgactggcgggcgacaagggaacaaaatcctcccggccttccccttcgctccctcccccttaccgtcttggcggcctccgcccaggtcctgcccttcttcctacgtcccttttccctcatgtcgggtcttgaactgactgggaggctcccgtgtccgggctccggccgccctccctgcctgctctgccctgcgctgcttttcccgcggtgccgggaaaggtgggagaaaagggaagtcagaccgggggggcacccaagcagaggaagcggcgggggtggtgcgcgggggggtctatggggcggccggtcctcttgctgccgttgccactgctaccgccgctgccatattgggttcttactgtacaggctgccgctacggtcatgtgaccgctcccgcgcggccgtcactactgtacgcagccggccgcgcgaacgagcgcgggcgcgcccccgcctcccaagcccggccgctgagctatcgagccggcggtctgcggtacctcgccacgcccccgcccttccggtctccgcctctccgcaggagcatgcgcgccaaggaggccccggcagtagctgtagtctgacgcctggcgctcacacctacagcgaatatctgcctgcggaagcggaacctgtgccatccgggaaagcttactgagcggatcccgcctcttgcgaggcgctgcacaggctgtgtagacctggggagctgaactcttccctcagtgggtggctctgccaactatcactttagatcagccctgcgtttgtgttttctcatttatttgcatttttacagaggttatctttttgaagataggcaacaattctcgtctgcctattaaccccattcgataggcgaagcaactgagattgagtgacttgccaagctcataagtctgggatgtagagaaaccaaaaatcaaattgccagctcagagccctttccatctccccagaatgcctcaaacttaggtgactttgtttttaaggccaccagtaactgcatccatgcttttacatgtgaagctactcatcaatgacagaaatggtgtcttctttatttcggtgagctcagtccctagcatagtgcctgtacatatcaggcgcccagtaaatatttgctgaatgattcacctatttctgtggtcagagaccattatttgtagtatccgtaacagctttctgaaagatccagaatgtggcatcttctcttacatcatctacaccttgataccttgcaaagtaagaagaatgtagtaacaactgctgatctcccaaatccacctgcttccagaagctgcttccaaacaatccagtaaacttactatagtgtgaaataggactgaggattggattgcctcttgggaggaaagacaggtgagagcaatacttaaagtttatggatgcgtttcagaaattcatggactccc

SEQ ID NO: 36730 - DNA, 1462 bp, Homo sapiens
gcttaaaaactcttcctgtaccccaaggtcacaaagatattcttgtatattgttttcttttttcttttttttttttcctttctttcttttcttttcttttctttttttttttttttttttttttttttgagacagagtctcactctgtcacccaggctggagtgcagtggcacattcttggctcactgcaacctccacctcctgggttcaagtgattctcctgcctcagcctccccaagtagctgggactacaggtgtgcgccaccacgtctggctaatttctgtatttttagtagagatggggttttgtcatgttggccaggctggtctcaaactcctgacctcaggtgatccgcctgcctcagcctcccaaagtgctgggattacaggcatgagccaccgcgcccagccaaactttgctctttcttaaatctcagagtgggactgccagtgccagcctggcattccctcttgaaatcatcacctatttcagaggaggctgctacagtgggaagtcaggacaacaaggttggggccaaactctggtctcccaggcatttcaccttaataggaaaagtgcctgaatctgtcctcctcatttggctcatgtgcagaacaaggcacaaagccctgcgtctcccggctgcctgtccgatgcccttttccctgactcaccgtcaatcagcagtcagaccaaggtccctgactcaccgtcaatcagcagtcagaccaaggtccaggctcttgcctcctgaaatgttgcaagggcggtttcccagtgtgattcacaaacagcaagaatgtttcaggctgacttggagaccacttgggggtggtatcctcagccaggaagcttcctcagggcctctgagtcccagagagctctatttgtctctttctttcttttctttctttttctttcttttctttctttctttttctttttctttctttctttctttctttctttcttttctttctttctttctttctttctctttctctttcttccttccttctttctttctttctctcttccttccttcctctccttctttccttcctttctttctttttctttttttcttcctttctttctctttctttgccttgcttttctttctctctctctttctttcctctttccccctccctccctcccttccttccttccttccctcccttatttttctttcttcctttctctctctctttttttttttttttttttgagacagagtctcgctctgtcgcccaggctggagtgcagtggcatgatcttggctcactgcaacctccaactcccagctcactgcaagctcacaccattctcctgcctcagcctccccagtagccgggactacaggcgcccgccaccacgcccagctaattttttgtgtttttagtagagacagggtttcaccgtgttagccaggatggtctcgatctcctgaccttgtga

SEQ ID NO: 36731 - DNA, 1197 bp, Homo sapiens
tttctttctttctttctttccttccttccttccttccttccttccttccttcctgctttctttctctctctctctctctttttctttctttctttctttccttttctgagacggagttttgctctcattgcccaggctggagtgcaatggcgcgatctcggctcaccgcaacatctccctcctgcgattctcctgcctcagcctcccaagttgggattacgggcatgtgccacaacacccagctaatttcgtatttttaatagaaacagggtttctccatgttggtcaggctgctctcaaactcccaacctcaggtgatcctcctgcctctgcctcccaaagtgctgggattacaggtgtgagccatcacgcccagcactctgtttctttttctttctttcttttttgactttggacgatcttgtcacccaggctggaatgcagtgatgcaatcatagctcactgcaatcgcaagctcctgggctcaagtgatcctcctgcctccacctcccaaagtgccgggattacaggcgtgagccccatgcccagccccaatctctgcatttctgagagctcatagcatctttcatccagggccctcgtaccaccttctttgctgttatcctcatgtgtggtattgtttctccaactgtgagcaactccaggtcagggaacacccatggatttccttgcctagcgctaaccctggataccaataaccctcagtagctgtgagattgagccatgaattttatggagtccctaggcattctgcagcctgtatggttagaaccacacttggaggaaggcttccaagatggtccaaaatgaacacctgtgacctggctgtttgctgaccactatcacaaggagtgataaaggagcctggcaaactcacgagcctgggttgagtcgatttttaaaacccaaacctgggccaggcgtggtggctcacgcctgtaatctcagcactttgggaggccaaggcaggtggatcacttgaggtcaagggttccagaccagcctggtcaacatggcgaaaccccatctctactaaaaatacaaaaattagctgggcgtgggggtgcacacctgtaatcccagctacttgggtggctgagccatgagaatcacttgaacctgggaggtggaggttatagtgaactaggattgtgccactgcactccaacctggaca

SEQ ID NO: 36732 - DNA, 616 bp, Homo sapiens
ccaagcctgtctcactggcaaaggctcaagtgtcctctgaattagctgcacccaaagaccatgctcactgctatggagaagtgaatccccctaaaggagatcctgtctgtgggctctgaaggtttagaatctaaacagaacaacagctggtcaatgctgggagcagagcagccccaagagctgggagcaggtccccagttggagtcaggaaaccctagctcaggcctggctcagccacaatatgccgcgtgatgctggacctctgatgccgggactcatggtgacttcacccctctgagcctgtgcccttatatgcccagcaaggggcagccctgcccagccacccacacaatgatggtgtcaggagcaaatgacacaatacaaataaaagtactttgaaaatcttaaagtgcaataatgacacaaaaggttattagaaagagaagctctatgagattaaaggggcaggtctctaacacttgtcaaggtaatttactcagtagtaggaacaatgccttatttgttcggtatttgataatttacaaagggtttctagattctttatctcccctgagcctcataataacccagtaaggtaggcagggccggattgttc

SEQ ID NO: 36733 - DNA, 999 bp, Homo sapiens
cacctaaggtcaggagtttgagaccagtctggccaatatggcaaaacctcatctccaataaaaatacaaaacttagcagggaatggtggcgcatgcctgtaatcccagctactcaggaggctgagacaagagaatcacttgaatccgggaggcggaggtttgcagcgagctgagatcgtgccactgcactccagcctgggtgacaaagtgagactcagtctcaaaaaaaaaaccaacaaaaaaccaaaacaaacaaacaaacaaacaaacaaaaagacaccacatacaggaataaaatgtactgaggagacaaaagagtgtcaacccaaggatctctttcagaggggttcccttaactctggcaggccatgaggatgatgcctgggagccccaggattctcctgttactttcttgtgtcctcagaaaccaccctggtgactcagtaacacaaacctagggtgttgagtgggtggggcaccgcttcccaccccagtttatctggttttcccaggcagaatagtacactgaagctgtaggcaaagaggaagcccaagataggggaaggccagggtgttggttcctcagtttgttgaaatcagagtcatgaagcaagacaagccagggcttgctcagcatttctccttcctggcatgggttcacctcagccccaattcagtggcagctctgttggttcagaggggtgaggtatccaagaggaggaagcttgtacaatcctgctagcaggggagggctgatggtagggtggagtttcaaaggaagcctctgacatctgacaaaggctgagtcagttatattgccccatctctgaatctggcttctcctgctcctctaccctacccatcctgccttccagacacaccaaagttctttttatccctgaccatgacaggcatggctgctgtgtgcagcttcataggttgtgcactgcacagttccaggaggtgctattcccatagacaaaggagtgaataacaact

SEQ ID NO: 36734 - DNA, 1794 bp, Homo sapiens
agacaatgtctactttttgccatgatgaaggaatggggtctagatttatcctctccttaatcaagcaaaaagttgaatgaaatatatgaaacagtggttttaagacattggtcattggtcaacagggaactcaggacagtgatccttaagagaagggaaaccaaggaggtgagcagagcagatgtcccagctggagagagtgtccaagctatagcacagagaacgtgggctcctggagacctgcagaggagtcccctgacttttttatttttgagacagggtctcactttgtcaccgaggctggagtgcagtggtgcgaacatggctcactgcagcctcaacctcctgagtagctgggactataggtgcaagccaccacacctggctactttttgtatgttttgtagagacaggatttcatcatgttgcccaggttggtctcaaactcctgagctcaggttatctgcctgcctcagcctcccagagggctgggattacaggcgtgagttattgcgcctggcttcccctgattctttgggttccaatcagtcacgtgtgtgaagaaactactgacacactggggaaaggaaccctggagaggaggaggaaatggatccgtcagcagagcttacacaggctggggagagctggtgttcccattaactagagtagaaagaccttccaacccactgggcatagagtgacacacactgaggctgtgaggctaaacctgcagcagtgagagaagtagtgggtcttaagtctaaacacggcctctcaggggccaggtcagactagagggaaatttgatctgctaaatcctctgagattgagctaaagcttcttaagtcttcctggtatgcatgagacagggagggtcttagaacctcgggtacagctgagcctgtgtgcaggaattcagtaaccccaggtgtggactatcagtttgaagttatctattgatatgtttgtttttctcttatgcgtcatcccctcatcagcgcgtgcactctgtgaggatagagatcttatctgactgtgtcacaagggctccgaccaatgcctggcacgtaaatggcactcaataaatatttgttgaactgatgttgaatgaataaactcgctctaaaccaaacccacgagggagaaaccagatgcagcattattcattcattctgtgaaatgtaattgacaataggcccgaagaaacccctgtcagcacattccttgctttgtggaaggcacacttcagaagctcaaagtatatccaagagtcactttgtaaatacagagtagggctaaggggacttgaaagatcttaagagcctgtgtcactgagctatggcaccccgatgagtcatgctttcccacacagggacaggcatcccttgccaaacaggatcctgccttgcccagcactggcctctcttccctgtcaccgtgggagaaacactgacagtctgtcctctcccacttctcttctcggtactccttatcaatcataatgcttcggtcctttctacttgacctcacataacagtgtcttagattacacagtgtcccttactcgttacattttccatgtgaatttggccacaatttcatacatcctgcaaaagacaaaataacctagacatggatcaagacctctcactacctaagttgcaaagtccctcagtcactgtctctcgatttccctatctttagaaaatgaaataatgtaccttttccatctagcctacagggctgttaagcaaaaacaaacaaacaaacaaaaaactgaagaacatgaat

SEQ ID NO: 36735 - DNA, 1714 bp, Homo sapiens
ccacctcagcctcctgagtagctgagactacatgcatgcaccactgcacctgccattttttccggatttatagagagagggtttcgccatgttacccaagctggtctcaaactcctgggctcaagccatcctccggcctcagcatcccaaagtactgggattataggcatgcaccactgcaccaggcaaggacacagatttttattgttcacccacaaagtgcttcacatgcactactttgtctgaccctcacgacaacctgcaaggtaggtattgtattcctactgtacggatgagaaaaactgagactcacaaaggttagttactagctcaagatcatgtatgcctcagtggcagggccaggattcagagcagggtggcctggaggtctgaggttggaagcaggtgtcaccttaatgacttaggaatgaggtcagtgtctgtgtcctccaattatggtgccaggctcagtctctacgaatgcctggagaatatgtcagcacttactgtagcttcatgtttaggccaagaaaaggctgagatgagatgatccatgagagtttttcacagaaacacagaccaaacacagaagcaaaatcttggtcttcatattgccccagacttgttctcttctgggactgaacctagtgttagaatcctgctctgcaggaataggggggtgtctttacatttcattctggttatttgcctaaagcaaatcccagagatacccagagagggaagactttcctctgcagatggtggaagatgctggcgcccaggccatcctatgtcatctgtatccagacacagattccagatccctgttcatgcctctgaggacatggagcgggccttttagctctcttcagagctagagtttcaggcatatggttgctgccctggatgacaagggtagcacatgggtgggaactccagatgcatgtaagggagcaagaagctgcccactgaggagaatgctgggatagtgcagggctgggctggcccaactagttcagctcagccaggaaagggcaggtcagatctggctcagcaggggaggctgtgtcggggagtggtgctgactcagggcctggtgagtcaggtgacagccaaggacagctgttgcctgggtgtttttagaaaactttggctgccaaccactctctcatgggtgcttctgcacctactcagaagcaggcagaaaaaaggagggcatcttctgtataagaagctctgggtgaggggtattaatatctggctctacttatgttgatccttcccatgaagtacctagaaaacggagcagaaattaattgagaggcttccaaatcccttctgaattctctgaaaatcacttatcttttctgcttagctctttttaggcaccttgccaggtatccagcatagaggttaagagagcaggctctgaagttaggagggcctgggatcaaaacctaatttcatcatttatagttgtatgacttagatcagactaaaaacaacttttaattatggaaagcttcaaatatatatgaatgacacacattagtatgatgaacctccatatactcattatccagcttgaataatcattaacccactgtaactttatttcatctatactctacttatcccctttgctcccacttattttgaaggaaataccaggcatcatcacattccatctctttttttcttttttttttgagac

SEQ ID NO: 36736 - DNA, 3142 bp, Homo sapiens
gccgggcgtggtagcacatgcctgtaatcccagctacttgggaggccgaggcaggagaatcacttgaacccaggtggtggaggttgcagtgagcagagattgtgccattgcactctagcctgggcaacaagagcgaaactccatctcaaaaaaaaaaaaaaaaagaaagaaaagaaaaaaagaaaaagaaaatgcgaggaaacgagcgaaactccatctcaaaaaaaaaaaaaaaaaaaagaaagaaaagaaaaaaagaaaaagaaaatgcgaggaagcaggctgtgtcggactgggagtaggcttgaccacctttcaattttcaacccagtggtacgacgctggcggcaggcagaggccccacctcctctgcagagcgctctcgggttctcccggattcctgaaggacggcaaaggcctgaagcaggttctctgagcaccgcacagaaccctccacttcgcagggaggttcttcctgcgcccaggtgttcctcaaccttcctctcctcgcccaggaagaggttgtgaggattacctcatcccaacccgagcggcgtggccagcttttccatctcaaactcttgctcttgaagtcaatccggatggagcgctcatgtttccccgtcagggctggccctggagagggggcacgccgggaggcgtctcgttctagcaaagaggctattaaatgacccagggcgcggctttttctcgcgtttacgagctccacctacacgggaacacatggccacccaagcccgtcgctgcgccaagacctccagctcaacacacccgacaagcgctgtgcagagaaaccgcagcgcagtccagcgggagaccccgggaggggaaggaggtgctgggctctgtaagggtgtcccggggagcggggagcgggaggcgggaggcgggggtcggagggggggcgctgcgcctgcgcagtcgctaggtagcgtctcccccggggcgtgctcgtaacgccgcgcaccctatcaggcggccacagggagcgcgcccgcggcctcgccctttctcgcccctcccttctcccctctgggtccagcctcagactgaggcttggagacaggagcattccactcgccacttcggcgcgcccccatgccctcttgtgcgcgtgcgcagaggcggaccgcaaggctagggcgtgagggaagggcgggcgtacgcccttgcgtgcgtctcaggcagcgcgcacgccggcgtgagagggcacggggaaaaggtggctctggccggggtggctcggtttcctggggctatgtaactgagctcgtcgacttaggggtccttcttcgctgccctcgccgcgtgctagcagggagtttccgctcgggagagagactgtcctcacgcccgctgcgcctcctcgacggcagagcaggcttgctcgcccgtgggagcgtcccggccgagaagccctgaggggggaggggaggccattttgtcccgaccgactccccggaaccgggcggacgggctgggagaggctgcggagccgcggtcgccgccctcggaggcactggacgccgccactgtcggggcttcctcaaagctgttcgtaggtcgcccgcgccgtctcgagcctttttcccacgcttccccggtcctccggcctgagaacgcccgagtgaggagttggccgtagtgagagggaccgatcccttggggccgccggcggcgagagcccgagccgctcctcccaatggcgaagaagacgtacgacctgcttttcaagctgctcctgatcggggattccggagtggggaagacctgcgtcctttttcgtttttcggatgatgccttcaatactacctttatttccaccataggtaagacctgtgggaggacggtgtacggtctcggtagctgcataccgtttattttactccagacatcttgcttcccgtaatatacgcctttgtttcagtgattccgattccaaacgacacatccaagttactgtttgaatcggcatcgagcttactggggcggggtcttcccatgatttccatccggtcttttgctttcgagtctcccactatgctcagtgccttctgttacaaaatatgcatcatttaaccatgttccagaaccttatttcttcaggcgactggactggctttttccacatttgcgtggaattagtagatgtgtgatatttttaaggtatttatttcagtggttgcgattgaagcagtactagctatttgggaaaggcctgaatttatactttggggcaaagaaaagattccatatggtgataacttagagtaaacttgagggtttctgagaagaataattaaggtaaattagaagggaagagtgagttgccctcattcactaatccattgatgtgtcaaacaatcggaggctcttcgcgcttggggtgggactctggcatatttgcctcagtgcttttcgagacatcaacagaagcagtaatctgagggagatgatcagtttctgtcctcaaacccaacggagtgaagtcaagctctctcttctattttatttgactctagtatttacaggaaagtattttgccagtcatagccctatggacttataatgcactttcaccatgtttcagaattacttagtgtggaagtaagagctaaagagtgacctttttaatcgaatttcccgtttaggaaaggaaaagggaaggctctaggaaagtcccttttgaatctggttagaaaatttaagtggcattgacgctaattgtgctatattaattgtgaaacccatccgctccgcaataaatttcttaaaagacacatggctctcagcattgtggcggtgcagttgaacccatttttaaatgtacttttatattgagaggcttttaaaaagcaacggcagtcgtctttgaactctgggaattgtcaaaattaagctgatttgaaacagtttgtatagcgtaactgaaatatttggtttgggttttcttttgtgacaaatacctgcttcattctcacaaaagaaattatactgaaattaaattggacaagtgattttttaaatagatttttattttgcttaccttttttgggaggcaaattatcataatccttatttccagagtatcatactgttttcttggtctgtcataaatttc

SEQ ID NO: 36737 - DNA, 701 bp, Homo sapiens
ttaaaaatggttaagatggcaaatttaatgttatgttttagaaaatggtttaaatggtaaatgttttagatatattttccccaccgctcaacaaaacccaaaaaactaacactcgacccagttctctaaaagagcatttgatcacagacggcccctcctgttccaggtgttagctactgttaaccagtggttgtgaatcaagaggatcctttatggtactttcccatgctttaatatcactggtctgtactttcagttgttgaaggcagatttgtctttttgttgtctgtatttgcatagaccttcttggaatgttagaatcacagaatgttagtgcaggaatgaacccttaaatgaattttcaaagtgggaaaactgagactggtgaggtgaagtaacttccagaaggccaaaaggccacatggctaattagtttttttttttttttgagatagagtttcacttttgttcccgaggctggagtgcagttgcgtcatcttggcacactgcaacctccacctcccgggttcagatgattctcctgcctcaacctcccgagtagctgggattacaggcatgagccaccactgctggctaatttttgtatttttagcagagacagggtttcgccctgttgaccaggctggtctcaaactcctgacctcaggtgatccacctgcctcggcctcccaaagtgctgg

SEQ ID NO: 36738 - DNA, 599 bp, Homo sapiens
atggggtggaagaaacaacttgcaaaagcagaatttcaattaagaactgtaaaaagaatgagagaaacaccgaatcactgttaggcaaatactacactaaaaattgttgcggcaggagccaggaatggaatgtaaaatcagtgggcaaaaatatgatgagaaacatgataattatttagtctgaaaggatcttctccaataatttttttttgtcgtgatacattcctgacttctccacccccaaatgcaaacaaacctaaattgagggaaattctatgcaatacctaaccattattcatcaaatgtacacaggagtacagtgacacaatcatggttcactgtaaccttgaactcttgggctcaagtgatcctcctgctcatcctaaatagttggaactacagtcacacactaccacacctggctagtgttttgttttgttttgtgttttgtttgtagagatgggatcttgctatatgttgttgcccaggctggtctcttaactcctggcctcccaaagcaatggcattacaggcgcttgactcccaagaaatttattaattaccaagtggaagacagtaaatttgcaatagagagaaac

SEQ ID NO: 36739 - DNA, 1360 bp, Homo sapiens
aaggcacagtctcccagggaaccgtgggtccgggggctcctagctcttcctcccatctctctggcgcccctgcgtgcctgtgtacggtggtggtcttggaggggtggtggtcttggggggcgcggccccagccccatcttttcgcggggctgcttctgtccgcccgcacgggggaggggaggaggaggcggaggcggaggcagaggcccctaggagggcgaaggccggcgggttaacgaggaggcgctgagtgcacggctgggctccacgctgatttctcctaatgaattaataatggcgctcgggcgggcgggggtggccggctgcggaccgcggagagagccgaggggaaggccgtggagggaggaggacggcgactcgcgccgggtggggctgaaggcactgcggggtgactcggtctccaggctgcggcgctctgctccgggagtcagggagacctggcctggccccgtactgtcccccgtcccagcccccgcccctggccctgcgggaggggccaggcgtcttccctgagcatggtgccacttccccagtgttggccttgtttcctgctcagcatttggcagatgcgcctctggcccaactaggatgtttccattttacagacgggaaatccgaagcccagagagattaaataatttgcccaaggtcacacagctggctagtggcagggtgggattcagccagatttgtcgcactccaaagcctgagcttttacccacgttctttactgagtgtgtgctgtggggcaggcatggagaagggtggtcagcaatcccctgccacagccctcaggtgcttggggctggaagggaggagcgaggcagccatgtgctctgagggcaaggacaaggaggaggggcaggtcaggatggagcaggtccttagagccgtgggggacctcaggttccatacagggggaggcaggagaggaagccgcccctgggctggcggggaggaaaaggcttccagggtccagagcatcactccctggagggctcccttccttcctcccgcagtaatgaccggcgctgggcttcaggctgccgcggagggggatggtgctggatgccatggttacatcgatctttcctgccacatcctcccccagctccagccctgacttggctccaagtcgccccacagggggcagtgggcattgctccctgcctggctacttgtggttggggcaggggcgggggtgggggttgtgtgtggacttgggggaggaggcgggagtgaggggaggaggctactcagtgcctgcagttcctgcttcccaagtcctagacccctgcttcttgcctgcccccctccacatttttcctctgttgccctc

SEQ ID NO: 36740 - DNA, 778 bp, Homo sapiens
ttcaaaaacattttttttctttgagacgaggtctccctatgttgcccaggctggtcttgaactcctgggctcaagtaatcttccggagtagctaggattacaggcatgtgccactatgccccactgggttgcagttttaaagatcaaatatttgagataacaggttagtggtcattagccaacagtttaaaccattttaactcctgtccactaacctacctatgctgcccacacactcatacacaaaacctctccaagatcaagacaaatagaaacaaatagaaaaccagtatatacatgaacatacttcgaaaataattccaaaccagagtcaaccaaatcaagtcacactgcaaggtagctttgcttttggagtctagccttactcactacctaactgcagagcttaccctatggcagctgagtgaactttagcctacatctactgtgccagcaaagtagagagaaacctttgccccactttttaatcatctttgtaatgtaacccaagaataactacaaaacctcataagactacagtcagcgaagagagctggattatgctaacataaatttcaaatttgaaaacattactttggttgtaataatcaacagcttttctcaagattcaacactgggagaagcgacgagattaaggaagtgagaatcaaatttaaaaatacacaatctatggccgggcgcggtggctcacgcctgtaatcccagcactttgggaggctgaggtggctggatcacctgaggtcgggagttagagacc

SEQ ID NO: 36741 - DNA, 2359 bp, Homo sapiens
tattaagcacaacatgcaataaaacgttgtccacttttgactttacagatttgggatggaaagaaaatgcaacgtttcctacaaccacccactttaaccctttcactgccagtttgaaaaggaaaaacactagctaatacaggctgactgggaatcatcagattacaaatcgttctcagaacgatctaacattttattgcttaaggtagaggtattagcgtatttttaaagtgtgtcttccagtaagttgcagaacttcccgctgaaattcaaaatactatacgttcacactgacattactgaaactgcaagagttgagctccctacttgattggggtagtaagcacaaaaatggttttgagggaacggagcagggaggggcagtgatctgcaaggctgattaatcccatacaagacagcgcttgttgcggggtaaggtgctgtttttaagacagctcttgttgcggggcaaggtgctgtggagccacaaagatgcgacagaatggatcccgattctcctggaactccggatcaagaaaatatgaggggcgtgagcccagaagtgcgacgcaagagacccgcggaaaggtgacagaacgagtggcaccagactcagaaagttggggagttaggaagcctgaaatcgccgcaggagtcgtgagaggggaagtgacagtctcttcagaaggtcacgggaaaccgggtcccagggcagtatccccacagagggctgcgtctccgggctggggcaggcggcagcgaaagggagacgcggctccggggccaccccagtcccggcaggagttctgcccggaggtctgggatgccctcggccaggcctcacctcgggagcggaggatcctgaaggcagaaaagcggctgaggatgccaatcgcccggcaggccaccatcttgagctgaagaggacagcagtggagagcgcctctaacgggtgcggccgagcggaggacttttctcccgtagcctggcagccaggcgcctggagcactgcctgactaaaacccagatgccgagtggccgccggccccttagccctgcccctcgctcctggctaacatggccgaaaggtcgtattctccgggggaggacgggggcccggagaggagggggtggagtgcctggttttccagtcaggcggccggagggcagccctcaagaacggccctgaccgcccgcggggtgaggggccctttctgggcaggacccgccccttggtcccgcagagccttggtacttggacctgaaccttgctccgagagggagtcctcgcggacgtcagccaaggtgagacggcgagccctcagctctccgcccgggctttcccaaaggcgagattccacttccttccccgcaactgtcgccggtgcccccggccccctcccctccctgggaaagtgggagttgagggagcggaaggaaactcctcggacaaggtcggcagtgctagctgcagttaggacagtgacttggactagcgttccagctgaagttcgggacagtagtgtcacctgcgccctaatttatcatcacaagttaacgaagtctgggggtgtgggggtgtgtgtgtgtgtgtgggtgtgtgtgggcgtgtgtgggcgtcggccttaatgtaaccctggtctgcgtagaagtgtgtgttgtttcgcctgcttcccctgtacccaggtcggcggctatagagattgtggacggcgccatgggtttgcccgatttctgctgtaaagaataagactaggtcaggtgacctttcggggcttgagtgtgggaggaacggagacaatcctccatccggctccgttatccagataatcctgcgctctcgggggttttccgatctggatgattatctatctggtcgttcacacctcagctcacttaagcggtgaagaaactgcctacgaatcagagagagtgattttacccatggccatatgtagtagaaataagactggagcctaagtctactaactcctagtgaagagttcttcattgcatggtagctgtttttgtgctggaatgatgggctggagtcctggaataaagtgattgatttcaaaaggaagtcacattgagagcctgctgtgctctggtcaccttcatacctttttgtttagtcctcacattccccaaattattatcatttgcattttctagatgaagtttgggaagctcagaatatatacattttctagtctgtgacagacctagcattcagacataagtctgagtctcactactcgccagactgacagctctgcaggacaggaaacaaggggcatcgaagttaagactgaaatgagtatagagacagagtagagaggtttctgtttaaagctca

SEQ ID NO: 36742 - DNA, 1072 bp, Homo sapiens
acttccaggggtttgttgcatcggaccagtgtccctaaggaagtagttgattatatcatctttggtacagttattcaggaagtgaaaacaagcaatgtggctagagaggtgagtaaaacaaactttatgttgtttaaagagtgataggagaatcactttgaatttcaattaatagaagttactttacaaaagcctttaaaatctattgagttacatttgacctaaaatgtgattttacagcttgggtaatgtgttatttaatatgtaaaagaattctaatataaatcaaatgacatacactatattagtgtatatccatactttactgtaaatcaaataaattatttgagctggtttaggacattgtctcttgtgttaggaaaatagagatcagcaaagtgtggctgatagtatttttagtaatgttagatatcatggcttccaattaatttaaaatttcaacatgttgcagagaactaatttcataacttgacttttgttagctggaagtagccttgcttactcatttgttcccatcaactagatggcacgtaaggcagcttggctttttaaaaactatttcacaggagtttacttttgccctagttggcatagctccatgtagtgtcgattgggcaaccaagataatgacaggccttggaacttctaggatgtgtcctacaggcaaatccaaacacgtcttctgggctgtgttttcatttaaaatcgattggatgaagttggcaccaaaagcacatttcattgtactcagtattttccctagttctggtctgtgcttgccatattgttgggttcagtatcactgtcaactgagagacaagggcacatgagcaggactgaaagtatttgttctgttccacctctgtacctggcagaaatgttagaactgccaaaggcctggcatgactgaagcctacgaaactaactgtgtgctgttgaggggcaggaaggaattaacaataggaagagattttatttcccttctgaaattttttgtttttccttgaaccttgacatttctgaatgtttcaaatatgataatttcatgagt

SEQ ID NO: 36743 - DNA, 2756 bp, Homo sapiens
tgtatttttagttgagacgaggtttcaccatattgtccaggctggtctcaaactcctgatcgcaagtaatccctccacctcaggctcccaaagtgtagggattacaagcgtgagccaccgcgcctggccgagactctcatttctaatgttcttctcaaaactggtacttcacagcatatcaaagagatctttgctcattcattcaataaaatacgttgatcatgtattatttgcaagccccctgggttatggaacatggggaaaattaagatgtataagatgcaaatactgccctcgagggcaagtgtgataaaggacactgaagtttattggttggcgggcgcccattcttcaaaaaatgcaaaaaatttagccgggtgtggtggtgtgcgcctgtagttctagctacttgggagacggaagcaagatcacctgagccaggggaggtcgaggctgcagtgagccgtgatcacgtcactgcattccagcctgggtgagtcagtccctgtctcagggggcggggagaagcttattatctaccatataccaggtataagattatctattactttctaagaatcatgctttaggaggggagattagacatgtagtaataatactgtgtttggcatatctcgggtccccaataaatagttgttaaacgaatgaacataaaagtatctcaaaataatcgcccttatttcagagacccagagagactgaaaggctccctgaagtagtggtttcccataacacagaactcatttcatgttgggtcgatcatttccgagcttcgtaactaagtgactctgggcaggctgcctaatctgaaaaaggggataatgcctttcacttcagtgttgttatggggttgataatgtatgtgaagttctccccacagaaggcgctcaataaaaagcagcaactattataaaattttattagtagatactcactagccattgatctagtgttttttgtttgtttgtttgttttacaattaactgggctccagttatgtaaaacacctcttgcaaacgcatttaaggactcgtcgagactgagagatcactgcttttatctggtcgggagacaccagcaatcttaatttggaacggtttgatagagcggagtgcgatgaggcggtccaaggttcctaagcaacatagacctgaggggcttgtctccaatgtcctttcacctgtctttcaagtccctctgctgaccgcacaaagactcccgtggccccggcagcagctcggccttctctacatctaaccacgtttactaaatttctacggcacgcagcgcaccgcaccaggagctgggagcggctcgcggtacagacctccttcctcttttacttcgctgcagcgggagaactaagtcctcttacctgaggcactgctgaactggttcgcaagcagtcactctacccccaagactaaaacggtataccccagatcaccacgcaagtgcggataccacagaaatcccaccttcccccgggaccgggagcaaagcccgctgggaaattgacctttcaccccctctcttgccttacctcagctcaccaattttgacgctagcaaatgaagcgacgaagagagctggaaggcgggacttagtgttgcctgatccacgccgattggacaacagcagtgtcgggggacgggccgctcgagcgggctagcaaccccccctcgatgggcggggagaagcgtgggctgcgcttgcgcactgagaggcggccgaaggggccgaggcggctacgcgtgcgcggtgggcggagcgcggctctcctaccttctcgggcagcccagtctttgccatccttgcccagccggtgtggtgcttgtgtgtcacagccttgtagccgggagtcgctgccgagtgggcgctcagttttcgggtcgtcatggctggctacgaatacgtgagcccggagcagctggctggctttgataagtacaaggtaccgcgggccggcggatgcccctctccctgctcccggcctcgcccaggcggctgaggggcccgcgcggcgcggtccgtgtcaccttgtgccgcgtggctccgggcgggctggcgggcgttcctccggaggtcctgcgggtcctggggattgggggtcggggagcgtgggagcatcctaagcccgccgcccgtagtcggcaccccccgggagatttccttttccttaggagagcgctcagtgatcatggagcgagggaattcccttcctattttttttaaacttattattttcgtaagcccccgaaaggatggagttccttctgttgtgtcaatcgccttcattttagtgaagtttccactcgcctgtcatgcatacaacttcggaggaggagatgatcgtttggcagatgaggcccgggaggggagcgacttgccgatgccatcctgctgatgtctccacttctgctcccggcagggacttcctaagcggcagcttgtggcgctagggccaccagatgaaagggaggtgcacaggaaggagctgtggagtggaaagagcgcgggctttcgagcacatacaaacctgattacaaaagtcagatttctttatttcgtcttgggcacgtcattttaaccccgctcagcctctcttttgtgtatgaaactgaaagtaatagcttctgctgtgcaaaatgattagaggaatttgtgaagcgcttggcaacatactaggaccccagtaaataaatgcgggtggttaactttcctccaaatctggt

SEQ ID NO: 36744 - DNA, 639 bp, Homo sapiens
aaggcagagagattaagtaacttgcccaaggtctcacaggtagtaagtgtatcgtaatagtatcaaaaggaaacacagattccgctaagttgagagggatgaaggaggttgagaaggtgtgtggttagtgtgtgaatgcatgcagtgtgcattttgctgatcctgcataataagtgaggacatgtaagcaataaaaatttctctactgaaacaccataatgtaaaagctgattgagagtgaaggatgagtcagtgattatcttggcgatttggactctggttgtatgtgccaatgaaacaaccactgtatgattaactctgcgatttgggttgatctttagacttcccctatgataatatctgactgcttgatagtctttgcctcatttatgttgctattccagttttgctactcagattaggacatcataaaaataggtgtattctccaggttatttttgtattattattattattatttttgagactcagtcttgctttgtcgcccaggctggagtgcagtggcacaggcttggctcactgcaacctttgcctcagcctcccaagtagctgggattacaggcgtgtgccaccatggcccagcaaatttttgtatttttagtagagacagggtttcac

SEQ ID NO: 36745 - DNA, 1506 bp, Homo sapiens
gtgctttatagccacatgtggttattggctaccatattggacagtacagtgctaagcagtaaaaaatgatgcataaaagacaatgatgagatttaagttaatagtagttaataagaatttatagcatatctgcagactggccaacatggtgaaaccccatctttactagaaatacaaaagttagctgggtgtggtggtgcgtgtttgtcgtcccagctactcgggagactgagtcagcagaattacttgaacctgggtggcggaggttgcagtgagccgagatggctccactgcactgcagcctggggacagagcaagactctgtcttaaaaaaaaaaaaaattatagcatatctggactgcatggtttttttgttgttgttgttgtttgtttgtttctgaagcactgatctttgatccagaaagcacttggaagggattatttaaatagagttggtcattaattggtggtcaaagtagaaagtcaagggaattttttgagtggtgatgggaacatgataagcctggcaatagctgaagacctgagtaaaatggaacaattagtttacttggtaagaaaacaaagagcatgttcaataagaatagggaagccaatgaaatgacaagaaaaaaacaaggggttttggttagattgggagtggaggatggtaactcaattctgtatctccaaaatagtgttacactaggtaggattgtcctggactttgaacaaagggagtagagatggaagtcagagttagaaaaagtcaagaaagaatgagataaagagatctgctaggctgaggcgggagaattgctggaacccaggaggcagaggttgcagtgagccgagatcgcgccattgcactccagcctgggcaacaagagcgaaactccgtctcaaaaaacgaaatgaaaccaaacaaaaaaacaaacctgctgtgtcatgttgaggtttcatttttcctaaggcagtactggtagcccttatggacactgtgtgccagaggagagagcagggtcttgatgatgtaagtggcgtgggggttggtgaggtcactcccccatgcctcccctgaagaagtctataatctggaactttatctcgccaccgcccctttagtctcattttctgattcacacacacagacaagcacacacacatgcactatttagaaaattcatgcaatacaaaaatgtagaaaatagaacttctcagtaatttaattcctgttctttaagtaattgctgttattcgtttgtcatatatacttccagaaaatgtcctgtgcacatataagcctgttttttgtttttgtttttgtttttcagacagagtctcgctctcccgcccaggctggagtgcagtggcgctatctcggctcggctcactgcaagctccgcctcccgggttcacgccattctcctgcctcagcctcccaagtagctgggactacaggcgcccaccaccacgcccggctaattttttgtatttttagtagagacg

SEQ ID NO: 36746 - DNA, 1864 bp, Homo sapiens
gggcggaaacaatgctcctcatttcacacaaaggacaatcacaacttgcagagtttgcaactcgtccagagcctgggctctttccacccaccagccccggttccctgcctgggatatgactggagggtcatcctcgcatggggaaggaggctctgctggggcagatattccctggcccccatctgtgcccaaccctgcaatagttgtggacaacttccccatggcctggcaagaggaggaaggaaaaagtccattgctgacatttcctgctctgcgggtgtgggcacctgcagctggggctgtaggccaggaaggtcgtgacgcagctgttagttgcacacgtgtgaggtgactgaggccagctccaagtccagccacaggggctgcgtggccccagcacagtcccaggtcccaggccacagctgaaagtgggatgttgtagtgaaccttggcctcataatgacccttggcctgtgacaggacccagacattctggacggtatggttcccgcttccacagatgctactgtatacaagaggctgggggaggaagaggtggggcaggctagattggggatggcatgggtgcgtggagagaggagaggggaagactgcagagaatggacgggcgggagatgaagaacgctaccagaggtcacagctggagcagaagctgagcaagaaggctcaggcgtgtctcctgcagggaggcagtctgtgggtgttcagcatctctcagctttggagaggagatgcgtgcagggctttggaggcccatgggagagccagcgtggctcgcaagggtggcaaagaaggagggccctgggaaaaatgtaacgactttcaccctttcttttccagatcaactctgaactgcaagttcctcccactcaggtgttgcgggtacccacaaaatgagctggaccgccaaaggctgatgtgttagggctggcctgatgctggtgtctgtgccggagccagctcatatcacccactgggccgcacctgggcctgctctctggattttccagggctgtctttatagcctgtcgaaataaggagccagaggagttacctgtgtcctgcattatgattaaagccttttaaagttgtggctgaatctctttaaagaggtcaggtctagcaagaccaggcccttgcccctacctctgtgtcatgaggggactttgccccaggctcagatagtggtgtgagtcagaggccgaggccagtagcgtggggctcctttcttgctttcaggggaactggtttctgtgggtggaggctagagcttttgggcccttgtggggccttaagccttcagactggccccagacctgaaggattctttcggtgctttgggggcccctgggcccaggctggtgtgccctttgggctatggtgtaagactcctcctgtgggcagcctgggtgggcagccctgtgcctgaggcctgccttgaaccctgggccaccagaggccacttgaaggggaaaggccatgggagccctgctggtactgaatctgccagcctagagaactgctgcctctgccccgcacctgcggctgctcctctcagcttgaccagtgcagacctgtcagctcagtgcttgacttcttttatttagagaaaaatcaccactcaagaaaagaaaaacagccaacagaaacccagacacaggcaggggcagcacttgacgggccagctcccagctgcagctgaaagggctggaagggcaagggggcaggggtgggaggacagggtgtgcccgggatggggagtcccctctgctgcttctcacagctcctcagctgggcctggaggcgctggctggggcagagggagctctgggaagccatggaa

SEQ ID NO: 36747 - DNA, 1949 bp, Homo sapiens
ctcctgctggcccttcagccacctgtgggcgccacatctccagacccgcagccaggctggtggggcctctcccacccacagccaccttccctctgcctcctctcctgccccccgggaagcaagccccacccagctcagtccctcccatgcagggactgctcacccaccccctcacgaagatgtcactggacttctcccctgtgaagaagtcgtcgtcctccaagaccacctcatctgtgttccagatgatgacccgcagctcgtacctgggcccagggagagaaggctggttagcagccccaggtgggggttatgccagggtgccagggctgggatggggcaggcggagagaagccctggggtcttggggtcagcacagggcctgggccaggctggggctggaggagtggtttggggttgggggagcagaggcatgagtgagaaggcccaccaggcacatggctgtgggcggtgggggtggggtgaggggaggaagccaccctctgtctcagatgctagttccaagagaagtctgcatttaagcccagtagccagcaatggaagcccatggaagctgtatgtccctgtccccaaagaggattttcccctcaaggtttaattgtaattatgaatgatgtagttcatttcaatcattaagagtgaggctgagtcattcactaaaaattgatctgagcatggctctcctgggattgcagacagggctgcgagcccagagtggcccagtgagttgggtgccccctaatgacaggccctggaacagctgactcatggcctcaggtttccaggacattcctggcagaatttgctgcatgatttgctggggccagcgccaaatggaaatgcagggtcacttgtcataaagaatttcaagatggcaacataggagcatggaaacaagagtgggaccctgtgtggcttcctccatccctgaagctggccctgaatccagtcactgtctgacagctggacttgaacctgccgctttatggatgggaaacccgggttcttttcactctaccacctcctgcctcttccaggcactcactcctggattcatcactggcaggcactccaaagaaaacttggcggaacatcacactagcctggatgtgaggatgacgcagggccggctcccaggggttctgtgtgttgtgaaggagtgcgtcagtgtgggcatgtgtgtgggtgtccgtgggagtgctatgctgtgtgtgtgtgtgtgcatgagatgcatgtgtatgggcgcgtagaccgtgtagatacaatgcaccggagtgtgctgtgtggggcttgtctcgctcactgatgcagggtggaaggcgttgtcctgccttagcacgtggggactctccagggcaggccctaaactctatcgattggttggtcagtttctcccctataaggcccagtggccacacccaggccccagggatgccaactggccaaggccatctggacctgagccccccgcaggaagggttgggccgtggtgggaagtgggtggggtgggccggaagggagtagcgctgggccccaggccgctcacttcttgggcttccgaggtgagatgtccagaggcgtcccaggggctggcatgtccatggggaacatgtccacccacagctccaggcggccctgaggaagagggttgtggcagatctcccagggccttctccctctgcccaggaagatcagctctcctctccctcctaacctttgttctgtcaaggacccagttcatcagtttccatctttggatgccaggaattcctatgatgtcaccaatagccaatcacagcttctgagggagacaacccaggtctctgcctgagctgatgtaattctcactcaaagcaaagacccttgccattcaagttaccctgaggggccttggtgggaaggtgcctgccaggctttctggaatgcag

SEQ ID NO: 36748 - DNA, 548 bp, Homo sapiens
ggaagaaaaacaaagacagagttgggctgtgcaatgccaggttctttgagctgtagaaagagaaggatccaaggcaaaggggagaggtggattttcagcaggaggaaggatggtggcgctcccaagatgcccagggcggggccagatgcacacacaggacacacaggaaaggagccttagtctggtttgtgaatggccagcttgttccggaagggcaaaggttttgagcttccctgcacacaggcaggctcagggccaggcagggtgatcaggccaggtgcccgcagatgtgccagccccaggggagcgagctagctgagctagagccagaatcccgaactctctgagctgtctgcaatcaaattcctgttatttcctgagcatattttccttttgtaatagcttagatacctaagtcatgttgattgttcccacctccctctgttgttttaatggagccaaaggaaggttcctaccagctcagataattagtcagaaataatacattcccacgacgaggaggatgtccttcattgaaaaggaatgtg

SEQ ID NO: 36749 - DNA, 2264 bp, Homo sapiens
cagcgagattccgtctcaaagaaacaaaacaaaacaaaacaaaaaacgagtgggttgaactacgttgtcacaccaggactgatcgctcctaaggtccctatccccaggcacccagagcagccctggggtgcctctgagggcctctgcacaaagccggcctctgggatgggccagaaggagctggccagggaggcaggcctggctctaggccaggctgtgtctgcaaacactgaccttggctgccgcagggattttccatgacaccagcaccctccctctgagctccctgcatcacacatgggcctgaggagggtgggggatgggggctttgggggtttgtcctacatcagaggccccaagatcagtactagggccacctgtggatgggaggcagctcaaggcaagagaggagacagcagtgggcccaagagtggggagtccaggaggaagcatggggcagggagagaagctgctgggggtagtggggggaagagctgggagaggagatgggacaatgggaagagaggcctcgggaaggggcagggcagaagaagcggataggtgctgtgcttcagagctgtccttcccaggagctctggcctgaagagggacaaactccagatcccattctgtacattggtcccacccctaccccagctccatgagacccggtggttcccaggcctagctaggggcttgcccaggcccagtgcaggggggattccttctgaaccttgaagctgacctcattttgaaggggccagaggccacagtgaaggcaggagctatgagtcacccgaggccctcctgccaagggccacctcccgtccccatcctggatgtctaaggggtggtttctcatcaccatcccagacctcagagtccttcagaactggagcctctgggttctgcagccctcccaccccaggcctgtgctggacactgaggggacaagccagccctgcaggactcctctgtggacatgagtgcccaaatacagggtgggggcctgagaggggcagagggaggagaggcctcttcagtgcccagagaaggttcccagaaggttctcgggaaaggcagtgtctgagctgcatctcacaggaggagggagagcacctgcgccctcctcccgtctccaccaagctgcagcccctccctcctctcctcccccaagacctgggcacagaagctaggctccttccgcctcatctcctttaacatgccaattaggctccctcagagcctgcagtcccacttcctggttccacactgctgccatccccacaactgaggggcggctccatgtctgtgcctcaggcgcctgagctggttcctcgtgggccctcccctgggtgccctctgagcccagctgccctctgccatccagcaggggagcccagccttcctctgagggccctccctgtgtcttgcagcccccagagctgcctctgtctcccccaagcccgcactcctctctggctgccacaccaggcccaagccacactgaggtcacttcggcatcagcccagagttcacggcctttgggcacctcaggccacaggtccctcatccaccttccctcaggacaaacattagcccagccattgcctatttacattagataactaggtcagcctggagacaggcacagctggcattgccaagggctgtggtttctaatctacagaagggctgggccacccagagaaggagatcaaagaatcatatcgtcagagacctgggggaaggacctcagaggttcttgatactgcacaggagcgtttcccaaactgtgctcccagaaacacttgctcggtaatgtgcactatgagaaaagtgctccacggtcaaggaagtgggaagacaggcaccttttcctggccttgatcgaccttgcacatgaacacatacatagccctgagaaagcctaggctcaaatcaaatgatggtgaatcctgttaaattcagcatttccccaatttaattgagccaagcaactcttttctcatccaacagttgttaacattccatggaactggtatttcagaaaaataacttgagtaaacactgatcatagaatgttggcactgaaaggaactttaaagatcatcaaatcttggtgctccccaaaatattcatattaataattcatatttattgatctcaatgtcctaagcatgttaagtctatgaactcaatcaagtccccacaccaagtctatgaagtgagtacttcattattcccattttacagacgagaaa

SEQ ID NO: 36750 - DNA, 729 bp, Homo sapiens
cccctgcctcataaagccaagcgcgacatgggcaaggaccaggcaggcagcgggcctgctggcaggcagacgggtcttgccaaactcccacttacttcccagaagctccagggccccctgggagtggctccacccagctggcacccctccaagttgggcgcccacgtcagcaggtcctcacactcccttgccctttcacccagtgacaatgggacaggcaatggggtggggggcaccctaagccggatacttggagaagcgtctgactgcctgagcatggccctcctgttaccacctctgctgcaactggctcagagcaacgcctgaggctgatgcccaagtgaaatgctctcctcccaaggcctcccggcctggtcgcccttcctgggtgatgcattggctcccacgtaccggaatgaatgctgagtcagaaaggcccagtggccttggccaacacccaaggcctctctggacttcatgacaccaactgtaatatgaagataatcataatagtgaccttgtaagaagtttttgaggattaagttaaaaatacatctgaagggtaagaacttattattcttaagcctcagcctgcggtaggaagtgagattgagccctgggggcatgtgaccccaaagaggaggcacatctaggccagggctgcctggacagggcagtggctgtggtggagcatgaggtgctgcctgggataagagcctctggttaagc

SEQ ID NO: 36751 - DNA, 1946 bp, Homo sapiens
taaatgtatttgtttcctgcctatataagctaaaccttaacttttttggttttcccccaagccgaccaggatgagaaagaccttaactttcaactttggagcactggccccatttctctggtgcctgtgtttctcaggtggttactcccagcttttcacttgcataaactatttaaaattgaattctgaaccttttgattatttcaggtggatagatagattttgcaaagcctatgcatgtacatattcaccctaattctgttaccggaaaggggtcccaatccagaccccaagagagggtttttggatctcgagcaagacacaagaattcaaggtgaagccacagagtaaagtgaaagcaagtttattaagaaagtaaaagaataaaagaaaggctaatccataggcagagcagtggcatgggctgcttgactgagtatacttatagttatttcttgattatatgctaaacaaagggtggattattcatgaactttccaggaaaggggcggggatttcctggaagtgagtgttcctccccctttctgaccataggtcactcttgttgccatcttggttttggtgggttttggccggcttctttactgcatcctgtttcatcagcaaggtctttgtgacctgtatctcatgccaacctcctgactcatcctgtaactaagaatgcttaacctcctgggaatgcagcctagtaggtctcagtcttattttacccagcccctattcaagatagagttgctctcgttcaaatgcttctgacgattcctctgtatttttttcagaattcctgtctctttgggccctgataccttagcctggggctcactgctacctggaagcactaatgcaatcctagttttctcccctaaagcccattctagccaggtggcagggacgtggagcctcactgtaggtcacaccctggcgtgaagggctgatcagccaccccatggtgtccacatggttgtctctgcctggggtgaccctgctttctgcacctggagcaatcctgctcctccttcaagtccctactcaggtctcctctgaattccagttctacagggctactgtgaaaaccaaggccacagaggtcaagcttcaggcacaggcctgacacagggcacctggtccaggacagctctgattgtcactgttgtcccctctccttgcccactcccttaggtaatccatccctccctcaaccccctctgtctcttacacattctcacattgctgcatggttaatgcagtgttgacccctctcctccaatgaatctcaaattccttaagggcagtgaccttgtcttgcttccttaggaccccatatctggctctaggccttaaacttagtggactccacggatatttgccaataaactctgtctcctgggatccacagacagcagtttgatgaatggtcaggacattgtgataaattaaaattcattgtttgatgtggctatcgacacagacagagactgtgctgctagtgacatcatgtcggtctggtaattaataatgatcattagtaacgtttacttcaggacagtgcccttggcctggacgtgtggggaaaatggtccagagcctcaccgactgagtcactgtgccctgtaggaacggcctctgatagggatgagtgcctgctgctgtgggctgccccagtctgccccttgggacagaagctgtgttttattcatcctacatctcaataaacattttttgataaatcaatgaactcctttgaaatcacacaaaactagaggtgttgttggagacaagcggttcagaagagaccaggcattgtggctcaagcctgtaatccctgcactttgagaggccaaggtgggtggatcacctgaggtcaggagtttgagaccagcctggccaacacagtaaaaccctgtctctactaaaaatacaaaaat

SEQ ID NO: 36752 - DNA, 2941 bp, Homo sapiens
cctcttcaaacaaacctagggatggtctttctgcctggatgcctcagctgcgaccagaaagtccacaaaggagcagtgaagcagggcttggtgcagaggccatgcggaaggcacggatttttggagactggagaacccaagcgcaaatccctaccccactgctcaccagcaggttcttaagcaaatcactctgcttcgctgaatttactgtcctcagctataaaatggtgtcctcggcaactggagctagatgccttcgccactttgctgaaagatatgaactgtgcccaaggtgggcggtatcagataggagccccgaagtggaaacgtccagcgtgggaatctcctctctacagggtccccaaggaactcccggcaggcccacttcagggctcctttctgacaccgcccagctcaacctctcaaaacgattcacaaaatgctgtaatagccacgatgcaccctcactgcactgtcccatccgccccttttacaaataggaagacccaaagataaaaataagaaaccaaggccaggcgcggtggttcacgcctgtaatcccaatactttgggatgcggaggagggcggatcacctgaggtcgggagttcgagaccagcctggccaacatggtgaagccctgtctctactaaaaatacaaaaaattagccgggcgtggtgaagggcgcctgtaatccgagctactcgggaggctgaagcaggagaatcgcttgaacccaggaggcggatattgcagtgagccgagatcatgccattgcactccagcctgggcgacagagtgagactccttctcaaaaaaatagaaaaaagaaacccaaaaaggcgggggagagtgaggaagaaaagaaaaaaaaaactggaaggcctgggccgtgatttgccagggccacggcgtggccaccaaagcgctccaggacgactcggcagagcgcgggcaccgtggctcaggcgcgctccccgggggcggggcgagcaggaggggtcacgtgacgcccggcccggaagcgctcgcgcaggagaccccgggtgacggggcccggcgccgctaactggagcgaaccccagcgtccgccgacatggcctggaccaagtaccagctgttcctggccgggctcatgcttgttaccggctccatcaacacgctctcggcaaagtgagtctgggccctgccgggcgtgcgggccctggcgaccccggcgctcgttctacgccttcccccttcttggccctgccctcctggcttcccctgctttcccacttgctccggtcagttcgcgcgcgttatgaccacccaagggatgcgaggcccggggaaatgcggagcggggctgcgccccggacggggggatccgagccccggctttgatttgctgtacagcctccgctcctgtttccacgtcttttaacaggagggttggccgattcctttccacggcccttccagtgctggcgtccaagcctgagcacctccctccacgagctgggagagacccctggacttgtgcacatgagccgcagtagtggctgtgcaggccgagtgacccagtgagcgtggaggcctcaagcggcagacagggaggtgccccacggcccctcaaggatgaggggttagagctgtgctttgaagcttaggtgggatttcggaatgtgtctgagactgtaagtcaaggaaagtctacggaaaggccagatcaaagtcgattgtaaccagcatcaaatgcccaggttagattttctctcataatcagaaaagtgcttttgagctggggaatgacatgttgaaagtgatatgattgactcaatgacatgaggagtggtttggtgcaggaaaaaccactccaaggctgctgcatagcagatgaggggaactaggaggtggcagtgagaagagaaaggaagggacaactggtggcagagaccaggtgtgaatggccacaggcctgacccacatgagcaagaaacaaggatcactccagggtttctgcctgggagaagaaaagtgccattaactcagacagagagggcaagtggccagttcagctctgatgtatgggggtgagaggggggacagttcccaggaggttagggactaaggacccaggcagtcatgagactgagggacagggcctagcctcccctctgttgtgggcaggatggcatttctttgtctctctctgtctccatctcagggcagggccttcctgcccctccttttcttgttgcccaggctggagtgcaatggcacgatcccatgtataaggtacctacggtgtgtaagggaaggggacagaagtgaccaagaggcgatctctgcctttgagatgcttggaatctgaggtggaggagacagacgtgtacgcacacgacagtcacagtgttctcccttccccaaacggtgggcacagtcagtggagtcctgggtgggccccacctgttcctctggttcacctctggccaactgtgccttgtggagaactactagcttcccaggccctgcatcctcctgaggatcactcctcatgctgaatccttagctgttcagaggccccagcctgagggctcccatctcaggatctgaacacagcaaagcaagtcttctgttctgtcatgccagccagggcctctgtcaagtgcttagagagcggttgtaagtccaccagggctgctgcccacaaggagaatccagattgccagttactgctggggtaaactgtgctgattcacctccttccttagaaaactccaaaccagtcaggtaggaagcttagagatcctcaatcccagaaggcgtcgcctttaaaggctgcctgagagtcaggaaagaggctcccaggtgacagacccaacttttggtcctgtcccctgcctgacagctggtgtggggcctctcaggatcctcccaccccaagatgggcccccaa

SEQ ID NO: 36753 - DNA, 562 bp, Homo sapiens
ctcgttctctacaaataataataataaataattaattaatagagccagggtcaagtagatgctcactaagtaaggctcagctcccctcctaagttctgcaggctgtagggccctcccagccaggcagggatatgagcctgacttcctttcatgcccaggccagggaccctgccaagaaggtggcaggaagcctggaaaccactaggcctctactagagaagaggtgtttgctcttcttctgtgtcctttctgtgccagctccaatgtttgcccttggcagctgccccaccacccttgggttccatgaactggcatgggataattgcttcaaaggggttgttgggccagcttgtggaagccttaactcaggaggacagtgtagtagagtgggaagttcatgaggcttgggacctgaggaatagatgagccactggacctctgtgagcctcagttttctcatctgtaaaatggacttggtgatccctgccgtaccttcttcctggacactgaagatctactgaggaaggtttccttttttttttttttttgagacggagtctgg

SEQ ID NO: 36754 - DNA, 3082 bp, Homo sapiens
tcctggccaacatggtgaaactccgtctctacaaaaaatataaaaattagctgggcatggtggtgggtgcccgtaatcccagctacttgggaggttaaggcaggagaatcacttgaacctggaaagcagaggttgcagtgagccaagatcgcgctgctacactccagcctgggtgacagagggaggctccgtttcaaaaaaaaaaacaagaacaaaaacaaaagacaacaaacaacaaacgttgtgaagaactgacagcaaagtgctgcccaccttaggggtcactgctgtcatccccaggcaaactggggctggatttttgttctagcctgtgaggctggggtcttttctgattctgcgccaggagtcgaaacctgtctccaatccaggatgagaagcctggctttctgccccaaggtacctgcaggcctgagcatctcaggctgggcaaggcagcccatgctgctgacacccaatcccttgggctgtcagcctgccccaggccctcagatacaaagagataccatttccccagccgggagcgctgccagccaggcctgtctaggcagacctacccgtggagaaagcgaagacaacccctgtgggaggtggggagctcagcaccagccctacagtcagctccccaagaagcgccccagccttggggaaggacaggccccgaggggtttcccctatggaccaacttgttctaccagcagggggccctcagactcaggtgggaagtaggactcatggaaatgtggcctcagcttccatacctgccccctacagacaaaaataataataaaataaataataatccttgcctgaagcttctgatcaaccttcatggcctggcaatagctcccttgtccctcctagaggaaacttggctcctggcctggggattcccatctctctgacttcacttgctctgggcagttggctctgtgcccttggtaaggcttgacctcttctctcttccttgctttgcctctgtttcactcagttgcctcatgcaggccttctcagggggctctttctgcaaaagcaagactgggttcgagagcagccctgctgggtctgtggcccttacccatgttccatgtcctgtcctggccagggatccaagagccaacagcatatcaggcagaaattaggcaccatgggtgcagtggctcatgcctataatctcagcaactcaggaggctgaggcgggaggattgcttgagcccaggagttcaagaccagccatggcaacatagtgagaccctctctctaaaaaaaaaaagagaaagaagtgagactccagcccatgaggtcaggtgtttcctgacctggggtggaggcttccccagctcccagactccctgttccatagcaggcgctttctttgccccactggtactggttacagcctggtccccaagccatgccaggctccaggtttctctctgccttctaaacagttctgtccgaacttctcccttcaactctcctttgcccctgccattcccaagaaccacaaggaatcttaactacccctctttctccacatctccaggagctggtggggtctctcactatggaataggtttgccatagccctgttttcttccgcaaactcagaggcatatagagaagccaaagctggacagggactttgtcaaacctagaccctaactgcggcacaaccagtggcacatgctctgggtgctgcgggggaggtacaggaaccagaggactcccccgccctttgggagctgaggctcgctacagagatgagccaatggcagtgcagggctgtgcactgcaatctgactgccctggaaagacatttcaaggaaaggcatttaataaaaagaagtcccgagtcttgcactttaaagacatccactgcctatgcaggatatgctgcagtgggagcaggtcggtggcccacaggaaacggctctgggactgtgttgacttcagtcagcacatgatgttactgatgcatttggagctgtgtcaacgaacccagggtgtcaacatgagggagggccacgccttgctagcctcagtctgggccagatcacatgctcttggctctgggcctgggtacaccagagtacttccagaagtcagtggccaggggtgaaaggttaggagaggctggagctgtttagccaggagatgagaagattcagaagaaggtcaacaagtccccaggtacctaaagggctttcaaatgaaagattagacaagattccacagacctaaccaagcccagcaaagacgaaattcaagacagagaattttcatgcacagatggcagacagttcagagtgattggtggttaagctgcccaaagcactatgccacaaaggattctgggcttgtgtctaggctcatcggggaagtatgtcataatcagtcatcaccatctgccgggtgctgactgggaggtcatgccatgagtgtgatgtctttgccacctgcttgaaagtcagcattagaaagatcttccaaaccattcaggctttttgaaggtgagcaggtggtctgtattaagtcatttcccaggacccaaatactcctgtagaccagaggttcttgatatttttcatgccatgggactctttgacagtctggcacagcctatggacctcttcttacagtaatgttttaaaacgtgtaaataagaccaaggattgggccaggcacggtggctcacgcctgtaattccagcacgttgggaggctgaggagggtggttcacaaggtcaggagattgagaccatcctggctaacacggtgaaacaccgtctctactaaaaatacaaaaaaaaattagccaggcgtggtgtcgggcgcctgtagtcccagctgctcaggaggctgaggcaggagaatggcgtgaacccgggagacggagcttgcagtgagccgagatcttgccactgcactccagcctgggcgacagagcgagactccattaagaaaaaaaaaaaaaaaagaccaaggattacaaaagaagtcaattaaattgaaatacagttatcaaacacttaaaaaagcaaattcgtgatatagaatatata

SEQ ID NO: 36755 - DNA, 2693 bp, Homo sapiens
tagccataaaagatgaaaatccgtcatccagctactgaaatcaggtgcacacggttgttcctcctgtgatgagacagggcggagggattgttaccctgttgccagggaaaaaggaaggggctgttcccagttgctatggtgacgaggtaggcgcgttccctcggtaccgccgcacacgtctgaagcggtctcttctcctcgttgctacggcaacgcagtgggcctgttcctgtcgccccccgcctcccgccgcaatcgctaaggcaaggtggaggtaggggctgtcctcccgcggctcagttgccttggagacggcgggtgccctggccccgccccgctcggactgacagcggcggccgcatcgcgcctgcgcagtgccctcgtcccccgcagtctctgtgcgttgaagccggagaccgcggcggcctcagcgaggaccctccgccccggagccgccggccggagccgcagcctctgccgcagcgcccccgccacctgtcccctccccctccgcctccgccggagccgcctcgtgcactgtgagtccgggccgaggcgacggacgccgtggggctgagtcagcgggaggccagggcccgggctgggggaggggaaccgggctccccccgcccctgcctccccacccgcactcccgcatcccgaccgcgccttccccgcgccggtcaaccccctccatccctgtcgccgggttccctccggccttggcggcccggcctccccagccactccccctccccttccctcccctccccttccctccgtctctccgggtccaccttgaggctccttccccactagacgtggccaccgcacctctgccctgggctgatattttctccaaactacctcccgtccgcccttatcccttctccctcctcctcactcctcctaggcctgacatctcccggcctctctggatctccccagtgatgtgccagaaaaagagtgacaggagagcgaggggagacttgggggagggggaacatcgggccaggcccagcctgggggcctcgggtttcttccccacacgctcctgcctggctggtttggggaagcaggtctggacagttctcactggctgctcagagcttgcagggctttccgaatagatttggctgggaagggttcagccccatcgtgatcatctagcgtttaatgaacgcggctagtgcctggtggccttctagtgggctgagctactgcccggccggtgttgcggagcggggagtagaagtagtggagggaagggagaagaggttgcgtttgggagctccaagttcctgcgcttccggtgtggtgttgtgaataagcatcttgcggaactctttaaaatgcttttttttttttttaaatcgcactacaaccctggtataatgtgaggtttggaaaaaggcctgataccatccataggaagtgcttactgtttatatatgaaggggctgtggcaggacttgatcttggattcctgtaaattaactaattggatagtagtgagtttttaacataacgtgtgcagagttgagaggaaggagaaaaatcgaagcttctccatggtgtaggtgtgaggcctgtacactgtgcctcctccagctgtgtgtctttgtggggctgtcaccagataggggttctagcatatttggacaattccctgggttatgtttgctacccctccacctgcccatcttgcagtccctgttcttggaatagaagagggtcccaaacagttttctttttccagaagaactgagttgaagtcagagttagtgcccagagccagaaactcttaataaacatgtctcaacttgagggcccctaactactatatgacctcattgtcagcttcttttttatttggcttccaaatttcagtgtgcttttagaaagcacgtgtaaatataagccagatctaccgcacaagaggctttgggatttttactccagatggtaaaaggaacgcatggtccatttctaaaaatcatggtgaaggagccactcatttggagtttccggggttgcaaacaatgagaaataactatttcactctttactttgctcaatcatggcctattggcagcctcctcatagccactccctgcccccatgcccatcagattagtttacagtagccaagacggctgtcgccctagttttaaacatagagatgaagttcaggaaaactatagcccccatccagcagggcagtttcttctgtttcgaatgccagactggggtttggtgggatgcacctgcctgtggtgcagtgggaactgtggggcctgagagtggcattccttctgtgtggtcctgtgtcacatagctcaccaaaatacccgagcagggcaggagcagacagctgtactggagagctgctcctcctgggctgagtgtattttgggaatcagcgatattactggggtggagggttgtgaattaaggaggaagaaaatgtgtcaaggctagatagatcaggagggtgtaagtaaaatgttcctttccagtttgctatgggatagtacattttcagaggatcagagtagtttttatatggattaatttgcctttgaaatccataccagtgttttatgagataatgatggaatgccttttaaactgctactatgaggaaacaggactaatacttgtcttatacattgcctatccagctgttgctg

SEQ ID NO: 36756 - DNA, 645 bp, Homo sapiens
ctggtacagcacatctttcacataatgactgattaactgcttctggtaggaattactggtaaactctgataaaatccttaaggattgttcagcttttaattttgtcgtaagttggccagctgtattttctagccagatgtcatgtttattatagaaagatgacacacctatcatttggacatgtgctttgggttgcttacccaggagttaggatgggttatgctgagtaattcacattccatcacccagtcttccctttggccaagagtacaatttcgtgtgacagttagccaagtttcgtgaagcatgctgtggccacggatggtttttcttgtgcacagagttgactggccaatactagcataagcctagatcttgcactcactagcaccatgccctaccagctttgctaaactgaccagatgttgttagtcaactttttagcataacgtcagtgttttaggctctggatgcttcatttgcctcaagtaaataaggacttgtcctatctaaaatgctttaactccatgcaaaatgattttttccctgaaactatttcctagatataggagatacataccacttgtgtgatacatttaaaataactgagcaagaagcatggcttcaaatctgccttgtagcttg

SEQ ID NO: 36757 - DNA, 1101 bp, Homo sapiens
actccatcccaaaaaaaaagagatccaaacagattgtagggaagcttagtcaatcagtcccaggggaggtcgggtctgccactgaggtacagcctgtggtcagttggtatgtctggtcctagtggaaagacaatagcaggaaggaagtgatagtggtggctggaccaatactgcctacagcctcaccacaaaagaaacagtttggtggtggtgatagggagaagaggactttgttggtgacaattggctacaaatggtctgtgggtcactgccgcttgctttctcaaatccctactccagttctatcagctgtgtctgcctgccccgaggtagtccctactctttttctaaacaatagaattccacattcattttatagagccccacataaataaaagaaattggcctattttcacacagtttatctcctttctatttccatcccttcagaatcctgtaatcatgagattgcctaaatggtctctctggaaggccctggcaacgtctaggcacgcatcctgtcttgcatttgtagatcagattctcagactccaaattgggccagatgtaaatgggtaacaactgtctgtgttctctctatcccactaaaagcatcgggcattcctcctctccttctcttattgaaataacttgcgtaaatcatgctagactttgcaccttgacctccttaggccacacgtggaaattgattccctgcctttcaccaccaccaccacacactcatatactttgtgccagattcctaagagagattgaatgtgtataattttttaatctcatgattttggaaaatcagaaactgttactactccataactaagggagaagaataaaagaggtatgttcatatttattatatttatatctaagtgctatagcaataccttttgacaaaaatatacttttaaagtcacattttaggagaagcgtagtactcattctcactgactaatgttaccagataattttttttttttttgagatggagtttcgctcttgttgcccaggctggagtgcagtggtacgatctcatctcactgcagcctccacctccctggttcaagcgattctcctgcctca

SEQ ID NO: 36758 - DNA, 3558 bp, Homo sapiens
aataaataattaaaaattaaagttatgaaatttattttaaaaagaagaaaaaatctgaatttggattttttggagggaaaaagaagcaggaatcttatgaagcaggagtacaggtttaggattaaactgagacaaagccataattctaggaacagtcagtccagagtaactcaggtttaactcctcctgccctaagcaaatgcctgggccttccaactacaaactccaagcagattaacagttcctagaggacagaaaggtttggagaggagaactctcccagagccagacttccatggacaaagcaagagaagactgaggaaagttctcatagggtgtatttgtaatcacccaaaactggagacaaccctgacatcctcagtgggtgaatgagtagactgtggtacatccatacgtgtgccattgtttggaatactactcagcaataaagaggaaccattaatccgtgcaacaacttggatggaagttaaaggcgctatgctgagaagaaaaaaagccagtctcaaaaggttactggatgatttcatgtatataacgttgacaaaatgacaaaattatagagtaatggggaacaggtctgtggtggccaggggatagggttgggggggagggcacagctataaaggggtagcatgaaggagtttctttgagattatagaacaggtctgtattctggtagggtggtgattccatgaatccatccatgtgataaaatttcatggagtatatgccaaaaaaaagagtgcatgtaaaaactgatgaaatccaaataaggtctgtagtttacttacaaatgtgccaatgtggatttcctggttttaataattgttatgtaagatgttactgggggaagctggatgagtagacatgaaatacatgagaattatttgttctgttttgcaactgtgagtctaaaatcatttcaaagtacaaaagtttacagaaaattggagggactctcttgggaatctcttcagcttttactagaaaagataatataaaatcctctgcagaattataaattgaatgcagtttctaagcactgtaatttcatttgttgtaattttgatttggaaattattttaactatagtattagcaatattttgtattgttgactaaaatactgtgtacctgaaaagaaaatcctctggagagtttcccttctagataaaataactccttaacaatggcatacagagctactggtgatgtggctttcgtctgcctttttagccacatcaccttctgccccagcatgactctgggatgagctacttgcagtcctttccttcctccccatgcattcccctttcctcttaactcttacctgcctgatgagtttctccttcaagacccagttcaaaccatgtttcctttacaaagctttccctgatgcaggaagcagagttgctccagcagctcctgtatctggagttggagcatgatgtgttgccctttggttatttcgttcagttgtccagctctcacctaagttcattaatttctcgagggcccagagtgggttcatttcttcctataggtcctgtgctggcacaggggctggcacacagcattgggtgctgaagcacacactccacaaatggtgatgagtgactgattgaatctgaggctctgcaatgtccttagaaagcaattttgtctattcttcctgccttaatacagtaattttccacaaaaccaaacattaaaaagggctctgattaaccacagttaaacaaagttaatcaatatgtacaacattattttccaaacattcaacttagttaagactttattatataaacacatttcttatcttgcttttcatttgtgatacagtgttgtgagtagctggagaaagatcgtgagtcgcactcatgggtcttcttggacagataaaatctagaacttgagggtaggatatggagtctgaagggggatgggtgagatgttgagataaggagcacaagcctacttttaatctgtatttctttttttttttttttttttgagatggagtttcactctttgttgcccaggctggggtgcagtggtgtgatattggctcactgcaacctccacctcccgggttcaagccattatcctatctcagcctcccaagaagctgagattacaggtgcgtgtcaccatacccagctaatttttgtatttttagtaggggtggggttttgccatgttggccaggctggtctcgaactcctgacctcaggtgatccacctgtctcggcctcccaaagtgctgggattacaggcatgagccacagcacccgggcccaatctatatttcatttcaaattttaactgaaagaaccaaaatgctctccaccctgcaggcagtcactcactatctacctgaagtgctgcagcagacacacatggctgtgatgacaaatgcctgatgtccctctccagcttcctcctgggcaagtgatcaaggactccacaatcatctgcaggtctagctgctgtccccatactccaacaaaatgactcagagtttcatcatttcttattgcacaatttaatgaccatatcgccacctctggtctggtagcttcattaaacagggcagatgacctcctctttgaaagtgggccctcccttggctcctaagacatcaccttctctccacctcctctattttcatcgcgtccctaacattcctccaggactgagtcattggtcttatgctctttttttaaaataaaagtaataataaatatgtttcccatgtccagaatttcccattttctcctcgctgctttctggcatcctgtcatctttaaaggcccaattaggtgccaccttcctccagaaaccctctaactgctgatccccctctcatctttttcatgtgcctggaacacttaaaagccaaaggtgctttcactatttagcacttcatatattctgctttgtggcgtcccttgttattttataaattactcttacctcttcaaccaaagaaaagctccttaataaagacaagacccatgccttgaaatgatcccatgtcctcatgatgcctcactgggtgttgagcattttgtcagtggtcagtaagcacttgctggtcgagattaaggcaatgctaggccggacctggtggctcatgcctgtaatcctagcactttgggaggctgaggcaggtggatcacttgaggtcaggagttcaagaccagcctggccaatacggtgaaacctcatctctactaaaaatacaaaaattagctgggtgtggtggcacacacctgtaatcccagctattcgggaggctgaggcaggaggattgcttgaaccagggaggtataggttgcagtgagctgagatcatgccattgtactccagcctgggcaacaaagcgagactccatctcaaaaaaaaaaaaaaaaaaagaaagagagaggttaaggcaatgctgcaatgtcttgaaaaaataagtataaagaagaaaactgggccaggcatggtggctcatgcctgtaatcccaacactttgggaggccgaggcagg

SEQ ID NO: 36759 - DNA, 5317 bp, Homo sapiens
ggacgcctgtaatcccagctactcgggaggctgaggcaggagaattgcttgaacctgggaggtggaggttgcagtgagccgagatcatgccactgcactccagcctgggtgacagagcaagactccatctcaaaaaaaaaaaaaagaagaagaagaagaaatcctctgaaattccctttccctcctcctaattctcaaggggtgaaatctgggcaagtcatcctgctctagagctgtgaaaaatcaaatcgtccttcctgcaccagtgtggtggtgtggaaagagcatgggatttgtgttcatttggccaggttcagctctgatcttgccagtggttgatcttgaacttggaaaagtcactggaatcctcatccttcatttcctcaaaagcaaaattgaggtaacaactcaaaggctttctggagctggatgctgtaatccacaagagtggcatttctggtgggaatttcgggcactatggtagggcaggagagaagctatctgcaggccttctggaagctctccagtgcatgtccccactggggtgggggctgactgtctccacgtggggttagtcctgcagaacaggcaggtagagtagagtctgagggcatgaggaaaggcagtctactggagagggcacagagagttcaacaaacactgaaacttaagtttgtcctggacatcttcagcatccgactttctggtggaaagcttaaagtataaatgactgtgccctctcaaaagggcacagaagtaaaactgggaggattttgggaggggactggatgtggggtgaaaggtatggtgagagcagagaagaggggcctgagcctggggtcaggggaaagtaggctaaacaattcacaggatgcagacatttcagagaagggtgacacatcacttggccctgaacaacaactataagccagacagtccaaagagacatagttccaaaggaacataaagtgacatggcttgttatgtgtccccagagacatggatgtgcttttggaacttgaaggataattaaaaaaacatcagacccaccagggctgctgcaaacatgacagttcccttcccaacacgtcatggcagctgctgcagctcccttccctctatcctgaggctagccacagatgggccagcagcccacccccagagcagaccaagcagagaggtgctcccaggagttaccaggttccactctcggaaccatcttaaaatcctgttctgggaaatccagcagcaccatgttatatgcattagagggagactgtttaaatcccttgccaaggttcccaaggcttcgtgctgcatctgtttgcgtgtagccagggagtgcagctagcattctcctctccttgcttctccatgtagccagtggcacctcctcagggtcaacaaacaagaaataaaagcagaaaaccacactttctgagtccacctgccatctgaaccccccaaaccctagtttaacctctcccattcattcattcattcattcaataaatatataggtactgagaagctattgtgcactgagccctgagccagtactaattgagggaagaaatgggcaacatagcttcaaaagcacagctctgtctttctgcctgaggcagcagagagtggatacccaaggctgtccctactctctccctgctcaggaccctgatcagagggtctgtgggaattgggtcagggtgcaggaaagaagatgttgagtcagatatgtctatgtcagtgatcttgcctatcagtaaaggttgctcagcccccaaagcagcgtgatggtgaacctttggctcctgccagcggtactcattatccttccaacagccccatgctcaatcataccatcattctgatgcttcatgagaactgaggcttggatatcttcgcctacttgcttgtgtctcacaggcagcgaatggcaaagcctgtagccaagtcacactgtctgccttctgctgggagccttggattgatgggtgactccatggacatttgttgacctaaaaagtaggtgtttgaggaactgaaagatctccagcaaagaacgtttagaaagaaaatattgcctatctgcccacctagatgaaccctactgaaatggattgattttagcgatgagaaattttgtttactatactgcagggtttccgttaaccctcgaagttatggtcagatagggtgacctagccagaacctaccccaaggactccttccctggctagcagctacagggatgtggcaccattatcccaaccagcctggggagagccttagtaagagttcagatcattattcagcaggacatgtccaggatcccagtggctggaacttcagcagggctcagggtcttagagttgtgacctaaaagtgttgtgagaacaaaatcctggaggagtttcagtccctacctgaacccacagccgtccagatccctgtcctggatgtgtgggagggggcgcatgctgggctccaggccaaccctgcaaatactccacttgccccgtctctgcattgattaatccagctttgagaggctgagcctctcaatgaatcaggtccttgctcagccataagaagaaggtgattggccaggtctgccagggctttgtgacccgctggcttgctccccagcccctcagaacccctcagccccacctgcacatactgcctccatgcaagcccagaataacctggatgtgtgactcacaggggtaggggtagcaattttgcagattttccaaacaggtgacttcagcccccgggcctgggcaggaaggggtagcccagtgacaatgggcatagtcccacttcaggaacgggaaacgtgttggctggctctgtggagttctctctcttctgatcccacagcatctgttccagttgtcttggccggtaggatggcgtctacaaagcaggctatatgggaaatctggagctggggagggattgtggtcagagcccagctttgggaagcccatgtggctgtctcaaggcaaagcagcagagaaaagttctgtagtctgtctcctttctggactggcatttccatggtctgagaccagaggctggctgtgtgtcaggcacctactcctcgaacaaatgcccttagattctcactgtctgtccccgcgatgctgacagcacttgccaaatacatactgaatgtcaggctctgtgctcagcactgtgtacacatggctcacttaatcctcataactgttctgtgaggtgggagctgtcactgtcctcactttatagatgaggacactgagacctaaagtcaagtcagacagctaggacatggtacaactaggatttgaacccacctgatgtgcctggagatctagtgttcttaagcactacctttctggagcttgctggaggcatgctggccacctccttcaggactggtagacctggtgtgtctttcatagccacgctgggcagagggtggaggcctggaaactgcagggggttcttccagggaccagccagaacagggctaaacttggggtaaaaagagctctagagaattagagaagactgagggcccctaaattacccttaagacatatttgtggaagacagatttaaaaacaaaaagccaaaattagatttaggctggtgataaggtcattaaataatagaatgtgaaatttcagttgtgcagacttattggccatctttatgatttaagaatataagtgcctagatctaagtgcagtcctaatcgcctgggaaggaagcagatggtctctagaaacccttctgaccatgggttagtgggatttggtcttgatgaccatttttaaggcctcagtctgcagaatgaccagcagcttcccctcccgcaatgagagctgtaattgcctttcccagttgcctgtgaatgcaccatgaaccttacagtcctagtataggaaatgactcagcaaaatcaccagattaaacctcctcaacttttctttcccttggctccattcctgatagcaggagtcgaggcccttcagagcaggctttccccaaagccacgttgtcggtctgatcctcgaatggggatccgcctggatgatgacatgccacaatccaatcagggtctgtttctcctgacagtcacatgtgccaaagatcatggtagaaacatgtggatggggttggaagacactgctactacatctcttgggacagagcctgccccctccgagtggctacctaccattctctccggggaggtgaaggagctcttgggaacaagtgtgttattattaagagtttcgtcaggttatgtctttttttttttttttttttttaagatggagtgtcgctcttttgcccaggctggagtgcagtggcgctatcttggctcactgcaagctccgcctcccgggttcacgccattctcctgcctcagcctcctgagtagctgggactacaagtgcccgccactgtgcccggctaattttttgtatttttagtagagacggggtttcaccgtgttagccaagatggtctggatctcctgacctcatgatccgcccacctcggcctcccaaagtgctgggattacaggcgtgagccaccgcgcctggcaggttatgtctttgctgtaattggaggcagctggtccacttagaccctgatgcttgggcaaatactttatacacctctgcccccagcagctggtctggtgtgagtccaggcccaagtcaacccccaatgcaaaagccaatcagaagttggacctctttggtgagttcaaactgtggttttaggggatacggaggctggcttagttcagtccaggatcttagaacagccccaatgctccaggcccctcagccagcccagcttttagaggctcccaatttgagctctaaactgagctctggaaagggggtttgggggatgggggatacatttaaaggagtttttgctcaggacctgggtgccacctgctggccatgtttagttctacttacagagccaaagctacgagaggaaaattaaaagggcatcctgccctccccaatgtgatgtttgctcaaaggaaacaaggaggctgttacttcatgctgccctagcaggtgcagcagagaattcctgcagagacccctgggtgccctggatgagtcctcctgagccaaatggacccccattagggcagagtgtagcaccagttgtgaggacctgagcgagtcctgagtagggactgaagctgtgttcctgctactagctacctgcttccccagaagccccatagtgggtaacagcatgattcgttgctgggtcctgaaaggag

SEQ ID NO: 36760 - DNA, 685 bp, Homo sapiens
gtccaatcctgtggaaccaggaaagctgcccccaggctggaagacccttgaggctcaaatgatttcaatcaaaaactggaggatatatttggactaagaccattgcctttccttttcttcagtagtcaccccttgaaattcatacactttaagcagaacaaagtccctaaagtggctcggaaactcccagggccaacctaagactactccttgcccccagaaccacccaagaccagatcagcccctctgaggcctgtcagccacagctggcccagaatcactctgccccaggggcctcatagggaaatgagtctctgagcctgtggaacactcctgcagagtcattctggacagttcccggaatagctggtgccctctgcaccagctcctggccgtcctctgcaccctccctggggacctggcagagtctgaccactgtggccctggggtcattcacatccatctctctacctctgcatgccctctccttccctattcttgtggcacttgctgtttctagcacactttggggcatttggttatactgttctcatgtgtgcattactctccccaataagattatgaactccttgaggacagggacaaatcttttcaatttcttgcagtccacaactaaataatactcatcaaaatcagatgccctttccttgaccctacccactct

SEQ ID NO: 36761 - DNA, 669 bp, Homo sapiens
ggaggagtcacatgataacagcagatgcctgcgacaggcagggaaatattctttctgtaagaatataaggtgtataagatgtatcttatttcacagagacactttacatattaaacctgaagaaatattcttcactcactccagaaacacatgtcctcacaattctcggaaaacacagtccttttgacctatcttgtttttccatttctgataaagatgtggttacaagaaatatgtccttttcttaacagcgcaagtcagttagcagcagcagctgacccttggcctctggggtgggaaggaggctcactgctggctccactccaactgctggtttcagtgcgggagcatagggtcagagtggccaaaagaagccagaaatcccaagttgttaaacatctgaactttaaaatattgggcactaattcaaaactgtttccaacactatgagtgctgaacagtttaagtctgcaaggcaaattcggccaaggagtgtctcttttatgactgctggctgaaaggacttgaagtgggggagggcggtggccagacctgcttttaggtagattctgactacagcaatgtcaaggatggattaagaggagggagagactggaggctggaaggccttttaggaggctcctgctagcctgggctagagagaaaata

SEQ ID NO: 36762 - DNA, 1662 bp, Homo sapiens
gccctttcctcaagcccccatcctcttccttgttctttggcaatagatttgtatagcccattaaacccgaggtttaatcactagcaacagtaaagccagcactttcctagaaggaaggaagcatttaatcttcaatctctccctagatatgaggagcactacttcccttccatccttccagctctacgagaaaggaaagaaaaacagtggccgggcgccgtggctcacgcctgtaatcccagcactttgggaggctgaggggtgggggtggggtgggtcactttaggtcaggagttcgagaccagcctagccaacatggcgaaaccccgtctctactaaaaatacaaaaattagctgggcttggcagcgggagcctgtagtccctgctactcgggacgctgaggcacgagagtcgcttgaacctgggtggcggaagttacagtgagctgagatcgcgctactgcactccagtctgggcgacagagcgcggccctggcaatcaatcaatcaattgatcaataaaggaaagaaaaacagaaacagttctaccaagtctctcaatgccgtggccttcacatcgacgctcaatgaacgttctcagaagggaatctcctctcctcccggcctcttcgcctgggcgggggccgcaggctgccgcggaagcctcttcccgatgctcttcgctcaggagagcccggcccaggagagggactacaagtcccaggctgccttgcggcgggcgccgggcgccgggcgcgcggtcctgcgaggagacgtggcagagtgcggcgcgctcgcgccggaccggaaagccggggaagtggccgaggagggagggctgcgagccatggcgaccaagacggcgggcgtggggcggtgggaggtagtgaagaagggtcggcggcctggggtcggcgccggcgccggcggccgaggaggcggcaggaaccgcagggcgctcggggaagcaaacggagtgtggaaatacgacctgacccgtgagtacccgccctgccccgccgcctaccccaggcctgtccggcagggtcgcagcgagcggctcccagaacctgggcgcgagctcgcaggcacatccccgagcgccacgcttgcgttgtctctttggagcctcacgggaggcagacagctccagggaaggttgcggtcctcacctcccagatgagtaaactgaggcccagtgaagttggataccttggccagggtcatgtgtcagaggggctaggattccggtcctcagactctcagttcactgcacacactctcccagctgcccagggccctagctggtctctctgggcaggtgtctgagctttgaagaggtactgtggatcattatacacggtgccccctctttaagtaaccagcaggtcatggaggaagggacaggaggcccagcagtgggagaaatgaccgccacacactcaacactcaccaggaattataagtgacacctggttcttccactgaggagtggagaaagattgccacttgttgattatagagttgtcatgtcggaaccaagaggcgttagggtaggaccaagatggaaaaagcttgtcttcccagactagtagccactcactgaataaggcaaacctctatatccaacctctctgcttgttcctacatactctgatttgt

SEQ ID NO: 36763 - DNA, 2949 bp, Homo sapiens
acttcggatttaaagctcagcccgagagaacccatcaaatgttggagctgcaaggggctagaaagcatcaccagacctggattcgcgggcgatgttggctcaaggtagcacaggacgttggcccagagctggaaattgaggccaggtcttccggcacacccaccccacaggacgaccaagcagggcttcacagaggagttgggggttaggtttatttctgttgttaaaaacccggtgaacaaaaggttgtggaaaaaacacatgcaaaagacaggcgaaggtgtgagctggatagggacaaagatgggggaacccgtggggtcactccttgaccccacccgggacacctagacatccacagtgtcgggggaggggccccagaccaggcagaagacccttccccggccctggggaacccaagatttccgagagtaagcggacctgtgcaaagacccacaagggaggccagtggcctgtgctgggcactgtacagccgccccgaccccgacctcacgtgggcctcggaggctgcagggacctacccggccgcgcgccgcccaccatcccaggtctaccgcaggggaatcccccaggcttgcgagcgcttccgagggcaggaaagcctgtactgcagccccgccgccctctcctggcgcgtagccctctccccgagccctcgggccacgccgccaggcccgcgatcccagggcggcccggggggttcggcacagcccgataatgcgccgcgccgaagcctgcagcaccccgcggtcgccgtctctcttgcactggtcaggacgaatagagcctgacaaaacctgagttaattggccgagcgaatgtcgttcgcgtcaggagagcacgtccggagaagccaagggaaatgtggagcaggagcagccaaagtggcccatcggctctcgagcagggtttgcgcgtcgcggtcgcaaagcccctgtgagtgcaggtaccgcggcacaagcgctgccccggagctccaggaggcggcggcgggctcggcgttcgcggtccaggagaaaccaccgcggggtgttgggaacattttgttaaaaagccgggaagctcagggccggtgtggcctccgttctggcctgagaacccggactttgggcagcttcttttccttgcctttgggtctccggctttctcagctctgtgaggtcccatgggtctcctgccctggcaggttccttcagctggagaaagcgggggtcatggctggatgaggttgcggtaagcattagagggctatcagcagcatcttatcgcagcggagccttcgatagctcagttggtagagcggaggactgtagtggatagggcgtggcaatccttaggtcgctggttcgattccggctcgaaggacttcgtctgtaatttttaacctcaatttaattcaattatcccataaggggaaaggcttggaggcctcctgtgacttagcattcgtactgccgtcagtccatagggaacaccgtagtatgtagtatacggtaacgctctttctgcgttcaatgtacatgtggtaacgtgttttagaatgttttctgcttaagcacacgattatatgcttgatttttagaatcttgcacatggatgccactgtattgtactctgctaaataaatgtcctgaactgtggttgatccactggtcagtgaacagtgcagtgaacctgtaaggcaaagggaaagaactaagcagcaggcgggggattagctcaaatggtagagcgctcgcttagcatgcgagaggtagcgggatcgatgcccgcatcctccactcagcttttgcgtccgtcacactacagaacacaaaacgggagggattcccggcgcagtgggctacgtgtttcattttagagacacaagactgttaagcgataaggagtttcacacgatgtctttttatttcgcagttgagtcccagtttctgccgctttatctttcccgcctcccggcaggcaggccgttaaccgtcttccggaagacgctgctagaaccctccggccgctcctgcccgccatcgtccccgaacgacactcgctcaggtacccactaacgtgcgaggaaccctgagagctgaccaatggtagcgagctttactgggcgggtcgccagctgcagccacggccaataggcgagagacttcttgtttcctggcagagcggggtcccggcaccgcggcgctcgggtgtttttgggggcccgggtggagggcccgggtgccggggcccaaggtgcggcctcgctagcgggagagggagcgggatcaccggcccggagagaggtgaggggctctgcgcggactacgggccccgccagccccggccccgccagccccggccccgcccccttctctcagccccttgagcccgagcccctcgaaggccaccccgcaccccgctcccgacctggcttacgcggtcccgaccccgcccagctccgtggcctcacctctgactcctaggccctccctgcctaatcccctgccgcgggagcccgtctcgaccccttccatgcctcccagtcccaccctgcccagggcaagcccgctcggtgtgacggttccccgcgagtcgagggtggagaagccagcctccttcccccgagtgggactctagcagcccacctcttttaggggtgctgagaacacccattactcatccacagctactagggtagctttctcagggtgcagtgcttacggggcggagggggatggaaacagacccatgccctggctggaagggagctccagtcgctaggtgagcccagtagcctttggcttggcagaggcaccactgttatagtttttctccatactaggcataaggtaggaacaaaaaaggaagaaccagcccttccagggctcaggggagcaacaccagaatgtccgctcagtacttgtgaggacagaggctggagag

SEQ ID NO: 36764 - DNA, 2398 bp, Homo sapiens
aacaaaacagggacctgccaccccttccctccctccgcagcacaagattttgggaccacaaaaaaaagtctatatttttatattggggggagggagtagaaaagcaagcccctatactgggccctattcagtggcagcttcttgttccataggattaaggaagactctgaggaaataaaagttgtttggaaaaatccaggtgtagttgctttgtatgttgtgatgggtagaagggatgaagtgaagtgtgaaggcccctcataccctccatcttgcctcagactatgtcctggaaccctagaaaagagggggaaagacctgaggtaaggaaaatgctgcagctttcctctggggaatccttcaggaagtaacgcccatccatgttccctttatacttgtgacccacacttaaggctggctccaaagcccccccttccttctctatagtttgggtcagcagccaacccctggcctcagaacatggaaacagaattctacatctgtcacccccctcaccaaaaaaaatctgcccaaataaggcctaaacaacctggggaaaatgagggctatttaagagcccaaatcctcatacttggatggttccctcggtaccttcgttcctaccggtgtcagtgcctccttacaactatactcccaacttgggcatctacctactggagactgtgagggttaggcaacccactcccattctagcagggaacaggttacggggagaggacagcgcgctctctctctactctgtgcagacaaaggggcccagttctggactgtatcatgcttggcccgacactttctgattgtaagtttcgaaccctgctagccctggcgcggcctcgccactcagctctggggactgggcgctacagccccgggccgttacctggggcggagaaagcgccactttcattcctgcttcttgggattgttgacggccacgtagtgatagagaacgacaagcaagaagagcgacacgcccagcatgttggcgaagatggcgagctgcacgtccgtgatcatcctgcggagaagagaggggctgagctgcgggctggcgcactcctcgccctcgcaagaacccgtcctcgccccacgggccagccacggccacggccacggcggggctggcccgtgggacggcccctgcgtgcctctgacctgaccagtccggctcggctccgacgccaccagcgaacaagcccgaagtcagagacctggaccggaacttcgtagcgccagctcaggcccgaacaagccgcttccggcggggggcgcggtcgggacggcctctctagccccgccgtctcgtcggctccgcgcggcgcgttacggccgcggctggggcggggcctcgggcgcggctgcggtgggaggtccagccgtagggggtggggcggggctgcggacgcgcgcctgggcccggcaccgcacagctggctgcagctggcgtggctcgggacgcggctagcgaagccgtggtggccgcctccccggagccgaggagtgggctggggcgagggtgcagcggcggggccggcgggatactccaacccccttccggccccggccctcagtactgctgcccacccttcgcttcccggcccggcccaaccaggtgcttcctttgggtcctgccctcagtgccctctccctggcccggacggcggggacaggggtaggaggcgttgtagaatggggacagggctggtgctgccgggtgctcctttctccggcgccatcctttgtgacccacatgcaaccaagtagaaccatcctgccttttgtgatctgaccaggttctgtcttagccgggctccctccctccaccctaccccccggaggtgggcgtcggaaatagggcggaccctcccggaatcaaaacccaaaccgtgggacttcggccaagtgggaaatcaccccccggatgtgggggagggagaaggggaggaatggagaagaggaggaagggctgggacaagcaagaggggtcctgggttcaggacagattaggtcgccgaagagaacgaagagcggtggctgcgggtagccgagggtctctggcgaggggagaggcaccctggaactctccaagcctctgcccaagccagagctttctcccccctcactccatgctttctctcagcttcaccataaaagggaacggcactgagccaggccggggccgggggctgggctgttgctctggagctgtcaggggtaatggaagccagttgctttgcggtagaggggggccagggctcaggggaggcctctgcttctcggagccaaagaaaactctacaggagatgctatgggcttgggacaggggaccagtttcccgcctgtgtgcactgagctggggatgcactatcccaaagta

SEQ ID NO: 36765 - DNA, 813 bp, Homo sapiens
tgctgggggagtcccccgtgctctatgccagagagaagagaggggcagaagggttagtgagatcgcagagattccctgcccgtgtgtgtgtgtgtgtgtgtgtgtgtgtgtgtgtgtgtgtatttgtgtgtctgtgtgagagagagggagagagcacgcaaaagatggagagactgagaaaaagaaggccaaaaaagagaaggtgctcgcacacgccccatgtggccaagatccttcaaacagctgcaggagaaaggggcattcctttgagaagcttggtccgtggggacagacagttgagactacaaatcctagcatgcattgcacctgactacagatcccagacccctccgtggcctctggagaccgcaggtcccagcatgcagcagttcctgtggcttgccttccctcctgcgtgctgcacaccggatgtgctgtttccctgccccgagatagccttactataattatgcaaacaggaactcctggccaactctcaccgtccacagagcctcttctttgtccccgtggtgttgcagggaagtgtcacccagtggtagctactgttgtggcatccagagtgcctccctacactcccatttcgcccctcttgacagccccatgacagaagagtgtcattatcctttcgcagaagaggaaagagtttccaagaagttaagaggcactctgggcaggtggaaaggacatggacctgggggctggatagatggtctgggtttgaaacttagcactgccatttattaaacctgtgatccatggccaggcacctaatatctctggtccagtttccca

SEQ ID NO: 36766 - DNA, 1564 bp, Homo sapiens
ttcattcattcagcagatctttactggggcctgctcctgcccaggcactgttttaagtgctgggaatgcatagtgaacaaagcccccagttccctgccgctcacattccagtgaggtgaaaagacccagagggtccctcctcagtccaggagttctggtgcgctccccggagcttccctggcccccctgactgctatccttgtccccaggcgtgttcacagcgccactggctggacgctacttgctgagcgcggtgctgactgggcaccggcacgagaaagtggaggccgtgctgtcccgctccaaccagggcgtggcccgcgtagactccggtggctacgagcctgagggcctggagaataagccggtggccgagagccagcccagcccgggcaccctgggcgtcttcagcctcatcctgccgctgcaggccggggacacggtctgcgtcgacctggtcatggggcagctggcgcactcggaggagccgctcaccatcttcagcggggccctgctctatggggacccagagcttgaacacgcgtagactggggtcccgcccgacgtgtctacgtcggctgaagagacagcgggggcggcgggctcctggggtctcgcctgagacggggcacctagccctgggcgagcgccgcacccgggcccgcagcggcaccgcgcccagagcggcctctccccacgcccggggcgcgccggctcagggaggctcggggccgcccatgcagacttttggcctggcgcgatcccccaagaacccctccagggccggcctgcggaggagccgatcctcgcaccctccgctccctccactggccctccaggtcgattccctgggctccaggctcccccgcgcgggcgccgcccaccgccatactaaacgatcgaggaataaagacacttggtttttctaaaaaaaactaaacgaaccgttctgctacggtacggggtcgggggctgccgggcgtgcacagggcacggggcgggagagacgacggcctccggagaggaccccgggttccgcactgcgttcgccgcctccgcccggctcggggcggctcggggttggctcaggcagcaagcggcgcccgcccggctcctgcgacgtctcccccgtgtcacgcccgtttcgccggcgtccgccagggggcgctctgcgttcccgccacgtgaggctgcggcccacccggcgggtcctgctcctccgcggcggaggcgtggcctcggctgggactaaccggggcggggcggggcggggcggggcggggccgccgcgaccgcgggcttcaggcagggctgcagatgcgaggcccagctgtacctcgcgtgtcccgggtcgggagtcggagacgcaggtgcaggagagtgcggggcaagtagcgcattttctctttgcattctcgagatcgcttagccgcgctttaaaaaggtttgcatcagctgtgagtccatctgacaagcgaggaaactaaggctgagaagtgggaggcgttgccatctgcaggcccaggcaacctgctacgggaagaccggggaccaagacctctgg

SEQ ID NO: 36767 - DNA, 1913 bp, Homo sapiens
agcttgtttcctggacacttctggagcctgcttcagcctcttcctttctccttccttgcttcctgcagactctgcggtggatgtgcctttgccttatcttaagtcccttatcctggccatgcttgaggcagaaggcagttagggacacgtggtacccatcctcccccaggtccaggcccacagtttctgtcccagttgagaggcagggctggtgctcatgtccctgttgttcactgaagcagtgagagtaccctgttcaaggacaccctgaagccacatgctaaagctgggctcagaacccacacctcccagttccccggctgtcagggctatagccctaaatggctcatgcacgccctccatgttggctgctgcagggacctcagagccctttgacccctggcgctgccgactcagcaagcacttatcgggaggtgaggcccacactttgcacactgtgggcacgggggcaggctgccaggttgctggcctgtgaagggcagccctttgaaccctggtttgaagggggctgctggcagagtccaaccacctgagctacagccaaactccctgccttgatgaactggcaggaagagaatagagggagagaatctgccctgtgagatgggacaggacggctcagaaccaagggctggtgactcattaaacctctttaatagctcctttcctctgagctagaggcaggactgtggctctggcttaggatggtcgactctcctttacatagcaatcaggccaatgggtggtttattcagaattctccccatgtgctcgacaaacatttagagagcacctaccatgtcccaggcactggggtgcgaaagttatttggcaaaccaaaccatatttccaatgctttgggaaagttactatttaaaggagttgtaagtcaagggatgatgccctgacttggtatctttatgcaaatctgtattatccagctttggtgttgctgaaagcgggctctggccaggtgagaaaagccaggatggtggctggactgctgggcataattgccagttcttgagcacagaacaatgcctgtccatagagggctggaagggctggggctgacctccttgtccttgcccctgggctcactctgcatggagggcattccaggagagagttctggaccaggcccatactgagtggcatcaggcacggggagccagctgattgcccaggagggttcacctggctgcaggaggacaaagcagtgagctggctcaccaaggcagcaccacttccaggctgggcctcctggaggcaggcagagagtgagaggaatcacagcattaggactgggagggactgagagaggacagcaccctggatgagcttgtggaggacagctgggggcaaagtattgccttggagattaattattaatcctgtttgggcattgcaggaaacaagccacggtgcccccacatgcttggttcaaacagtgtacaggttctagggtcctgtctagctttatgaacaggagcaaatcctttccagcatgagttggactgaaaaacagagtcaggatcggagcatgcttcagccaagacctaaaaggatggcccttagtgtttctctctctgagctccaggctctgcactcctgcatctcctgccctgttgcactgcctgtggcaagactgtgattcccagttctctcccagccccctttgcttgcacccctgcctttcagggtccctagtggccctgccagctaccctccagtccccaaaacccttgtcgaactgcacccccttcgggttactccgccctagcagttttgtcctggatgacctccgccgctattctgtggacctacgctacacagtctttcagaccacaggctccgtccccatcgccacggtcatcatcaacgaggccagt

SEQ ID NO: 36768 - DNA, 521 bp, Homo sapiens
cttcttatcccttgcagactccctcctgcaggattttagaggtttagtgtactaagaacctagtacgtgccaggtactgttatggctgagagggcccaagcccagcagccctcaggttcaggctgttcctacggcccagcctgactgccggacctggaggaggggcagccatccctgggcttcatatgtgcagtgagtgtgagtaggcaggcatatgtgctacaggtgaccttcgcattgggcaatcctagtcaaatgcttgttaagcaacaatccgtagtaaccctgatcaaggacacaacatagctatttacaggagaggagctctgaggagaaatgtttcttgcccactggcctcagtccaggcacattcacacacattacctgcaactgcagcaggctgcaagggggctgggggtttcagccccatttatcaatgtggaagttgcctcccaaaggcccgggcagatcacacagctatagttaagtggaaggactcggctacagaacgtggagcgggg

SEQ ID NO: 36769 - DNA, 939 bp, Homo sapiens
cctgggtttgaatctcctgctctgccactaactagctctggcaagcttctggcccttgacaagttattcagcattcaaatccgttcacatagggggatcacagaacctatttcatggaactgttatgaaaatcacaagacaaaatttgtgtgaagtgcttagcagaatgcctggagcttaatgagaactcaacaaatcttacctacaagtactggtggtaatgtcatagttaataattttgttttgcctcttgcttgctgtgtaactggacaaaccacttaatctctgtcagtcataacttcttcacttataaaatatctcataagtttgggcttagcccagtgccttcacacgactgacagctgtcgtaattccagggcttaaggactagggtccaaagtcacatctcccaacagttgcactatcgacttggcatctctaccatttgcccctgtagactataggaactgtactggagatagaaatctggtcctcatgttccttagggcccactgcggatatgcagtttctattcttgaacctatggcatactcctccttcacatgccttccacgtggctaggctctctcattcacttgatgtctgtccagaacacagcagagaagctgaaagtcagggcttagtgcccactgacctcatctgtccctgttatttcatccttgtcaccttccccctagctggcatgaaggaagaaaaaaatcgattcacattagggctgttcttcctttagagcacaatctaacagcaggggccccacaagtaagagaagataaggtccccggtagaaagaagccccttaggccagacgcagtggcttacacctgtaatcccagcactttgggaggccgaggtgggcggatcacgaggtcaggagatcgagaccatcctggctaacacagtgaaaccccatctttacta

SEQ ID NO: 36770 - DNA, 1621 bp, Homo sapiens
ctttctgtggagctttcattcaatttgtgctcagttatggcaaccatgaaatctataggtgtttccccagagacagtctaagcagacatgaagaaacagagcaggaaagagaacactcagggtttgtaaagcacacttgaccaactgctggagtaaaaatgacttttgcacaaatgacatttcatttttgtgtgtgtttttatttttttattttttttggttttgagacatggtctccctttgttgcccaggctggagtggagtggcattatctcagcctactgcagccttgacctcccaggctcaagtgatactcccacttcctcagcctcctgagtagctgggactacaggtgtgtgccaccactcctgcctattttttttttcaattttttgtagaaacggggtctaactatgttgcctaggctggtctcaaactctaagactcaagtgatcctccctcctcagctcccaaagtgctgagattacaggcgtgagccaccactcctggcctacaaatgacattttttttttgaaatattgaggaaaaaattgaggcaaaattaatacaagtagagagtttatttgggccaagtttgaggactgcaacctgggacattggattcaaattgccctgaatatacactcccgggttgccttcctcaaacttgggcccacaaaactctctacttacgtaattttgcctccatttttttcctttggatcaacatatctgacatagcaggatttggagtgactcagccctgaccacccggtgtttctctctggaagtagtgctcagcatctgcacaaatccactgtgtcctctgtcttcagaagtcctatccggcgttgcaggtgagttctgaatctggacctccctttctttggttaaggtccagattttaatttgggccgtttctcttttgactctctcagaatgaaggtctctgtctctgactttcctattgaagtcaggggatcaggattttgttttctgccaacacagagaacggcggtttgctttcgttttcagctgaggtcttgttgcattgtgacctttcattctggaaatcagacttgtttcacctatgaccaacctctcttgaagttatttttcctaattaatgagagtgaatggattcttcactctaaagatgaaaggctcttgctccctctgacctgttagagtgctctaaataattagagacgtggtggaggtgttggacccttgtccatgatatccagtggccttacagggtttcctctctcagaggaacatctgcaatctcttgctctgccagcaaatgcacgcgaagcctggtcacctagcactagtgaaccctctgtgaccctccagggactccgagtttctgagacacataaaagagtggacccaactcattggtgacatattgaggagctacactcacaagcagcacatttggaaccgcaacattccccagagcttagtcctgagtgattcaggtgtctaaattatgggcgttaaagcaaactaaatatggcctgagaaggactccatacttctatatttgagtccttgtggacgaactgtaacctagtaataggaagacagggtggttcacggtggctcatacctg

SEQ ID NO: 36771 - DNA, 809 bp, Homo sapiens
tgacccgaggtcaggcattcgagaccagcctgcccaacatggtgaaaccccatctctattaaaaatacaaaatttaaccaggcatggtggcagttgcctgtaatcccagctacttgggaggctgaggcaggagaatcgcttgaacccgggaaatggaggttgcagtgagccgagatcactccactgcactccagcctgggcgacagtgatactctgtctcaaaaaaaaaaaaaaaaaaaaagtatctaaagtgccagaaaaaataatcgggcgcaatggttgtttggcaaccctcattcaggatgttacgacacatttcccaaatattctgctaatgggaatcttcctggcaacacaaacaatgagtttatctcatgcaaaatgtatgaacatggtggatgacctgcgaggcacagaagggaatggaggtgaaagaaaaatgctctcactaaacatttccagcatcagaatttagtatcctttctatcacttaaaacatgttctgaccaagcaagtgacaccacatgatcaatgaaggaatcccaaatacgtggcttgcaaaatcaaaacaagacctttagaccaaccacagttaactctctgatttgtcttttgtaccccctggaccaatctgcagatgcatttctagttttccatgatgcctgaaagaacctaaagatgctagtgggcagacatgaactcagccacatctgatggccactccccaagaaccatttttcctacttggaagagccaactgtctttgcctcaagaacaggcttctgtcaggaagtcatcctgtgggacac

SEQ ID NO: 36772 - DNA, 903 bp, Homo sapiens
gttccttatgcttcctgccttcaatgatcatcatgtgaagatatggtgctgggaacagcagagatcatcttatcaccgggaagggaaagtcacgagaaagtcagagagactgagccagaactctgacattgtggaacttctgaattaggcagctctggaattctcttttccaggacttttatgggaaataatgaatgtcctcactgtttgagtcacttttacttgggtgttctgtttgtgctgctgaaagcaccctcaatgatttagctgaaagtttttgaagctcactcaacaagtattaaattgctgtggttagtagatccagaactcggctaaagaaacttatctcactcaaataaacaaaattattttattatgagatccactggcccaaaagtgttgcacgagtctttctcaacttctcacggtttaggaatcacagaaaccctcccacagactttgagaagtgggcaggagacaggatggattggctgttcttgttaacagttctcagtgtccttgctgtcattgacagcttcagagatctgaactggcttcatgaggaagtgctagccaggcaggccgattctgtgggacagatggctgctgtttcacaattgtagacatgagaagggcaacctttagcccagaagctggggttggtgatcctgagatatcattagcatctatggcatctgtgctgtcacttttgatcacagtgtggatagtactcactgttcatttgttttatttctaaacattctaaaatgaatgcgatttatcaaatgtttaacagcacaattctgacatatggcaaactttttttttttttttttttgagaaggagtttttgctttgttgctcaggctgaagtggaatggtgccatcttggctccctgcaat

SEQ ID NO: 36773 - DNA, 658 bp, Homo sapiens
ctgaggttgcatcattgcactccagcctgggtgacaagagcgaaactccgtctcaaagagaaaataaataaataaatgaagtgaacctctatgatgtccgctacaacagtgctggtacttttaaagctcatccctgaccacatcatccaccctcttccctcaaggagccactatcctgaccctggggttaatcattgccttgcctttttttcatggttttaccaccttcttatggggccaagaacaatagagcttaattttttccatgttgaactttaacaaagagaatcatagtgtttccttctgtgactgctctcttttgatcaacattgttctgtcaatgtgtgtgattgtggttaatttgtttgccattgctacatagcacccctgtaagcacgtaacactagatcgtatggacttttgggttgtctccagattggggttatgtttttgtttgttttgttttgttttgtttggcagagtcttgctctgttgctcaggctagagtgcagtggcgcgatctcagctcacgctgggctcacagacgtgcacgaccacgtatggctaattttttcgtttattttttttttttatttttagtagaaatggggtttctccatgttggccaggctagtcttgaactcttgagctcaagtga

SEQ ID NO: 36774 - DNA, 2414 bp, Homo sapiens
gtctcaaaataaaaataaaaataaaaataaaaacctgaactcactttggtcacacactgcagtggatcgcattgactcctacaaaaggcaatgagaccactgcaggactaactgttccaaaaagattccctcaaaatctgtcctggggcctataattcctcaaggtgtgaaaggctttgggggccctccttaaaatgctaatagctactaacaccttagaaaatttgccagccagctaaacgtaaacctttcaggaacttccaggcagacaccatgggggtaatgtggaagggaagcctggctcggctactcgagatgatcacttgggtcggctttaaggagctttctggctggccctaaccaacactgtcgcgccgggagcagggatcccctggcgcccttcagtcagggcgctggcccaccctggggcagcaacgcactcccttacctccgtggttcagtcagagctaggaaggtccctttgtgcttcctgagatcaacatcgctcccttttcctgggaaggcaaagaaaatgagttagggaagcgtctatcccgctcctacctcctcgccaggctccgggacgctatgcgctatcagcattgaggtgaagaggactaggtgcccggggcgatccaggctcgtgtcctcccgctggagtttgaggtttgcccttccctcatcaccctcaccctcgttctttctcggtttcccgcttccctctacgcggcggagaccaccaccttaccgctcgcacttaagatctcagacccacgccggaggccggctcgctccgcccctccccgcccccttgtccccgccccggctcagacgccgctccccggtgcctctcggcaccggctcacgctctccaggcccacctgcccggtctccacacgtgggtagccagagcccggccgagagccctggccgggagcccgcgggggccccgccccctgcccgccccctgcccgccccgctcgccgtgccgccatgtttactgagggcggatggaggggcccgagtttctgcgaagccgcgacctcggcgtccggacgcggggaacaccgggctgagggagtctgcagtcggctccgggaagccgcgcggcgacgggggaggccttcactaaaggggaaaaggaagagggggtcggccagtatccccgaaagagggctagggcgcatgaagaccagcgcagagctccacgagcaggaaaagcccccaagcagccccagggcgactggaccgggccgcttaggccacgcccggggaagagggcctgacgcgctgcggggcggggccgcggggccgggtcgcgcgagcagcggagcaccaagggaacggaaaatggcgcctcacgacccgggtagtcttacgaccctggtgccctgggctgccgccctgctcctcgctctgggcgtggaaagggctctggcgctacccgaggtacagaagcaagtttgaggtcgggctgaagcagggtcgctggccagccgtgcgtcgcgctcgccagcggctcccccttctcctcggcgggcctgcggttctgatttcgtccctgacgcttcccgaccctgcccagccaggtcctgttcccaagtactcacgtcgtgcaggccttcggcgccccagtcctgccgactttcaaagacctgtgaaacttgatttcgccccttaattttagaataactttaagttctttctacagacgggtcctctgcctcttgtgtaatctctctacgcacgaacgccatatatcgtgcggtggtagggctgtacttttgtaatgcttgatgagttctttacgtacctgcggtcgttttacaccgcgccaaactagggctgtcagattgagaagtctctgcagaaagcataataaataagttcgaatagtgatcttcagagatgaggaccttccctgtgcgatatctggtactgaaagtgtcgggagctgattcggcgcaggactctggaggaagagatggcatctcctagcctagcctgttacaagggtgggacacgagccgtttatccatttatcggccccgtgttagaggaattctggaaacgtgtactggcagttaattcttgatcgccgtttgttcttttcttggcttttctttctggagttctaatgtttctttctcttctgcagatatgcacccaatgtccagggagcgtgcaaaatttgtcaaaagtggccttttattgtaaaacgacacgagagctaatgctgcatgcccgttgctgcctgaatcagaagggcaccatcttggggtgaggggaagacatccctagatgctggatacaggccattccttagcctggctgcttttatacccttatattatttaaagaatccacctattatggtttcagctgtaatcatcacgcagatgtctaccaaaact

SEQ ID NO: 36775 - DNA, 1109 bp, Homo sapiens
gaaaggcgccctgcctttacgtgtttcttgcttggggtgggagggactgctttagggcagccggttttttcaggtttcccccggttttgcagtgcggagaccacgggggcccactccccgtggctccgcggaccccgccccttacgtgcccggccccgcccctcacgccgcctgtgtccgcgccgccgcagtctctgctgctgccgccaagcgcgcccgaggctcctacgctgccgcgcccggcttctctccagcgccccgcgccgttagccacgtggaccgactccggcgcgccgtcctcacgtggttccagtggagtttgcagtccttcccgcttctccgtactcgcccccgcctctgagctcccttcccatggcggccctagtgttggaggacgggtcggtcctgcggggccagccctttggggccgccgtgtcgactgccggggaagtgggtaagcaagcccggttaggctgcagaccttatcccactctgtgatgcgcctctcctcccaaccttccccgtccagaccccgccattttcccgccagcgtacccccttcccccattcggtgcccatgggccccagcgccataaacccctcgcgaccaaggcagcctccactggggcgtgctcatcgcgcggggagtgttccgaagggtgccctaccggagcccagccctgcttctttcttgcagtgtttcaaaccggcatggtcggctaccccgaggccctcaccgatccctcctacaaggcacagatcttagtgctcacctatcctctgatcggcaactatggcatccccccagatgaaatggatgagttcggtctctgcaaggtagccacacccagtgctttctctacattccttttcaagtcagtaattgttaactattagtgaagtaggagacgttgacaccctgctgggcatcctgcagaaaacatacccactgaagtagtaaagtcaaggactaagatcactagtaactgtagttaggggttgttaagtgccttgggaggcacagagtgttggaggcctcaggaaaaagctaccgcctttgttaagggcatcaaggctccaggtatagctgaaagcattctgtatgtagt

SEQ ID NO: 36776 - DNA, 1345 bp, Homo sapiens
atcctatgccaggtacctcatttaagaggaatcatacaatatttgtccttttgtgtctggcttattttgcttagcataatgtcttcaaggtttatccatgttacagactgcagacctggttacttttagctgataatttctattgcaatctatgtgacttttatcagcatcatccattctcctgtcaaatgtggattttttttctgtgttgatatttacttgatttctttccttaattctgccagctctcttttcttctccagttttgatcacttatatctctttgtttttgttatttcttttaaaatggtatatcgaaatggtattgattcttggagtatctgtcccttgtttgtcaagctttcttttttcttttctttttgtattatctggtttgcatcttttgttggattctgtctgcttatcactccccttttatcagggtacttttatctggagctgaaggtgaattcctgactcaacccactgtgtttatcttggctttctttcactgtcctcttaaatataagctgcctggttggatgttgtcattggttttgcaatctctctttagttctgtgccttctttggtgaatagaggggtatgacctgaattaataggtagttgagtgtctcaatttggttgtgttgtcttggagtatttttcacgcagaatccggtgatttatctaccatagaggcccacacaggtccatgggaggaggtctcccctgagatttgagctatttcctctccatttcacagacaaacaggtcattctggttgaaagcagggcccttatagagctccatggcacacagggttttaatttgatgagtcatcttttgttgatctttgcttaaatagctttagtccacagttgcatagttgattttcaggctgtagtttctttcctctgtgaaggtttgaggtttgttccttcattacccttttactttttttacttaaaaaacaaaaacaaaaaacggccaggtgaggtggctcacacctgtaatcccagcactttgggaggccgaggtgggtggatcacctgaggtcaggagttcaagaccagcctggccaacatggggaaaccccatctctactaaaaatgcaaaaaattagccgggcatggtggcacgtgcctgtactcccagctactcaggaggctgaggcaggagaatcgcttgaacccgggaggtggaggtggcagtgagccaagatcctgccactgcactccagcccgacgacagagtgagactctgtctcaaaaacaacaacaacaataataacaacaacaacaacagtaaaagaaactgcctctgcctgagactcagagaaatgaa

SEQ ID NO: 36777 - DNA, 3282 bp, Homo sapiens
acagtgaacagcaggaaaggaaaagtctggatggtctgaaaaagtctgggaaaagtgctgggaggctacattttgcttcagggctgagctgggacgtcagcatagcctcaggaagactgaggctgtggagctgaagggctccagcaccaagagcccagaactccagccacatgtcggcacctaggcctccttggagctctagctcctgcccttgtcagctgcagatgcctcaggtagggaaatataaggactctttccctccctattcttgatgaccacaagggggaatcttccatctggcagttatgggccctgagggaatctgagcctgggcaaagggcccagcgtgtcagttcccatcatagccacactgtccagcatgagtcaccacacacgtagccaggtgagtcatacaggctgacggacgctgaggacaggacaagaggtggttgggcaccggagactggagaggggcccagggaagggccaaagaatccatctcctggccattcatgcagttaagtttctgtgccgatgcagggctgttctggtcacaggatccctgttccactctggccttcagtagcccccaatcccttccaatagtcctcttctcagaaggccagtcatcactagaatcctgttccccttctctaaacatgggcaagacctcatcttaatgtgatcactctttgcaccccaatgttctaaggccttctgacattccccctctaagacttacttatcttcatgccatcctcttacattagctaacttgcaaaatgaagatggtaacaaatgcaggtaggtcactgcattacctctgtgaggttagtactcaatcactgcatttggagtgactggtatctgatcactccaaatggatcaggatggagtgatcagataccaatatactaaccttggagatacatatttaggcagtaaatgataacaaaagcaaatgaacgatataaacaaaactcaggaaattttgggtgaattacggagaggcactcaagaggtctcaaagctgattactgacacaggagtgttcagttttaatgccatttaaactgtacatacacatcttaatcattcttttgtatgtttcacaataaaaaataccaagaaaaactggggtaagagtcttgattcagcacttattaggtgtgatctaatgtggactcaagtaaccctcctagctcacacacctttgtgggggccctatgccataacgtatatgaaagtgctttgcatacggtaaaatgttttccaagttgaggcctcctggggcaatgcctttatccttcagggctgactgttcagctttttgaggactttgaaatcctaaaaccctactgcacagcttggccaactacgcataccccttaaaaacagccttggggaccaccctccaaaacagactggggacagtgtaggatgaaagacagccaacccttcaagagagccgaatagaaacaggaagtgagggtggtgcagtggggcaagcctctggcttccaaatcagtctgccctggtcccactcaagtcctagagggacactcaccagctgtcaggacctgtactttccacgggtgagcggccagggcccgctggtatgcccgccagagtgccatgcttcctgtcaagccaagaggagagggggtcacccccaccgtccctctccacgactaagaagccgcctgacattcccttgtgcccactcccttccccttcccacttccaatgtgacttaaaggggcagaggccacatgaaggatgcttcccagacagcttcctgtcgcaggagtcgccttagacaattggggaagagagaaaggctgtgggaagctatggactcctggtagcagccaccagccaccccaacctcattcctgaagccagaccacctggaagcctccgttcccgacggagacactcatgaggacagctttgctctggcttctacccagagcttgggtgcctcaaaagatagcttggtccgtctccagattcagacttggttggaaccagtttgtaaccttcctgagtccagctccaaaccgaaaatagggcccgtcactgcccggatataggatgaccacacaccttgtgggcactcatggcttgcgacgctttaagccagagaccgcagatcacccgccactcacctgagcgccgagcctccctcccacgtgacaggctggcctaggaacttccgccacaagtcccgccccttcctcccagcgtccttcggattacgcagccaggacaggaatgggggtggaccgagccatgaatacccgtggagagcggcctaactcggccacccactctgtgagagaccccttttccagctggactgtgccggaccctggtgtggggcccgccagccatatttctcacctaagttcgaccctctgcctcctcctgccccttctctccgcgcgagacccgggcctctctcaatccggtagtctcattgttcagcccaccctccccgcataactggccataactacgatccttgtctcagcaatcgtagttagggaactataagttatagttaagtgcgtgttttgtctctaggttcttcactggcctcaactgtgagctcatgagtgggtaaaactggggtcgttcatatttgtcgtcctcatagcaactatttcagtgctttgccgcaaacagccacttaagaaatactgcgtatgtatgattcttccacagaaagcattggaattagaacctcagaagacattaggtattggctcccaaactaacgggctgtgcagccttggtcatgactagacttgatgttaaggctctgcatctgtaaaatgagggaggttacactattgactttccaaactcggctcctcagttctagggatttttcagatgtttgtgtgtggggatgagaggggcagcattactacagctgcttctccaacttttttttccaagtatatacttctcaaaagacccatttttaacggggcccacaactgcatgtttgaaaaccagtaagctaggtgatttcttaatccccttccagctctaacattctaagagtctgtgaatatagagcaatatcctttctagagcgttggaaatgtctacaatatccctggcaatggacttgtcaggctggcaggctttacttatctccagggagcccacacgtcaggaggcacactctttcaggctctccacctgcccagctccacccccaatttactcaattcctttatgattaaggcagggagactcctgccacaa

SEQ ID NO: 36778 - DNA, 2025 bp, Homo sapiens
actggcggtatgcaagatgattttaatggtacgaaaacgaacattttaatgactagtgcttttatttcaacttacataaacaattataagtagcccatgaaacccacggtttcatttatattgcttaggtcgagactaatgcatttaaactttttaagtaagtcaatttaaagagaactattcagaaaacaatagtacaattgataagagattgcaaaaatagtgatggcacgggattgacttaaaattgtatatgcctctggaacaaagaggtttgtccataccctatacatccctccaacaaagtgagttgcctccgacggagttgaagtcgccacctctgacttccccaacaggcagccaacttgccacgggacaaaaggactagacagggaaacacaactggcccttggttacgccaatggcgttgcagcgcgcggggcacaaccctcggggttaaagagcctcctcgaggaagaggctgggacacagctgaaagagattgacccacaaccactctaggggccatcacctgcccttcttcagtcctgggcgtgaaggtagatttctcccctagcctgtgcgggagaggagccctggtttttctaacaaggactactgtaggttcgccgagttcgagggacgctacgtatgcagcgcctacgcccggacacaggcttccgcgttaccgacaccgcgtgggggaggagggcaagacccgaggcttgcagagatggggggtgcacggtggccacagtagggaaggtgcggagcatgatggtgctctgtaggagcgcagacgctgaaaggcgcgctgctgtggctgggagaagagcggagccaggagtttgttcccaatatcttagtgctatggcaaaagaagggggaggagtaattgtggggccccccacacacccgctgcggcgatacactcaccctcgccaaagtccttccggaagtctaagttcgaagatggcgccgcctgtctggtcgcggtcttatgacgaaatcttgttagctgctcttcactgacgcccccaccccagtgcacaaggtaaacacgtgtgcttggtccggagtcggtgccgggctagttttctcttagactctgtattccataatgcagcgcggccagagtcaccgagccctccgaagccagccgagttccagggcgtcttcagcggcgccagggacgctgcagggcctcatgggagttgcagtgtcaaaaaggggagatcgacgcctgcgcggccaacgggatcccacgcggcctcgacgggagccgggagtaggcggactcccaggccgggctcgcgctctggatccctgaatccggcctttccggccggactgccgcgcctgtggccggaagagccagctagaccagagagtctgtacctgcaaccctggcggcgtccgagcccaaggcggagtctgggagacaaagaagtcctcgccgccggccgctggaggattctgccagtagtgaagtcagggatgggcccgagagagcttggaaagaggacaaggaagggaaggagtaggagtagaaaagcatgactttggctgggtatggtagctcctgtctgtaatcccagcactttgggaggccaaggcgggggaggatcacttgagcccaggaattcgataccagcctgggcaacatagtgagaccccgtttttatttttatttttattttttcctgagatggagtcttgctctgtccccaggctggagtgcagtggcgcgatctcggctcactgcaaactccgcctcccgggttcaagcaattgtcctgcctcagcctcccgagtagctgagattacaggcgcccgccaccaagcccggataatttttgtctttttagtagagaaggggtttcactatgttggccaggctggtctcgaactcctgaccttgtgatacgcctgcctcagcctcccaaagtgctgggattacaggcatgagccaccgcgcccggcctaattttttaattttttctagagatggggtctcgttatgtt

SEQ ID NO: 36779 - DNA, 2630 bp, Homo sapiens
taaacctctttgctttacacacttgctcaaatcaactttgtcctgtctctcccttatctctcccaccacatccctctaccagctccacaccccagccctttaaaagagacccctcactcaccttgacattgggctgcagatacagcagagccagtctctggttctgcccccttttcttccttccgtttcttcttctgctgtttcttttccttccgaagctgcagcttttcttctttggtcatttccctccccactgcctgagacacagacataggatactgctcttccccaacaattccaaaggggaacaaatactattggatgcttacaagatttccacatggttaaatccctagttcttcctaacttccacaagctacctgttgcaagcttacatccacagaggctgacgtttctcctccagggacagaatcatatatccctagggttgcaagacctctgtaaaatctcctggctttactgagaaataaaccgacacgggatgggagctggggcggaataaagctggcacagcctcctgcgtagcgcttggcaggcggcttgggagggaagcctcacttaccccaggcccagggggaagctccgccttcatcccggatcccgagtctgcatcagaaaacagggcacaaagtgagccagagagactccgggagggtttgggggcacgagtactcggcgcagccggctgctgggttggcatgaccacggatccgccggcaggcgcgaggcgagccagggatccgcgtggggacgcactgcgcggcggatcaaaggaatggaggggtcaccgaccctcctcacagcaaccagccggtgcgcggcgcgggactgcgctcgagactgtgtagaccggagcccagcgtggcgctggaacggagcggcggggcccaaaggcgctcaaggcccggcactagctgtccggagctcgtcggctccgcgtaccagtaggcaggcccggctcttcactcaccctcgcgaacagccacggccacagcagccatcgccctcagtcctaggctccgcccgccgtggtcacggagccgccccgctgcctcgctccgcggctgcagggtccacagcgccacctgggctggaggctgagccgcagaagcgaagcgcgcagccccaatcggactacaatttccgacgggccccgaggccccgccccgcactacgggttgcaatgagggccaactccactttgggctccctatccggacaggtggctcttgccctttagactacagttcccagcatgcccaggcgattgcgtcccagaaccgacgtcccaccgccttcccacatcggatcgcagggctcccaaaatggcgagtgaggctgcggggactcgctgagcagcggagggggagcgtgcagagccgctgcggccctcacagtccggagcccggccgtgccgtgccgtagggaacatgcacttttccattcccgaaaccgagtcccgcagcggggacagcggcggctccgcctacgtggtgaggagcggccggagccgagccgggccgggcaggggcggggataacgggcccgagccatctcggagcggcctctgaggcctgaccgccacccttcgggcctggtcctgggccgccgactcccgacggcctctctgggagcttatctcatgtgtgtgattcgtgcagtggtcgcccgagctcctgtaggcccttaggccgggtcgcttccccgagctaggccgcagctgccctggtgggcgtcactggcctcttgggcagtgagactgcaacacaagcgtccgaatttcccccggactggctcttcagctttgggacttggccctggcgaaaacaagcgaactatccctcgggagattagcgcgttactccggcgagttgccaggcaacttccggccagggttctcaggggggttgcgcagaccgcaaccctaaaatgcttgactacttttgtgtcctcaggcctataacattcacgtgaatggagtcctgcactgtcgggtgcgctacagccagctcctggggctgcacgagcaggtgggactagcacccctgccttgagacagcttcaagcccttccctacacgtggacatcagtgtctccctttacccgctcttcttgttcccgtaggctgtagttcccctttaatcactgccacagggtagggccctggtttatcttgtctgacatttccgggaactccctaagaagcttaatgtccgcgcaacaactgctccttcctgttcttatattctggttttctgtccagtcttactgctctagtagcctttacccctgcatggacaaaccaacccctccccccactacctccacccaggctgtcaaagcacattccttctgtcatctgagcggcaacttgaaattcttttccctgcttatacaaacgattcaccgatttccttttgtgttcttcggctcatttcagtgtgtttagctgtgccaattatcgttatgtatctgtgatgcaatgtttctcctccttccttaccagatcttaaactctatttaactcagtagagctccactgataattagttgtgcaaccctgaacaagttacctgatatctttttttgggacggagtttctctcttgt

SEQ ID NO: 36780 - DNA, 2311 bp, Homo sapiens
ctctgaggcaaaatttggagggaagtggagacaatgaaagtaatgcatgtaataccacttgcctgcctaaagaacagatatttacatggatcccctcaatgactttcaaaaaacatcttgcataagtggatgggtagtgcagcaaattagggtagggtgatgctaagatcacagggaagagggacatggaaggataaagacagaaactaaaacctctcaatacaaaaggagcttacgctgcaggtgaaagggagttagattagacctaaatactgggttgaatgatttacagagagtttgcttccctgaacctctcttaaaagtaaatacacataaggaatgggctagggagagagacagggcatttacttttaatcagttgctccatgtgattcacccaccctcctattcctatcacctttgaccaggcctcagaacttcacctcaacaaagtgatggaagtgattggaccattaaacaaatgaagtcatctagctcaaatgtaaactaaaccagccctcggttgtggcaggaaatggtgttctgttcacctaacctgcctcctgaagggctggggtctccagcggccgctaatccttaaccaagacccgaaaacccaccttccgagtctctctcgaagcccatgagctggtcactgttgccgtcgccttcctcctcttcctcttcctcctcaaactccagatcctggcctagtagcaaatcactctccaataccagggccccgggtccttcgtcgagggagtcttcagtatccactgaagaggggagggggcttgtggattctccctcaggaaccagccctcgtggaccacacttcccgtactcgctgacccactctgattcccttagtgcctcggtgggaagctaggagtctggatcgcccacttcatccctcaggagtccccctccaccctgacctgagcccactccactgaccccacccccgctcctctcccctcaaggcccctgacccctgacctttgaccccctcgcatttcacgggctgcgggtggctttgcttccttcggggcatcgtgaccggctccagcccgacgcgcctccggcctgcggccgcccgaccccgcccctcctatctcggcccgcctgtctgcccttcctctcagggcccgcgggccgcccccatgcagcggcgcgggccctgggcagcccccggccctggccccggcgcccagctcaggccgctcccgccgccgccgccgcttccattcatggagccccctacccccctacggagaccagctggtacctccgtactcgcttccgcttccgccgccgcagagacgcacgggacgcgtagtccgtgggaagcggccgcggcgggagcctcaatggcgtgaccgggaagtgattgtgacgaggcggggagcaagccaatcagcggcagcggggagccggccagggagcagcgcaggaggcgtcctgcccgactccaggcttcaggccagccagaccggtcccaacctgtccctgggggaactagatcatttctggctgcaggagggggcgaggggcagccgcgacgcccgccaggccggcctaccagcagctcgctctgggctctcctatacacgcgcaggacacacacgagcacacgcacacactcacatgggggctcgccacatgctacagatgggaccaagtcgggggccacggcagcagaaaaaaaaggacacgatgcgtacgattaggttttggcctttagtctgaaaaagtgttgattgaaagtgtacaacagagagcgggtgcaagcggccgagggccatggagccgccaataaaaaagaatgtccttaaataaagttcacagagtaaaaaccagaaccgccagtccttccctccaacacaacagagcacaggcacagaaccggtgatgagcccgaggagcagaggcggctgggaaggacagcagaggctcccggctgcagtgtggagggagagccctctttggaatgggcggagtgaagccacccagctccccctgcacacctcatacccactgctaaggctaaaggaaaaagacaaaactcagtctcaggtccggagggctcagaaaacagtctaggtgggcaggggtctggatgactgctagtctcgcttggccttcttcttcttgtcgctgttgccattttcttcagccccctcagtagagagcacctcctctagttttcgcttgccactctctggctggagctctgctgtgtttcggggcttgaagcaaatgatgatgcaggtcatgttgtcacaccctgtaccatccccagaagtgtctg

SEQ ID NO: 36781 - DNA, 1899 bp, Homo sapiens
attgatgaaatgacttacaatcaaagaaactataaactacaattacaggcaaatgagaattactgattaagttttagagaaatcctaagagagaaagaaaacgaagcataataaaaaggaaaacctagggactgacataattcaagttttccgaagttagtaaaaggccctgaaaagagtgcaaatgagtgacaactcctggaggtcgggtccagcctctgaaattaacatgcaagagcccaaggccaggcaaccaaaatgtgaaacagactctgcccggggttcctttcactgtcaaactcctagccaaaagaggcttcccacatcagatattttaaatattaaaatttaaaaagttattcacatctattcacctctcccttgaaaaacaaatgaataaatagcccctatttgcgtctttactcccacactaaacctcacaccgttgatgagcctggagggctaggttggcacgagaggatggcgccaaagctcggggagagggcggtcagtgggcggaaggtgcctcttcccacatggccgagccctcgccgccactggccaccggcacacggtccccaagcatcgggagctccctctcggccctgaccccgcggtctctgtcgccccgcaaacggccgctgcggccgcaggctcccaattgggacccttcccaggggaggaccccatcccccgctctctttctccgtcagattcccgccccgcagcggccagcctatgggcccctgcctcctcacctccatggagacgcgccagccttgcatggcggagaagccgtagggcagcggcaggcgcggggcgccgaccccgtccccggagcacttcaccgtgttgggctgggagaggtaggcacccatggcggcggctggccggcggcctcaggtgcaggaaagctgggcgcgacccgtgccggagccgaagccccgggggtgcgcgcggcaggagcaggccccgcggcgcgaccgacgcaaggtgccggtgaaaggcgcgaggccggccaggaggcggtaacgggacgggagctgtgagggagcggaagcggaaacggcgccgctccagaccccgcccggcctgcgcggcggggccaggcgctgcgggcagtcatttccttagcaactcgccccgcccgcagggacaacggcccgcccaacggccgctcccgcgagactagcgcgaccacgcccaccaacggccgccgtcctactccgcttcctcgcgcaggtggcaggtcgcctctggcagaacctcttccttcgttcccagtccccagcctcttggcgttttgtctgacgcctcttttgtgtcggactcgacgctttcagcccgtcctccagtgttttcatccccctctccccaacgttgcactctcagactccgcaaaccccgcccgatttggttcaattaaagttgaccagtatttgttccgagcttaggaagtacttggccaggccatgcgaggcctatatgagaagaatgtgagtcttttctgaaagcgaagacctcgatctgtgatataattcgagttaatacaatgtagaaatgtttggtacagcctattctgggtgggaaaagctcaaggatgggaggaggagctgtttcttggaggattgaaaggatgtaggctctcagagaggatgcctctggattgcattatgccacaggaaaagggaataatgttataaggtttggaggagtgagggaagaatgtgaactgcatttggggaggatttctgaggaagctggctggactcggagaatgattgtaagtggtaatattaactagctagcttgataaaaagaagcgccaagatgagtgacttggacttcattgtcgtcctggtgtaacctttggcatcgtttgtctagtctttgtatgca

SEQ ID NO: 36782 - DNA, 2124 bp, Homo sapiens
ctcccagtgaaacaggattagagattctctttaatgacagtaaaatttggtgattgtgacatttccaagttctgttgattgattcatcatcttccctccatcatacacgtctaagggcagagtgaacttccatcctgaaggctccgcgcttagttttcgcagattaatagctcaccaagaatttatcatcttttctttccactaactcgaaaccaatctaaattctttccaaacatcttctcaacgtagtctcctttgatgaaatttactgtttcggattctagacttggctcttaccaacttaactttcggttaatagcttaatacctctgattcaggtttttgcatttgtcaactaccattgaatgataatttcaatgagttcgttcttatgaggatcaaatgaaataacatctgtgaaaacctcttacaaagtttaagcaaatagtgctaagcaatcaccaagcgttaactactaattttcagtgttaggtaaattttaaaagctttccggagaattggcgtcctgcacaccagtctcgttccaaaataatgcaggcgggggctggggtgggggcgctcctctcggactgaggctatgtctttcgctccttttgtcttttccaggcattagaactgtcatggcgccttcaagaagaggtaggaggccctctctgcgtccagcagaaccatctggggcacctggaccgggcggtggggtggacagagagacgagccccagctgggaccgaaaacatcgacccctccgagaggtctcggccggaccggcgcaaggggaggagagcgggtggaagcccaccccagcgaacgcccgagggccgggccccgcccacccagaacgtcacccaatggaaacctgccggcggtgcggcaccgcccatcgttggtccgggcgccgcgagggcggggcccgcagttcggttgcgctgcggagcgcagctgtgagggagtcgctgtgatccggggccccggaacccgagctggagctgaagcgcaggctgcggggcgcggagtcgggaggtgagcgcccagggaaaagagggcccgggagggaggggttcgcgagaggacggaaggatcggcctccgaggcccgggacggtgggacccgccagtcgggtgctgaaggcggccctgctcactcagtagcccaggcccgatcgggccctgcctgctggagccgaggggccgcttcggccccgcagtcgctgcttagccctccctggcgtctctggcttggcggcggcgccccgggattctgcgggcgcgggtcgggaggccctggcgttcgcttggaactccggctgcgagaggcggggcccggcgggtgggggcgggggcgggggcggcggtcgcggcccggcggcctgcggaagctcggcggcctggcctggcctgctcgcggggaggtgcgcagactgcgcgggggcgtggcctgcgcccctgactgcgctgtcggtccggcctttgatgaggtggccgccgctggctccctgggccccagcctggttcccgcgcgggccgcggctgccttccagacgcagggcatgcgacctgttggagtgtgaaattctaggggccgggttcctccccagagcggttttatttccgactggactgtgctgcgggtctcagaggccctctggtccgttcagggtgaggacagctgagaggcctgggcccgtgagctcttgcagaggagttgacacgcagaggggctgctgtccaataaacgaaagtgtcggggaaaaactttgcagggcgatctgcattactccaaagtgaacacactgcatgtctcagggtggctggaggcggcgagaatccccttatgggagtatatgagcttttccatgtgttatctctttaaaacctctcagcggctccgagacaaaactcccagtgtcgcagaggtttcttcatcaataggagtagtgctggagaatcttgggcactgccctcattttgcctgcgaaggaaaaattaggaagggataaaaagtcacaaaaattaggaaggtgggggggataagcaaattccaagggcatctatctctgatgaagggttggtgtctcctgtggtgccctactgtggattagttatt

SEQ ID NO: 36783 - DNA, 628 bp, Homo sapiens
ctacaagtccttagccctgcatctcgcctcctggacgctgtatcgacaggccaagatccagatcatcgctatatcccttacagccttctgcacacagtaggaggtcaacatcattaaacttcagttcccccacttttcttggaacataaagcataagggggagggactggcacgcaattcctcacctgagggctcagcagggtcctcaggtgcttcaagtgcatgacgcacacctgtctttcagatgctcctagacagcgacaactcccgtggttacctggacaacccgccacgcagccgcagcgacaggcactgacgcttatgcgaccggagcgcaacacgcgtcgcaaggtcacacgtaactttgcggcgaagcaaacagaacgtgcgcaagcgcggtgagatctagggcgggcccttgagagggcttcatgaatgttctccttgaccaatcccgtcgccgcatgcaaactcaagaccaagccccgcccacaagccttcagccagccccaggtcctacgtcatagcggtccgtctcgctcttcgatgtacctgactttctgagtgcactctcttaatcctcacaactctggagggaagcagggcggtttccatgataggccttctg

SEQ ID NO: 36784 - DNA, 4802 bp, Homo sapiens
ccacactctgctaatttttgtatttttagtagagacgggtttcaccatgttggccaggctggtctcaaactcctgacctcaggtgatctgcctgccttggcctcccaaagtgctgggattacaggcgtgagccactgtatctctcacttctttttctcctgacaacctttgccacctcacacctttactgagtccctggtcccctgtctagctgcttactcaccagcccacatgagcaacaccaccacaatgatgaccacttccccagtctgcagtggccgctctccatccagaccttccactgtgatgtcacctgagaagggagaaggcagaaggcagactccaggttactggggtccatactgcagacatgcaggatggagatgctggggattagaaagggtggacccatcataatgttgcccttggagtgtagggtagcccctccctgggaggaagccgttggtggacaggtggttagcgaccaaaaagcgggatggctgcaggttaattactcactcatgcaggctgcagctgatgtgaagttgggtaacaggaagcttaaaaggccttcccccaaacaactcaataccagcctgtctatacccaatccccttcccacctgcttttctttcctttcctggcagtacaatgaattaaatcatcctattcaactcagctagtctgttgcttgtcttggggaagtaagtaagaggctgcaagccaggtaagcagccagagaatccaatagcacagatcctcacctgggcttgaactgtttgaaggtagccggtcagaacccttgagagttcggaagtgcacccggggccctgggggactctctccccgaaggccgatgctcctgacctgcactgtgtagtcactgtcttcagccaggccccagagggcacaggcccgggtggtggtgttcacctcccgaatcacacgctgcccggggccattctgccgctgcagggagatgaggggagaggaggacagcctcaccccagtgccaggccacaaggctcaaccagagactcttcaacatccaagcactccgggggagtagcgtgaaaagggcagcctgagccaggatacgccagcttccagatcccccccacttaagtgaagaaatgtgccgaaatccaaggacacaggttgggggagcagaagggtgattcatacttgctgggaaatggagtagccaatgacgatgttgccttctgggacgtcccaggacacagtggccgagttggctctgaggtgagtgaccgtcacattcacaggagagggaggccggtctgcgggagccagggtgtttaacaggtttcacccattgactagctgtggttgaccctcagccccgttcccctttacttacctgctcgcacgaagcccaggtcacagctgaccagcaggaggaccgtggggcttagatatggggaaaggggcaccagcgaagccatgtccccacggagtccgctggggggggaactgtggcatccgcttggcatccgcttgacatccaggcggggctcctggagatggcaggagttgtggggggtcaaggactgcccagaacgcacggaggtcggggggcagcagctctcctgggctccccacagctcacaacagccctattttctctacgccctcccgcccccgcattgcccgggcggccccagagtgcggtccgccctgcccacacccacctccgccggtcctcgcggttggtcaggcctcggggggctgctcggtgcccagagggcggcccatcgcccgactcggtggcgctgcccctaccccatcccggcgcgggcccggcgacgcgggcagcgcggggccgagctgcgggcggagcgggcgcgggtctgcggagcccccagggctcgagcgggccacggagtctgtccgggagcagggggcgttgcccggacgctggcctgggtccccggtgcgggaggcagtgcggcggcctccgcccgcccctgcagcgggatgtgaccgtcccggagagccagccgccgccttctgcagcgctggccccgctcgctccgccgcagcccggccgggacgcgcgggcccgccccgcccagccggggttctcgccgccgtcattcccctcccgccccctcactcccgtcctctcggggctcctcccacgaccctcccaatggcgcctccggagcccccatcccttatcccttctctctcccagctgaagcggacgagtcggcgggggcgtggggggtgagacgcgggtgctagggtctccggcacctgggagatccccttcctccccgcgtggaagagccaagttgggaagaggaattccacctccagtgcccgaggggctaacaggagaggggagagagtgagggagataataattgctttaacaatcccttacttgtagactgcgtcagcttttaagtctcttttccattcataatctcatttaattccgttcgctttctcattcattctttcatttattcaccaaatatttattgagcatctcctatgtgtctggcattatattaaaacctggagatacagtgattgttaagagtgttgggcttctcgggagaatcaaagcgcaaagacctatggcttttttaaaaaaattattattcctttcttttctttttttgtttttctaaagctctaccacttacggtgtggttttggagaaactggtttatctgtgcttcaggtttcccacctgtaaagcaaagcgtgtgaaatctcacagggttgttgtgaggctcaaatgagacgggaaagatctttataaatctcacaacactatgtgactggatgatggagattaatttgcaccaatctgttagttacttctttgttcaataacatgtaagcccttacattatatcatgctttggttgagcttgaaatctgaattgagaacctgggtgtgagtcccaatttgtccagctgtgtgatcttaagcaaccaactaaactactctgagcctgtttcatcatctgaaaaatgagggtgtcaatattgaccaacatcttagtgttggtgtatccaatgagatactgtctgtgaaaagtgtgttgttcagtgtaaataaatgttggctaacattgtatttagggcagattctttggtttctaattctcaatgcagtatttctgtttctgtgggatttttcccgctgtaatatccagtacagtgtgtgcacacttggggctcagaagcttctactgccttcctttctgagaggagaggataaaatgggaccagtgggactgactgtgtgtgctgagcatgtgatcaagccatgggccaggtcctctgacttgtgctgacttggtgaccctgatctctggcctcggaggacacttgcccagggattctcactgccgtgggtgttgtcctgcactcccaggctccaggtcctctgtagaagagggcattgtcccggtagggcaagagtcccgagcctcaggtcttcctcttcaggggccaaagcagaggctggcgagtcagggtgcttgcaaagaggaagcccaggagtttccctggggttaccagagggctgggggcctagtgaccaggaaagggtggtgctctgagagcccagggtgcttgggttaatcatcactggggctcagataaggccctgccaactggaagcagagtcattgtgaccagaggggtttgtgtggctgaagaggcaggaggaacagtgtatccacagcgtgggaccatgccaggcacaaaacggtttcaacatgtcattgagaccccggagcctggcaagtgggaggtgagaccccttcttcatgttggctttctgtgctgattcctagaattatttttcatccagtcttccctccccgctggtttctgctcacctcttcttccttcctgatgttctttccctaatatgcccagagcaccaagtgcaggctgagtttctggtgtggtatgtgtgtgcgtgtgtgtaagtccaaactctgtgcctgctgccactcccacctccagctcagcaggcatgaatgaggctttggcttcctgctccatccttgtcccctcttccttctagttgtctgggtacgaggcagctgtgccaatcacggagaagtcaaacccactgacccaggatctagacaaagcagatgctgagaacattgttcgactgctagggcaatgtgatgctgagatcttccaggaggaggggcaagccctgtccacataccaggtaaccaagacccaagacctggaccctggaaataaacatgccaaccccaaccccacctctgctctccctcaccatggctcctaatatcggaaaccctgagaccccctcccccattcatcgtcctccttttcttggcttctcattcctgcatattccctacagagactctacagcgaatccattctgaccaccatggtacaggtggctgggaaagttcaggaagtgctgaaggtactaaccttccttctgttccctgcctaaacttttctgtttccctctttctctttttactgtctctatttctcactttgatagatctcattctcctttctcccttttggagatcctcccttttggatccttattttcatcttattaataaataataatgataacttctctgcttaatactttataattgacaatctactttcacacctattaccctcacaaaagcctgtgaagttgatatgacttctgtttgttttcctcagatgaaaaaacaaagatttagaaaggataatcactgtagcttgctcaaatacactgagctaataattgctggata

SEQ ID NO: 36785 - DNA, 490 bp, Homo sapiens
gcattttgaacaagcattctgaagggttctgatgcacttgagccttgggcaccactcagagtaatgaccccctcatcatgcccttctctctcttcaccatcaggctccctttgtggcaggccagatggactgctgcatgaacaacacagctgtcttcttgccagtcctggttggcttcaatccagtgagcatggccaggtgagccttctggaatgactgggcagccctggggcaggctggaggggaacatgtcaaagtctacagtacaaccacaagggagagaacagatagtcttgttcaccaaatctcagaatattaaagtaaatatggggtgcccctaagcttataaggttttttgtttgttggttggttgaattattctcttcttgtttcagaaagcattaaaggcagcttataaaggatgcataaaatataagatagcatacattcaaaacagggattgaagaggcaagagaaacaaggaataaaa

SEQ ID NO: 36786 - DNA, 1812 bp, Homo sapiens
gagagaggcccagccatagtttgtctagagatttcaagaatcaaacaactctcctcgggaccacacataaaaatcccaaagcagggcaagtgtggaggcctgaagctactcgatgaggcgaggtccgcccctattattcattgtcctaagtcttcatcgtgctgccctttccaggcttctttcctgctcagccactgcctccaattcctgcgcccccagcgtggaaaggcttccatttctctctaccgggggggaggcgggtgagaatgggtctgtaatttctctaagatgaataaaggggcagtaaatgatcttcctgtgcatctggactgagaccactgggcgggtggatggggaaggcaggctggagggacacgaggagttgtgcaaagattcggaatgagagccaggggttttgaggcccagccgaggctccaagctccgccccttcactccagaccccacccataggttcccgggtcccgcgtcgcgatcccagtggggcggggtctcagaggaatcggagggtgactcatcacgtgactcgctccggccgcagccccctcggaagctgctaggcggaagtagaagttcagaagagggctaggcggagccgagcccacatccgggagaggagagcggaagtggcgttggtctggccggagcccttgggtgaaattgttaggcgtggagagggagtgatgtcttccagactcggtgctgtacccgccgtgagtttcttggtttgaccgttatgctttagaggtagcgctgtcgagcccggaacacgcggtccctcgcttttgtcccatgctgagttggttttatcagaggccatcgtaggccccacccttctagatcagatcacctgtccctttttctttacccacgttctgctgcctgttccccacctccttggatttaattcctcgccacattaccattagtttctattccttttacatccccaatgtctctcatatccgttgtcttttcttttggcctcccttttagagcctgggacagggctttgagaatgggggaagacgaaggctctggtattgttacccgcctttgcactgctggaagataggacagcatatttttcctaaaaggtgttgccttcttgtgtttgaggtggtttccccgggagaacttcatttcttctgggcataggggaattcgtctttttgtggtcgaggttcagaggtccctagcactcactcgtgtgcttgtgatttgctagacttcgggacccacaacctttaagcagcagaggagcacgaggatcgtgggagctaagaagtaagtgaggttttctaaggtccttttatgattgtgtcaccagcgctgaccagtagaacttcttcctgtgatgaaaatgttctgtatctgcattgtccagtatcatagccactaacccggtgtggattttgagcagttgaaatgtggctagtgcaactgagggactgaattttaaattttatttgccaagtgagtgaggtttttctaaggttcttttgtgattttgtggccagcgctgtccagtggaacttcttgtgacgaaaatgttctgtatctgcactgtctagtatcatagctactagccccgtacgccttttgagcgcttgaaatgtggctagtgcgactgagggattgaattttaaattttatttaattttaactaacgttaaatagccacctgtagctcgtggctatcggattggacagtgtaggtctaagtctagtgtgtgggagaaaaacctagcttgcaaaaaaaaagtacaaattgtaataaaaatggaaccaaag

SEQ ID NO: 36787 - DNA, 623 bp, Homo sapiens
atgatacggtggaaggagccttctggggccctcagcaaacctgaaagaacaaacgagacattcctctgtcagttaatgaaactttaggaagtaagtgcacaactgtccttcattcatacaagagaatatttctgagcaccagaatgttccagacattatgcaaggtgtggggaatccagctagtggtaaaggatgaggaatgtagctcgtcatttacaacgtgcattcactacaaccctgggaggtattacctcagttttaaaaaaggagaaaacaggttcagagagtttaagtgacttgcccatgactcacaccactagcaagtggcagagcctgggtattaaagccagatcttatgacttactgaacactgtttgcagctacaaagggtcacagaaacagactgggtggtcaggagtagaaataattttctaggctctttcatcatctttcctgagtttctgagggaccttcagtgactggaggggaggaagctcccctccagtacctacttgcacctggaatccaagcattcatcctgaaggtcacggcaactgtgtagttcactgagggtgactgccaaggaatgagcgctagcatcaggaacctgcgtctgcaactcg

SEQ ID NO: 36788 - DNA, 1250 bp, Homo sapiens
cccttttcctagctcccttcagccttcctctcgcttgctcagcgcccccacttcctcgccactgtcactagttgactcatcagccctgcccgacgctaagaagatgccctggcaaccgccgcgcccctcacccgctcctttctgacgctgtggtggttttcgttcgcagcccagaacattgcggaagtttctctacccatgcggtgtctctatggtcgggtgggtggggccaggaggaagatggcggcgtccgcagctgccgctgagctccaggcttctgggggtccgcggcacccagtgtgtctgttggtgttgggaatggcgggatccgggaaaaccacttttgtacaggtgacgtacacagcatgggtgtagtaggggagcgcaaaaggttgcctccggcaggcggaaggccaggaagaaagggagggaagaggatttggagggtaccggcgcatggctttcgggggcttcccatcaactttagttccttccccggcaaagcctcctcgggccctagccaggttaattaaggctctcttctgcgcaccttcagggcatactcggtccagcttaccacgttgtacaggaattgtcttgctgataaaattgcgtttctcggaggcaagttacaagtaactttaaagattaatacagtgctagcacacaggttttggtgaagatttgccaaatatttcttgcacgcctgtcatgttccattcactggggatatagcgaaaatgaggttgacaagattcattcgtggggccaaatatttaatggaggagatagagaaaacccacatacgaagaatcaaaacaagtaaacaagtgactacgagtaggggaagctttgttagatgggtgatgaagaaaggtagcatttgaactgagagttgtatcttggaggtggacatggtggatatttcaggtagaagaaaatctaagtgcaatattcttaaggcatgggtgttaaaggaatggaagttctctcttgtcccctctttgtctccttccaaccctctccccatatctctgcagaggctcacaggacacctgcatgcccaaggcactccaccgtatgtgatcaacctggatccagcagtacatgaagttccctttcctgccaatattggtgagtaaaccagtaacataacttgtgtgcagtgctttaaagagaatggaaaaggccaggcgtggtggctcacggctgtaatctcagcactttgggaggccgaggcaggtagatca

SEQ ID NO: 36789 - DNA, 2122 bp, Homo sapiens
ctctattctcacagtgctttgcaagtctatgtcacagcagttatccttggattttaattagtacttatcgcaatagattttttctgcccgtctatttcttatggctgtggtcttgttacagggccaggcacacagaaatatctggcatttgttgaatgtttactatatgccagacttcaccttttttgtttgtttcttttttgagacagggtttcactctgtagcccaggctggagtgcagtggtgcagtcatggttcactgcagcctcaacctcctgggaccaagcaatcctcccacctcagcctctggagtagctgggactacaggcgcgcaccatcaaacctggattttttcttttttttttttttttttggcgagacagggtctcgccatgttgcccagcctcctctggaactcctgggctcaagcaatcctcccgcctcagcctcccaaaatgttgggattacaggcatgagccaccggtctggctggcctttattgtttgattcaattcttccaacaaccctatgaggctaataatcttatccccatttttcagagtgagggctgaggcctagtgtcttgcccaatgtcacaaatggcgaggtcaaaaatcgacagtctccagagtctgctctcttaaccacttaactattctgccttaataatttcagaaaaaaaataaatgaatgaacgaaataacaaaaaagtcgccctcttcccttactttaccgaaaggagcacgaagaacaggcacggagcccaaggaatgcccaagtccctccaggggtttcctcggtcacggtccgccggcgcaggcgccaatcacagggtcctgaggtcgcctgacgttcagggcagccggaagacggggaggtctggacctgaaccgagacaaggaggtaccacactattcactgctgcgtcgcagagcgggctgggcggctgtctggacctcgagaggcctgaggcaaggatcgcgtcagaccccgaaagctggtttgttgattagtgatctaagaccgccggaagcgcttcttctcaatcaagctatgcaacaggaagtcattacgatcccgttgtaacctctaaatatgtccccgttctgcacagcatcccgataaccgttttgtttttctcatattatgaccttctcatgttagcaccacttcgcaacgctccaggtcgtgaaggagcaacttcaccatcgccgcctacagacgccactgggagcttgggagagtgggacgtggacaggaacgtaaagaccgaagggtgggtttcgaaggagcggatttcgaagttgcaccggttgaggatggctgacattctctctcagtcagagaccctggcgtcgcaagacctcagtggggacttcaagaagccagctctgccggtgtccccagcggcgcggagtaaggccccggccagcagttcttcaaaccctgaggaggtacagaaggaagggcccactgcgttgcaggactccaattctggggagcccgacatccctcctcctcagccggactgcggtgattttaggagtctacaggaggagcagtcgcgccccccgacagcggtttcttcccctggcggtccagcccgggctcccccctaccaagagcctccatggggtggccctgccacagccccctacagcttagagaccctgaagggcggcactatccttggcacccgtagcttgaaagggacgagttactgccttttcgggaggctgtctggctgcgacgtgtgcctggagcacccttcggtgtctcggtaccacgcagtgctgcagcacagggcgtccggccctgacggagaatgcgacagcaacgggccgggcttctacctctacgatctgggaagcacccatggcacttttctcaacaaaactcgcatcccacctcgcacctactgtcgagtccacgttgggcatgttgttcgctttggaggcagcacccggctctttatcctgcaggtaggtagaaaaacctagaattgaaatttcgggttcattggactgcgttcttgtgcttcttaagctttggatgaggaagaagaatctcccactcagcgattacgaaagtgaaggaatcaagtctggcctatcatcttcag

SEQ ID NO: 36790 - DNA, 4192 bp, Homo sapiens
ggtgggaggatggcttgagttcaggagtttgagaccagcctgggcaacatagtgagaccctgtctctacaaaagataaaaacttagctgggtatggtggtgcttgtctgtaatccctgctacttgggaggctgaggtatcacttgaacctgggagagtgaggttgcaagaccctgtctcaaacaaacaaacaaacaaaaacaaaacaaaaacaaatctctgctttggaaaacaacaacaacaacaacaacaacaacaacaacatttggggcaagaagaattaaaaaaaaaaaaaaacgaaaacgaaatatgtctcagcttcctccagagcctcctctcctgctatcagtctgtgtgcttgcctggtttttcctccctttcctattttggatactggtctagatgtgtatcttcttcctcctcttttcacttatgggttgaacttccaaactttctgcctcctaccctaacccctgcaagcaatcttgattgtgattccatcttctgctttttcatctcctttgagccagtcttagcttatcctctaggccagcctggctttttaatgtagctgaaaacatctgtgttgctgttgcttctgtctttctatgccagagccttcctgaggcctgtggggaagggtgtgaaggataatgatttgacaaaatgtccttcatggccaggcaggcagcattcttctggtggccttagcaagggaatgggttttatctctggtagggagaaaggggcttgaggctggacttaagagtgctactaaggggataagacttaggtaaaagaaggcagtagtagcaagtggggcttcagggagggccaggtagctaacatctggtatgggtcactgtgagtcgaatgccattactgtccttatattccagttttcagggctgtcccatggtcaatatgaagaaaacagagggctttcttttcagtctagtatgcttattctggggtttcctctgtctcctcatgccatattctcattgtcacctctgcctgctctgagtatcttgtcaactgaattgctatcccttttgtttttgctctgttctccccctgcctttctaatttctactatctcttctttatacccttcctcagctttgtcctaatgggcttagcttttctaactatctccagccgttgagaatgttgacaggctcagcagttgcagtctctcactatatctttgtcattactacactgggtatcctgcatactgtacccccatccccatgcacacttttttttttaagtgctcagagctattgcgcttaagtgggagctccagataagtaagacactcttcagaggttggtgggaagtagggctttacaccatggatcaatctcctgctgcttatatgttctcctttgccagtgacctttgtactgtagtcatttcatgggtgtgaagtcatgtagcatgtggcaaattacttgactaagggagcagcctcatcatagctctgtgtctgtgacagtcagcattgttcttgtccattcaaaatctgttggtctgaatacctctttcttattgttatatgcttagatattcattttgtggtaatttttattttgccagaggtttctttgtcagtatcatggtatttttagataaaaccttgggactccctggaatagatgtgtataattattctttcttcctaggactgaaactcagactacaggtgcagaaaacaaagctaaaaagcttacattgcctctatttggtgccatgaaaggaggaagcaaattcaaattaaaaactggaacagtaggggtaagttgtgagtcagggtgttaaacttttagcccttgagttatccctgagctaatttttctcttttcttttttgaaactacaaatgactcattccatagtaatgtgagaaagggctgtgggcttggtatgatcacatctttcccagaacttggttcttggattcttttttttttttttttttggagacagagtctcactctgtcaccaggctggagtgcagtggcgtgatctcggctgactgcaacttccgcctcccgggttcaagcaattctcctgcctcagcctctcgagtagctgggactacaggcgtgctccaccatgcccagctaatttttgtatttttagtaggatgggacttcaccatgttggccaggatggtctccatctcttgacctcgtgatccacctgccttggcctcccaaaatgctgggtttataggcatgagccattgtgcctggccagtttgtggattctttttctcagcttagggttatcaagaattgatgaattaatttatgccaatcaatttgcaagtaaatggtttgtaaattagaatcatagtttattaatttctcatgaatgttgcatttaagaatgggtctcctgcattaaatgcttttccccaggtggatagatgtagtgttcagactcaccaacatttaagaacatagtgtgtgcacttgcctctgccatatgatttttcttcatttaatccttccaacaccttttgctgtgtgggaattattgcctcttacaaatgaggaaatagagtcagagaagttaaataccagatcacaccagcgttatgtaactaagctggtaatcagatccaggtctgtctcttgagctttatgatttccctgctaccctacaatatatgtctgtctgtatgtttttgctttatctatattcctattcatagattcagcttttaaaaggttttcattacccctaagagctgaaccttgagtattagtttgctagggccaccataacaaaatactagggattgggcagcttaaacaacagaaatttatttgttcacagttgccagcagggttggtttcctctaaggcctctctgcttaccaatggctgccctcttgctggctcttcagatggccatccctctgtgcacttgcactcctggtgtctcttcttcttcttctaaggacatgagtcatactgagttagggccccaccctaatagtgtcattttaattcagtttaatttaatttacagtcatattctgaggtactggggcttgggacttcaaacatgaatttgggcagcagggggcacaattcgtccaaaacaccctgaattagggtatactgccctctggtggcagaaatctgaagtcctagctatgtattctttttgtttgtttcattgagagacagtctcacactgtcacccaggctgcagtgcagtggccatctcggctcactgcaacctcctcctcccgggttcaagcgattctcctgcctcagcttcccgagtagctgggattacaggcacccaccaccacgcccaactaattttttgtatttttttttagtagagacagtttttcaccatggccagactggtctcgaactcctgacctcatgattcacctgcctcggcctcactatgtattctgaatgagtaatggtttacctaacaagtaggcttttcaatctgttgcggtggggacttaggttttaaatagaaaactttttactaaacagccctccttagagaattttagaactaagtcctatatttaaaagataatataggccgggcgcggtggctcatacctgttatcccagcactttgggaggccgaggtgggtggattgcttgagctcactagtcgagaccagcctgggcaacatggtgaaaccccgtctctactaaaaatacaaaaattagctgagcacggtggcctgcgcacctataaccccagctactcaggaggctgaggcaggagaatcgcttgaaccggggaggcagaggtttcagtgagctgagatcgcaccactgcactccagcttgggccacagagcaagactctgtctcaaaaaaaaaaaaaaaaagatataaccaagatatgctttggttccttccctctattccataactgtgatcaaccttttctaataaatacttttattgaatggctttgattagaatatttagctttattctttgagaaatgtcttcctccttttcttcaggatctgtttgatggatttacatgccttgtttccttgaaattacgctaagtctaaaatgaaaaagcagcacaaatgacttatttctgattgtctgatttattccttagaagattttgtaatcaattgaaatcctttaatatcatgagttataacagtccagaatt

SEQ ID NO: 36791 - DNA, 2953 bp, Homo sapiens
tttctgttcctttgcttagtccttctagttttcaattgtttatgtctgtaagcttagtgagtttttaagagcaaggactatatctgattcatctttatatccctgaatggtgccccttaatctttagggctatggctgggtgtgttgtataacaccttctccagagttagagtccatgatctatctcttatcctccatgattcaataattttgtgattttgaggcacggccctaacaaagacagtggtggctatgagtgatcctactggctgagcatttcaacaagggcagccacttggctgcatccttcgtaatacagagaggttgtgagacagttttccaaagtatacacgagtgtccctggtgtcacgagagtcgactttaggggatgaggatgaaaatgtttaattttagtagctacacatataaatacatataaacagtataaatgtaatatgtcacattacatatacatattaaaatatatatgtacattttaatatatatgtacacatatatacacacatatgtattgcagcttagaatgaagttaacttttttatgtcaacagattttagggtacaggtaagtatttggttacatgggtaaatttttttttttaagagagatggggtctcaatatattgcccaagctggccttgaactcctgggcttgagaaccacccaccttagcctcccaaagtgctgggattacaggtgtgagccaccacacccgtcacatgggtaagttctttagtggtgatttctaaagagattttagtgtacccatcacctgagcagtgtacactgtacccaatacttagtcttttatccttcaccatcctcccaaccttccccagccgagtccccaaagtccactatataaatcatgcctttgcgtcctcatggcttagctcctacttataagtgagaacatacaatgtttcgttttccattcctgagttacttaacttagaataatgggcagaatgaggttaacttttaaattgtgtttatttaagaaaaatattatgtaaataatagtatggtggtatgccacaaggcagaaagcctgaaacagatataccaatgacaagttcaaggaactgtggtgaggtgggaaaatgtaacaaaactcattagtcacaaacctcacttcaagtctggctctgtcacacttaagtcatgtaaccctgattaaactgctgaccttaaatgaggctgtttcctcatctgtgaagttgaaaaagaactcctaccctcctaaactcacattaaaatatgtagaaacatgctgaagcccggaacacaccgtgcaaatagcccgtggggctgatatcccaatttcctcttttaccaaggtctatccagggcttcctcttcaccaccccaggaagtgcctcacaactagcccctatttcccaggatcccaaggaccaagttctattcagtttgttgtccacacctgggtctgccattctgagggtggggaggtgggaggggctggagaaatcctggaatcagtctgggaacaagtcccaacacatgtcactgtttgctttgtcatcctgattcaatgacctcatacaaggaagggagggagcagaaggagctgttcccttccagatacctaaggaggcttctgacatctactgttttccttggcacgagaagggcaggagctgggctgtgatttttaaggtctgagctaatcttggaagtggtgaacagcacctcccacagctggccagactgctgcttggggaactgccttgagcaaaggggcagagggagttggaatgggcatcagaacccaggctgctgcccctgctccttgaaagggcttcagaacacactgccctatccatccccaggatctcaccaatcttagtactaagaatgctaagaatgggcatgtcgcccagttagggagaaaaagcctgaagctaggacagctcctttttttttttttgagaaagagtctcgctctgttgcccaggattgagtgcagtggagtgattttggctcactgcaatctccacctcctggttcaagggattctcatgcctcagcctcccgagtagctgggattacaggcgcccgccaccatgcctggctaatttttgtatttttagtagagacagggtttcaccatgttggccagactggtcttaaactcctgacctcaggtgatctgcttgccttggcctcccaaagtgctgggattacaggtgtgagccactgtatctggcctaggacagctcttgaatggattcttagcctggcccctcatgggacattcaactggggttgacagaagcttcattgaccccagggtcagagagtgtaatcgtcctcacggacttatacatataatgcatactttttgagcacctactatgtaccaggccttttggggaaatgagccagccatgttgtatcaaaaggctagataggaccttagagtcacctttttaccaccaggagtccttgtgtcatccttatcccactccctctaccatcctggacataattaacgtttaaataaattatttttgttggccaaaaaaattgaatttagcaagtattcatttacaagtttttggtaatcacatatttacatatctgcaaataaattatgatcaaataacacaagataatagctaacattagtacactgagttaatatccagtcaaaaaaaagcaaagaaattcagcattttagctatcctgtttattctggttgggcttttttaaatttaaaaagtagctggccgactacgtggggaatcagttcaaggttttagaagtggtgacgtaaccgctgggttttgaaggagaagagttcacaagcagatagagaggatgttgcaggcagaggaggcagaatggtccaggtgctagtcctgacaccaccatccccaggttgatcagttgaatcaggctgtagctt

SEQ ID NO: 36792 - DNA, 873 bp, Homo sapiens
atgtgtgctgataattagacccaggttaagcatttgctggcaggaatctcacagaagtgatgccggggcctcagtacatcatatcaggagccacgtgatgtctgtttgtcccaggcctggtgatgttaactttgatctcatgtttaaggagatacttgccaagtttctccactgaaaagttattattttttccttttgtaattaataagtaattgggggagagggtaaatatttaagcctatgactatcttgtccatatcaaacttgcatcctttgatgattcttgactggatcaattattactatgacagttgcaaaatagagtttttgttttgttttgtttttatagagagagaggacctcactctgttgctcgggctggagtggcgcgatcatagctcactgtaacctcaaaactcctgggcccaaatgatcctcccgcctcatcctcccaaagcgctgggattataagtgtaagccaccacacctggccctaaatcaagatcttggttctgattttcaggctggtatctctattccaagatgatagggtggaatggaagggtggatggagcaggagatctaattatgcacaatttgtttctcaaatggctattgaggtggaaggtgactgctattgactttctgaccttacttactaagtaaaaatctggagaatcagatgggattttacatgataaaaggtattaattcctaatggaatgatttccatttacctacccagcacttactaaatctcaaacatcacatcagccatttagcgcacatgattttactcagtcctcataacaactctatgagagcgtattgtctccaatttatagatgaggaaactaagactcagaaaggtta

SEQ ID NO: 36793 - DNA, 780 bp, Homo sapiens
gcacgcgcctaaagtcacacagctgggaagtgtaagactcaattcaaatcaagatctgctgggttccaaagcgctttcactgttttcagtgggaaggagctctgggtggcagtcagccttgatgcacattccaggcaatgccagttttcaactattcatcagcttagaaatgaggtatgctccaaaagtggatgttaaacctgggtgtccgagtcttgcaaaaggctggtgaggtcctcagtatagttatctatggcaccagccaggtggtccttaacttatagataactctgctatgtgagcagcgccctggctgggagatcctcttgggtcaccctgctgttgactccttcagctcaggtggcagagccatccccagacattgactcatcagatccccttgcccagtattgctacatctcctgtgcttagaaaggcaggaaactgaactctggtattttagaaagcctctcaacaataaccttgattaaaaggggattttccagttaacgctggagaatttcagttaaccaaagagttattgtattctagttctctgaaatgtagtaatccacatacagtgtgtatttatggtaattctcattcaccagaaaattcaattaaacaggatttccccaccatttagaataagccacagaaccacagaattaccaagttaaaaaaaaaaaggccttggggatcatttaatgggatccttcattgtacagatgaggaaactgaggtcccagagaaaggatataacttattgaagattattta

SEQ ID NO: 36794 - DNA, 3284 bp, Homo sapiens
gccaccatacccggcctctaatgtggtttatttttgtagtaaaaattatatttacttaaggactagaaaacagatggaaattatcagaagactctgcttcatttttcctctctggatttgagtttctactcctaagaaacgaagcactgagcctggaattagataacttcgaagttatcccagttttgatattgcaaattttcgtatataatccggtggctctgctgctgattcaaagccaaaattcagtcttcacattgaaaacagatcagaccggaacctgttctgtgaccattagcttaggctattcctacatatgtcaaagtagccacattaattggaagaaaaaggaaacaatgttgtctgaatctgtgtagatgcacctttaggcttgatgtttccagtgggaagtagagggtaccaggcttgggagtcctgggaccagatgtttacagcagtgatttcttgacccatcccactatgaggggttgtgtccctcattccctcctctatcagcccggatactgatggtgtgtgaggctctcccatggccatgccttgctccctctgcagtgacaaggcatggttggagactgtgtttcctttgctggctggagagctctttgaaggcaaggactgggtttttattccagtacctgaacagtgaatgaatgaatgaatgaatgagtgagtgtgagcataaagaaagcctgttacatgggagactcagtaggatttcactgaacctgtgaagtaagtaaggctagcaatcagaagcatgttgtgaggtcactggtctgtaggtgtgtgtgtgtgtgtgtgtgtgtatgtgtgtgtttgtgtgtgcagggaaggggcaaggctggaagaacgccgctgtgctggcacagccttcgtcagagccctgaaaggggctgagtgggctctgactcagctctatgactcattcactgtattgctgtctccatcctctgggcacatcctctggaccatttctgctcagcctcaagtggaggaggtgagatttgggccggtacctccggatgactcacctggctaagctggaaggaaggggccgaagccccaccatcctgcacccccttgtcactacccctgtctccctaggggttctcgtgcagacacagacttcacaagtaggttatggctgctccagtaatgaatgacgctctccatcccaacccaaagcattaccccccaatcacgcttcccggctcaaatgccacagtttccccagtcccctcacatggttgtcccctgtgcttcttgtgggcctctgaggtcagctgataaggaagtttacaaggctctcccagaccattggtcattttattcttcttcatctcttacaaacctttttcagtttacaaaatagttttacatcccctttctcatttgattctctcccagaccctaggaagcctggtaggaaggcgaatatccccattcttcagggatggacgttggagctccactaatcctttcactagtaaaggaaaggaagtgaagggcattgaggggacacggaatgttgggaagggcaggctgggcagggacagtggaacagtgggctgggggcatttagtgggacagtgggctggagaatagggacagcactggccagttggtgacatgacaagaaatatgtctgtatgagagcagaagacagataaggtcttttgactttatcccaagaccaagaggaagccatggaagggtcttatgcagtggaacgccatggtcagactggattttagaaacccacccctgggtgtgatgtgggcagggaactggggcagggcaagctgggggctgcctctgttattcagagaagagctggcagagtccgcctgtgggcagtggtagagggggtgggacagggacagaaagactcctgggagggtgtccagtaggcacatgaaaataggggtctgaggctgtttcccctgaagaagtggtgtatatttattctactgtaaaggaggacggagtgctaagtgggttgccatccacttatagatgtgactggagccaggcagtgggtgagatgactcagggaaaagggagggtcaccagggatgccaacccttaagagccgagcaaaggccagtgcaggccctgccacaacaccccgcgggaagggcatttgtaatgtgaaagcacttcgccaccatgacctcctttgatgcggacaaggccctgtgaaggtgacaggtgactcacctcacagacactcaagggtgaaatctaaggggactgctggcttttccctctgccgcgttccctttcctctttccacccatgctgggctgctggggtcaccacctggcaccacctggagcaggaagcgtcctcttgcgagagtgcccagaacctccagtggggtgtggctgtgggctgtgggaaggggctgggtcccccgagcccttttggccctggagggtctggagggtttccagataaaatatgagatgtccagttaaacttgaatttcagataaattacaaataatgtttggtataagtatatctcaaatattccatgggacatatttatattttaaaagtacttgatgcttatctgaaattcacatctaagtggcatgtctgtcttgtatttttatttgctaaatttggcaacccacaaggggtgcctcactactcctgcacaccagggccttggggattttcctttgtctgagaccacagtgagaaacagcctcttaccccacacttgccctgggtccttgtgtggggctcagggttgtgtggggagacaagctctgtccctgatggccttccagcttctgtctcagcccagcagacgtctaacctgagtttctatggccttccacatgccaatggctccccacctggacaggtgaatagctgctgcctctgatcatgtgacccaagaatggaggggaccagggctccccttctctagccagcagcatctgccagggtgtcatgtccaggccctttagatagcccaggagcctgcagccctcagtcagcaagagcttacccagggcagcctgggctaaggggtatggaggaaaaggcacctgctctgccttgggtctaggcaacgaaggtgtggatatttgttgtttgttcagtggcctactgttaggaaacagtagccccacagctttgcagagcctgacaaaggcaagaaactgtcacatgtctgccctcatttgtagttttttcttgttgttgctgttgttttgagaaggagtctcactctgtcacccaggctgg

SEQ ID NO: 36795 - DNA, 2780 bp, Homo sapiens
accatattgttgtcaggtgaacagggatggcgttttcagctgtttcctaccccctttatgatgagtgaactgaggctgagagaggtgaagctttgctcgtagtcacatatcctaacccatgtgaacgttggggcttcaaccctagctcagagaaaagtgatcaaggatgctgaactccaaggagcccgggagttgtgctccagatgaagttcctccactttcacagtagggggcgagcctgaagctttgcttgaagaactgggatgaaaagtccacagtcctgccctggccacaggcaaaagacaaggctggcagctcccactgtggcgctgggagagcttcctctctctactccggcccacacatggagtgggctgtggagtcctgatgagaacctgctggggcagcaggtcagggcgctgcacatactctgggtggggaggaaacctgcaataaccgagaaggcggctccagaagctcagggacctctcagttccccggagggaaccaaggctttagtgctgggcacagagtgggtcagccacaccagagtctctgtgaatgttaagccagactttggagaagggagacacagaggtgggtgtggcagagactgcagatgtaaagagttctatgtgtttattccacaaatattttctgagcatccactgtgtgccagacactgttgtagacatcagggatacagcagtgaataaagcaaatatgtgcatacaggtgtctcatagacaactcgcttgtgagtcagctcatttgtgagttgattcttttgaccccaggcaatgtaatgcaaaattcagcccccttagcagcttccagaaaacggtttttccccaccaaacatggcagggcagagggttttactgaagatttactgggtcataatgagaggctgcagttgcttctcttgtgccaccccctctgtgaatgtcagggtacatgacccttctcccagctctcctgacatgcagccaagctgggggctcaccgccctccctccacctcctgcacccaggctccctgcctggctagcctttctccagcagttttctcacagacatttagtcttgggaggggaggcttttgtcccattcctgtgtcactgtttggccctgaaggacacagcctctttccccagggcccctcctttctgaaatggggatgttgtccctatgccattcctacttctcagaattattccagggtgagatgagctcatatctgagaagggttacactcagaactctctagcacctcgggtcatggcaactggagacagcatcttgctctgaaccaggccccagcgtcctacagatgggtgacctggtgtcattatgggagtaaatattgagctgctctccttttattttggattgggtataatttagtaccctgttctcactcttttattaataaaataaaacaataaacacatactaccatcaaaagaacactcacagcctgtgtttatgtgtttatgttgtgtctgtgtctaagaagctgcaactgctatgtcaatttttaacaaaatgagttttcactcagtgctggggggtatgataattcaaaacaaaaagggagggcagattcttccactgtgtcttttagtttttgcttttttactcttttcctttttctttcttttttttttttctgttaaaacagagacattggcctaaggcctaggcacagaaactaagagtgcctgtgttcactcgggaaagattccacaggggaatcaggcccatgcccctcccgtctcctgttcccaggggctttgtttcctgctctcctctgccctttctgaaaaggaccccacaggtgatctgaaccccctgaatatggtgcctggggagaggaatgtgggcatgaggaaagtaaggaatgaggaggagaggagaaatagaacaataagagagaataatcagcataaactttgtgatctcagggccagggatgagagaaacaatggtcatttatacattttaatcatgagttcagtcttgtggctgaaagtaacagaaacaaaattctaattagcttgagccccaaagatgaaggtgttggcttacataaactactgtggagacagggataaaacaaatggcttcaaggagtggacatccttgggacgtcccctcccctcaggatgttgatttatccacctgctctcaaggctgtgaggctctgtgtgcccatcctcacagccccatggccagagaggaaagcactctttcacaccagctccggctagaggacagcaaacagcagcataccagtgtgcagtcgtcacagttcaaaaatgttacactttgttcttttccagtactgatgaaggaatggaaaatggagaccctaatgctgtgatacactattggagggaacataaattgtcccagtccctttggagggaaatttggcagtatctattataatttgaaatgtggttaccatggatctcatgatgccatgtctcaaaatccagaccagtaactctcatgtatgtgcacaaggaaacacaggccagggtgttatgtgaagaattatttgtaatgcaaaattaggaataacataagtgtccatctttaaaccatgatatattttatactctgaaaacctggaaactattaaaaagaatgaagtatgtactgacataaacccctaagacatcttggtaaatgaaaaatgtaatttgcagtatatagatacaatatggtatcactcaagcataaaccaaaaccaaaacaaaaccttgaaataat

SEQ ID NO: 36796 - DNA, 4870 bp, Homo sapiens
ggggttgtttctgtattttgactattatgattaatgctgctatgaacattcccgtacaagtttttgtgtggacatatgtttcatttctctgggacatacacctaggagcggaatttctgggccatacaatagccatatgcttaattgtttggggaataataatgtacttatattttatttctgaaccattttgaggtgaagttgcagacatgtccctttatccctaaatacttcagagaagccaaaccaaggacattctttttcataaccacgtttcaatgatccaattcaggaaatttaacattgatacaatattactgttatataatccacatgcaaattttgccaattatgtccttaacagcaatttcccccccatccaagatgcaagctgggatcacgcactgcatctagttgttctgtctctttcctttccttcggtctggtgcagttcctcagcccttcttcatctttgtgtagttttgtgaaatgtctctcagtttaggtttatctgatgtttggatggatgagtttcaaggcttgtccatgtagtgggcactgaggtccagtcgtgtagctgcccaggcagaggaggagacttggctcggcaggagccctgaccccttccaaccccaccgcgattgcaccgcgctctgcagcgaagggacgggccgcagacccagacccagggctgagcccggcagtggaaagtgccccacctggacacctggagggtttactgggaagtgccaagagaaagaaaggggttgtgcgggagcttcgttcacgccctttcccaggaacagctcaggggcctggagggcgcgggagtgtgtccccaggccgggccgtgggcaagcacttcccatcgcggcaccgagggctcccggacctcgccaacccgagccgcccgggaaaggctgcagcgcgtcgccgggatatccgggaagggcgggcgcgggggagaccagcaggccggtgctgggaaggcgctgccccttctgggaagggccttgatgcaagggcacacccccatgcccgcgccctgcacccccgcttccggcagccccggcggggctctcgggaaggcgcggggcgggggcggctgattctaatccgaggcccaagatggagattgggcgccgggaggcggctggcttcactgggtcctggccctgagccggtttgctgggctgggcctaccaaaggccccaccaacttttgcaagaagacttttctgggtgctccctcaacattattgattgagaagagccccagataatctgccatcctaccgcacagctgccaacttccacctgaggcagcggtggttgggctgttcgttgttcattcgttcattcattttgtggctgcaggtatctgcctgctccccacctttccccctccctgttggggaagaggctcagtagggcttccaggtaacagtcctgtacctaacctgcttctgctgagaacacctgtcctcatagtgccacccgacctgccctccctcagccccagggccttgaattctggccaccccaggactgagctggcctctgcccactttacaatgagggcgacagacaccagggggaaaggcagggccttagggagctagccaggaagaggtagaatggggagaggaggaaggcaccaggcagggaccaggccaagagcgctgcaggaatgtcatagtcatccgagtttgcaccctgacagtctgcagatatgcgttgttctgtcctcacaggcttttgaaaattggaaaagttcacataaaaatccagatatctgatttttcttgacaaataaaaggatctgccaacaccaagcttgcattcctgtggcagccaggactgaatcaggaaccttccctggacctggcagtggccacacaccccttcttattgtttaaactttctgcactagctccattacttgcctcttccccaagggcacctgtgagctcactcaatcctcaccataccctgtgaggtcaggaacccgattccattttgtacagaaagaaagcaaggtgagaggtcaaccacctcgcccaaggtcacagccagagagaggtagggctgggattctcccccaggttatctgctccctggatgatgctctcttcactctgctgtactgtttccttgtgggagatccggtgtcttcagcagcagctgggtggacggcagatgtagacagcaaatggaaagcccttggccatcgtagtctggggctttctaggccaccacagagtcctgagctgggctacacagctcttggctgaggctctggagtggtgccaccgaagtgtggagcaagaaggttcggtccatggtcccacagtaaactcaggcaggcgaaaggacatgggcacctctgtgtgggggtgttggcctctagtcaattaaggggtgctctttcttcgttgcttctctctctttgctggaagtgggctccctctgccagtgttttgctccatatggctttcttgcgcccacatgggggcaattgatggagaatagtgtcaagattttcttagtgcataaatcacagtacattacagtcaggcttccctgagcacagctctttctgctcagttgtgcgttctcctcctggaaaggtttgctaacccttttcctgattgggcttgtccaatacttctagcaatttctagaaatgaatcaaagggcagtaccttacggtcacagagggtcggaggaagctaaggtaactgccttctaagagtagttcagctgtatatggtactctacagtttataaaaccttttcacactcttgtgtattcctttggttcacacaactttagagctgtacagaggagcaatttgcaaacttaccttgagcaaattcctttcctctttttctgttttgatttcctcattgaagaaaaaacaagataatactctctttttaaggtattttcaggcaaagctactctgctttctaactcctgggagtgctattcacattgaatgccatgtgatgggtcctcttgggattgtgcaatgggcagaactcctcatatgcatgttgtgaggatgaaatgacatcatttatgtactagcacaagtcctgggagatagtaggtgattaataaatgcttatcaagtgagtgaactactcacttggtcatgatgaattctgaaggacgcttataggaagaaggaagttgtaccggccccctgtggctggtgttgcctttcctgcccattttttttttgtatctcttgccaagttgccctttgtcctaggcctctgggctcccagccggctggaggcacagagttatctgtggggcctggagtgctgggcctgggctgtgtaatgaccagccttccgcttgcttcaagtttccgctggggggctggaagccacagcatccagatggctaattgctttgtgcctgtttctgcaaatcacagtgattcactgtccctgctgaaaacacgctctcttttcaaagatttaatggtttccaaaattaatttagcctcatctgttatccccctgcccttctgcactgtcctctctctccccagcaccctcttttttttccctcccttctccccatcccatgatggagcattctgcgccaaaagccagctttcactctgcagggcaacgtggagagggatgaaaagcctagaccccttagcacggtcacctgaacacaagctgagtgtggcgtatcaagtggaagcccaggagggaagagccagtggcacagttatctcccaccacccgacatgctccggccgccagctctggtctgaccgacgcttcggatgaagaactccaagcagccccctattcgtactgttttcctcagtgaactcccagggatcacctgctttttatgtgtgacgaatgtggtcagttttgtttgcttttgacagctcattatgggtccatgaggtcagagtcctggctgaaaggccagaagtttagggagcctatctccagctgatactcgcttgcttcttgaccatctttgggcttctgttctttcccagtagcataaagcttgtatgattctgacctctggcacctatgcattatttaatcaacatttattggggctgtctccatgccaggcatgtggtaggccctagtggggcaggggtaaaaaaccgctgcaatcctggcctttcaggaactcagtctagagggagaaagaaaacacctgaggccagagggctctctctgatctgcttcttctatttcaagtctgtgcttttaactatattgaatttcccagttattatatcttcttaatgaattgttgattttatcagtatggaatgtccatcccactttgacccttgtaatgccttttaccttaaattctattttattctgcccatcactaggggactagttgaatcagttatggtatatcctcacaatggagtactatgcagttgtgaaaaataatgagggccatctttacgtgctgttatggagtgatttccaggatatatagttaagatggaaaagtaggaaggaaaaaatatgtattgtatgctactgtttaagaaagacaagtattcatctgtgtgtgcgtgtgtttgcttatatattaaaatgcagaaaaatatgaccaggtgcggtggttcacgcctgtaatcccagcactttgggaggctgaggcaggtggatcactaggtcaggagatcgagaccatcctggccaacacgatgaaaccccgtctctactaaaaaatacgaaaaattagctgggcatggtggtgggcgcttgtagtcccagctactcaggagactgatgcaggagaatggcgtgaacccaggaggtggagcttgcagtgagccgagatcacgcca

SEQ ID NO: 36797 - DNA, 3406 bp, Homo sapiens
gcccctctcttaagttctccaagcacagctttaacaaaactccccataacctctgcagagatgccattctctctcaaagaaagccacattttacagtgactaagaggagcctgtggcctcacgttgtcctgcattgcactgtctcctttccagaaaaggttcacgttttatccttgcataacccaaagacctattaaaatcttttcctaaaaacaaaagggattattcccacaagagcaagttgcttccacctccaccggagacaaagaaattggaatcaaaaccccaagcccatgtggctcagaatagcagtttgctctttttttcttgccattgcttttttcaaaaatagcggaggccattttttgcacaccacattctatacctgtttggaaaccaaaggctgagtctgaaagagggtcagggactgggctgggaagggaaggctgcaggagagactcaggaagagggagtgaggtcaatgaacacagcaaccgccagtttttccaagactgagaccttttatcgtggagtcagatgtggggagagggggccaggcgtcagctagctgtgggatcacgggcaagtcttggaggtgcctcttccagcttcaaatctctgtgtactttggggaggcagggggtttgcttcccaggtgcaggcttgcacctgcctctttctggattgcatcagagctgctcaggactcatttccccacccccacaggcgcctacagctccctccccctcccataacttattagctacagataacatccctttgttctcccagtgactccacacccacagaaggagagggggatgaagaaatctgccaggagggtgcctcccgccagtatctgatgaaggtaagaggtaagaggctgcccgtttactgcttgtgccttccagggaagcttcttccccagggccactacccgtttcgggaggcgtttctgggctaggcttcctggcaggggaggctctcaggcactggggccgctgagggtatgtggtgaagcgcttggcttggaaatctttgccttagggactcattaagaattttttcagggaatcctcgtcgggtgtcttccaatggcttcccaccaggttacagtcaggccgaaacttctttttttttttttgagatggagtctcgctctgtcgcccaggctggagtgcagtggcgcgatctcggctcactgcaagctccgcctcccaggttcacagcattctcctgcctcagccacccgcgtgcccggcatggcccaaacttcttagccttttttgccagtccttttcccagacccactgagctccagttacatagaaccacgtgcgatttccttgaaaatattatgcattttcatgcttccgtgactactttgcatatgctgtttcctttgcctggagtgccccctaccacttctcttcttaaagaactcctattcatccttcaagaccctactcaaaagtcaggttctttttcaaagccttgcttgacttctcagacagggtgggatgctctgtgctctaggcacagggttccttccctggctcatctgggattagggtaattattagaatttacatgtttatcttccttctagttgttcctccagggcagggactgtcattcacctttgcaaatgtggtgtacagcacagtgccaggccctcgtaattcctcagccagtatttgtggcaggataaacacaatttcttctggatttattgtaattttgagtagcattaagagaatgcttttgtctctgtggacattccctggcctccagtggcatctctccagacaaaggtcacatatttgtgaatctgtatattcacacagcatcagcatgtcacttctcaggtattttacatctgatttatttattttacacattaaccctatgggtggttgttattgttgccatcataaaataaagagatcgagatgctaagagattaagtaccatgttcaaggtatcagcacttggatggcagagctgggacctgaaaccaggtattctggctgcaaaatcttttatctacatctgagtttctgagtaagtggtctttgaatcagtaggtcagcgtcccctggggacttgttagacaacccaaaactccaagggtggggcccagcaatctgtttcaaccagccctgcaggtcattctatcctcaagttaacactggcctgtgccacagctgctccagtagctgtccacagccatgggagggcgctccaaggccgactttcaccactgggaacctgtcaggcacagcagaaggcaagaaaatgcatgaactgggaattaggcggcagagttctagtcctgccagttctgcaattattggttgagtgatttggagcacattatttaatgtttaacctccctgggcctcagttttctcatctgtaaaatgaggatgatgactaaatgttctcatctctaatttccctttaaattctgttattcagctctcctttggagtaatatgttgtctgtgccaaggatggaatgaaaacagagtatgatggctcatcttgactttttccttacttacaaatggagagccccaaagtccaaatccttggaccagctatcccccaacttcctccttaggggcagaaggtgagagcaagcaaacatttgagttgattcatgaaactttactgggcaaagaatagaaaatgttggtttggaccctccttcactatctggggcccctccacatgagctccttcaccgatccgtctccttcagctgcttccccactgtgactctaccagcccctctctatccccccttcaagcctgagcactttccctgcacccccacctggagttgcccaattcacatgctcttgtttattcactgctcttctgaggaagggtggggttggtgtcagggtgacttactaggtttgacaggggcttggtggcctcatggggagcccctcagacgctggcttcacatggcccctcctgctggcttcacatggacccaacggccctccctggagcccacctcacagtggatgggactgtacctactgggcactggtggggcccagcattcagctgacggctgaaaaaacctccggtctacattgggctaaaagggaggaagaatgtttcttgcccttttgagatgtttgcaaaaatccccaaaaagcaattgtgttgtcagagtacagccttgaatcagaaaggtggttagaagaattttaatcacccaggagcttggcatcaacataagaacatggctgatactcaagtccagagagactaggagaactggggagtttcagaagttggtcaaagaacgtgttgcctttggcaaaaccacacgtgtcaaacaatccgagtgtctaatcaatctgtatcgctctcagagagactt

SEQ ID NO: 36798 - DNA, 1067 bp, Homo sapiens
aggtggaggttgcagtgagcccaagattgcgccactgcactccatcctgggcaacagagcgagactatgtctcaaaaaaaaaaaaaagtaatgactaggatgatatgatgacagaaatctaacaggctaattaatttacataaggaagggcataaagctactttctggatggataatgggctgggtgcagttgttgagtggactttgggtaagaaagtccactctccaagacgcttagtaaagacttacattgtttttagggcatttggagttcaacttatgtttcttttgaataggacaccaaacaagatgaaccttcataagggaggaagaaggctcaggcttattcaagttacatttcaaataatttcctgatagaggaaagggatttgggcagaaacccctaagatgatgacttacagtggggttttctgaattctcatgttcttagaacaggactgtgaagggtaggaagcagaggcctgtggggtgcagtcttatcagattgggggccttcacctccactggacatgtgggtaaagctgaggtttcttttgggcctaatttctcatgaagaacaagtcccagtgtcaggggacaccaaactttaatttctttcttggatttagtttgaaaatggactagattgttaacatacagaagaatttttgtgtgggttcttgctccttaaatgccaaactgatgttctaatgccttttgacatgtctcctgcagagtgactcagccctggcctcatggaccctccacaggctctccctccctcaagggtgcaggtgtgtccccacctcggattggaggccaggaaactaaccacaatctcctggctatgagacctggcccctgccttggaggcaaaacagggtgaaatacaggcaggcaggatcccaaaccacagaagctcaagttaggtcattcttgtgaacatgacaactcgctgtctctctaggtcaacaaaaagagacatagatccatttgaaaatggacttaaaagactaacaatgtggccaggtgcagtggctcatgcttgtaatcccagcacgctggga

SEQ ID NO: 36799 - DNA, 1052 bp, Homo sapiens
actactcctctgaaataataattcttgggaactttgacatggctggtgtggctctgaatgtggtcatttttccttaaacatgggatccagcccaaggcagaagtagatgaatccttgggaatgcacaattactattcactcagttcactgtgggaatcaagcaaatgaaattgcctgatgaaaaaaacaacactgccttaagaagcactctgtcatgttcacagtgaatttaaaataattattaggaaagagggcttggcaatgtgaagaatgtcagaaatcttcagcccaatttgttcttagggtatgatgaaaatggatatattttgactgaaattctaacttctactctcagggctactcagaaagtctggctaatggttcatataggaaaaacaaacagattttttttctttcctagactggtgtccctgaggcttaggaataataatcaatttctctaaggctagttaataacaaacactgtttgttctttgtagtatctaacatttgcccaacctacttatagcacatggaatttggactgaacccacaagatacacactggttgcctttgaccctgggatagggcttactgacatctattttgaatggagggaagagtggagtactagaattgatgctgggtgaattaaattctacccattataaaccgtgtttgaagcagctcatgggatcactcttatagaccacatgagttatttctgggcctggggcttctctggccgcccgcatccccactggttggctcagcccctggtccttagaagaccttcctgagaggccagtgtaccttcttggctacatttctctgcagccttttaatattcacacatgagacaacttaacacactgctgcctcacatggccatgagttctgttctgtgccagcatcaggaccaatcttgtcttggacaggggggctaggaagacctttgccctagtagctagcatcaagtcatgatagtggccagccccaggctggccttatgctctggctccggaaactggactctcaccttgtccattca

SEQ ID NO: 36800 - DNA, 2077 bp, Homo sapiens
cgggttcagctaatttttgtatttttagtacaggcgggattccgcgacgttggccaggctggtctcaaactcgtgacctcaagtgatctgcctgcctcagcctcccaaagggctgggattacaggcgtgagccatgcgattaaatcttatttcacatctgtaagacttcatatgtagatacaaatcacggattaggaaaaaaatccaaaagtcctgattattagttgcgaaatgaggttactgacgaggtccttggtgttagaggagcccaggttccttacagagccatgaaaaattaatgattgcaaactggtaggtcccaatgtctactgggaaaggcatgagtctttggagtcagataaaatctaggtttaaattcttactctgccacctggtagttctgtgatattaggcacgtgatgtgaatgctctcaatctgttatttggcttctatgtcaggaactgtgctaggtgtttggatacagaagtttgagatgcaaagggtcctgccctcctagagattgggataactaaggaaaggtggggttcttaatgccgaagggactcagaagagtgagagtaaggcttaaccaggcggagagggagttgggtcgggggaggcaacattttaagaaaatatgcgaggggctgatacgctggagcggccgaagtacaatacacagttgttcttgtgggtctaatgcaggtggttgcgattatttcgtgaaacaaatatggaaagcacctaacgctgaaagcacttgacccagaaataggagtcagggccggggcgcgaaccctgagctgtaaatccctttccagaatgatgaggattccaacctccagcacgacaaaagcaaaacacactcgctctgagaaaccgaggaacgagccagacgactggaggcaggttccaggcggggggcgtggcctcgggcgactgccggatgtcctcttccagaaccgggccgtgccccggaagcagttgttgttggttgggggccttttggccggtgacggagactgcccaggtgtggtcaccatgttcctctccgcggtcttctgtaagtggggctggagacgccggtaggggttacggcgagggttagggggccgtgacaggcagggccccggaatgatgcggggaaggatgtgcgaacaggacgggaagctgcagctgcgtacttttccaggccttcaggaccacagcgtccggcatgccccgcggcgcgcctccctgcgcggacctgtgggtgcctgagaaggggtctgcggtgtctggattcaattgccgtcctcacggaccgttgagtctggctgtggggcgtttttctccagcccgtgttaggagaatctttgtccgaaggacctcagaatttgcagcccacctatttcgaactctaaaaataaggaaaccgctcccgagaggggcaatgaattgcctgagtaatgcggcagggcagttaaagaagtcctcgggctcccgagtcagtgctcttctttacccttggctgacttcccagttagatttagtatctggttttcaccacatgtgatggttgttgtaatttgcaaaggttaaacttgtcaaacaagaagcttgctgcagcgcgaatacttgcaccttagaagagggaaaaaatggagcaggtattactttagaaagatttaaaaggtagccagtccaacagtcatgaaattatgcaaaatattaaatctagaattgtgttggtctgattggatcttttaaccttccttctataaaatcctaaggggatccctaatagatagggaatagttacttgagtgacacctcatggcatatttcataagttaaatatttttggttattactgatatttatatgaactttgcataagaaagagaatacatttatatttttattttcttttccaacccttcctgtctacaaaaaagttgccaagagcaagtcaaagtaagtaaagatttttccttttttaaacgtcacttgtttatgttggatttgttagtctagctgctcccagtacatccttatatgaaattaagcattgggccttgatttcctaagagttgg

SEQ ID NO: 36801 - DNA, 2168 bp, Homo sapiens
gggtatgtagccatacagtttcagctgctatgaatataatgggtcctaaatcagtatctttagcccagactctcctctgtctttggatttgtgtatctaaccacccgtgagcctgcttaacctggctcatgtctcttgcaggcaactctaactcaacacggccgaaatgaactcaaaactctgccttaacatggacctcttcttatcttttcagcttgtggcacctccacactgaaaacctgggggtctcctgggcatctccttcccatatacttcatcaatcaccagttgtcgagtttaaatcctaaatgtttctcaaatctgtcctcttgtctccactcctacccccactgccccagtaatgttcacatcacctcacagggtcacattaacttccaagccagtctccctgcctccggtctggacccttccagcccatcctctacactactgcaaatctgtccacgtggcccccgtggcatcaacttcttaacatggcacacgaggttccctaaaccacttttccagtttcatctcttacttcctcctattcacttaaggaacttacttcttcctattcacttacgggtctcagtacatggagacacctcggcttggacttttccctagactaactcctatactcatttttggagactcagcttgggtattaacttggccatcacatatttattgcctagcactatgttcaaagcactgtgctgtcccggaaaccaccagtctcaggccctctggctgccccctgccctccccttgagggtagcacgcctgtcttcatcacctccctgtcctgagacctagtgcaaggcctggaccatagctgaggtaggcactgaccgaaccaagaactgtcaggaggatgggtgctgagcgatgaggtgaggagcacacactgtcccaggaacgccctgtaggaggatgacaatggaacagatgcatgaaagttctggtttgccaaattccagttgatagaaaaggggacaagttggaggaaatgatgggtatgaagtgtagctgggaaaaacccccaagtgatgaaagtctccaaggtaagatcttgtcaggcagctctaacagattccagacaatcttgcaagaatgacgtcactaccaagcttcacttgttaggaatccgtacccacgctgaatgagtcactacccaaactgccgagggaccctaacagttacagcgcgtgcattcctccccgatgtcttcatgcattccatctcacaagtagatgccactttcttctcttttcaaaacctctccctacacaaagctattcagagcctacactgtggacatgaattcctcagccatgcttgtggttttagaagccagggaaaagcaaatgggatgaaacatgactaaatcataagtcaatgcattatttcttaaaaaagaatattgccaggggttcaggaaagggagagagggcaaatgtaaaccaccagggtctctgttacctcccaccaccatactggggccaccagattccaccaacagggtcagccttgctggctacactgggtttaggtcagaatttcttcaagggagagtgtttcaaggagggctgcgccagctgctgagatggctcatacttaggctggcccaggggccaggcttgctctgcgctctcttccaagttctaaaaatggggcttctgccttgttcttgcctgcaggaggctgaggcgtgagtatctagctgactgggcctgggaacgtaaaagtcattctttgtcctccaagggttaatcactgacaggcaggagatatgggtgtcatatgtacctggttttaagtcctgcctctgccccttgttgttaggtgtctttttttttttttttttttttgagatcggctcttgctctgtcacccaggttgggttacagtggcgcgatcacggctcactgcagcctcaacctcctgggcccaagcaatcctcccacttcagcctcctgagtagctgggactacaggtgcaagccaccactcctggccagctctgtcatcttttaagaatggtaaattcactgtcttttcactggcaataaaggtcttgtgtcatttttatttctattcatacaactggaaaatgtttttttcaactgggacaatgcagtaaatggtttggatttcagacag

SEQ ID NO: 36802 - DNA, 2831 bp, Homo sapiens
aaatctcaatgcatgatcagatgattctcccacagtaatctagcacagaaggtactttttggttaaggtgatggatactctaatgcactgcttttcaagctatccgtggagaagcactggccttgttttccttttcttgttttcaatccattgtggactaacaattttataaaatacaataacaaggagatgaaaacaaaaaagagtcatacaaactacaaggcctaatttattattactattatattcaacggttgtaaagttattctgtcaaattgctataaatgatcctaactgcttactctcaattcctgtgctgtttggaccggtgacaatctgcatgcagcctggcaccagcctgaggactggactttgaacagcaccaccttaatgtaccgagttaggaggccagcaggtcttattttccagttggaccctgctggtggaagcaggatctggtcaaaacatggtgcaatgaagacgctggctgaaaagaggaaagtgacctctagttgctctcactgctcattagcacaagacactcctactggacccaagatagtttacaaatgccatggcaatggcccagaagttaccttttatagttctggaaattccccaccctttttccaaaaagttctgaataacctgcctcttaattagcatataatttaaagtacatgtaaatatagttgctaacagcccatacactaccctctgggcacatagcctatcagttagccctgcagcactggttcaatcaaagttgctttttctttttttttttttttaatatttaacagctttactgagatataattataataaaaaccctgcatatatttaatgtatacattttgatgggtttgaatacatgcatacatctgtggaaccattaccacaatcagtgtaataaacatccatcacctccaagtttcctcctgcccatttggcaagataaaataagatccagagatctgctgtaccacatcgtgcctatagttcataatactttattgtatgcttaaaatgctcttaagaaggtagatctcaagttaagtgttcttactaccccccgcccccccaccacacaaagttgctttttcttatccttggctcactcttaaattcttgcctgggcaaagccaagaaccctccttggctaagcccctcagggcagcctgcatcagtatcacctctgtcacaaaacttcatgcttgatggttctgaagggaaaacagatagctacctgtattagagagtttgatagtctcatatatgaaggatagtctcatatttgaaggatagtttgatagtctcacatttgaaggaagcaagacagggtaatttcttgaaggtgtttccagtttgctgattcctgacctgggtcatttgggttcatacctgctcatggtttctgtgctcatactgggccagtgcatcttgagttccttacttgaccatggtcctctcctgaactgccaacttttgatgtttaggaataacttcctcttcttaacatttggcttcaatggaatggagcaggaaacacttaactcaggtgaagatttaagaaagatgtcctaataggctctttgccctgggaggaagactttcattttatacaatatctgccaggattttaaatctgaaaataccatctccagttatcactagactgtagctttggtccatgactcagctaaatactgactaactcttaagtacttgaagtgtttcattatacatgtatcactgtataaataatgaggtaactcatttaatattctttgtcacaatatcttaacaaatatttctccctagctcaatataagtttgtttgggccatcaatcttacttcataagagtttgaattttagtttgttataggtagcaagaggtaaataaatcttgctgagaaagccatagaaaatttttacctgtttttcttttgctccttctgttcatttttatcttgataaatttcatggttttggtttctacttagaacttgtcatctttaaaaaactgctataaagcaagtttggctaatttgcttaataaaaatgtatctcacaatggataaaatatgattaatggacagataataacttcttttacaaaaatatatgattttctttttaagaagtctgagaatattatgcaatttgcttaagcttttaaataattccatgtctaaaggttccaagttatctaaccaaagttaccctggataggttttagctgcagtcatgttttttgatcctctgctaggcagacacacaggctaaaatccactgtggtgctaagcattaggtgactaaatcaggggcatggtagatgtatagaactttcaaaattgtacagatgctaacataaaccatcacacacaaatggtacctttgctttaatcaacctcctaactggaacatttcccaaaatacagccccctgcttctattcctctcctatccactcatatggttttaggattcatttcccacgttcagttccataactcaaatatttctctttgtcatttctttctttgcctcaaattcaacagacctaaaataaaatcaatttcataatcttagggttggaagagatcccaggggacatccaatcttgactttaatggctacataaatagcttccataaaacatccaagagaggggttctctaatctctcctttaatgtctccagctctaggaactcccctcttcccagcgaagccattttgggtgcatagcttccaacgccaattctatgtccaagttttcctacacaggaaattatatcatcctctttccagttcccaggtcctctt

SEQ ID NO: 36803 - DNA, 2723 bp, Homo sapiens
attggagtggtaggattttcttggaatatctgaatttattactaattttacagtgaacatacattacttttgtaatcagaaaagctaccttaatttaaaaaaaagaaaaatcagaaggatctgtctactcaatcttactgacctaactcaacaattttcatttggcatattttctatcataatttgatcatcgttttcagaggttgtaaatactgtgtttatgtttttattttgattcatacttggcttgctgaaaaatacgctgtaaatataaaatactgcagtaatgccgacaatcaacatggtgaaaggtgacagtctttttgatttctgctcaactcattattttatacaataagctcagacgaataatacccaatttggataatgttacgcttgacaaaacactttacttcatttagtcctcacaacaaccctgtgaggtaggcacattctcggaggtaaaatgacgtgggcaaagttccctggctcgtttggggaaaggctcagcagccgggccaagaaaggtctttgggggcgcaagtctttggagggcaggtctttggggagcgctttgagtaatattagagctttcactaaaccctggcctattacgtcccctcccctgagatttacctttatatactcaagttctttcatgccaggaaggtaggctgaaggcttcgaaaacctgcagctcatacccaaagctagcactgtctatccctggagacccagcgcccaaaagctccactgggcgcatagcgcacggcacgcctcctcccccgagccgcagactgagtaactggccccggactaacctgaccaggtcggtcatgcaggagcccaccactaccaccgccgccacctcctcttgccactgcctctggggttccccagacgccgccatcgctcaaaggtgctgctgtccaacctggacggtgacctctgccctttgcccgaccccgtaaccagagacgccactcctgccctccctaacgacgcgggcctttcagacgcctacgcgggtcgcccacctgactgcccgaaatcaccccgcccaccaagtgtcccctcttcttcctggaatagtctcggtgcacagcctcacgtaacagggccctcctgatatggcgagactccgcgctcctcgtcactcacggggcaggcgctgaggaaggaactgtcaggcaccgcggggacgcctttccgagcgcccggctcggcgcggcgcgggggcgcgcacgccgcccagcttcggggccgcagagggggcggggcgggacgtccggggagtgcgcacgcatcctgcccgcggcgcgcgcgcaggtcggtgcgtctgtcgggggcgcgctcgggtacctgtaccccacgtagtcgccggttaccgatcggactaagttccaggtacctggactggggctggtgcggggaggttggatcccgagtcgcacaggtggcgtggagaactgtggtttaaatatggccaggggactcgcctcctcttcctatggagaaggcccccgttccaaagatgcccttctcatccccatcacgctgattccctcaagaacgagcccccaaggccagaggcgtctctttctccatatctggcccatcccctggttcctgtaaaccccgagtattagttccttgttgcctgatgaggggaatcatacagtttggaagaggggagagtgtccctttttaagacgtcccctagagtggggtggtcattcttcgggtctgagctaacttgtttttctcgaatgttgccccttgggggaaattgcttccccagtgtaacttccctcgtgcgctgtatgacgtcgacgtgacgcagcaggatgccacccctttccgttccatgacgtcagcagggcacatgtttccgtgtttgtcatctcattttaattgcaagaacctggatggtgctttagacgtctttgtaatccccaggcctctcatcaaaggaccttttgtaactttattttggggtagcagacccttgcaaaaattgtaattttgcattttccttttgcaatacgtcaaaatcaggaaatacaaattgcagtagtagtattcaggggactctgaccaccgtaaatatttgtatatctggggtgtattatagtgctgccatgcgtaagagttactaccggtggtgactccctgtccatgtacccggttcactgcaccaaaggaccagtgtttttggctaagtgacttctgattttggagtcattgtgttccactccccaccccccgccctttttttttagagaagtcacacctcctcatggttgaaatagattttaatactgcgtgaaaccttgcactgttaaaacatagtattatggctgccctggaaatagaattcattccctcaggtgtcatcctaaagtcacgaccgttgctgaattagaatgtattgttgtcacttagtatggtttggcttctagagcaaggctgttccctttaacatttgactagtgaatcactcagaccaggttcagcagtaggtcagcaatagtccagtttgtttttagtggtaaagcaatcatttgtttaaatttttactttttgtctgttcacattttataagatatacgctttacaaaatcaccttgatgcttttctctttggtgatagaagttatcaatgtttatttgagagaaagatgggtatagtggacttggagaatccggatttggattctgatc

SEQ ID NO: 36804 - DNA, 433 bp, Homo sapiens
aaaagtttacaggaatattttcattggaaaattagtagtgtttagtataaaaattacttcttataaaataacactgtacattgaatgtatgaaaatggtatttaagttggccttggccctggggatctcttatataacatttactaatatgagtaataattaccagcattcccacagttgaaatagcaaacagtccaggacatttctgtaacttgtttgaccttgtccactccagctctaccttgctcacttgcagtatttatgaaatagctttcaggtacttcctgtgtgccagcaggtatgctgctggacactgagggatccagggtttaatgcattctctttcttcttagagttttcagtctagcagtgcctgtctcttaggttttgcccttacttaaagacaattgcccataactatttctccttcccc

SEQ ID NO: 36805 - DNA, 1994 bp, Homo sapiens
atcttttgacttcctgcgctgatacatgaagcatcagcctgttttccctatgccccttaactctgttttcttttccttcttaatgtagttatatcaccattattggttcctgtgttggttaccctgtagcttaaaaatttttacttactttttttaatggatcactttagacattgtattacacagttaatgaataacccctaagaattcttagtaagtacctggtacctggtacacagttagcttcgttattacttaaggacaatctctaagcaagaatggtgaatacttagggtagtatattctttagttttacattaaccatagatactgtgtcttttgcctctgcattttatgagatgaatatattagcccctgcccttccttcaattcctcttccttcacctcccagcttttgtctttggttattttccttttgcattttcaagattgttaacttactgtccgttctaaatctgtagttgtcttctgtgccttgcctataaattgcttgaacgattgctctggaggcctgttcctgcataattatcactgtgagatttgcctttattacttttttgaatttgaccttgttttgtagaatctatgtatcgtagattctatgttttgtagaatgatttcttgataaacaggttacctacttatcttgctggcacccattctcaaataacttgctcagattctattcctctttctacccttctgttttcctttagcccatccgataattttttattactacagtcacaattaggtatcttaatttctaggaactctttcttgcactgtttctcattctcagcatcttgttcttattttatgaatataggtcctttaaattccttcaaagaataaaatttagagattcaaaaaaaatgttttcttctgttatctgaattattttaattttccctagggattatatttttgtttatcatattttttccctcttttatgctatagtttttcttcaaataaaaggtattcatttctgtttaagatagacaataaaatagtgattgggacttctgagtaggtgagcaaggcttatggaatgtgtggatgaatgatgggccagatgtgagtcaactgctctagctctcctcaaatagtttgttctatttcttcattgaatacctgggcatacatacctgatcaccctgtcattttcagggggtacgtatatagactattccgtgaggagcttttgcttactcttcctgttcttagccctgtgtctcattcttgcctccccttacactggataactagaaacttttatgggtttactaggacagatggcttcctcctcatcagtagcctcttcctcacattattacaggtcaaagctttcctctgccctatcttgtcaagtactacacttccatctgcattctgtctctagcaatttgctaaactttctcatctactgattaactactctcctcccttcctcttcatcttcctgttgtttgggattttatctttctgtattcactatcatttaacgggattggagggggtcttagagaagaaatgagtgtgtgtggtcagtccacagtcttgagacaaaaataatgtgacttcacaggcatctttctagtagcatgggtttatgttaggaagcatttgctgttaccctatatcctctcattactataagctcttcatgggaaacctttaataacatttgtgattagtgtattaggactgtcactcatcatataacataattatattctagcaaattattgttggatatcgtcattatacattggggacttaatttagcccacagtatgctctataataaataaataataagtgaacattgtataatggcaattcttatgctaaaatgagtcaagattctagtgttaagcagctcacagccaaataaaaggaaaaggtaattgatcatggaaactatatttataaaagttcatagaattagaaagatgagtttttttttt

SEQ ID NO: 36806 - DNA, 2472 bp, Homo sapiens
aatgccagaagattaaggaagttctagagagttttgcagatgtgggatttcagatgaagaccagatacatctaatttgtgaggggaataaagagacaggtaagagagatgggtgggaatagagctagcctgaggagaaagagaaggagattaaaaacaaaattcgtatccagtctgaataaaatttgtttcatccctccttggcccttagaaattagagtcttttcatattattgtctttctatttggtaagctgtgtttgatagcggtgcacaaacttgggcacagaagcctgagtttgtggggttgcattcagtgtatagaaaagttacaactcatttctagttagttcttcctttgtacttatgcctaaacctctccatctggagaaatgccagcttgccactaaatttaaataaataagaacatgtctcatcaataggggcggcaaatttagcccctctttagagcactgagcaatttatgaccatatgttaaataccataaaacagctttaaagatttggtcgctggccattgccagattgcaccgtaggagtgcagcagcactgtgagggactgggaatgcttcctccggcccttggaggcctcagcaactcactgatgtcacagccaaagagggctgttttcaaacattccctttataaaggtgaaatactaaaagattccattttggcatttgggagcaaagaaggcaagacttctttttgattcttaagggtcaaaattagtatggaaagtgttgtgtgggagaatgagtaacttggcagcagtgagtacagaaggcaagtctagaaataggtaatagatatcctactcatcctttttcttggagcatgaactggacttttatgtggcataagccgaccaaatatcacgtttctcaatcaatttctttttgccaactttcgtcgaattaatattaatgttaaaaacaatttttaaaatttcatgccaaagcattgccaattgtaaggctttcttttcttccagaaatatgactcactatttggtgaactccaaatattagtttttcttcttaccaccatgacagcctgtgaatcatttatggcattcagtgggctcgtggctgagagaatgaaggtgtgtgccagcaaacatgtgatttttggtcaagtagtgctctgggaccttcgatgggcttttaacacatgtgaggaaaccagtggttcaggcagggggcagtattattaaatagtaatagacaccaaaaagctttgtacaagatttttcagactgctctctcagaaatgtaactcttcctacaaaggaagatgatgaaatttggctgtcaaaggtccaggattcctagccttcttgaatctgtagttgccagcccaagggctgatttcctgtcagttcctgtgtggtttgcactacatcctctttgcaacagatcagtattttaggtcatccatcataactgctctcctgtaagttcttggcaatttgatctcagtttgcagaaggcagctggcatactttgctaggaagtgcagctggagagctcctgtctcactcttcctaaggccaggaagcacactattgttactcattgctgctttcttcctttaaagaacaaaaaacttcaaactttggcaaattctaaagttactaggtagcaatttgaaattactctgatcgttttgttggtctagggcaaaaacttgagtgatcttttatatcatttgtaaatcttgtctggtttttccataacacagatatgtgcattagtggaagtttcctccccattgcaaatgaagttatgcttgtcttcagagtcacacgggaatttttagttttattttgttttaggctttgattgtcaaggacagtaacatggcctaatttcttctctgtgttttattcccttaacattgagatttttctattcctaatatcagcattgggtaagactatttaccttgggtatgacttgaatatttgcactggattttcaaactatacgaacagagatagttaaagcactttttttggactatttaatgttaaaataaaagtatcgttttagtgtttctgatttctcattccataatgggtgacctatgttgtgagatttagaaaaatgagcaattttcctcctttcttatgactcacaggtcacattttggcaacatgttttttttttcctgtagaatggtgattacctttaccccagttcacctaagagaggaacctgtttataaagaggatacaacctcatgcatgaattattttaaatggtattcttaataatctatgatggcacagatcttttatacttctgagttgtcttcttttcatctttacgaaaaccatatcttctgtagagttaaacaagattattaatgtagctcttggtttcttttatgttctggttcctaacataaatgaagggaaaggaaagataagttgtgctgctttatagaaaa

SEQ ID NO: 36807 - DNA, 803 bp, Homo sapiens
tagcttagcagtggtaaatacataaaaatgttagggcttttagttaataagaagcataataggagtcactactgatgaggctgccaaaaaagctattttaacttacaatgccatttatcaatagaagtttaatacataaattaaggcatggatttttgtatttgtttctgtgctctttagaacacacctagaatcttatcttgagatctgggtgttatcctctaagagagctatagacaaactggtacatattcagagaggagagagccaaatgatgaaggaaattgaaacaagtcagatgaggaatagtgaaggagactgggatagtaagcctgtctaagaggtgactcctagtggggttgaaagataggtcacgagaactgccttcaaataattgaagggctgtgatattacagataaattaaacttgtcccataaagttctcagaaccagcaaatggaattttcagagagatattaaatttcagtgtaaggacacactaagggttagagctaactcttggaaatgagtcacctcttcaaagtttttcgtaaagctctgaaatggtttggatatgtgtcacctccaaatatcatgttgaaatgtgacctccagtgttggaggtgagcctagtgggaagtgtttgggtcatgggggtggatccctcatgaatggtgtggtgctgtccttgtgataatgaaagagttcttgctctgacttcatgtgagatctggttgtttaaaagagcgtggcacctcctcttgctctcactgccactctcatcttgtgatgtgcctgctctc

SEQ ID NO: 36808 - DNA, 674 bp, Homo sapiens
gttctctcctttcttgaagtgtcattatatcagagaggctttccctgacatccctatgcaaaatagcaatactctcctcagtacattctcatctttgttgtggtctgttttcttcaaagcacttatcatcatttgatgatttttggttgcttgtttggtgtctgtctctgccagggtgaccaactgccttgatttgccctggactgaggggttttctgggatgcaggacattcagagttaaaaaagggcagtcccaggcaaactgggataatgagtcatccttgtcttttcactggattggcagcttcaggagagagtggaatttgttcactgctatatcctggtaatttgaagagtgcctggtatgtaggggtatacaatacatgtttgttagatgaacagatttcctttaaggttctgtatcccttaagggacttgcagctttccaggactagaaaatacactttagattaaaattttaaaaagtagaaaaaaaatttagagaaatttggagggataaaaataaaatcagttaacagaacctctgaaactatgattttcagcctttgttttgcaacaccctgtggtatgttcatctccctcaaaggatattatgaaattctttacccccaaggtaataatgataattcactttaacttaaaatgaagttgca

SEQ ID NO: 36809 - DNA, 731 bp, Homo sapiens
cgagtaagttctgttaattaaaaaaaaaaaaaagtcaatggtgagttatgcaaaaaaaaaaaaaaaaagctagtagtcaatgatgcaaattagattttggttgaatattagaaaaggggaaaaaatagtttctaaaccagttgcttttttttcccctggcagaaaagctgtgagttttaaggttacatcatcagagctggcgtgaaacatgctctacctttccctcttccccagactgttggcagttgttgtagtgaacccaaaggttaaatgggcatgagagtctgcatagcactcttccacgaaaggtgtgggcccttttcttggcttgagccactttgtgggagtggtttaaagacaaccagcttcctcattccctgtgctgttcccactctgtgcataaaaagaggacttcagccctgaggcagaccaggtggcatctttcacaagtacagaatttgtttttagaactttttgttaagttacatctgccttggaaatgagtactcaaaacttcccagcccacgaacgctcactattattgaggcctgtgtacctgcaatatgcatgtttgttctttcaggcaacagaaacccaatgagaatcaaccacatgtgaggccctttgctaggtgcttcagaggctgtcagcataaatgaaatgtggctcatctccttaatttcctcaaagtaagagggatcagaacaaatatggcaagttgtgacttgtgg

SEQ ID NO: 36810 - DNA, 2011 bp, Homo sapiens
aaacctaggtagatagtagagcctactacacgcctaggctatctggtgagcttattgcttctaggctacaaacatacacagcatgttactatactgaatactacaggcaattgtaacacaatggtaagtatttgtgtgtctaaacatatctaaacataggaaaaggacagtaaacatacggtattgtaatcttatgggaccactgtcatatatggggtccatcattaactgaaatgttgcatgtggctcatgactgcatgagagatgtgataatttgcagacagaccgaagttcacaaagggctctattagtttcatttgcatggaaaagactagtattaatacattcagtatagacagttcttacatttgagttttagagccaacaagactgacctggaaatgcttttctggtttcattttcatctatttaattacccctaccactggaaaagattttaaaactctggcctcatccttctaatttatatccacagattaagtttcagttctaagaatgatcaactaatttcatgttttattttattccatgaagagagagaaggtaccttctcatcagaacagccctatcacccttttctcctcccaggttaagcctgagcccttgccacacggatttccttctcacccgcttcctccccgcaccactctggggatcagaagtatcagtgccaagtggtccctttcatctcctcataattcttccccagccacttagtgggttagtcaggccctgccttctcttcagccagccctgcagtcccgggaatgtcttgagtgagccctggaatctctgcacagggtgagtttcctgttgtacatgctcagcccaatattttttgattcatgaatattaaagaattagagatcacaaggccttaccaccatcttgcaccctctgaaaacataatgactcttttatttcatggcactttacttagtttattcagcatgatcagggcagcattcaggctatagcaagcttgttaaatatttacccatgaggctgatatttatacatgaatcagcagcacttatcagtgtgtgacactggatgtagattttggacgcttacaagctaagaaactactgggttaaataaagggtgaaatgacgtcctttaaaaaataaactctcagttaaaactatctttcgtagtgcctaaagtgctttgcacctgttgaggctcaccccagacagccaaccaagtcattcagaatcagacctgccagagtgtctggtccatcacatttgagatcaaatgaatctgattgtttggtggttggggtgggagagtactgaggtatgaacaaaattaagaggagttcctgcttgctgctgtgtgggaaattgtaaacggagatgagccgtacatcacagtgtctactttggtgacggtctgaagcctctaggagcccctcatcatttgggatgctggcctggctccctgatagccagacctactgtttcttcccatccctgtagtcttccatgattaaaatccccctcctctcagggaggtaacatatttcagcagaaacagcctgaactccggtgacaggcaaacctgtgttcagatcttggttttacctatgtctagttgtgtgaacctaggcagtattttctgttctctgagcctcgtttttttcacatgtaaaattacagcgatacttcccacctctttgaactatggagagcatttaattagataatgtgataaagcacctagcaacatgtgttagttcttggtagtgaccgaagcagggtgcggaaacatgggcctggcagcagaacacctggcctttggatctcttcacacctctgcttttctccatcattacaggtaatttttgtctaacggctgtatttcggaatgacacaatccaagcagagagagggagagggtttcaagtttaaaggattactcagactgttttccttccatgtatataatttaatgactgattaaagacttctcttgtaatatttta

SEQ ID NO: 36811 - DNA, 768 bp, Homo sapiens
tttaaaagtatctcatacctacaaagatataaccaaatctaacatttcagcaaacaaaagctgaggcttgtaaccaacagaagtaattgctatacagttatcacgagaagtacatgcccagcttccagggtaaccacattacttaataaacatatcaaatctcttttatcttaaaagacccaaagaaaccaccccagtaatggttgccagccctgatccatcccttatctgttgctggcaaactgtctgtaaatagtcaatccagaacactcctctaggttgttttttcttgctctctcccttcccccttctcctctccatcttggaagtattcgcctttgcagtctccaccctctgtagagactctgtgctctctgcacccggaatgagtcagcatgtggatacatacctgcatttctagggaaatggactggggttatcagaaaactcaatctgtccaaccatggataaaaatcaagacattttattgcaacccagatagttagctcagcagctgcactctggaacatacagtacaactcctttgggaaatacctagttgggagtgactttcggtctcttgggtaaaatgttcccttctcatacagcaaaccttttgtaaaagggaaacagactccatccaaactgggtggtaactggagataaaggcaggccactcctgtttgaatgtttgtcattttgatgaggattttgtttaacaaggtttctaccttatctgtcttctttcagatttacagctccagagcc

SEQ ID NO: 36812 - DNA, 2396 bp, Homo sapiens
atgtacagtgtcccttttcatcgtcacagccctgagaggtaaatggtgtgactcttcccattttgcaaatgagaaaagagaaacttaggagaggttatgtaacatcaactttgtgggctgaggctgagtgaagacctcgcagaagagaccagacccagcatgctccagtagctccactgcagggggtggctgcttacgaggacagagagcagaattcagacgactccagctgacctacttggtgcaagtcaagtgaatactagtcgggagggattagatgactcagcctctgccttcgttggagtcaggaagtaggctttgcagtccatttcctggggaattttcagatggaccagtgatttcattttcctcttctaaagcacccccatgcacagggaaaggttgttcacgtggccatttggatgaagccaacggatctgatgtcttaaaggagaagctgaaacagcagtggaaactttctaggcctgttggtattagtaatttcattcctggccaaacatgaatgagaaatccttctagtccactttgactgaggctagagtgtggattaacagtgctttgatatttcagtattgctgcccaggttgtgaaggtataagcctcatgcaggtcacctgctcttgcctccattgtacctattgcctaactgggataggcctggggtggggctgctgagagctgacaatgccaggccaggaaaggcaagctaaagaccagcaggcaggcctcggggttggaaagctacacagtaaacgggtggagtaccaaagcttagttgtgtgtctagagaattcagggtgtggtgagtgatcagctcctggaagagcaaagattagtatttaatacatatgcatttattagcgtggctgggtctctcgtcaaaaatgtcataatttcacagatcaggattttaaagcaaatagaattattgatatatatctcttccaacagccaataaacatcccgcagagaggacagcttacgcatgggctcacacaaagaaaattgcagagtctttgcttaagctacagcctgaaatattaaaattctgattttcatgcgctgttagaaatagttttcaaagaattccttcctccagccccatcacaacccctgcccatgtgagaggttaggagtaaatcatatgttttttaaaacatttgctgaaacctcctcccttttccaagtctaccaaatttttatctcaaaaaaaaaaaaaagaaagaaagaaaaaaatgggactaatatgacaacaagatttttaccttcacagtaaatagtacaatttagctgagtaacttgtggaagcttgttaggttgaagtgactcacttgcgtagatgaagttatttttagagatgtaatttgtactgtttagaaaagaataaagagatggtaaaaggctagatcgctcattatagtttacagagctcatgaacccagcatccatgcaaaagatgactaagcaaggggtcggttggtactttctctcagaattttacagatgtgagtcatccactttagtctgcagacacagcaccgagatacctgtgactcagctctcatttagaaaaagccctagaattcaattctgatacacttttatagttaagtagtgaggaaattacatactgaagcaaaatatgcctttgtaacgcgcagccgtgggatgtttttagcaaagactgatttatcttcatctctggcctttgaaagaatcgacctgtgatccacgctgggtaacgtgcccattgagcctgctggtacacatcacagtgcccaccttcttcgtgtttggctcacaacccaagtactaaattgtcctcaatagaaatctcagcctcaccctttctacacttggatgccccagcactaaggcccacttcctttaaccaaatacatgtacatatatgtgttcgtatatatgaaaatcttctgcctaaaatattaaaattctagttttcataagctggcagaaatagcttgcaaaggcttcatctccttcactctttacgtatgttaggggttagaaggaataaaatcatgttttcctacagtattctcatatttttagtaaaccctgcacaaaacatacatacagatgatgagcattatctttacacattagcagacggcagagtgagcccatgttctctgtgcagggccattgctttgttctgaggcgcagggctctgctggcctagtgaccctccccgtgcagcctcatgcttggctatctccctcgtcactgacacacactgatgacatagcctgtttggagttaagcctcagaacgtaacctgtccatttattcatttatttttagacagagtctggctccatcgcccaggctggagtgcagtggggcgacctcgg

SEQ ID NO: 36813 - DNA, 1580 bp, Homo sapiens
atgaaaccctgagcagagagactgagatcagtgaagagggactgaacctcattttgccctcaggcatattgagctctaatgccatctaaaaatagattcccttacagtgtgcattcagtgaggagcttgacactcagggccctctcctgtgggccccacttggccagttaatggggaggtgagaagacttcactatcccctagaacacgcttacacttttaaagcttactacatactttgtctctgggtcaaaggttttttcaaagatgacagatacctcttgccattagcaatctgtactctgggcagctctccattttctctgataaaaagtgaaataaatgaaaacagcgttttaaaaaatctataaatgggtgggagccagttgtcattttccctttccccctcctcccactccgttaactaacttaatgaggatccaagttgagaggcactcgccgaaaacagctggtagcatcatgcctttaaatagccctcgccacgcttccccttggcagcacgcagttggccctggcagggaaagcccaggacagaacaggaaactttagaactttctaaaaagaaaaaagcttgcctttaaaacgtgctcccttctgtgtaaggagcttgcaatgttgtagccccttcccctagaagtttacaaggaaagactaagctgatgaggcttgcctcgggacccagtgtgactctgggcctggggaggtaagtggagggctccccggacccgacccctgcccagctcaggccagcgtccagggcagcagtggctccagcaccatctgctcatcaggcacctgtgggggctatagtgcagctcagctgcagcctctccccttgatgttcgtagctgtaaggtcagggaaggtgacgtcctcacctctaacttagggaacattcagccctccctgaaagtggtactgggatgggccagactccacagtgcacatcaggccagagtccatgcagcagaggttggtggcagcctgtcgatctcagaccctctggagaagcggggccacaaggctctctccggccgcacttccatgttgctggggaaatagcagcaggtgaaacatatggaaggaataagtggccctcacgtctgggtggcagccaacagttgactgtctcctcccacacactgtcccatgcgagtgtggcatcaggtggccttatcacccctactgttcgtaagggaacagagcccagggcttctcctgccctgcccggccttgcctaggtctggagctctgtcacaccacagcaccccttttgcattaagggtgactgtggcgactgtggcatggtgccgttaatggataagggctttgaggtcctgagtgccagagaaggtggcggtttggctggctcagggctgtgctgatcacaagtggatggaagagggtgctttttcttactaactgttggcaaagtttgaaatttgagaatggactaaagtgttcttccttagtacctaaatattgtacctgttctctttctggagctgctgtctctcccaccttctttttttttttttttttttttttttttgagacaga

SEQ ID NO: 36814 - DNA, 454 bp, Homo sapiens
caataaataacaactgttctgagttagcttgaaagctcccagttgcactttgtttcaagttgtttgtgctaaccacaattttttttctccccttctttcccaccagggcttatttcaaaacctttgtccctcagttccaggaggcagcatttgccaatggaaagctctaggaaacaccagtcttgagaggtggccagccagactgcctgtccacatgcgtgtcagcacatacagccgcttcctggaagccgcctggaatgtcttcacggcagcgttttgctcacacagcagcttttgcacgccccaggcagccccgactgctgaaatccaacttgagctggctggtggtccctggatcctagagcccttcacttcgggttactccctctttcttgcctctatttcttagttggaagaaataaactcacaaattatggtgcagtaattttccggg

SEQ ID NO: 36815 - DNA, 4079 bp, Homo sapiens
agtggcaccatctcggctcactgcgacctccgtctcccaggttcaagggattctcctgcctcagcctcccgagtagctgggattacaggcacacggctgtaatccaccacgcccggctaatttttgtatttttagtagagacgaggtttcaccatgttggctgggctggtcttgaactcctgacctcaggtgatccgcccacctcggcctcccaaagtgctgagattacaggcaggagccaccacgcccagcctcaaatgatgctctattaaagctcattttcttgtggagacatgaactagaaagaatatgaagttgaggatgagagaggaaaaaaaagagaaggaccttggtttgtacaatttgccaatttctatggtgtaaatactccccccatgatggactgcaggccaccaatgtgaggtcactggacgcagagttgggaggagcagggagggtcatcgtgggagcctctgctggagtgagctggccccaatgtctgtctttacttaatctgagttttgttatcctcatctataaaatgggaataaatatctgcctcccggggttgtgagaattaaataagaaaagtacctagagcaccatgtgcagtgcttggcacacagtaacatttgacaaacagtggctattattaccgcagaccagaaaaaagattttctgatgttgactttggcctttttctaaaaagtcagaatgtccctgttaaaaagtcctgccaatgaatttggcctttggaaaagtgaccctgtctggattaccaggaagacaaaatgatgagtcatcttgaattttaacggataagagatgcgatgtatttgtgggggttccccaccccccacgctggtcttgcttaagctctcggcaggacttcaggctctgagcagtgctggagaagaaacaacccactgacctgtttattcgccccggcccctgctttcccacaggcaaggaaatcagagcagcgtggttcacttttgcctctgactgggtttcagttcctgacagctccacgctcttggagttgcggctgacttgccggagggacgactgcatttggtttgcctcttgctcaggcctataaatacaactatcccagagcctgccccagttcatggggaccagcctgtcccacagttcctaatgtgaatgttaagaacatcatctaatggtaataggacatctcattctattaatggcatcatagctaattcattggtgctcgaaaaaattaaaatacaacctttgcctttttttatgcatctacggtgcttacgtgcaggtccagtacaaacactaactagaaatcgggtgtggggtgcacccatcgccttgtgtaatcctcgaaacaactaaatgaagtaggggttattgtcttcattttatagataaaaacatggaacctcaaaggtgttaaataaataacttacccaaggacaggaagctggcataattcactcatcaccatcctaccttctcccccttcccctctcctttctttgcttccctcccttcctctttttttatttcacaaggaagtgaaccaggtccctctgtttctttccacttctgttatccagcttccccaaatgagagctttattgagcatctaatgtatacagagccctgataagacatttacacactgctttttgccattttccctgtgaggagaggggcttggagtagctgggtctggccagatcacacgaagtgggtgtcaaaccctggtcagctgggtccaaggaattctgtggggtcacatgcaacaaactaaaaaagacttggaagtggtcttcgtatatgtggatgagtatatctatatggctacacacatatatataaataacttattttcagatggctgagccagagccagcccacagctggaaaaaattaaaaaataaaaaataaataaacctgacttcagaatttgtgccatagtctctggttaaagtccaaaacacacttggttgaaataacagcctaatatttgaggaaaacaaggtgaaacagttgttacaattattaaggaaaattaccgaggtattaccaaagacagcagggtccgtgaactaattccaggttgaataggaagcagttaactctaagaggcctaaagaagtgtcttccttctacagcgttcttggatttactctgtcactattctctgatccctttggaggaaccacacttcccaagtctaagaggtcgtgcttggggtcataataaatcatgggtcatcatggccagaaaagtagccccacaagcaacccagggatggccagaatgagcctccctgccccgggccagccgcctctgcaacacgttgggatgagccagccaaatggcttgtggagggtgtggcatacactcatcttcccccaaaacagcccaccacccccttcttaaagtcccatggagcaggtccctccacagaaggctcctcgttccagagagcctctttgaaacgtgccctttgagtgagcctaggagccaggcaagaaagtgaaaatcagtccctttcaactccatgatctcgcttttgctccaaaacggaacgctgcagctcccggtgacttttggctgtctgcgcaggtgccagtagagcagtacgtagaagggtgctgggtgccatctggaaataaggtggtgggtgggtgttaaaggtgacagctgccctctcccttctcaagcaccatgcgtgacagtccaggccctgttccaggtggttcccacacggcgccttctcgatcctctgacccttcagagaactaggagagcccacccctgcaggcagccgaagcaatgtatcagggcaaatcctggggaggccaaaaatcatttgagtaaggcgaggtctgccgaataagagggccgcttacccagggtcagctctgaaagtgtcaatgagggacgtaagttcaagtaggtgtagggaaggattcgactgggactcatttcacagcccagctggggactgatgtcacgcccgaggacaggaggtttggggcaagggtcagcctcacactgccaggttgccctaggggagattccacaagggcgcattccctcgccacgcacatgcgcaggcacgcacatccgtgtgcacgcactcacccacaaccagggcttcagatgagctgatcccccgctatcccactccagcacccgctcctgggactccagcccacaccaggtgggaggaggactcctcatcctgactccacgctggtggctctcggcgtgcgtgggctgcaggttgtacaacccagacggctgcctctgcctgtctctcccgcctttctacccgcaccgacacccaggcggccccctgaggcacctccccttcctcgccggctcctgcccaagctgcccaggcccaggggccccctcagcctcgcccactccaactgccagctgtcagcagccagcggccaccagggctaatccccttcacaaaactaactccagcctggagccccgcttcagcgaaaccaagccctggcaaggcgaatgggctcgttggctgagttgaggcccatgggctctggaaccagccggcctgagtcaaacctggctccaccacttcctaggtgcgtgaacttgaacaagccagttgatctcagtttcctcctctgcaaaatggaacttcaccacgcggtgctggcaggaggactccatgatgagggcactgagttataagcattgtaacacttacaccagtgcctggcactcagtggtgctcagaaaagcctatctttattattattgccttttaggtttggcacaagttgctcctggtccctcttctcactccttcctttccattccatatccctgtccttaagcgtttaactgaccgaaaacaacaaaatcttttttggcctctcccatacgatagtccagtcctcttgctggagccactcccacttcgagtgtctctgccagctgtccacctctatgagctcccaggccctctgcccaaggctatccacctgccgcctccccctcctctcttcccacagctcccctgtaagcctgtgctaagcagcgcgacc

SEQ ID NO: 36816 - DNA, 1651 bp, Homo sapiens
catctcttgccctgcccactccagtagccctggctggaggccaggccacccttttgtccccatcagttctccttgcactacccactctgcattagtccgtcccaggccctcatttacaggcgggaacacttaaaaatggacacttggctggttgcgagcttggtgctcgggagctgatgagaggcacagaccaggcccccttctcggactcccaggctgggacattgaagcagagagctgtgtctacggatgggtctgcctgggcaaccagctctccaagagcagagcttaagctgcagtcctgcctggatgcagcagacatggctggctggctggcttccagaaaggtcaggctggctgttgatggctgacctcaccgtcctgcccaactggagaggttactgtggccacagctgccactgtagataaggttgcctggggactgcagtagccccatctctggctcctgtgtcactcaagcttggcctgtgagtgggcccggagcaggcctcacccagcccactgaggatggcaatggtgtcctgggggcctcgcatcttctagggttccagagccggggatggaactgggctctggacagcaggatggcagggaacaatgccacccaccccctccagagcctcccaaattaatgaccacaacaggagggagagcaaggagaattgtgaagaactgaggaggtggtggctggcccaagtctgtatgattggagaggcatccctgttggttccttccatctccacacagatgcttaatgaagaaaacggcttttcggtgcctcccagcagccacacacagcctgggcaggccccacagagcagcgaaggcccagagacttgactttcccaggcccctcccacccagagcagggcccacgaggcagcttctcagtcacgaatcagcctgtgaggctggcgctgcgcctgggcctcctgccaggggcgtgaggaagggagtgctgggttcagacactgtccctgccgcctctggctcagggctcactgcctgtggccgtgcctcttccccacctccaagtcaccttgggcctggcagtccagctcagagtcctgtcctgccttcactctggagcacctagcagccacttcactgaggctcagctcctgaggatggaggagcagaggacaggctgctgagaggagagggtggctggggactgggggcagagggagctgcacagggctccgagcaggcagctgtgtctacctaggagtgactcctggtgtcgatggatgactcggggatagagtctggggtctggaggccctgcagctggcacagcctgtccaggaacagtctagctgagctctgggagcccaggccaaggacagagccgccctgcctggttccctcccaggctctcccagagaccacccacgtgggccctatcagctgggatcattctccagccctctggctcaacccacaaacccactggctccgagctgcccaggcctccctccctggaacggctaagtcccaacagctgaccctggcaggcatctgggccacagggagagatgggagagagtggcttcaagtggaggagggtggcaccaccctggatgggcctttgaccctgaggacacagacttctgagtggggcccaggc

SEQ ID NO: 36817 - DNA, 7560 bp, Homo sapiens
tttcaagaccagtaagagagagacaaagacattccaacaggaggcaggtcatgccatgtcctggggaaaaagaagagcctggtgtcggagaatctcagctgcactcctaacagatcactaactcactaaccagttcccctggacaagttattcaatctcactgtcttcttctgcaaccagggaataatacccacctccagcgtttgctgtgagaatttcacagaacaagccctgtattcagcatggtgcctggctctgattttagcactcaataaagggtcacctctatttttagcattccagggagccagaggaccctttctaactggatgattctggaatgatttcccaaggagagggcacttggagactgaattctctgtatggcaggcacagttcgctgaggcactcgctcaaccgggggaggtcagtcccgcagcagcaccagggcacagcgctgtgtgtccggcgctggggggactgaaagggggtgagcgggctgcggaacgcaagcctcccggcgggcagagggagccagcacgagttctggagtaggagagggccgggatcaaagcgctctgaggcaggccagggcgcaccaaagggaggctagtgaattgcatcagcacagattccgtgatgctctgcagacgtctccaggctgctgggctttacgggaacccacaagaaaggaaaggaccggggagctggcagggcgagggcgggcgagggcgcgagggtgcgctcgcccgcgcgctcccggcggcgcctggccggggctgggcgcgcccgggactgcggaggccgcggaggaagctcccgctccccttcccccgcctctttccccccgcgttactggaaggactgtgtgggagagacccagaagcacccggattttcgaccgccaggtgggggagggcggggcagcctctactgctcaaaggaaaaccaaaagtgcgtctgttcgcgccgctccgacacgcggttgctactgggagggctcaggcagggcgctttggccgcgcctccctttgcagcccccaagacttggctagggcggcctgaggcccgcgtggcgcggggaggggctgagaaccgagtgggaaaatgtcacgatttcttctgtgcccctcccgtccctacccccacccccagttttctgagttttgctgctgccgctggggaaggactgattcgttttgcgtcaaaggactgcatttactcagtcctgctgggagaggcgcgtaaacacccaggcaagccaggacgcagggatggggagggggaagaaaaaagcaaagcacccacggccggcgcgcgcgtccgcctgccccacacccctctcctgggcctgcggagttggggactctgtccagcgggcagcagcggaggtgcgaggagtctggctggcctcgcctcgtcgcgcacgcgcgcgcgtccttggggatagcgttcaggacagaatgtgttttatagctgtaaacaatgaccccgagtattgtttgggattaccgtatcttggggcccttggggcggccagatgccgccagccgtcccggaaatgccagcgctttatatagagccccaggaaagcttcgcgttcccggctctatttttctctgctaccaacacccccactttgcagataaggaaactgaggacagaagttgtgtgacggtgcacagcgagttgtcagcaatggactctcaacacctcttaacattgggtcctcataaggaccctgtggggtacagatggctggcgctacttaagaattgggtaaactgaggctaacacagaccctggaccaaaacctaagttccctgacttccgctacagtacttctccattcacacacaccatcatctcagcggaaggattggagctccagagcagagaagggcctaaggtcatgtctccaaactccttcactttataggaggaaactgaggcccagagaggttaaggaattcgtccaagatctcacagctcgtaaatagcgtagccgggcgttcctgctctaaggtctgtgctctgtaccctgcgccgcgcccctcccagccccgcccagcgagggaggaggacccaaatgtccggcaacccgcgccctgaacttcgctccaaaacagctgaagacgacaacgttggggcacaccctctcgctggctttttttttttttttttaattcgtaacagtctggagtttgcttataaacgcccgattactcttattagatgcgtcctaattgcccggcgtatagggcggccggaatgtcttgactggttaatttcatcttcaaggctactcctaacgaattaactgtaggaccgaaaacatgaaaaacaaaaaacaaaaagggaaccggtaggcagaccgccacggagggaaaaataggcaggccagccccgcccggcgccgtgccccgccaacacccggccgcagggcggcgcgggcaccctgcgcgcccggggcgcccgctgcactcggcggcgccgcggagggcgcctacgaccgcgcgcagccgcgccctccctgcgagcggctctgcgcgcccggctcccggcctcccggtggcgccgcaccgaaccgcccgtctcgccgtcagggctgtgattattttctaaaatccggaggcgagacccgcgcggccgctctcggggccccgccccgagccccttcccagggcgggggagaggccgcagcgcactcgggagcgggcgagggaatccctctccctccacgtcacccgaaagcgaggaaacccgcactcgcgtcctctaacgcaaatgaccatctttggcaacgtgcgccaatggaacagaccaagggcgctgggcccggggggtgagcgggggactggggagggccggggctgcctcggcgcctccgaaccgtgcgtggcgcccgctcccgcccgtgccaccgcctggcttcctcgcgcggggtgcgcggttggcgtcagcgcggccgggagccggggctgggaggggagagctgcgcccgcctcctcccctcccgcgcctcttcctcctccgcggcctcctccccccgcctcctcgtgcgctcctccctgcaaggtggagtctggggttgacgtgagtgaatccacatggtacagggctggagaataaagagtgtgagttgaactcgtgccattgtagtgactcatctcgggcagagcgctagggctccgagcgaaccagcgagcgagcgaacgagcggcgctcggcggggacagaaagagggagagagagagagagagagagggagaggcgcggccgggcgaggcgggcccgtccgggagcgggctccggggaaggggtgcgggtctgggcgccggagcggggagcggggccgcgtccctctcagcgccagctctacttgagccccacgagccgctgtccccctggcgcgctcggggccgcgggacgggcgcacgccgccttctcctagtcaagtatccgagccgccccgaaactcgggcggcgagtcggccacgggaagtttattctccggctccttttctaaaaggaagaaacagaagtttctcccagcggacagcttttctttccgcctttttggccctgtctgaaatcgggggtccccagggctggcaggccaggctcgctgggctcctaatcttttttttaatttccaatttttgattgggccgtgggtccccgctgagctccggctgcgcgcgggggcgggagggcgcgcgcaggggagggaccgagagacgcgccgactttttagagggagggatcgggtggacaactggtcccgcggcgctcgcagagccggaaagaagtgctgtaagggacgctcgggggacgctgttcctgaggtgtcgccgcctccctgtcctcgccctccgcggtgggggagaaacccaggagcgaagcccagagcccgcggcgcggccggcggacgaacgagcgcgcagcagccggtgcgcggccgcggcgagggcgggggaagaaaaacaccctgtttcctctccggcccccaccgcggatcatgtaccaggattatcccgggaactttgacacctcgtcccggggcagcagcggctctcctgcgcacgccgagtcctactccagcggcggcggcggccagcaggtaggtgcgggccccggtgcacctggcggcgcgggcggacccctgccctcttctcgccgccactgcctcttttgctttcttttctttttcttggcgagaaaatacctacgggccaccgttgtaagttctggattttcgtcctccccttcccccccacccccttttaaactaggggattggagagtgggcttgaagagacaacatgcccttttcctctcacgttatattttacccagatagactcctggaattgtaggccccctaccaggagcctgttacctccttccaagaactactccccctccccagtgtctgcccccccccccccacccctgccccgcgtcttctctctgggtggtggacagacaagaaaatctttgcacccactggcacctctcgacatcctgggaccctattccttcaggaaagccctctctctctcctccccgttctccatcagtcataactcctttctgaaaggggttggggacccagaaacatggttggactccttcaagtaatctggagcgagggcgagggctgccgctctgggaatcaggtgcgaaggtcaggaaggaagaagccagccttggttggctcatgccgcctgtgtgccccctgcctgcctgcctgcccccccgccgacccgtcttctgtaaggatcacggacaggaggctgcactgccccccaggaacgaaggagcaccttgagggtctgggggtacctggagcaaggagaccggcagagggaagagggggtcgggtgggggaagagacatcacgcaggctcctgggtggttctggaagcagaaaacaacttgtttctaaagcagccggactggtttgcactggagggattgtgcgtgtgatctctgtgtttataaataccaggaaggtgctgttggcgggggggtgctgatggcgtgtctgccctctgctgcagctcccccacccgctctgtctcgagagagagctgggttaacgcaggcccaatacaacatgaagcccaccgtggtcagcatctgtggagtctagcatagttggctgcagcaagggatgctcatgctccataaggcggtggccttggcctctagaaggggctagggtgggcttccagggaggggtggactcagctggaaagaattttggaacgtggctctcttttggatctgatgggggggtcccttgttccaaagtgattccctatacctggtgagtccccaaaatggcttttctgtcttccctctgcctcccatggtgctcctataagcacccacagtagagacagcctagtctgttcattgagggtgcagtcaatgcacccttcgtaatgagcaccaaggtgatgagtttaaaatccgaaaagttgttgattatgtttgcttcccagccccgctagtggtttgtgttgaatgtaaacataatgagggaataggttgaagtctgtacccactccctccgtctcccgttcgacaaaccccaaacgcctgtctgtctcctcctccctgaaatcaggaagggatcttttgatttcttctctgttcttttccctaatgtgtctttagcagtgatcattggagtattacaatctcactgcctggtttagcatagaccctggggcctggagggaagtcagaccggacatcagtgccccaactgaataatctgtgtcactagggctttgagcccaggatgtgagcggaggcaattcccggttttggaagaaaatcagacaggaaaccagtgctaggaagaaggaagagaactcagtccagcagagtgtaatagggcctcattaccgaagcaaaaagcagctgttggctaattcctagcatgctgtaacacatgagtattttgcaattagcaataaccagtgcacggggtttcgcatagacgcctgcccattcggcccggcagtgtgtgaggcgcctttcaaaccggagggattggcaaggtaatgccacttgagacaagtttcttggcctgtccgctccttggtgtggtggtggttgggtgggggacgaggaggaactggtggatttttctgtcattgctccaagtgtgaacaaaattgttctgtggtcctaaggactgacctcagaggcttttgttccttcacaagtctatgctatgaccttgcccgatcttgggctcaaggtaactttactacataccagataaaacctgtaatcactttatttctctccgcttcctgtactggaagactttcctggcaattagtggatgggcctttctcttttatggcatctcagtggaccgatccatatgagacagttctctggtttttctctggggaagtgaattttatttttttcagctctctcttttgggggtccaatattcctgattagtttgttgccagttcttcaacccagagctttcccgtcctctctagcttcatgaagctggatcttaatacatggccatgagctccagtgactttgggggtggggggagcagactagtctttgttacagcctctgttcttatatatggcaggaacttgaggcatgaaaaatatttcctgttccagttatagttttaatctcaaaggttggtcattggtgattttgttttgtcagtaaccgttgcacacacctccccttcttggatttttctttttgctgttgttttttctctcctaactttcctaggaaaacatctcccagatatatgccctgcctggctgcttgactattacggtttcagggcctgagcattacgcaatccagccagttacacaaacataggtcatttcataacttgttttcatcagctgggcccccttttaatgaaaaaacaaaacaaaaacaagacctagaacttttccaaggctgctatttgtttctcagataacttgtgaaaataaatcaagggcagtatttcctttttggagttaaggaataccagactagcactcttcttcctcaaccaccccttcccaagacacacacacacacacacacacacacacacacacacacacacacacacaaaattccccagagtgaacttttgccaactgtaccagactgggacattcctcacatcaaagaacttttaccagaaatgactgtgattcccaagctagcctcaatcatacctctctagtgccctctacgggaaatttttaggaaaactatcttgggaatgtatttttccagtcccagagagtgttaaattggtgagtttggaattcttaggatgctttttctttttaatgagggacaaataaatgccacatatttaaccgtggttaactaggaactgcttgactttgagtttcttttttgttttcttctaaataaaacctggttaaaaaaggagtgctttttcgttgtgcacaagtaccctagaacttaaagtataataaaaaataaaaataaaaaaaggagtgcttttttcttttcctattt

SEQ ID NO: 36818 - DNA, 762 bp, Homo sapiens
caacataacattcccccctgggtggttcttaacctgtgtggggactccaggcccagctacttaacaaaatggggataatgaggcttgcagagcaggcagagtgatgggaggagaaattagccagggtttggaagaagctgcttaagtgggtggggccacgcctggctggcaggaggggactcttggagaagcatccccagctccttctctctggcctgagcactgaatcagggctgatgtgataggtgctgccatcatgcctgggccagtgaatctctgacccattgctgtcctgtttaaacatggactttaaacttggacatcaccttccggggcagattcagctcaaaagagccctcccaggcagccagacatcagggatccacatgttctggggcctctgagtccagccatgctcctcttgcccttccttctcctttctccatttccagaagggcttcttgccttacttaaaatacagtttttaaaaaatactgtgaaccattgtctctgttctaaccatgatccttggctttggcctctagctgtctcctgaagaggaggagaagcgtcgcatccggcgggagaggaacaagctggctgcagccaagtgccggaaccgacgccgggagctgacagagaagctgcaggcggtgaggaactctgcgtagggtgggagcacctctgggtgggctggagtgagagccccgggggtcctgatcctctctcccacagctgtctccttacccacaaatgccctac

SEQ ID NO: 36819 - DNA, 928 bp, Homo sapiens
cctattacattgctgggatgctactatcaaatccctgcacctgaaattccaggttccagattcgggtactcagatgtcccaagagaactcctcccagcatgaaagatctgtccagtccagctgcaaaggagagatggccagtgacctgccaactgtctcctggatgcaggtggccggccagaacacatggccaagacagggcttgcctccacccacctcacaactcattttgtttactgtgatgaagaggacagctgccgatggggcccaggcaggtctctggctggccgcccaaatcaatgggaatgtccaaattgtttttcagggagagcagagagtgaaggcttcaaagcgctcagccctcagagtgtggagctccagaagttccttcctgtgtcagccttttggcttgctgtggcccaaggactaacacacacatgtacacacacacacacacacacacacacacacacacacacacacacacaccctgcttcttgactccttctcccaactccattccagtcgttaacagcagaaggtagagacactctgacaactccatcctgattaaacatgccccatagaagggcatcaggagtctgaatagaagctgaaatagttcctgtttcagatcatgggctcttggcaaataagtggcacccctggcataaagaagtgtgaatatctttcaccccattcttcccactcaactatccagtggttgaatttcctctataacattcctaggacagaatggttacccaggctttgcttgaactcccccagtgatggggagcttaccaccttccaaagtaacatacctggcaattcttgaggcaggagggttcgttcttaccctggtccttccttatgccatcccatctgtttcctgcttggtcgccacaggtgaccgtatttgaagaca

SEQ ID NO: 36820 - DNA, 856 bp, Homo sapiens
tttccctgagtttctgacccactacagagaggccatccttctctgtgggcccacatgtgggcccaggacaacagtggaatggatctctgggcccttttgactgtagaccacatagcctcgctagctgggagggactcagcccactgtctgggtgctggtggagcttttctgggtccctagggcctggagagagggactccatgctctgaagagaatgctgtacttggaatctgacctccagactagcaggcctgtttctttctacttcccagttgggatcttgtaagcaagctgctgaaactccctgagctttagttttctcatctatgaaatggagaaatatctattgtctttttatgaggatcggatgacatcacttatgggaaaataccttataaaccaaaacacagtctacaaatgattaaccagtctaaatggtaagtgaaggagcttgtggagtttggagcttggaatttctttgtcccaagtcttgctggtgggtgaatgtctggagcagagttggttttaggaggactttggattcttcttcaagccttgtggatgtttcctggtaccccggggttccccagtgcagggctcagacctgttcatcctgcgtgacccctggcccacataaggcctctctgtgaggggactctaggtccaaacccacaagatcaagtttggggtggaggtcaggcaggtggagccagacggggccttctgttctcctcccctctcaggtgccccagggctgccagcccagatctgcacctgcacaacctctgttcattgcggcccgccatcactccctgcccagcctttaatttagacagaggtgaattctaatccccta

SEQ ID NO: 36821 - DNA, 1009 bp, Homo sapiens
tgcttcactccactaggttgcctttttaccttcttcatcaatctccaaccccaccctgaggcaaccaacgttctgatttctatcatcacagatcctttttggaatcatctcatatgcactcttttgtgttggcttctttcttccacacagtgttgacatttgtccatgttgcattgtttgttcatttttattgttcagtagtgttccattgtatgaagaaaccacaatgtatttatctacttatctacctgttcatggtcatgtgggtaatttccaatttttgctaataaaggaataaaactgctatggatatttttggacaagttgttttttgggtgaaaatctgtttttatttctcttggggcaatacttggttgtggaattggtgaatcatagggttggtgtatgtttaactttctaagaatctgccaaactgttttccaaaatggttgtaccattttgtgccctcaccagtgtgtgttacagttgcttcacgtcctcaccagcatttgctattgttggtcattttcagcttagccattcgagtgggtgtgaaatgttactgctgtggttttaatttgcatctcctgattaagcacaatgaggctgagcaattttcatttgtttactggccctttgtaatgttcttttgtgacgtgtctgttcatgtcctttgctcccttttatttattaggctttaaaaaatcattttattcttgatttgtgagtatttatatattctagataccagaactttgtcagatatatgttttgtgtgaatatttttttcacagactgacttgcctattttcttaaaaacgtctttccaagaaaaagaaaacaaaaatggccaggtgtggtggctcacacctgtaatcccaatactttgggaggctgaggtgggaagatggcttgaggccaggagttagttccaggccagcatgagaaacacagggagaccctatctctacaaaaaaaaaaaaaaaaaaaatcaaataaaaaccaacaa

SEQ ID NO: 36822 - DNA, 1228 bp, Homo sapiens
gattagggaccttccacagcaaccaacgctggctgccaatttcagagctgcccctgggcctggctctgctggattgaggccaggagtgcctgggtctgaggaatgcactcacctggagctcagaaggagcccctgcaccctctacctgggcagcccagaaaggtgttggggctgtcactccacactgagagggcatcaccactcaggggcttggaagaagggggaatgggtcaggacttttagttcattgctaaatgaagcctaactcccctctggggtcctgtggcctggacccctggtgcaggtccgcggtggccttgctcaagggagcactgaactcattcaccctcccagcagtcaaaccatgacacgcaagagcctcttactcatcccgaagtcatcagtcatgtttccaagagtgtgagtaattcagggagggagggagagagggctccagctgggggtgggatgatgctgaagaggtgatgtggcccagaaggagccctaattcttcttactccaaagctggaaatgctcttctttttgagaagagatgtctccttaatctgctcccaatggggtgtgtgtgtgtgtgtgtgtgtgtgtgtgtgtgtgtgtgtgtgtgtatgtgtagaatactggcagcttaaagaaactggaaaccaaagcaacaaggacttctcccttcattcccaggagctgagaaggtgtgctggctcagaggacggaggccaagtgggcactttttttacttattaataaaatatacattcagacagggcacagtagctcaagcctgtaatcccagcacttagggaggccgaagcggaaggatcgcttgagcccaggagtttgagactagtctgggcaacatagtgagaccctagccctaaaaaaaattgaaaaattagctgggggtggtggcacacaactgtggtcccagctactcaggaggctgaggtgggaggattgcttgagcccagctggtcaaggttgcagtgagccatgattgtgccactgcactccagcctgggtgacacagtgagactctgtctcaactacaatgcaatacaataaagtatgtactcatatttgcccagcactttattccattttgagcctttgaggggaacaagttaggtattgttatctccattttatagccaaggaactgaagctcagggcagtcatgtaagctgctagtgtcctatcacaggcaactattgga

SEQ ID NO: 36823 - DNA, 1112 bp, Homo sapiens
tgtgctggcctatggggaggggagtcgtattctggtttgctttttccgtttttctactgaagtgatggggaaagtgcaagctccaggcccccgggctgtttctcgggagacgggcgtttctggctagtgtctgaagggtctcggcgtggctgggattttaacccttcattttctttcttggacccacgttacagcgtcggcggagatgagaacatcggcaccgttaccaccctggcgagtgagtacgcggcggcggccgggatgtttggtttggggcggcccctgcacgcttcccgctccccctgcaggtggcgcgggcctcgggaggagccccggctgcaggagcccgctaaattcaccagggggcgctgcctcccgagactgccgcccagctccgcttccgacagtgacgaaagccttagagttgggggtggaacgaggttcggggcttgggggccgggggcggggaggtgtcaaaaagaaattgtgtttgaccaaaggaggaagaaagtaaagcggggaaaaagatcacctcttagggcaagtcattaaaaagtgattcaataatctggcatgagattagagagaataaagaaaagtgattcaagaaaaaagaaaaagaaacccggttgtgcggcgcctgcctttcccagcagatcacccccgcgagaggcatcgatccaggcacctggggcgcaggcacagctgcgcacagatattgaattgcggggttgctgtaggaaccgctgctattgccgcaggaggagatgaagttatcttgtgcaggctgtgcagacacagccattttgggactcagcactttccttaatttactttccatcaacctgctcggaatgatttctttctctttttttttttttttttttttgagatggagtctcactctgttgccaggctggagtgcagagtggcgccatctcagctcattgcaacctccgcctccctggttcaagcgattctcctgcctcagcctcccgagtagctgggactacaggcccccgccaccacacccagctaatttttgtatttttaatagagacagggtttcaccatgttggccaggatggtctcgatttcctgacttcgtgatc

SEQ ID NO: 36824 - DNA, 4095 bp, Homo sapiens
ggggagcagggacgggtggaggaagtggatgggggcagatggaagtccctagatctgaaacttcagcaggaggagcaggccccaaaccgaggtgaaaggctgcccagcctcatcctcttggtgactgagtttgccttttctcaggttcctcgggcatttgtgaacctggtgacggtgcttgagatcgtcaacctgagggagctgtaccaggagaaaaaagtctactgcccaaggatgatcctcaggtcagacagatacttctccccgattctactaagaatcctcactgctaagggcagtggcacccttagcaaattccttagaaaacccaagggccgaagtgtgaaagggctgtgaccaccccatcttctaacctggaaaagcctaaggggaggatatcctaggatttttccaccctggtgtaggcctcagcccacctcagggtgtgcatggggaactacccctgcaccccgcctctgttgccatggcagccacaaggcaccctccaggcctccagagggaagagtaaaacgctaggaatggagtcaagctgtgtgtctgaggcccggggaccgcccaggccactgctgggacctacttccaagtgtgtccagagctgatctgccccctcctagaggcccatctctaggacaggggtgcctctggttggtatgggtgttccatgtaaagcattcacagatatagggccactgtcacctgccagagaaggaggtcaaaccagaattagcagggtccagaggacagagtcctccccagagagtagagaaccctggtcctgagaaggtgcctgagaggacgtcttcacccctcagcctccagagccagacagagctggcttccccttctaatacaggctgagcatccctcatccgaaaatctgaaatctgaaatgctccaaaatccaaaacttttttttttttttgagacagggtctcgctctgttgcctaggctggagtgcagtggcatgatcttggctcactgcagtctccgcctcccaggttcaagcaattctcccacctcagcctccttagtagctgggattacaggcacaccaccatgcccagctaatttttgtatttttagtagagacggagttttatcatgttggccaagctggtcccgaactgctgacctcaggtgatccaccctcctcggcctcccaaagtgctgggattacaggcgtgaagccaccatgcctggccccgaatccaaaacttttaaagtgctgacatgacaccacaaggggaaaattccacacctgacttcatgtgacaggttgtagtgaaaacacaggtgcacagcacgcagtttattcagcatccccaaaaagcctccttcagctgcgatgcactctcttttctgggcatgcccagatcctgcggctcaagcatgcccacaaagggtagcaaaatggcacatgtgcaggccggatgctccaacaacaggttccccataatggctcatgtggggctaagacctgcgtgcattactcacctagtttttgctcattctctgtgtggtaaagatgtggcttaaaacgatagccatagggtaatgcaaatattccaaaaaaaaaaaaatctgaaatctgaaatgcttctggctcaaagcatttcagataagggagacccagcctgtatcacacatctccaggaccgtcaggaataagacgttcctctaagtgaagcatgaacgttttccgcagccttccttcctgcaggttttcctctggactgttagccaaggtcactgagactgtgctcccctaccctgccccccagctctgttactcggtacaggtccccaccccagccctgagcacatcacatggtaattactcatgtgcctccctcccccacagcctgtgaactcagcctgagtcactgctagcatggtgtaggggctcagctgctgtttgctgaatgactgaataattcacaagggccagacttgctcttggaagttaaggggtacctttcctgctcctctgcagatccatgccatgcctcacctgggggacccaaaccgcacaggtcccctggagaaggcctcacggtgctgtgagcagagacaggatggttgcttgggtgacatgttcctatgaacgcagctggtgtcaggcatgctatttccaactgctgactcatccgctggctcacactttctccagtcactgggccacacaggggatcggtgtcttcactccatttcagagcagtttaccagaaagcctcttgctacccatcttggcagggttttttagaccattcaaactcaaggttcaaaataggcatttgccaggcccattcacagatctgagatggccaagtcactgaatgtcaaggttggatagactcaggtcaccttctcctgccacctctgcagtgccctgcactccccgcctctccactgtttcatcgggtggctgtgctttcctctgcagtgctgagtctacacggagccatccctgctgttatcacctcatccccctggaccaaaagcccagatgtgccagatagctggccgggtcagagctgcagattggatggaagcagtttaacatagagattaagagctcaggttcagagccaggcagacttgagttcaagtcctagctcccacactcagcacccatgcaaccttgagaaagttactcaaccaccctgagcctgggtttcctcatctctaaaacagggataatgagaataccacttctagaatggctgggaggactaaacaggttaatacccataaagtttttattgcagtgcttggtacagtgttcaatgttaattattcaataataattgctaagatacactcaaatcaatgtatcttagcaattattattgttgtcactgcagtatgcctcatcggcacagcactttcctcagacagccgtaaggtgactcgtctccataaaagtcactcctacagaaatcagaagaagtctatttcattttcaagagcaaatccaggtctaggaatttttctttttttttttttcttttgagacagagtctcgctctgttgcccaggctggagtgcagtggcacaatctcggctcactgcaacctccgcctcccgggttcaagcgattctcatgcctcagcctcccgagtagctgggaccacaggcatgcagcaccaccccaagctaatagtttgtatttttagtagagacggggtttcgctatgtcagccagcctggtcttgaactcctgacctcaagtgatccacccacctcggcccaccaaagtgctggcattacaggcgtgagccaccgcgcctggcctggaaatcttctttagcttcgtttggtatggtcagcaggtcagccagccaggctcctcattagcacagatctctgaactccaagttaaaagaaatgtattgagtctcaagccagcgtttctgcatcacttattcaggatggtgatcttggtgggatgagggtttctctttggtttggtctacaggtctctgtgtccctgtgtcctgaagtttgatgataactcaacagaacttgctaccctcatcgaattcaacaagaagtttcaggtaagccgggaaggggttctaagacttcccagaactgctgtgtgattcgattgctctgtctagagaacaagtcagtgcttaggtaattttgaccctgtgtgggggatgaccactgactagtttgctgattttaaaacaccctgagacacagcaggggctgctacttggtttgtatgaattgcaccacagaaccaagtccctgaacatgacccactgaatctcagttcctggtcgttaaatgaaacgaacgtttccacttgtccatgggcaaacatggatcatggaaagaagtttcagagtggatctatccagacccaaacctcgactctgctcgctggttgtggaatgttagacacatgggcaatgaaacttctctgaacttccagctcctgggtgggaaacggaggctgaaagtcctccctcccttgaggctctccagggttcagtgacacagggtgcattccctctgccctccgctcctatagaatggatgatcttgggagagcacaagga

SEQ ID NO: 36825 - DNA, 1399 bp, Homo sapiens
agatgccgtacaggagggcgagtggaaggcaagactgagacatcagggtgggaaaccggaggagaggagggtggtgtccagaagcctggtcccaggggcaatagcagctgtgcaggactttctatgtgaattatctcctgagatcctcacacccttggacaggggcactgaggcttataagctttccagaaccaccaagattatccagcaagttatcagaggaggcaggatcagaccatgcctgaatcaggagcctttgctctgaccactgtgctattaccgcctctccagggcagcaggaggcgcacatctgccctggacccgggcgctgtccctgctggctccagctccacctcctgcccagcaggtcaaacgtgcagggtggctctcagcacctcgacaactgagtgcatgacccgggggatagctgccctttctctctccccacctcacttcagtctttggctctgaaaaagctatattctgacactagggagttagatgtcagggcccccaaaacagcatggtggctgtttgttttcactgggatttctgttgttgacaacaactcagataattaaagctgaaatgcctgaccaggctcattgattttctgcatggagcgtgctgggtgtatgccttgtagaaggatcactatgctccgatcaccagggaaacgacactggcttgactcactctgtttacagggaatgttcctttcagaagtggtaacgtgggccccatgctctgtttgagtctctaagccacaggaagcgatgtcagttcctcaacgtcacgagcaggaagaaattatttttctgcaaaaactgggctttatgaggtcattatagcaacatctaattactgttattattgttattatcatcatcattttgttgttcttgtacagtacaggcttcattttccaggaggtgatttctcactctgttgacaatcaagccccttcttcctttctcacttcacttctcttattgccttttctattttaccgctgctcagctcctctgccagatgaagtcagtggccagggaagtagttgagaacatggggctccttgtgggtatctctgatgtccaatgttaggggaaaggaaagtaatccattgacttaagaaagggaggttggataattgctctataactttcctttatctctattctgttgtttattagcatagatacagatgagttcacctaaagagaaacatacaaaccatagcagaacacctaatatcatagggtgtgggatcagatcattcgtgtctacattccagctccaaggcttgctagctgtgtgaccttgggcaagttgcctagcatctctgagtctgtttcttcagcaataaatagggataataatagtacttctcagggttgtc

SEQ ID NO: 36826 - DNA, 2776 bp, Homo sapiens
attctttgttccttcagcaatgcccaggtactgcgaggggatccctttgtaatcagataggttggctagatgaaaataccaacttctacctcgtactgtgtgaccttgggcaaacgatctctctggccacctgtatcaacatctataaaacagtgaaaacaagacaggtctcagacaacgcattgagatcatgtgtacatggcacctagcacaatagttagcactcagcaaatgtcaccaccatcagccttccaagcactccgggctcaactcatacccaactcatttctctaaacatcgaaaagtggagatccacacagcctgttttccgaggctgatacctattccagtcctttctgatgggaagaagggaccttatgaaatgaacatacagtctgggggtctttcagggacacctgcctggtgcttccactctgccttctgtggctggccaccagcaactgaatggtttccgcacagcacttgacctgtcacccccaacaactggatcctcttgcacggagcaaatgaaatgccttcccaacccaatggtttcttttaatccaggctcagtgggtaacacaatccccaccccaacctgtatgttccctcctttgtcctatgacaactaaacaagctacattccagctccttttatcacagtttcaggcccatagtgtctctgccaaccaccgctgtgcaaacgttcccacccctgtcagctcatccagtatgtccagcatcccactcggctgactcacaatattgactttctccttagctataccatctcctcctctctagcaacctcttcttttaagaacagcatgtaaactggctttatccttggcctagttaatggcagactcagcttatgtcgacttccattgtcagggggttttcctcctgtggacatcacgtacctgcccactccaagaacttctattgtactctttcagcccaagactccggattgtaaccaaaatgtctttgagtttgccccacgatttttaaatcagtttatatggtataattcctgtttcttttgtggattttgttttgaaggcggttgtccttcactggctgaatcatgtgactttattcctttgtaaaaatcttcccaaagaaagggtacctattccctgttccttttcccctgagacctcaggggattccacagatgcccttggcccttccttcccagttttttcatcaaggtatggccttcctaccaggtggcactccaagtctgcttaaatctgggaccctccaggaatctcctggggctggatagccatagtgacggctggaacatgaaaaagagtccattggtttcttttcttgtgaattaacaatgtagctctggccaggcacggtggctcatgcctgtaatcccagcactttgggaggccgaggcaggtggatcgcttgagcccaggaattagacaccaacctgggcaacacaggggagattctgtctctacaaaaataatcaaaatattagccaggtgtggtggtgcatgcctgtagtcccagctgctcagaaggctgacgtgagaagatcacttgagcatgggaggtcaaggctgcaatgagccgagatggcaccaccgcactccagcctgggcaatagagtgagaccctatctcaaaaaacaaatagaaaaaaaaaatatatgtagctctggccttctcttctaaagcagttcagtagctcttcccattcacccaggtaagaggcctttatttcataaagataagtgggaggagtttagatatgaaaacaaaacgtaaacaccgcactggagctattgtggaaacaaaacaagactgtccatggttccccagccattattatctcagccataccccgaatttcaaaataacaaaaacaaaactaaagccatccaggggtttcttatcctaggctctataatttggggaaataattatacagtctaatgttttcatccaaagccaatcttagacataaagctgtagcatgatgccaacttttcagatcggcttctggctggaatttcacccctagagtaacaaaaaataaataatagaccattagagctggaacagactgagaggtcatctagccagaacattctgtaactaaagcatagaaacatgaagcagtttgcccaacataacacagactgttcatggcacaagggggattacagaccaggtttttctagtcctttcctggtgacctgggcatgccaccaccctccccactgctcccaacctgataagcacatatatacccggtgaattcatgtctcacaattagagtcctatgacatagtgtctgcaggctttggctgatgttcccagggttccctactaggaagcaaaaagcaccttaaactatttcatcttatttcatctcctgcccctcctctcacgtccttctcgagacttttgcaaaggcaaagccagaagctccagcagcaccaggggatattttcctcttcctctgccttcttctgtcttcttatctgaagaagtttctctttcccgaggcctagtcctctactgctgcctctactccctcttctgcagaaatcctgctctcagccagtgtttgtatctccccaggtgctgggtgacagctccagcctcctaactgacatccctgtcttcagacttagagctcttagaatcgtgactctcagctctggctgcatattagaatcattcagggacattgtgtatgtgtgtatgtatgtgtatgtatgtatgaatgtgtgtgtatgtgtgtg

SEQ ID NO: 36827 - DNA, 1646 bp, Homo sapiens
cgatcatcttctgtgtgaattagttctgggttcctggaatagcatcgggaatcagccgcgctgacctttagcatttattctgtcactgttacgatagacttgagtttcctcagttcttaagaaagtggaaataatactaccttatgtatgtaagccaccccaatcacacgtgctttcatgccatcttctcatttgatgctcacaacaaaccaaggtgtcaggacaggatgtcatgcctgtccctaacctcagagaagtagccagcccagcactgcacagctcgttaccagcagagcctggatcccagccatctgcccatcgtgctcagtctagtcaccctagcatctctcccaggaacagaactgccctccctcctccaattgtgttactaaggaacgggtgtaaaaggccttcagacaacagaaagtgagatcatgggccaggtgtggtcatgagctcagatagtgaactttcacctccctccctggcaataccctgtggtcaggagcaggcagattacacaaagagtggaggctagacgttccaaacagactctgaataggtgacagtgccaggggctcattcttctcagtgctggccacaggttgggcctggctgctggctaaaaggtgccggggagggggatacagcagctcccagctcatcctcagagggtcctgggatcaaaggtatttacacccagggatatttcagataaatcttttcatctatgtggaaaacatacaaagtggcgcaagtgagaaactccgatttcctaaggttgacaagtcaagtgcagtaatgatgtcatggtaaccaatatgtttccaaactttcctaaggttgactagccccatgcactttgagaagttggtaaataggattgtcgtcgttttataaaattgaaaacacggtgtcttgcaatcacagccactcacaaaggaagccagagatggtcccagcccctccgcagacttcctgtggactcaggactggtggtctctcctgggccttgctgtacccggcaaatccaggggcacagactcagggttctgccctgccgacagatgctgcctagccttctgtgtgtcataagtcaactcccgctcagccccaggctgctgggtccctgctgtgggccaaaaaccagccacttcgctggtttctatcccccaccccgttcccgagggaggggctctggtgtgagacaccccctcagagaggaaagtgtctcccagctttggagagaatcgaggtgtcctttctctctctccagctggaaccagtgggccgcaagactacctccaacaacttcacccacagccgagccaaactcaagtgcccctctcctgtgagtaaacgtcctgcctgccccaggtggaacagatgcctggggtgggggttgtcctgtcccctggaagcacagaggagtccccggggatgctccctcaaatgcggcttcactcactgccgtcttctcaaatcccacctgtccccagtgccacggaaacttctcagtgtgtgggcagccatggagggaggggagaggacgttcaacagctccaaccgaagggaggacagtcgctcagggaggcagatgagcactggcgggtgtctcgggtcacccattccttccgaaagctctg

SEQ ID NO: 36828 - DNA, 1274 bp, Homo sapiens
caatgagcctgcgcactgtggccctctaggcccgggggtgggtcctcaccctaaactccctatagccactctcttcaccgccctctgccccagccactcccggccaccaggacatgcttcaatgcctggtgccataggaagcccaggggacagtcacaacttcttggggcctgggcttcttccaggcctatgctcctggaatggatacatttaaataaagtccaaagctattttattcctgggtttgcctgcgtgaagcactcaccttccatctcttgtgcagcccaggtgtgggagctgccactttttgtggcctgcctccagcagggctgcccaagccacgaccaaccagagcccaaactgcctgccaccacgagcatatcctcaagtcaccaaacccactatttcaaaggcagaaaaaatgctggtcaccaggtggtggctggaattttggagctggctggttgccattcagtccaatccaacacatacctattaagcaactgttttgtatccaggacaatgcgaagcactgaggtgcctcctaggctgtgcatgtcgcagcctggcagagaggtcaaactccttcaataaccaagaagccacgtgatgatgtgtaactactagggcatcagtaggtaaatgtgtctgattgttttaaagaatagaaagggttcttcggggaaagtttcttgggggagagcaaccttcacatgtcattttgggaaaaggaataaaaaatgattgggacacaaatacctcctatattctcaacctgattttctcaaggtgctaaatttaggaaaaaattcctatttctatatgcccaggtttctgagggaaaactagagagagtctgaaaatatgggctgcattcactgagcccctgctaggggcgaggccccgtgctggaggccttccacagatggtctcttttatgctgcacaaaagcccagggagggggtaaagggaaaatctttgaaaatagaagtgatgcttgcgcaacaccgtgaatgtactaaacgccgcaaattgttccatttaaaatgattaattgtgtatcatgtgaatttcacttcaataaaaaagaatccagggaggtagacatcatctgcattgtaaacctctctctgatcctgaagtccgggatgataaagagcctgagtcacaatcccggatgcaacactgaaatgctgtgccctgaagctgccttcgccagcctgagcccagtgtcccaggctctgcatctgtaaaaactggagtaagagtacaca

SEQ ID NO: 36829 - DNA, 1293 bp, Homo sapiens
acacacagtgcatttctttaagatgcagagaaatgttgtaataaaggaacctgttgaacttcgctgggtccagtatttcccatctttattgagcacagacccttcttgacacagagcatcctgcagagatgctctgttctgcattctgcattctacggagacattctgttctgcaggatgtcagcttgggaaacacagcctacaaaaatcatctgtctggaacttccctgggctctcactgccgtccactgaccggcctgccttcctccatggactcgggccaatgtaaacacttaaacctagttctgttttggacaggaagcctagaaacagcctctgctctatgcaaggctcagtatcaggctccactcttggtattcttggtctcttgcctagactccctctggtttttttgcccagtctctgtttgttgccagatatgagtccctgaccatttttcctggagaattctgagcctggcttcttaaaactcagactttggacctgatctgcttcttccaggcctgccggttggcacacctctacctgctgctccctccatctctgggtgtgacctctgatctactggtttccagtacctgtgcccctcccatctagaaacagccctgcccctcctgtgggcataatatctcatcactccaatgccagctcagctctctgcacactttgttggttaatcttcagatgtttttctaaagagttgcatttttttgataataaaataagcaatgacaaattgctagtaataaatctgtcagggcttgggtggagtctctgctggatggcaacactgtgtccaaggcaggcatcaactccaatgtgtacaatgtggtcaaaagaattggaggcagactatttacatgctggtcctagacctgtgacctttaacctctctgaacctcagttttcccatctataaagtgagaatactacctgtccctggctaccttaaaaggaggcattcggaggattaagatgaaataaagtattatgggctttttgaaagtgcacatcaccaaaacaaagcaaggtgcttattatcagtgctttatgactttgtgtctttctgtccacatcacagagtcaggatggggccagagtgaggcagttgttgatttattttgagacataaatcaatgtttttcaaaggttgactctacaagtttaagctatgaagtgatggtgacatcactggccacacccccatccattccagtgagttgagtttgtgtgagtgaagtgacccattcagtggctgcttcggcacagaag

SEQ ID NO: 36830 - DNA, 588 bp, Homo sapiens
gaacccaggaggcggaggttgcagtgagccgagattgcaccactgcactccagcctgggcgacagagcaagactcatctcaaaaaaaaaaaaaaaaaaaaaaaaaaaagaggtgtgagaggtgcccagtacactgtgaaaatatggagaacctgaattgctcattgaacatgtttgctcatgcaaggcagctgtgaagggcattacccaataaccaggcaggaatcaataactccctgtcagcagggtggcctggaatctttgacatgtacccaaaagcataaaagaaagctggccaagagaccagtatctatgctggcccagcctgcactttagacattgatgcgcctgaccaggtctgcctgtcccagctgcttctctatatcccatcccctcagtttccctacctgttgtctgtcctttgctgtccatggctcctccttctgaatgagctttttcttctcaggaatcaggatgctgtggaaggaggccttcatgctcccaaagccagcaccccagataggcaggaacacacctcaccaacctcccgatggccctcatgcaacccagagagtctgccaactcttgc

SEQ ID NO: 36831 - DNA, 760 bp, Homo sapiens
tgagtcctggctctgcccctagctcgtgtcatcttagcaaatgacttaacttcagagagcctctgtttcctaaactgaccaatggagacaaatacacctaccccaaaatacggctgtacggattcaacgaggtgaagtgcatgcaagggcttggcacacggtgagtgtcccatgagcgttagttgtgctgcttgaggcccagtgttccaggggggacgccataaccaagtgtcctcaagagccgttggctcccagggagagaggtggacatgaggtcacacatgaagagctcttggcagggtgcctgctcacagcaagcgctcagcaaacggcagctgctggaatgattaccactattttaagccttctctactcagaagctagatcactgtttggacccacatgggctcctcctcggtaggcttaggccaggcggagcacaccaggccctcggcatcatgccctttggcccccagagccccgtgtctccctacctctgcacagctccagacattagcctccaactccaggccccggagcctggagagaaacctgcttcccaacattactcccacattcctgctgcaagaatgcctttatatggcacagtcctgtgggctgagatttaattaaccctttacatgcctttgcaaaacaccacaccagagaacaattcttcctctgtccttggaaggtactgatgccaagagaatgttttcatttggttattatctcttgtctcctcttgaggagatgccgt

SEQ ID NO: 36832 - DNA, 649 bp, Homo sapiens
taatctctatggtaccttcaaattctaccagaatatttttaactaaaatagcatcatagctacgcttcgcatttttgcttttgcttttcttctcacagtcacataatcaaccaagagaatgaggcaaggagttgtggttgctgctgaacacacacatttatctagagggcaaatgtagactttggtttaaattcttctgatgaaactgtgtctcacacccaaatcccaagttcaacggactgctcttgagatgccagccgtggcggccttgctagggaggaggcccatgatggcctgtgtctgagtctgtttcattgcaacactcccagaaagccagccctgtcattaagctcacaaagtaaacactgtcctcagcaaaagcctgagttagcagtcacctaaaggcaactgtgctcctttaaggggagagctttcaccattcattgctccaccagtgccggccttaaaacttgaaatcaaacgcagggctcccaaggcgctggcctttcatccaaaaccaccgaaggctgtgggcaggattcagaattatgtttcaccagctggtccaggccgcagtttgtctggggagagaaacagacacagggaacaaagagatggaggtgggaaggtggtaagaaaagggcctttc

SEQ ID NO: 36833 - DNA, 1602 bp, Homo sapiens
caccagccagagaggtaagaaagcatagcatgtacagaggtctaaagcattggataagtaaattgaggaagaaaaaacatttttactggtaacgatttcacatgcatgaagccttagtttcagtgacatttacacacaccagaaagaagaactggacaaggttcctcttcagcacagaagtcactagaaaaatataactaatcacatgagggatgggaggagtttagaaagctaccagtttaatttcccttggcaaatcctgcagtgcagatttgctaagttccagtgtaatgcactctggtgatgtcattttagcctcggatgattgcacatcccaaacaaccatgtgactaataccctctggctgtcaccaaaagtctaaacaatatgagcagcagtgctcagcctcagcgtgctagcaagctgccttagttcctcactttcaaattacaatctgacttgttacatgtaataaacaggaggtgagaaaggagaaagaaaaacaagtgtggaaactattccatagtagtgctatgacctaacacatccatttgatttcagttggcaagggaagcagaagatccagtttgacacaagaaatcaagaatggttgcacaacaggctgagttgggaacatcctttatatattgtcagtctctgccatggccggtaattcactcaattgtgaacaaaatatcttacagagtagccaaaaagttttagaaaataatgtgcacttttttttttatttttttcccctttcatacctagtctggtagaataatctgcactttagaagggacggcttttctttctttcttttagacaaaactgtgccccttgattttggatcccatttatgctgatacttttaaataagcaattttctcatgtgcagtgggaattgacacctatctaaccaatttttattttgttgatgaaaactgaaagcggaagctagaagaatggggggattgtcctcttttctatatatttttttctttttgatgtcctttacttcaagttaagcctggtgtttgctttaatcacagcagaaagcattttccatttcagggaaaggagagaacaggccataaaccctgtcccctgtttgttctccaactacccatttttgtcctttgccctgccatgtcttttccccctcgtttgcttctcctttctttgttgatttctcagttcttttctggcctcactcaaaatggcagaaattacgcaacctagtacttttttacacaagctcctttagtgtcaaggattcatcaagtgcctgccatgtgccggaactgttctagatgccgagaatactaccatgaatgaaatagacagaaatcccggctgtcattgggctttgtctgagggccattggggaaggcctctcaaaggaagtgatagctgagctgggatctgagtcatgaagaggagtgagcccaggggacaacagctgcaagagtgtgccaatgggagagaccagcccagcaaaaaggagaagcataagtctggtgcattccagggacaggaaggaatggggcagggtgcctttaagagaaaagcatcagtttggatgaggagggatgtagggtc

SEQ ID NO: 36834 - DNA, 576 bp, Homo sapiens
tcggcctcccaaagtgctgagattacaggcatgaaccaccgcacccagcctccccaaacataaacataacatttttacatgagttgttgaaaaaggaatccaaatttaccaaatcagtaattaaaagtctaacctggtgaagagaaaacgcaggtataccctgggattagtcagagtttagctgctcagagttcctttctgtccagtctgcttcccagtggacttttgtccttccctcttatttccatttcccaataaactgagagcccacagtgctggcctgtagtgtgggaaacagcctgagttactgatgccaggcatggcctaaacagtctcctgtgggagagctatgcctaccggatccaaagtgtctacttggctccaccccatttcactcgtgtgccagtttctgctaaacatagcccagctcccagctggcaaggctctgaactatttttagctgggtccagggctcaggccaagagatctagataggtagctgagattcagctctagtgttttaaaaataataacctttattgtttttcttctcattataatttatgtttcagttta

SEQ ID NO: 36835 - DNA, 3613 bp, Homo sapiens
aaataaatttaacaaaacaacaaagagtgatgatgagccaggtcttcactcctgaaggcctcaaaacgaactggcagtgatctgtgaaaactacagagaactgcccgttcatctccacagattactgaagtctgtgaaaactactccagccaggaccaccattatagcctgctgcctgttgtgttcacaatcgatgcacaaactcaaccctgaaatggagagaaaaataggggaaaaaagacattaggaaatcctagctctatgtcatctggacattagaaagcacttggttggacaaagctttttctcccccacagcacatgcctgtttcagcatctcagcccacattcacggagagggagaatatagcaattgttaagaatgcagactctagcactgcatgctctgctgtttatttgtgttatttgggctaggttttttaaccgtctgtgcctcggtgaatcccatctacaaagtagagataataatagtacctacctcacagggcagttgtaaggattaaatgaggtaacccgggtgtaacatttaaaacagtggcagagtacatacagggatctgaacaaatgttagctactattagtgatatgtgagtgggggaagcacactgccttggacttgaggcaatatcaagtctgagtttctggaaaaacacttgtggaataagtaagggctggccacctcctaaaaccggacaaaagatctggcttgcctagatccttagcgtgactgcttctcctcctgcctttctagaggcagtattacgtgatggaaatacttggtgggtgctgtgggcacaaagataagttaatgtgtttttattccctaggagctgagtcgagagtaggagaaaaatgcataaataattaccaggtaggatgattaagcaatatactggaggcagcaacagaaacacaccgtggaaaaaaaatacccacggcgtggatgaagatatgagatgtgtgaaagcgctagacacaggcagccacctgcacccatgtaaaattggattattgctgactcctacaaggcccactttaacgcttctttcaaccagaatccctgcagaactaattttgtagaaccgccggggataaagacctttatttgcaatgtcgaactccagcagagtaaccccttttgctttccacacgcgcaaacccgggtcccaaacgctgcagttcgcgtttcccggctaacggaagaaacacgaggaactgtttgcagatctaggggatgaagccaaaaaacggaaagcgaggccgaaagggcgcaaccaccacgtctggaggaggccagtgaagtagagaaaggggaaggtcagccctgccccagcgcgctctgcgtaaccgggacttcctccgcgcggcaaagccggggaacctccctggcgcctgcgccaccgtggcgagactcggcgccgtggacgtggagagagggcgacgcacctgcgcgaagacggcagcgggagaagccgctccagtgcggttgcgcggcggcccaggcgtcgaggggagcctcggcggggagcgcaccgcgcgcctgcgcggagagctgcgtgacgcggcggcgcgcaagggacgtgcggagtgagtggcgctgcgggtggggccgtcggcggcgctggtgagctttgcggagctgggcggtgccgaggaggaggaggtggcggcctgggtctgacgcggccctgttcgagggggcctctcttgtttatttatttattttccgtgggtgcctccgagtgtgcgcgcgctctcgctacccggcggggagggggtggggggagggcccgggaaaagggggagttggagccggggtcgaaacgccgcgtgacttgtaggtgagagaacgccgagccgtcgccgcagcctccgccgccgagaagcccttgttcccgctgctgggaaggagagtctgtgccgacaagatggcggacggggagctgaacgtggacagcctcatcacccggctgctggagggtgagtgcgcgcctggccgcgggacagagggaggtcgggcaccgccgccgacccctgcgtccccgtctgccgccggaacgcgaggggacccctttcccgccccgagacgagtctctgggagcgcggcgcggcggacgaaccgaggagggggcgaggaggctctgggcgcgggggagcggcctctgggagcgcggtcaggggagatcgggggagagggggccgttcccgcggaccctcgggggccaggcccgccggccgaaggctgtgcggagcgggtctgcgggagacagcctttcggaaaggccgccgggctccgcgcgccgtggtgctcgcctccggtgacccgaggatggggagaggatgcctgccactgggctttgtgcgtccgtggaatcactgttcttctctgttctctttgtgcattgcccttggctgcctccgattgtcgttccgggagtgaattttacgtatatatatataaacctgtccttaacaggactgcttcgtctgctctgcatttttacacaatgctatatagaatggattcttcttaaagagaggataaaattagcgggaattaatctaccgtttgttacttggcctaaaaaaattgtaagacaagatatttgatcaggttgaagatgcacctaagaaatgtgatgtatgtagatgggtttgctgaagggattggcttttgcatttgatttgagcagagcttaatttctgcacaaacttagtgaaaatctatttttaaagcctgtcttgtattcgaaaggtatttgtaggtctacgcagcatttgaactttccgggctcaagtgttcttattgaatagttttatgttggtgggaaggcaaggggggaaaacgaagaggtggactagccgggagttaaatgtattgattcattgcaggatattattcaaagttaaatgcagtcttctgccaaacagtccctctaccctaaagttttcgtcatcaataattgttttgtgagtgtgtagaaaagcctttaatcctttttaaacaatttagaggcctctttgttagccgccgtccagcgattgcatatgtactgtttgctttcaaattaccttaagataattgctagagtgaagcagtatgtacttatatttggaaaatcatcaaagaatattgtaatgggggaggggtaattcctttttctcaaagtatgtgtcggtatctcaaacccaagttctgtgagtacctgttctgtaactaaatactgtgtatttgctccagatgtgaaagccatccagcagtcttaagactgaataggaagcaaaagttttaccaggaactcttatttaccttttcctttactatcaagttattcctgggaggccccctggtgcctgcagtcagtgttcactacctaagactttgtttcagatgtgaacatcttgctgggtctttgagaaatttgctttgaaaataattgtattttgtaactgttttatgagggaaatacagttaatttaaaaatgtgtatgtcttgtttacatttgggaagtagaggcctactcctttttattttttttttatttttattttttgagacggagtctcactctgtcgcccaggctggagtgca

SEQ ID NO: 36836 - DNA, 1886 bp, Homo sapiens
aacaaaattagtacttattatgtacgtagtgagttcacatcaccctaacagaaagttgagctattatccacattttacaaataagggactcgagactcctaagttaaaattaaaatctagccgttccctaatgctaattttcatcatgatatgtaaaagttataaccattggtttattttaaaagcctgagtacaataaaaaatccaaacgttctgagatgtctttgaatacattaatcaggactgagtactgcatctgtctttgcccctcctgaaaccaatacacaccttatctccatcgcattacctttgggaatgttatggcagtccctcttttcatcaatactacatagtcttccaaggctggcctcctcagcatgtactgcttaccgaaggaactcctcagtatctggccggggaacttccccacgatcttgccgaacgggactgccccccagttactatttaagagtccgaagttgttcaacctaaataatttcttaaattttgtttctccctccccagtctcagctaaaatcagttccccagcctgaaagggtctctctctggaagttgaacaagaaggggagacgtgacgctcttcgacctcggtagcggactgggcctgcgagagcatcgaaggatcctcggatccctggtgtgtgggaccgcaccggccctggtctccgctcgagtcctcgagctctcgaggggatgactcttcccgcagcgtcggcagtctgaggttttccagtgacgaaagacatccagtcccaatgtccgagatgctcagagggagagatgggcaagactctgctcctggggctttcctttgtgccgcctcgtgctctctttctccatctcgcaggtctctaggcgaggacctgcaacacagtgaccgagctccctcgaagggctcctgccccaggccgtgcaggaatgaattggttccgagcccctgccgcaggcacagcaagacaggaccgcggcaccatgccattagcatagtgtttcgcgaaggcgccgtcgcagacgagtgacgcaagcctagcgcgaccccttctttcccagtcgcgcgcatggcgcagcagcccgatggctctgcagctgcgtggggctctacagctccgcgactgcgcctgcgtcggggagggggcggtgcgctaggtcaagctagggcgcgggagcagcggagtcctggttgagtgaccatccaaggaatatgtcctcgcgcgcggccgccgttttccttttcggaatgtgggtaaagaatttaccgctaacagacgacctccaggttcgctcttggacagcaagattgagagacaaaacttaacaaagcgctgtgcaaactgaaatcccaggcttagctcgcttgtgtcttgaacacggaagtcacctagtcacccacaagatgtatgagtacagctaacccccagatgcatttgacagacggcgtgggacgcgccacttgctgattggctctcctttcccagttgaccgcgacatcccccagccccaactcccttttgatggggctgtgaccacctgccggtcccctcacccacccctcacgcccggagagtccgaggttgattcgagtactcactatgtgcttatgtaacacatgttttcattattaaaatataactagtttaccctcccaaaacgaaatagaagtgtcttaaaatggaaacaggtatctttggaggccagagttatttagcgttaaatatcactagcctcccagcattttgggaagccgaccgaggcaagcggctcatttgaggtcaggagttcgggaccagcctggcaaatgtggtgaaaccccgtctctactaaaaatacaaaaattagctgggcgtggaggcacgcacctgtaatcc

SEQ ID NO: 36837 - DNA, 1799 bp, Homo sapiens
acaggcgtgagccaccgcgcccagcccacggctaatttttttatttttagtagagacgggggtttctacatgttggtcaggctggtctcgaactccgacctcaggggatccgcccacttcggcctcccaaagtgctgtgattacaggcgtgagccaccgcgcccggccccccccctttttttttttttttaaaggaacaggacttgatcttaattctacaattactttctcccatactcccactcccgcccagaacaagatagcgacaggccctagcgggccaccgtccacagggcggatccgccagaagctctcctgcgacgcgaagatccactccctgagcccccggcgctccctccgcctcacttcctcctccaggctccgccccgcgccggtgcgcctgcgcacggacgaacacgtggctgcagcggggccagagcagcaatggcggcgggcggcggcggtagctgcgaccccctggcccctgctggggtcccttgcgccttctccccgcacagccaggcctacttcgctttggcctctaccgacggtcacttacgagtatgggagacggccaacaaccggctgcaccaggagtacgtgccttccgcgcacctcagtggtacctgcacctgtctggcctgggcgccagcgcggctgcaggccaaggtaaagcgagcgggactgcgcggggcgggcgccttcccgggctcggcttcgggcctccgggccgggtggcgcgtggtccggcatcgcgcgtggctctcagcggcccgggccagaaggcttggaggcggcgtcggcgcgttcagggcccaagccgccagccccgcgtgcggcctgccgcgagggcagtgagggagggcgcagctcgacccggccggcctcgtatccgagccctgccggctggcccaatgaggcctgggccccactgttgacgggcagccatgttcgccaagtcccctggtccccctggggcggcttccttctgccgggccttggctcatcagagttctggtttttgacagagccccatcttgggactatctaactttcctctgtctgtgatccggctcatcagttttgcactgggcagttggtatggactagtctgtacttgcttccggaccttccccctcctgccccccctttgggtgccggctcaccacgtgttctcgtccccgtccaggttgtgggactctcaactcttaacttttgcctttcccaggcacctctacattctcagctttttgaactcactgctttttgattttaacatctgctcgcccctcccgccccgctttcaagccgatcacactgctccccacccaccccaatctgaagtctgtattaggatgtggaggttaagtgaagtagtagcttgatttagtgaatgttttatgagtgcagatgaaattacccttagatggaaaactgccgagttaggcagagcttttcattgttagggacccgtgtcaggtaaatgcctttcactgttgagtcactcagctacatctctctaactcagcatgcacgtggttattgcgtttacagagtagccaaaccgaatcactgcaaagtgatttggaaacatcaggtatcctgaggtgtgtgatgtgagctgtttcaatgtggagaactgtaaaagctatttaggatcttactctctctgacgacctgggaagcctgctaaatttttgggttgggaaaagggatacatataagttgctatactttgggcatgtttagatatttttcaaattttaagctacattttcatagtttatcctgttgattca

SEQ ID NO: 36838 - DNA, 1155 bp, Homo sapiens
tgctaaaattagggcctttaaagggaaataaaaacgaggtaatgaagacattttcccccaggcttgcccatggccctgttgtagtttaatttgttagagattcctgcccgacctagagctgtccagaaagttcaacagagagaccagaagcagcactgaagtcgagcgaggactcggcagctcccttagttggtcgtgtgtggtcatgatgttccaaagctgggccaaagctttgttcttgtctctagatttgatgcaatttcacagagtcgaattgctaaccagccttccaagagaaattgtgtttgcatgttgtatttatttgcgacaagtaacattcctctcagtggagcaggatgttctcgttgggtggtgacccttctttgtactcaggagagttgcataataaaccagtttcataactggaagattgcgtttggaccagagtgtggaactggggtaagagaaatgaactgggtggccttcgtagctggtggtgtggacgaagcctggcctgtctgtactgatggggttggagttcttgactctgttgtgtgttgtgctaggtcgtcttactgcctgctgaccactctccttttgtcaacaggaattgtaaacaaacagttgactggctggaatttggatgttttgagtctcctcaggcacccacttagggttgctggtcagggtgctttctcatagtttagggatagcttgctggtgagcctgggttccctaggaatacggttatacctaaaaaacaaactggatagattcagccagactttgaccttgttaattcatgactcaacctcgacaaaggcctctccctttttttttgtggcaaaatatacataacatttaccatgttaatcatttttaagtatacagttctgtcatgaagtatagtcacattgttgtgcaactggcagtctttcatttggggacttttgtggtttgatgaggtacaagaaataaaaggagggcagacaggaatgcaagtcagtctgttgtgagaagagactgcattggggtccagaagctgagtgctagttctgggtccaccctacagtgtggcagttataactcgacttcttttttctggagtgtgacaggagagtaacagcagtgccacctgtctcatggatgctgtaa

SEQ ID NO: 36839 - DNA, 1646 bp, Homo sapiens
tttttgtagactcttatgaacctttccccactcacctccctgtgtagacatcatattttcaggatctctgtcagataaccatttaacctcttgcatgtcttcaatagtgggaaactaacaaaatagttaattttattgttaaaaagctttagttgtaataaaattgttttcgtatgttgactcaaaattggtctccctgaaattttggccaagtgattctagtttgatacatggcacaaattcctttataggatagcctttaagtatctgcagatagtttgaacattttaacttagcctgaaactccttaggctacacatttctgtttccttcaccagtttctcattgtcaggatttctagacccttttcatcgtagctgctttcttggtacactgtggtcagtctccccttgaaaagcggcatatataattgcatttattgagcaagtatttattgagggcctcttgtgtgctagggactgtcctggatgctggagatatcagtgaccaagacaggtcttctatagggaagaccagtaaacaaacaaatgaatagacaaagcaaaaataggtcataatgaattctgtggaagaaagaaacagggtgctgtgatagagaacaatgggggcaaggcagctgctttagatggggtggtcattcggagaatcagaagaggctggctgtgagaagagcctgggaagaagtgttccaggaaggaaaacagaaaactaaaggcacagtgttgagggaagaccttggtatatcctaagaattaatggaaggtctttgtggctgagaagcaaagtgattgatggcagagtgggaggagaaggaattggagagtaagacaccggccaggtcatgcggggtcatgtaggcccccatagggaatttttatataataccaactaatgagtgtaaaacaaagaaacaaaaagaaaccagtccacagaaaccagagttgaggcatgtgactcagtgttgactctcaaggtgattaccctgtgaaactatgtactgttcttgcataacaatttttggaatcttttgctttgaaatgccttcagaatcagttcatgcagaatacacattatatacattataaataccaaaataccttattatatattttgcttaaacattgaattatctgttaaatttaaataatataaaaaaatctcatttacccatgtagttaccatttctagtgctcttcattcctttgtgagtgtaggtccagatttccatctgataccatttccttccgcctgaagcacttcctgtaatgtttcttatggtgctggtctgccagtgatgaattctttcagctgttttatgtctgaaaacatctttatttaccttatttttttgaaaaatgtgtttgctgggtttagaattataggttggtagttttctttcagtacttgaaagatcttgctctgctctcttcccatttgcattgtttctgctgtcatttttgtttctctagatgtaatgtcttttttttggctgctttaaagagtttttattttgagcaattttactattatgtgcttaggtattgttttctgtatgttcttgtgcttgggtttggttgagctgcttggatctgagtttcagttttcattaagtttgggaaatcatt

SEQ ID NO: 36840 - DNA, 1357 bp, Homo sapiens
atcttatagctttcatttccaaattttagccatgtgtcaattaaaataatacaaagcttattggtttataaaagaagctggatccaaattgtacctgtgagagatggaacaagtcaaggttacctgctcagatggctacagctttttagtgaagattttttttttatttgagtgctgtagggatgcttttagagaagctatttttgagtcattttgtgttcagcagcttctgcatacaaatcaaagaatgcattccattgtctccaaaaggcttaggatactcctccttcaagggcactcccaaaggcagactatcttacctaaattaaaggttctccgaagtggtcactgaaattgcaaattattctttgtaaagttcacctattttttcttgtgaactttgtaaagttcacaagattctgatccacagtgtttttggaccccatctttgcattagattctctgaaaggtcttaactattaaggattcttttttcagcagctgctctggaacacagggaatcatgtgtttcacccttcccccttttgaacagaataggttgacttcctgagaagtttcagcaaaggttgttcagcataattggagagttctacacagaaggaggagagctcagattcaaaagagacttactctagaactccatggctgggtgagagagcagccagtgctgcggccctgggtaccagcacctagttactggccttggggcttcacaggggtcttcttctgatcctgcttctgacatcaaaaactgtcaaaagaaaattcagggtgcttttcttaatataaatattaagttagtaaaaaactgcaaatagggagacttccaaatcaaaagtggtaagaagcttgtctcacgaaggttatagtaaggtttataaagcctagaaaaggaaattcatacagcttaattctcactggttagaatgagtgggttagtttagtcattactgatttgctgcaatgtgctgagtcatgctgaccaagaaatgaagttcaagcttcatgtgcagtttaagtaggtgttttggagaataggtccttacaggttttcctgagctgggggtgggactttggctcagaggccaaggtttgtcttggcttctattttgatttttgcctaacaggaccattttgttgtctaagcttacgaatgttatcacatttcagttcaatctttctgattctcttctgatggactgctgctctgcttgtatatgtgtctttagtttggtgcctctcatcttttagttatgctgactctagaagtaagaactatgtgtacatagtataattttggaaaatatataaatgcaaagaagaaagcaaaaacaaa

SEQ ID NO: 36841 - DNA, 839 bp, Homo sapiens
taagcaggtattactattgccattttgtgtataaaacacaagaggtttggagatattgaataactttttagagacagtcattacctttccaaagttacaaagccaaggggatatcagcaagttctacctgggagctaaagctgctgtacaatggggtgatctgttttgcaaggtggtgagcattctactgctggagtcaggcaagtcaaagccagatgggctttggaagagcctcttgcattgttttggggtaggggataaagaatttgaattcaattacttttaaggttcatttctggttcatgattccatgattgaaatatttttcaagttctgctagctagattatgcctttaacccacaaacagtcatgtaggattgtgaaattggagaggcagtcatgggtgaaggccaagaactaaggaccttgggtatatgatgaaatacaggagtttttatttccatctgatttctggctttgccaacaaccacattttctggctcacatcccacacacaatgtacctgctgccaccacctcctggaaccctggagactgtccgtaagttagacaaggtggcagaggttaaacaagaaagttgatagacaagtgaggctttttagaaatggaagtcatctggatctactgagaggatgagccaatggtcactaggaagctcccagggcaggtgaccaggccactgcgagaaaggctggaagactccagatagggaaatcactctgaggcctgcaggtgaacatccagcagactgccgattagaatttcatgcagtcacagagaaattttagtcctaagacagagaaacaaaatcatggagg

SEQ ID NO: 36842 - DNA, 1033 bp, Homo sapiens
tgtctctaacctcatttgcaaccattttccctcattgctggagctcagtcccacaggtctccttgctcttccccgaactcaccaagcacattcccaccccagggcctttgcactggcagttctctcagccgaggaagctcctcctactcagaggtacatggccactccctctctctgtccaggtccctgtccataggtcaacttcccagaaagaatttccctggtcatcctgctgagagacaactcattgtaagccactcccatccctttgccctatttcttacacatatatgtgttctgtatattggtttattcattgtgtacctcctgcactagtcactgctatgtctccatgcctggcacacagcaggcactcaataaatatttgtcaaataaatgaaatcagcgccctggaggaaggtgttatctctggcacttattagctgttaacttcaggctaagcacacactctgccaaacctcaattttctgaaaacgatgacgagaataagaatagggcatattctaaaaattctcagggttttgtaagggccacatgagataatgtgtgcatgacacagtctttcagtatcagtcatatcattcttaaaattgtatgctcctatctctgttttagaatccaaaatgagtgggagtcttggtctcttttctatatttagatcatcttgtgtcaataattacaacgtccagaaatcaaaagtgctcccagagagctgcttcgctattattcactagttaatcattaactttgccaaatgtacatgatcacaactacccaaattgcagccgattggcactgtgtatttccaatctttatttttacatgtctcactgcatgtctatttattcctaagccaatgaacataatataataaatatatcatacttgtgtcagtataagtaatgaagagctatgcatgtgtgatggttatttacatgaatgccccaggctcactggcaagcatgttttacaaacctacatcaataaaatgtaacaaatgctcctattctaa

SEQ ID NO: 36843 - DNA, 1506 bp, Homo sapiens
aaggcacaacagtgaggaatattaataaaggaaattgttagcatggtgcctacccttagggatttggttaccttcaggctatcctataccaaaaaaaaaaaaaaaaaaaggaatcacaaagaggttgctccagaatggctaaagcgtgtaaatctggagcccaaacactctggccactgtttgccttttcagccttatttcccattcagaatccttcctttcacattctatcccattactccttagtctccaaacttatgcccaagctaatctctgcctagaacatccttctccaccccctgctttcctaaatcctaccccttcttaaaggcccagctcaaatccctcctcctcaaggtccctgtcttccctgagctggacaccaaagcagttgagctgggattcgggttgtgccagaacaaaacctgaacttgggccctgacctccttaaccacttaggatagtggtgttgaggccattcaacaaacatgttaatgacgatggattgtaattgcatattaatttcactcacacaacttaagtttcaggtctgttgtttatgttgatttcttttctttttttttttgctcattgatttagaaaaaattaggaaaagcatttcacagtggctgtttttggtttggtgtcatgtaggacatgctttgcaggggcaggggcagatcaagacatggacctatttcatcagttgagctaccacatctatgcaggtactagtgactcataattcatggccaaagtcctataacgaaggccatgtgacagctgatgcctcctcttcagaacctgtatctctcagaatttgatagttccaggtcactcactgcattttcacctttccagacatgatttcagcatcccaagcaagcacctcctgactcatccatgagcgtcacaatgtctcctttggccctgaacccctgctgcaggtgtgcttggtcactggccctacctaactggccaaggtggactcacactggcttttggtagctgtggaagactaatgggcatttttattttactaatccaagacagcaaatatcactctccaggtggcctgattcttaacacacccgcactccctacccccgtaagacctgagtgcttccattagcagggcaacatgactctctgtttgggtccatttctgtggtttgcttgtactctgctctttatgaaatttactccactgtgatcttaagcctattttctccccccaaaatatgttgactagaataataatcaaaaggaaggctttgaactgccatcaggcctttcatcttgtgatctcagagagctttaccaagcactaaataattaatatactgaaagcgatacaaagacacaaagacacaaagacagggcagcctggaaaaccaagtccatcaacaaaagacctttttcttttggagtgagagagtcctggtaaggataatcacccaccagcaggcccaggagtctccagacatgttagacaagaggctacaa

SEQ ID NO: 36844 - DNA, 1775 bp, Homo sapiens
tacctaggcagctgtttgtctaggaaacagcttattgttttcatttgtcatcaccgcggctcactaggtatcaggaagctcggctccagccgctacctggtgacgctaatgacgtgcgatgtctcgcagctgccgcaattagacaggccaagccttcgcctttaagaagctgactcacgtggatgctgtgttgtgtgcgctcagctgaaagggggaggtgggtccccagactgactacattggccgcctcgagagaaggggcagagttagcctctttgattggctgtacgagtccgaggtgctgggtcaggggcggggcgagctgtcgcaagcctgccctgggtctgcggcttctgagaggggtgggccgcgaagcggaggggtgcgggagtgggggagggtgagccagagaaggggcggggccccgcgaaaaaggcaggaggccgaggacaggggcggggcctagaaataaagggcgttctgggccaaccgggagagctgactgcgggggggcggagccacgccgggtgactgacgttgaggcccaaccagggagaggcggggccaaggccagggcctgactaaacctggagactcgggtggccgaggggcttcataccagctgaagagcgacaagccgctggcagccgcggatctcaccgccgctcagggtgagtcccgcgggaggggctggactcggggccggtggggactgaggcgcccgttcgggtcgggcggcttcgaggcactcgggaatcggcccagggtggggggcccaggcaggaagtgcctcttcctcgccgcgctcttcccggggtcccagagcggccgccccagatccttcagggtgggccccggcgctgggaccgcgggcggacgcgcggggctgtttgctctttgtgaggcctggcgcggcggccgccgtcggcccgcccccgccgcgcagccgggcgaccggtgcgacaacagccgcaacccctccgcgcggcgcccgcgcctccgccccgtttccccgtcgcgtcctccgaggcccgccgccgaggcccacggcgccccctgggcggacggtctggccgcgacccccaacccgccgcgccgcgccgcggctgccccgcccccacccgtcgcatagtcgggggcgcgcccggtctccgccccgaatccaagtcggaacttgaccgagttgtttgggccgcgatgaccgcacggcgtgaaccgtcctgagcagggcccacgcccggcccaagcggcccagccaccgggctggggcggtgtctccctttgccccctcccccccatgaacgtccgcctcccccgccctcctgcccagaggacccgggactgacagcgcagggtgacggttgggcagcccgccgggtgtcgggaccaagagagccccccggccacccgctcagctgtttcctgctcgtgtttgttgtgccgagggaggccccgccgccaccgccgccgccgcgctctgccgccccggtccctcccgattggccggctggcgtcacgtggcctccatcagctgggccggcgggggcgctcgcgggccccactgcggctgccgggtgagcccacccgggggtcgcccgggccggcccagctccgccagcttcgggctgcggccttccctccgcttgcagtcgggagggtgggcgtgcccttgcaacccctttcctgtaccttctctgcaggtagatgggacaaatgagtgtccggatcagcgggagtgggaaattgaaatactacaaagatctgtttaatcctga

SEQ ID NO: 36845 - DNA, 988 bp, Homo sapiens
tatgtttcaaacttacatcttttcagtgtttcagcacttttatgatttattgaatcagtaagatttcttaaagataatcaagttatgtatgggaaagcttatctttcccttattctgttctcattgctttagccttatgccagcctggaccatcttggaggcagtgtaggatcatggaagaactttgaattaggtgaattgcattctgtacttttctgtagttaacagctttgtaacctttgaccagttaataacctttttagccttgacttggatgatctgtgaagtgatggtaacaacctcacagagctgtgacaattttgaaataagtacctagtaacagtgctccctagacattgacttaaagttagtcatcacctctatagttgtagatgcacctggtgatcacagacctactcactctgtgttctcaaaccagactactctcttcttgttttctaattgcccctttatctacttgtatcccactgaaacctcacaattcttttctgaaattatacatgctcagaacgtatacttaacatttatgctaaaccttttttctcacctctctgccagtgctttacatcattcattttctgaaattccactttccattttctttttccacaccagccataagagaagtgacactattctttggccttggctaataggtttacttccttggctcactgctttaaaatcttcttagcttaggcatgcctgtttatttgttcagtgtgtgaactttggatctttttgttcaggatcagctatttcacacatcgagtactacaaagcagagattacataaatacgtatacaaattgttctctatgacaccccccaagtaggtgctaacatgattattataatgcatttgttatccttttctatttgctcctaggtttttagaacttcagccataaaaatgggcagaattttccttgatcatatcggtggtacccgtctgttttcttgtgca

SEQ ID NO: 36846 - DNA, 735 bp, Homo sapiens
cagggtccctctgtgccagtggggactagagtacaggagaggagggaagaggtttgccagagaggtctgcagacaatgggctttgtctgttgcggctgagccctggggctgtgggcttgcaaggcgcttcctcagggtgtgagcttgttttgctgcaagttctgttttgaacacctctcttcctgtctccagacagtcccctgatcccacagcagtgaatgcatgaagagttaggaatgtgaaagcgcgtgtgtttgttgacttttggtctgggtttcttggcagccccgactatctgagatcggccaagatgactgaggtgatgatgaacacccagcccatggaggagatcggcctcagcccccgcaaggatggcctttcctaccaggtgagtaagtcctggctcccctctgactctctagagcctagtggtttttgctgggggtgaggacagacttggttttgcatcccagtgccacatataagagctgtgggactgtggcagagtcccctaatgccagtaagcctcagtttcttcatctgtaaaatggggcaacaatcgtccttatctcctaagattgtggtaaagattcaccatgacaagtggatgtgtaggaagcattcctagtgtctgggacagataagggctcagcaagcattagccattgtgatgaattgaccctactggctctgtgaactttgccattcaccgcagcaaaggaggaaatgatttgt

SEQ ID NO: 36847 - DNA, 1596 bp, Homo sapiens
caaaactcagctagcactagacagactttttttttttttttttttttgagacggagtctcgctctcttgcccaggctggagggcaatggcgcgatctctgctcactgcaagctctgcctccctggttcacgccattctcctgcatcagcctcccgagtagctgggactacaggcgtgcgccacctcacccggctaattttttgtatttttagtagaggcggggtttcaccatgttagccaggatggtctcgatctcctgaccttgtgatccgcctgccttggcctcccaaagtgctgggattacaggcgtcagccaccgcacccggcctgacagacttgttactgaagaaaccctggagtgaatttgtttataaagggccctttggtcccgggggtccccccaccccatcacctcttctgtggttttttaagacttcatctttgaaagtaggatttgctcagtggaaaaagaagtagctcagacactgagacctacaggtccctgtcccaggtcaaaatgaagctcccctttcagtttattcagagatcagaacattctttccaaaccaggaaattggatcaggccaacgtcagtacaaagtgcactgtcagggcctggtgggtaacttggcctctcgtgggtcactccttatgctaccaataccaggactatcttagatgtctcggccaaaaccataatctctggcccccaaagagaatgctgtcagacagcaaggaatgacaggtttccaggaagtgtacgccctgtgccacccagagcttcaagaatcttggctatcgtccattcatcaacttggtcatcaaatctgcaggccatagtgggtggtgagcaacaagtctgggctggagaaggctgtgtttacatagcagttttatgcctgccaatctgtctgtgaactttggaagacttattcaccacagcaatatggtaattgtcaatggggacaataaagatttcttacgtctgtgtgcctttttaccctatataaagcgcttatgccgataaggcattctctttttttattgtggaaaatatacatacaatttaccattttaactatttttaagtgtaaaatttggtgacattaagtacattcacaacttgtgcaactgtcacccctatccattttcagaacttttgcatcattccaaacagaagctcaattactttctgtttctctgaatttgcctaacataggtaactcacatatgtgaaatcatacaatatttggactttcgagtacggttcatttcatttagtgtaatgtgtttgggcttattcatgttgtggcatgtatcagaatttcattcttccctatggctgaataatattccattgtatgtagagattacattgtgtttgtctattcgtctgtcaatggacatttgggtcatttccaccttttggctgtggtgaatagtgctgctgtgcacattggtgtctggtatctgtctgagtttctactttttattcttttcagtagatatctatgagtggaattgctggatcttgtggtaattttattatattttctttttttttgttttttgagacagagtctcgctctgttgccc

SEQ ID NO: 36848 - DNA, 1195 bp, Homo sapiens
taggggttgaatgaaccattaggttccctcggacaaatgacctccgctaatttcctatttcgttgttttctcacccctacaccccaccgttccgtgggtccctcctctccaggaggccagacgaggaaataagcgaggcctctttaaaggagctctcaaagaaaggtacccggggtatcccgggctgtggagcaagcgcggggcgccggggacccgggtttcccacgcagccggggacgccgttgcgtcacggcgcctgcagccaatcaggacgtagccttccgggacgcattactagggcgacggccggacgcctccgcgttacgggatgaattaacggcgggttccgcacggaggttgtgacccctacggagccccagcttgcccacgcaccccactcggcgtcgcgcggcgtgccctgcttgtcacaggtgggaggctggaactatcaggtggggttacggcgcgaggaaaatggcggcggccgggggatctcagaggtgcaggaaggggagctgcagcccgggcttttcctcctgagccatggaccttccccgggccgcgacctcgggtaacggccactggcctggcatttggggtcccggtgcaggtggcggtagcgtcgctggctcaggtggaaggaggcgcggggaagcgactcctggaggctggctgaggcgtcaggtgctgaggggccgcgcgagcggcgagggcgaggtagccgcggggcgaagagggtcccgtcggtgtttacgctaggagcgtcaaaaccttcctcctgcgacctcagcgggtctgggagctgcactgtcccggaacgcaacctgaggtctgaccctgttaaatcccatgcactaaaacgtctcaagtggtcaccacgtgcggggcttcgacgagagccgtggagagcaggggctggggttgtcttccctgcgagtcctgcaggcgccaaaggcctgcctgtaggtgccagagtggcagtgccgcgaaaagaaaggtaggccctagccagggcggatgccaaacctgatctttaaggtgtatcgtagcttctaattgcccatttgaagaaaagaagttgaaagataaggcacttagatgtggttgtggagatgttttgctttcttgtacttccctggttcaggtggcttccctggaaatactgcatctgcctttaaagttcattaactgtgtt

SEQ ID NO: 36849 - DNA, 932 bp, Homo sapiens
gcctggctaattttgtattgttagtagagacggggtttctctgtgttggtcaggctagtcttgagctcccgacctcaggtgatccgcctgcctcagcctcccaaagtgttgggattacaggtgtgagccactgtgcctggctagttatgactaatttctatcaggaagcacaaatcaataattgggatttttgtttttattacattttttaaaagaataatttgctgggggacttttaaaagaaaactgattttagttaagcttgttgttttgatatacttgtgctaatttttccagtctttatttattaataaaataggatgagtaaaagtggctaggacatttattgtttcattgaacctttatggaatagccctgccaagtctttaggatgtaaacattaactcctgaccctacccttgaggagttcagggagaagtcccaggtccagaagtttgtagacagttgagacaaataaataaatgattaactaataaagcatgataaggactcaaatataattgtgggtacagagacctgtgagagcacataaaagggaacagttacttcttctgggatgggcctggccagaagaggaagggagctaactggaggataaaggcgtagggagaaacagagcaaagctaggacaagtgagagctcatggtgtccaggggtcagaccacagtattacaggtgttgctgggagagaagccaggaaaggttagagccaggttgtgaactcttagctaagagagtgggaactctcctgcgggcagtgggaactgtagaaggatctcgattagatgcatagcttccactttatgctacaaaaatgctaggataatgggtgttagaatttttttctttttactttaggttttgaatatatttgtacagaaatcattgtaatatggaagtaatcactgatg

SEQ ID NO: 36850 - DNA, 880 bp, Homo sapiens
ctggagcctttctgagccttcagagccccagcatgacagggagaatcagtttttcaatcaagcaattgaggaccctgcccctttaaatcctgttaaagagaaaattaatgactggtccctgagcaaagccctgtgagggaagaaattgccctgtatcctgagaacaccagtccagcctgtgcagacccctggggctgctcaccactgaccctaggcctgcagaatcatccatttctgcttgtcctccagggtgcaagcaggcccaaaaggagcttggaatgacatgtggttgtggcagcaaattgtgcaggtgggctggactttctacctggatgcctgggtgaaggtcatctttgaatcctgcaggaaatggcttattcattcttatggattttcccacttatcagagtctctgttgacctgccagccccagtttttttgcatgcagaaaatcttatgcaacagggcagtctgacagcctaggattcaggatctttagatattagctttaactccaaagtccatgctcacaaacatgggcatctatcctggctaaccaagcaggggactgggaggcaaagtgacctgtcccaaactttgctgtgtgtctgaccctctcgctattcaaaagcattagcaagaggggttcaactccttaggcaggtagctattctacttgaaatgactgtggaggctttacaacagtccctgtggatgaggtcacttgggcctgtttggtacttgtatacagcatgccatcactgccgagcactgcccttgctcctggcatgggtgtgtgtgtgatgatgcagccctgtccacaccatcctgtcctccgaccgtgccactcagaaagtcacactcagcaagcttcccacct

SEQ ID NO: 36851 - DNA, 902 bp, Homo sapiens
ccagtttgcccaggattggagggcttcccaggatatggggcatccagtgctatcactagaaagagccaggcaaactggaatggttgacaagtctgtccctgccatgtgcccagcctgactgacatggcatgggttgggtcagaacctgcagatggccttaagtgcctttagctgtggggatcagaggggggtggaagcagggagccaagcaccacacgttcttggatatagaactgagtttttgttgtatgaggatcatggtctggcttttcccttcaaggcacttggtgaaaggaatgtagtgaatcgataatcattaacgagctgtctggtctaatcatttcctcccattcgttccagttaataagaaaacagaacaaggagggaagaggaggagggtgaggaagcaggatctggccgtgtctgggttcactgagtttcagctgagctcaaaggtcccatccttcacccagttttaacctccaccctatgccccactgcgtgagtctggcacaaggcaagcactcaatctatatgcacagtatctgagaaagttgatcagtgggattgggatcagatctgctgcctccttggacgtgtctttgtggaaaggtgtaggtgcctggctaggaatgactgtgacgaagccatggttcagtgggcaggcactgctgccctgtgctaggcagcccaaggtccaagtccttccctatgtgtgatctgaggacagggcagttacacaaccttgcacctactcccgctcatgctgctgctgctgagtctcaaaacagccaaagcaaggagaagccggagaagtcctggtgaaaggctgtgtggttggtgagctgccggggatctcgcggttttctcagggatttatgggtggatttaggaacatgata

SEQ ID NO: 36852 - DNA, 1667 bp, Homo sapiens
agaaataaactattgctgtattcaatcatggagattgggaaatttgggattattttctttctgtagcataacctagtctgtactaactcaagtgaatgtgaaaaaaaatcagaatgtatgaaaataaaagtaaagaaactaagactaaaaactcgatttacttaaacatgaaaatagacagagttgaagagatcattaaataattgaaatgtagacctaggaaattacccagaaagcaccacagagatagagatgagaaatatgaggcctaaagatacatggaggatagaattagaagtttcagtacaaatctatttagaagttaaggaaagaaaggatagagagaatggaggagaaataatgttgcaataaataagggcttagaattttccagacttgaaaacaagttctcaggataaagaagcatggtgaattccaagaataataggtaaaaagttaatccatgcctagacaacagaacaccttaaaatagaatactttaacagaagaaaaacagccagagaagagatagtgcctgcaaaagaaagacaattacgctggcatcagaaaaatacattccaagggtttgggaaatataactactcagctaaatcaatagcagctaattcagcaaaatcatcatttatgaatgagggcaaaataaagccttttttttttttaacaaaaagagacagagcttgccattcacaaactctggctgaaaaactatgaaagcgtgtgtttctaaaagaaggaaattgaagccagaaggagggagtggaataagaaagcaataacgagaaaaacaaaggtaagcgtatgagtaaaactaaatatttgcctgtacaagaataacaacaatgactaatcagagtgttaaagtgaaactgaaacacttgattatagccacacggaggaagagaggggaaaatcaattaatgcattctaagcttctcatcctgtttggtgacaacatagaaatattaattaaacataggctttgctgaatcaagtgtgcatgctaaaaatacagagatgacttctaaaagaatagaaataggatgtagaagcacgaaactcatataaagaatgaggtggggagaatggtggggcaggggaagggtcgggggacagggatgcttgattaagccaacagcagacaatgagaaaaagagaaagaacatggtcagtagtgacacaccaaatgagatgatagaaatgtcaaaataggctattaatcacaattaatgtaaacacattgttttgccagttaaaagagaaatatccttagattgcatttaaacacacacgtccatcatgcatgctattcataagaggccaaaccatacacaaactatgtgtattatttattagagactcaataaaacgtgacacgaacagttgaaaataaagaaatggggaaggtatgctccaaaattccagtgtgggctatgtgccttagaggaaagctctcatgcattgcagaaggaggcatgttcaaaattgttcgctacattgaaaagggaagatgataaacagcataaacatccaatggtatggggataaaaaaattaatgttggcatgtaataaagcaccatgtaatggataaatggctaaaccagatcaaatgggcccagatgaataaatattagaagcataacattga

SEQ ID NO: 36853 - DNA, 746 bp, Homo sapiens
cttcctgggttcgagccaggatctttctttaaggataggaggagagcatgagctattttccaggaaagagccacctgacttcaggccctttctgtgtcaggttccttttgaggtctgtactcactctggcaccacaaattctgatgaacaccaaaattagcaggtttagggagaggagatctattggaaaaagcacaatgaggcccacagttgaggcccccaaatggccacccacttttccctgaagaagccatggagcccgctcctgatgataaagctagctcagcttgcatgtcatgtgtggctctggggcactgagcccagagtttgacctttgttctggaacagaggtcccaggtgctcactcccaggactgtgcccatccacggggacattctcgctggggtacagtgaactgtcagtgtcaggctgacaataccctttcttgagagtttctaattctgggtattaaaatctcctttctttcatggaaggatgtgttttgttaatgaccatacctggcaaataaaaactgaatagagctacacctgtttcctccccactttcatcactcataattaaaaaaaaaaagtttactgaactgtgaaattcaaaactctgggaatcactgctcaaaatggtctatacagacaagctagaaaaccattaagaaaccacctcagggatataaatgctctaatttaattagcattctcattaaggaggtcaaaattaccaagggcaaa

SEQ ID NO: 36854 - DNA, 1266 bp, Homo sapiens
aaatatatcataggtatacttagtcatctttctgcaattaatttcttccttcagtgtctcactcaataatttgtagagttagtaggaagtgtgatatagtttgcactctgcccctctaaatctcatgtttaattgtaatccccagtgttgaaggtggggcctagtgggaagcaatatgatcatgggggcagatttctcatgaatggcttagtgccatccccttagttgtgaattagttgtcacgagatatttaaaagtatgtggcatcacccccttctctctctctcttgctcttactggccatgtgatgtgcctgctcccactttgccttctgccatgagtaaaaactcctggaggcctccccagaagccaagcacatgctggtgtcatgcttgtacagcctgcagaactgtgagccaactaaatctcttttcttataattacccagcctcaggtgtttctttatagcaatgcatgaatggcctaatacaatgtgctaaatagatcatgaaaactaaggtatttttatggcaactccataagaatgaacctataaactacagccagacaatgtatatactcaaatccttaaattctaaaattgtacctcaatgctcaccttgggacccaccacagaacatgcaggcattgcaccttccacgctggctcgaccaaggccaaatccccttcaaataaaacctgtcatctcatttcaactgctagatcacacctgtgaatttcaggggcatctgagagcatggcatgcagatctcggactttgcctctttgagtatacaatctcagatcctgcatgtgactgtggaaggccattctgttggcctgtgctcagagcagagtgttggcatgtgatgcgtattagtcaacactaatacatgtcagaaatgaaagagaaatctcaaaccaaagatccatcactaggttcaataaggtggaaaaagtggtctagaaagtgcgatgtcagttcccactgtgaattgtcaaaggaaatctacaaaaaccgatttcagtactcttcacacattaccaaagcttaaaagggtgtatattattgggataataaagagaaagaattcatgataaggttttcgttggagggaactatactacccacaccttcctaaaggagaaggggaggaatatttgcctcccacctcaaacttagtgagggagcttgctttgtgctacataaaaatctaacatgccacctttgcagcataggggaagagataggcttaacaagaaatt

SEQ ID NO: 36855 - DNA, 676 bp, Homo sapiens
ttaaaattactctcctaaagtgaaagtaaaatgcaagggaaaataattttccccaagccagatttaccttgaaattcttctttctagatttagtgcataacagcaagccatccctgaagaagagcagaaacttatacttttacaggttaaccaatggtttggtttaataaataataaaacctcagagtaagacatgaccttggacgtcattgaatctagctgtttacccaatgtaaaaattactaataaaaattccagagatggctttgtgtaagtagctctcctagaaagccaattgcacaatggtttcctagatttctacaatgtaattgctgaaggaaagaagttgtttgaaatgctggatgcaaaatcttacacttgaaagctttgccctacttcttgggttggtaccaggtgccaaccctgaaaaggatgcagctcagagaggaaactctgaacccagaagaacatggctgtccccattccccagcacttcccaaaggcaccactcaaagagagtccatcaatctttggagcactgacgttgaaacagttcatgaaatttcttttacagtcacccaaacacatcctggaaatttaagacctaggagtccagtgaagcacattattgttcttgaaaattataccaaaagtcactcaaaattacatcaaaagt

SEQ ID NO: 36856 - DNA, 417 bp, Homo sapiens
atgtcagtaaataattaccttctctgtttctcacctccttcaaaacacaaatacacacaacaagagaaaggaaattgagtctctaataccagagtgtgcataagtgaattagattcatgagttttacttccttccccagagggaaaaagaacagagtgaagatgtagtgggagagcaagggctccgtggttaaaaaggtcaggctcgaaggatttcactatttcataactctgtgatcttggacaaactccttcatctgtaaactgaggttaattattaaccttattggattatgaggctggactcattggactactgttttatgagaatcattggattcctacagaaattaaataagatgatgcaggaaaaagtaactgatacaggattgttgctatttgtttctccttgcattca

SEQ ID NO: 36857 - DNA, 863 bp, Homo sapiens
agtctaaaaggcacatagacctgtgaaatacaatacagagtccagaaataaaccctaatatatatggttaaatgatttttgacaagggtgctatgatggttgattttggatgtgaccttgactggattaagggatacccagcagctgataaagtacaaattattctcaatgcttcagtagaaactgatcatgtctcccttctgtaaaagggaaacccaagtgatttagcatttgattctaatgattgggctaccccaggtgcatctgtgagggtgtttctggaagagattggcatttgagttggtggactgggtggagaagatctgccctcaatgtgggtgatggaataaaaatgtaaaggaaggacaaattcttgatctgtcttctggagccagaattcatttcttctacccttttcaagtgtacatgggctatataccatggtagattatatttgtatcatgagacaagttcagattctctggtctttggactttaggacttgcaccagcaattctccaggctctcgggctttcagtcctggactgagaattgcaacattggcttccatggttctaaggccatcagacttggaatgagccatgctaccagcttccctggcactccagcttacagatgatctgttatgaaacttctcagcctacataatcaagtgagtcaattcccctaataaatcctttcttatatctcccccgcctctctctacatagatagatagatagatagatatagatatagttagatagatacagatatagatatagatatatatctcctattaattctgtctctctgaagaaccctgattaaaacagatgtcaagaccattcagtggagaaaga

SEQ ID NO: 36858 - DNA, 6468 bp, Homo sapiens
ttgttggagctctctatatgccaaaggccattgggccaaccagtcctctgagcacttgctccacttctgtgggtccttgccgagaagtaactacaaacattgacaataaatagtcacttgtttgtatatttggatggtacctgttgtgtaaataatggttttagacatattagagaatgggatgtgcaggccaaatgtgaagtccactaaacacagaatgagtcagtgatgcctcccatccaagcttactttttattatgccatcttgtatagtgggttgaatggtagaccccaaaaagatatctctatgtcctaattccaggaacttatgaatagtaccttatgatagcaaaaaaaagtgaatattatcttctatggcaaaagatgtgactacattaagaatccttagaaaagcagctcatcctgtataatccacgtgggccctagatgcaaacacatggattcttatacaagaaataccaggagaagaaagacacacaggggaggaagtaatatgaagatgaagcaaagagagatgtgaccgcaagccaaggaatgccaatagccaccagaagctgaaagaggaaaggagcaggttttccttcagagcttccagaagaagtgtggccctgctgacaccttgatttcagacttctggccttcagaatagtaagagtaagatttattttgttttaagccactttgtggtaatttattacagcagtcacaggaagttaatataacttgttggagtaatattacactattgagatcaatttcagttcagacatccagtaagggaaatgtcagcaaaggacgacagacaactaatatttatatattgcgtactatgttccaggcaatgttctaagtactttgcccatattaactcatttaatctttataacaaccctaggagataggtattattattcccattctacagagaaggaaactgaggcacaatgagactaagttagcccaaggtcacataattatgagatatcagagttgggattcaagtccaggtggcactgattccagagtatctgctctctagcattttcctctattgcagtcacatgtccacatcagaggattacacccctggttgcacaagcaagtcacctgagtggctttagaaatattaaaggggaggaatcaccctgaagacaaattaatcacaaccttgggcacatgactttgagcagaagtcattttaagggttcccccagatgattttaatgtgcagccaggttaaaagccaatgacataatgactcccagtggcagatttaactaatttgtttaaatttgcattgcttagatgttttggcttttccaagtctatgtctacacagagaaattggaccgcaaaacctagtaaaaggcttaactcagtaaaaccataattttttttcttgtaatggtctggttgatcaatttttttcaagggttataccataggaaaaactcaatgtgaaggctacctagtaatcaacaatttgttttaattttggtattgagggagtaggaatggagaatgataaaatggagatggagtaggaatggatgagaaatggaaattcatccacatccccagaacccattctggccaatttctggtcaactctggtctggatatctgtgacctagaaatctggagtacagcaccctgggggctcttgattttgcaattgccctagagcaaactcaaaggctgttattgcttctaaaataggaccagcttccttatattctcctgaacaaaaaggaactcatcacgaaagcagcctcctagagcctgctccaggcctgacacaggtcagtgctgcctgaccttctgatgcagagtctcaggttgaacaatcctctgataggactagtgctatctcactttcagatcggcactatgaagcactttagaaactaggctctatagagtccaaatctgccgataataccaatggattttaaagctttttagccatggagcattttcttcaatggaaatcttacttggaaggccagcaaacataaaaatcggggggagtttctatacttgaagagaatctgaacccctacttggccagacctttagtgtaggaaaatacaaagagcctttgccaagagagggccaagtaaacatcaagaactactctgacattgtaaataattctagtaacaggagacctatttggttatcccttgacctgtcctgctctgaagtatgcctggtgttaatttcctaggctgccataacaaattgccgcagactggatagcttaaaacaatagaaatgtattgtctcacagttctgaaggctggaagtatgagatcaaggggttggcagagccatgcttcctctaaaggctctagggaggagtccttacttgagtgttcctagcttctggcaatggtttgcagtccttggcattccttggcttgtcattgcatcactccaatgtttgcctctgtcttcagatggccatcgtcccggtgtttccctgtgtttgtgtctgtttctctcctcttatgaggacactagtcacattggatttagaacctacctaatccagtatgacctcatcttaactacagtcatgcatcataatgacatttcggtcaatggcacactaaatatatgattatagtctcattagattattgtaccccaattgcctacagtagtcagtacagtaacaggctgtagaggtttgcagcctaggaacaataggatatagtatatggtctaggtgtgtaggagactgtaccgtctaggtttgtgtgagtacactctatgatgtttggacaatgatgaaatcacctaacaacacattactcagaatgtaaccacaatgttaagcaatgcatgacatcgcaaagaccctatttccaaataaggtcatagtctaaggttctagagaaaacatgaatttaggagagacatgcttcaacccagtacacagctccagttctacctctgaacttgtttatatggctgggccccaccaccatggccagatctcccccagcagctaccctgacaccagatgccagtggcgtggctttttggcttccatcagcttttattgcctaaatgtttgagctcccagactgtgtgatctccaggctgcaaatgttgccactttggcttgacctgctgccgagtccagaatggaatgttttcttgcaagttttcctttccagatttcaatcaagaaaaaaatgagtaagctgtctgcagaaaatcctatggtatctttccagacaaagaaagacttccctggaaaccactctttgacttattcaatatccctttttttcttaattatggctaatataaattgttttttagaaagtgtttcttactaagtgataccatattttaactgagccgtgctagaacctactattctttaaaaaacctctttattctttgaatattttaacatacatttgcataaaacaaaaaatgttgatttgtatttcaattttattttagttcttcccaaattgctcttaaaaaaagaaaaagaaaagatttaaggccataaacatagatgtataaagtgctgtaagatggcctaaaatttaaagaaaaaggaggcaaatgaaaataaagatatgaaagtaaggtgaattgactaatgaagttagcacctagactctatgtcaacaagtcaggtatgtttgtctactgaataggacaaaaatttatctatgaactttctagtaaccaatacatcagtgcccataagtaaaagtaaacaaacccacacacacacacacacacacacacacacacacacacacacacaaagccatacaacacaccccaaccaccaaagtaagctctgaagagtaatctcaaagtttcctccaggaactgttaagatttaagtagaacagagtggtttgtgaaggtacctatagaactttatcatcactttttaaaaaattgtacgttcccacaatatctatgtacataccaatccccccccccccctttttttaaaaagtcattgaccattgggaatcaagtattttaggtaggtgagaggacaggtgctccaggatattctaagacatgtgattaatatatatgaactctttctgaagtcctggccctatatcctctaatgggacattccattcttctttccatcttgttgctactgctatttagaaatctgtcaagcaagcattgcctttgatgtaagcatctagatagactgtggggatggggagagagttctgaccaatgaacctgaaaccaagatgtctaagggtgtctagagctcccatctcctgtccatcttcccctgattttccctctatatctcacagttccctgaacttctccagcactttttgtatttctgtttaactatcctaggcaatagcactgattcttaataagcccttgttatttgagaaccggcacctgatttcaggctcctggcctttgggtgtaacttgttcaatgctttgcccaatataggcccctgaaaaacctgcatcagcactctctcttctttttccaccttttttgctgcgcttcctttctcctttcccagcttttcttctttttactgttgtatctcctttaaacctctttccccatttccttttactcccctttccctgttccttttatgcacctgctctttttcttcatacccttgccctctgagtagctgctctataatcctatagccctacagagcttgtcacacattacttcaagactttgttactcggtgtctccacaagaatggcctgcaggaagacaagcaaaataaactggataccaagtttaggaagaagatcagaagctagtctcctaagggctgttgcagagaaaggcagcaactcatctagttttttggatgggtgccctccctaaaatattgctcaaagttcccagaatatcattttataaattctagaatcaaaccttctatatacctatcccaaccctagaaaagcaatagagaaatgcctccctggggaaagcaaagtgattccctccacatctaatccctttttctaaaatgaagactcagcacctttccaagagctcaataataatgcaatgagatttgtaaaagagcacacctgactcctctccaagtgtgccctaactggggaaacacacggcctccagtatttacagtgtggattagcccagttttcaggctccaagactctattagcacagcaatattaacctaattactttctctagtaagacaaatattaaggcctcctagacatataatgatattttccccaaagagcaatgactcaagacttcttcccatcttactctgccatgctggaagacagggcagccacatcccattgtcaaccccatgcaaatgttatctggttttaactatctaatggtcctaatctggcagatccatttaaatcatgcaaaatctttgagatgattagcttgtgaatatctaaaatacagcagaaaacctttaagttccctgcttatgtttttaagtatttatggcatgtcctggtaatactgggagaccttggaactgtccactcagtatctttcttcctgcctctacattaaaatagatgttcaatccaaacatctaatgaattaccaaggttttaaaaaactttgaggattccccagaatgatagaaagaataatgatcattggagtgaaacctcccataggcatgctactgaccactggctccattttaaaaaaatttttaataccccagaagatcaaaatcaaagagaatcagatcaacttcatggcctgagtaactaaatcaacttatttgaataactagtttaccgttttctataaattgatcaacttgaggtggattttggcatcatgaaacaacagttgctcagccactcatgctaactgattattacaaaatcaagaaaatacaaatattgacatgggatggttttcagcttgaagtaaaaagctcagcaagcctatgaagagcagctaaggacataacaggcactttcactgttggataaatacatgccatttctctgagctataattttgtctcctttatttctcaatgtttgcaaaaagaaaattgtggttttctaagttcagttgtttagcttcttagtgcagcccaggtttacaggtcttttttttcctttttaaaaaatttttatgtttaatatttgtgggtatatagtgtatatgtttatgtggtacatgagatattttgatacaaggatgcaatgtgtaataatcacattagggtaaaatggggtatccaccacctcaaatattgatccttactgttacaaacaatccaattatactattttagttatctttaaatgagtaataaattattattgactgtagtcagtctgtatcaaatactagaacttattcattcaatctaatcatattaatgtacccattaacaatcccaagtcttctgatgtt

SEQ ID NO: 36859 - DNA, 929 bp, Homo sapiens
ttaggaaaaaatgtttttataatttaaaaaatttttacataataattttaagaataaatatagtttttaaaaagcaagaatgaggtcgcatttatccaacaagtatacaacagtttattatcatacctgaagagcctgagatctggagtctactgcctgggtttgaactctgattcctcgttattgtgtgaccttgggcaaggaagttatttaaccttttcttgctccagttttccacctgcaaaatgggcgtgcctacctaaatgggttggtatgaggatgagtaaattattaactcagagtgtttggcacacagagtgtaacaccctgtaagcactcaaataataacagatcacacactccagtggcttcaaagaaagaattcaaaaaagaggaaagacaaacatcagatcccgatgcctcaggaacaagtagctcaagagttgtacttccagtgggcaattttccctcaggcagaatgaatctccaagtcctttactaatattttaaaatttcctctgaagaaggacaatatgtagatatttgttttatgcataattactcctttgggtttttttttaaatgcaccggtcataatgtattgtgcaaagtgccttttgatttcaaaaacaagcctaaagattacattaatatgattgtcacaaaacactaatcattaagatgaaatgacctcataaaaatattgcttatgttgccaacatacagtagttaatttgaagataaaaataattgttgacaaaaatcacatttctgtcaaatgtctgttcaaaaatcagtgaaataaaaaactaatctcttatctcctgtatccaacatccttctttctgtgcaaattaaaccatctaaatctgagtaaaataaaatctgtgtaaaataaagaatcttgttcacagcaggcttttagtaaa

SEQ ID NO: 36860 - DNA, 516 bp, Homo sapiens
aatttaattttcttaaaaattaagacccaaggattgccaactgtttactttgctaattgaatatttttttaaaaaagctaatgtttgccattataataatttcatacaagaaataatatttttgacattaaaaagtagataaatactattacagaataaaagaaagtcttttccattctagaaaaaaacagttgatgaccagacactgacagttcactgcatctcagtgaaaacatcactgtggacaggcacagtcctgggagccagcatctgggatctctgttcttgaacaaaggtcaaattctgggctcagtgccccagagccatgcttgacgtccaagctgagctagctttatcatcaggagggagctccatggcttcttcagagaaaagcctgtggccatttgggggcctcaactgtgggcctcattgtgctttttccaagagatctcctttccctaaacctgcttcctttggtgtttataagaatctgtggtgccagagtgagtacagacc

SEQ ID NO: 36861 - DNA, 2768 bp, Homo sapiens
caaagaggcaaaagaaagaaagaaaaggcatccaaataggaaaggaggatatgaaattgtcagtgtttgctaagtaagagtggcaggtcttttctcccttagttcttcctttattgtgccccttccagcaatcaactgtttagtccacacacttctttgtaccttggttacaaaattactgcatgtaaaactactttacatgagttcagagttcagggcacaacctcatatggtattttccttttccaggtcactcttcagtccaaagccaaaagcactttcattagttctctcagtcacttggaaggtcaaactctgtctgtctgggtcccagtgagtctctctgaaagccactagaatctaaactcagagtttcactgcttttcactctaagaattagcagttctcccactactcagcctccagctttggttgccccaaacttctacttccctgaaaaaaacacttctggtgccatttcttctcatcctagcccgctcccaaacttctcctaaagtttcttcacagcctatagcaacattctctctgaggactcccttcaggtttctgatgtcttcatgggaggcagagctgagggaggtcctccctgttccctccaccatggggcttcattctattgtctttaagtcctcctcaaccaaccagttccacaaccagtgtgggtcctgaaggctgcttcaggcacagaaatgcacagttatccttcagctcaaatgaaaatcaagtcccagcccctgaagtcaacagaggacaagagttgctcttccagacttacagatagatcttgaccaagaaagaaaaacaggatttctttcttcccaagcaccaaaacatgtggtctaaaatgaccaggaggtaagaaggttctccccaagcagagcctgagaaaggagagaagttgagagctgtgaggaaagtaaccataagattcttcagttagaagactcagaaattaggtagttgaagatcactgaagtgttttattatgctgggccccatgcttggagattcactgtgtgttccttaatggctgaggtactgtgctaggcactgagagaagacaagatgagaaagacaagattcccttcccttaaggaacgtcttatcctgcagctaagaccaaaatggaagtcagtacaaaacaaggaagcatttaaggaggagcataagagatgccaagcactgtttctgactgggagagaagctatctccttgtgagggaaaaaaaatgtttacaaagtaggcagaatttgaactatggctttagagaaggaatgagaattaattagagagaaaatcagggagattatccctggcagaagagagttcacaagagaaagtgtagaaagaagaaaggtcagcatgtattcccagaacactgcagttgtggagtgggggcgatgagggagaggtttgcacaggttcctgcctcctctgatgtcctgaggctgctgggcatcaggtcaaagaacacggcctgctcaatagtgagctccctgctgccaactgagttgtttgtcacatgtggttcacctcaccacattccctacccctgcctggcaatcttcctattttgctttatcagtgggtaaaaggtatgttttcacaggcaactattaaaactatttcaatagaaacttttaaaaaaactcatctaagagatttgactcttataaacatttgctttaatgtagttttcttattctcatatattgggaaatggtaaacaaaatgtggctagcataaaagcctgagatcttggcagagagacacgagcttgagtttggtctgtgaagctatccaagaagtgcataacaggtccaaagtacaagcctctgcaggggcccttccaccgagatgagctcttggcttggaagaaagagcaccagaacaagacctaggggtcccaggatcccatcccagacccaccacaactctctatgtaactttttgcaagtcactttgtgcctctgtgcctccatttacttctccccaaaatgaagtgtctcaatgacatcaaaggcaatgtatttaggtagaaaggcaaagagctttaatgtcaaacaaaaagcattcaaataaatctttagctctgacccttgtgaaggcatgatttgggacaagatacttagcgtgtgatatccttactttcctcccgtgtaaaagaaacaaatattacctgcctgaggttgctacaagaaataaatgagatattgcatgtaaaaatgcccagcacagtatctagaaagtagttggtgcctgctgccatcttccctggcctttgaaagagtcctttgagttacaacattctatgtttccatcaaagtaatgtttccacattagcacagggtctgagatcatagcaggggtggaaatcacgagacacaaatccaagcaaaccttttcatcagagggccaacagaggattcagttaaccagtcaaatcttctgatttaggatgcactttcttctgtaccagtgtttcctaaacatgcttgttaataacaatctaggtcatcatctggagattccaaagcagcacatctggagagagacctgggaatctgaatatttaactggcactagggagaatgtttcaaagtggcaaacctgagaaacagcatttgatctggttcctcttgaactctcagcctcctaattccctgctgtctggcctactgtggctgttggcttcactgcctgccactggcacccatgtgcttcctagaatttgtccagtttctaca

SEQ ID NO: 36862 - DNA, 806 bp, Homo sapiens
gcaaataaattgaaaataacccaaataccaattgataggacaattaataaagtttgatatatttacacaatgaaactctatacattggcaaaaataaatgaactaaagccacacacatcaacaggggtgatactgaaaaacaattttcagaaaaatacattccatataaaaagttttataagcacagaaaaggaacccgcatgatacatggtttagaaatacaaaactgtgtagcaaaaccttaaggaaagccaactgggccttgaatggtggactaggttattcagaccaacccttccactgaagacagataaaaagaagtggtgaaatgtttttgaattttctttaagcatcagagaaccaacaagatgttagaaaacttaccggaccaagatctaggaagaagacaggaatccaggaaggtgagccccacagttggcactgcttttgtcctgtggacatttattgatctggaagtgataaccgaaagacagagttatgctttggagaaggcttaaaggacaaagtgcaaagatcacaatccaaggcaatagagagtcaggatcttagaaaacaacctcccattttgcaccctgaacttttgcatcttagaaaagagaataaaatcaaaagaaacaagtccttccatggactgtataccaccttcaagctatctgggtaacacagaaaatatcaagccctgaactaggattaagatgaattcatattgctagctctcccacatactgtcataatctaactaaatatttttaaaaatactccttagagaaagacaagctcttcct

SEQ ID NO: 36863 - DNA, 2173 bp, Homo sapiens
aacaacagactgagcaactatccttgcaagaaagcaccttcatacgaacccaaagttcagttgagtgatactatgatctggttttaacataataacaaagatagtgtatctggttttaacatagtaacaaagaaagaggcattgaagagggtaggaaggacagtcttgcagtgcctaccccacccctcccacaaccccaggcaacacagcacaaagggataacctgagcacctggggaagggagagcaaattatgtgtgggattcttcactggaattcagtaccaccctatcacagtggaatacaataccaggcagagttctgccagtgcccacagagggagcatttagacaagccctgggccagaggggaatttcccaccccagcagaaggaactctaatcctggccagcttcagcaccagctgactaaagtggcctggggacccaaataaatttgaatggcagtcaggccacagcgattaagatcatagtccttgggcaagccctggtgctgcactggtcacagaggcagtggacttggggtgcaaccccatgcaacaccatctgcagtgaccacaggagtgcctgcatcacttctccctaactccaggcagtgcagtgcagtgcagtgcagtgcagtgcagtgcagtgcagggagaaattccttccgcttgggagaaggagaggaaatagtacagaggactttgttttgcaacctgaggatcagctcagcctagtaaaataaagcaacaggcagattcctaaagctcccagttccaagcctttgttcctgggtggtgtttctagaccaatctgctgacctggtgggatggaccctgtcccagcaggattcaccaactatgcccttttacctaaagtgcccttctttggtcttgaataaacagcagcagcaggcaggcaggaagtagtggctgtgggtcttgggcaagtcccagtactgtgttcatctggaaggtcataagtttcaggtgtgacccaatcagtgccagctgtggtggccatgggagtgcccacgtcacccctccccaactccagttcagtgcagagactgactgtattagtccattttcacactgctaataaagacatacccaaggacggggctatttacaaaagaaagaggtttaatggactcacagttccacttggctggggagacctcacaaccgtggcagaaggctaaaggcacttctcacgtggcggcagacaagagaagagaatgagagccaaggaaaaggggtttccccttataaaaccatcagatcacatgagatttattcactaccatgagatcagtatgggggaaactgccaccatgattcaattatctctcactgggtccctcccacaacatgagagaattatgggagctacaattcaagatgagatttcggtgggaacacagggccaaaccatatcaccaactccttctccttgaaggaaagtgaaagagaagagcaacagacttcacctggaacctggagaagtctcccttatcttccccaaatccaccaagtacaccaaggctgtgtatctaggagtctgcaaaaatcacagtgttcctcagtttagggtgccctctagtgctaaaacagcttcaatgaccacaggctttggtaacaacactcaatccccattgaattctgggaaagccctctcaaggacaggtacaaacaaggccagactgcaaagactgggataaatacctaacttcaatgctcagacatcaacaatcatcaagaaaatctagggaaacgtgaccttatcaaacagactaaataaggcaccagtgaccaatcctggagtgacaaagatacctttcagtcagggaattcaaaagagctatcttgaggaagttcaacgaactttaaggtaacacaaaggaggtattcatcagaattctatcacataaatttgtcatagagattgaaataatttttaaaaatcaaacagaaattctggagccaaaaaattcaactgaccaactgaaaaatgcatcagagtctcaacagaagaattgatcaagcagaagaaaggattagtgagctcaaagacagactatatgaaaatacagtcataggagaaaaaaagaatttaaaaaattaagtaagcctacaaaatctagaaaatagcctcaaaagggcaaatcaaa

SEQ ID NO: 36864 - DNA, 1119 bp, Homo sapiens
ccagttttatgagcacatgctgtactcattgatgctatggagtcctttgcatcttttcccagctggcaaagtttttataatgacatcttagggatgagaccattagagaaagagaacccatctcgggatttactgggcaaattaatcctttaaattagtacttgccccaggccaggatacctctcctgtggggctgtggcattaagggggaagaaggtaaatacaattgagagagaaaatatttaatagctttcaagtaaaacatatctgggcttcaatagtactatcactatgttgctttgcacaagtcctaatagctattaaagtctcaattttctcatctgtaaaatgagatcttgcagggccattgtaagaattaagtgggttaatggatataaagcatttggcctacagcaagcttgtaacataatttaaatccccctggaaaaagaaaacctgaagtttaaagacagaatcagaactgaaagcaagaacagaagcacttcctcttagaatcagacatccggaccacactccttgccctgacagagcgtaggacatctagaaggttagaggagaagtctgactgtcatggggaggaagtttgcctaaaccaaggctggtgccctctctaaagcagttcaaaagaatttgaaaacaccagctctgagcaccccacatagcttgtcaactcaccccatgttatctcagtcatgatgactcaacactagagcctggcttggccagagcactgaggctacagccttctgtaaacaagaccaaggacacaggacagcaagaaagaagacagacaggtcactctcctggctacttctatccaaacctgtatatcaaaagaagagaacttctctcattcacactgcaggagagggtacaggagcagaaggagtaaagaggagatgggacttggcttaagcactgaaacaaattgtgtgtctgcaccctaaactgtcaaccctggctattcttcaaggtaaagaagagggccctaaataatcatttatgaatcatgtggtccaggcactctcccagagatcacttctctcactcctcaccacatctctattggtaaaatattatactccctcttttagtgag

SEQ ID NO: 36865 - DNA, 539 bp, Homo sapiens
acttaaaagttgtcttttgcttgagccttcagtcacaagtagctcaaccttcgcttgcatctcagaggaatattctgaaattgtgagaagtttccaaattttataagaatatcagcttaacaaaaattcttaaattatttctgtcacttttcctaatagtcaacataaaaaggcatatttctttccacatggattagtcgctctccataatttccaacagaattcttaagcctaggtcagggctgaggaaacaattgggaggccaaatctgcttcaccaccatttttttatagatcaagttttattgaagcacagccagttattcacttacatattaactatagctgctttcacaatacaagggcagagttgactagctgcaaaggcacagatcatatggcccacaaagcctaaaatattcactatctgatcctttacagagataagaggtgtcatggcaataaacaaaagtgggttcatatctcaaatctcatatcacaatacattccaaatggataaaagactgaaatgtcaaaagt

SEQ ID NO: 36866 - DNA, 1319 bp, Homo sapiens
ccaaatctttgctttctcacaggccatgtcactctccaagccaattctttgcaaaaggaaacatgatccgattcacctcgagaagttaggtctagttattgacaagccaataccaaatgactgaagactatgaggaatcacagtagaactgtctttgttaacataccagaaatgtgactcctgaaaataatcccagaaaacaggcattctaacaagcactttattaaagggaaagtccctacactttcacataaagaagtctaaaatgcttttagacagtggagacagaaaactcaactcgctcaaagcttaaacttaattcgttaggtagttccagcacctgcctggtgtagggcgaccagtgactggggcgactgctcgggaaaagtgctgatgccatatccagctgcccctttcgtgaatgacagtaacaatgcaaacactgacagaagagctgggagcccccccacccccaagcccctagcttagcagtacttccaccccagccccaacatacaaagtgacaaatccctgaaaggccctcctctgacagatctccccatgcagagacctcgtctgtagtctggtaacgtaaaaaagtgctacccttcactccctgcaagacagcggagccccttaaaggtgcggggaaacgctgcctccttctccagcaccagaggcacggggcgagaagacttcctctccggctgcgggcgcgggggctcgggggcagaccgagagaactccctctgggcgagggcactccccggaccgccagcggggagggcagggaagacgggagaggaaaggaaagggtccctggctcggcaagagggcggagggtcgctgccctgcggcgtggagaagcggggctcggcgccgggcacaccgtccttcccgggggtggcagcggccggccgcacgcttcctgcaagccagaggcggcgacaagtcggctggggtccgggagcacgttccttcctcgagcctggtcctgagggagggcgcaggctgccgaggcggcaactctccctctcgcccaactccggagagcgtgaggccggccggccccgggctgccggcgcgggatgcccgccgcccgggtgggggaggcggcgaggccggcctcggctcgctccctccccacgcggtccgcgcccggcggcccgtccgcgccctcttccccgcccgccgccgccgcggggccgggccgccgacctcggccggccgggcgtggggccaggcggcgacggcggcgggcgggccggcggcctggggccctacctgaggctgtgtaccagctcccggcgtgactggct

SEQ ID NO: 36867 - DNA, 1432 bp, Homo sapiens
gcggcggcagcaacaatcaccacaaactccggcgaccgccggaagatggggcccacggcggcctcaccgaagcccggaaagccctggccccggcccccggcgtccccgctgctgcccagccggggctggttccgccgagccgcccccacggccccctcccctcccagctggcctccccgagccaccgcgagtgaccccacccccgtgactccgcgcccgcccccgccccccaccccccgcggggctccccgcacccacccccacccccggcagggccctccagcccggccgcccgccgccggccccgccccgctcctcctcccggccgcgcggcgaggttaacggcggaaaccggacaggcctgacggcatctggggtcgggcagccccgcgaggaggcagtggcggctgcagctacgcgcacacaaaagcccagggccggggcctgaaccggggaaggcagacccggagaagagccaacgcttccttactcgccactctaacgggtcctgcccactgagcatgcccagcaccgctgcctacccgccgaggaatctcaacgtgcacgctccgctctccggggtttagcggcagcagaggctgggaggtgggggcagggcgcggggagcaggacgcagccgcaaggcaagccccctcccccagccaacttcctcaaatggagagcacctagggctcgcggatgcggctttccacgaggacagtcccgcgggtatccatcatatacaggcatctctcatcgatttgcacccccaaggtctcattcctagggtggcacgccgggaagttcatctgtagaagcaggcgcgtggtaaagtgtgcctgtggtcatgcaaatactagtttttgcttcacagggtcactcttaccacctaatggtggctttgacactgtaaccatttatcttgtttcatgttgtatttatgtaggtgtatgtcatatctccctaactaaggtgtttgatataactagcctcgttatcctcagctgtaaaatggggacactcaaggagtgtacctacgattataagagctgttgaatgtgaacagcctgacagggtaagcctacaacaaatattattttcacctttgtcatcttataaatcccagtattccacataaatgtcaggaacaaataatttttttacaattgtataagaatcacagcaaaggaggctatcttggacctctgaggaagtgttattgttacaaagtacaccattgcaaaagtaggaatagaggaagagaaagttgcatacatccaatgaaagttttggggcaaacactataaaatgtttgtaactgcatgggcatggtacctcctgcctataatcccagcactttgggggcctgaggcagtaggactgcctgaggccaggagttctagaccagcctggggaacataggagaccctgt

SEQ ID NO: 36868 - DNA, 1187 bp, Homo sapiens
gaggattttctgcaacctagaaaacaaaacaccggtcacagagatataagtcccccctttctcgctgcctccctgcacaccgccaccctgaatccacggcctcctgatacctgcgtttgtccctccagcatctgctctggctccatggcggaccctgcaagtcacagtccccggataccagtcttggaaaacaagaagagccgcgagttacctgggagatttcaacacgaagactccaggatggagtgcagcccagcccccgaccccgcccctcacccccacctgggcgcgggagcaccacgagcagtagagcagcagagtgggacagtccacgactgggcgcctacatggggtctggaaactctacgacagtcccaagtacctagaataagtgagaaagtgggggaaagggagctgattacccgcgcccaagccgttcgttcttaagagccctgcaccgcgccaccagctcccagcacaaacagctccggccgtaagtgacggctgtcgcacgactgccgcgcctgcgcagaacctcccggcggacaagaagctgggaggcgcgcagaaccatcgtcagtccccgaggctctctgcagtccgcgtgagtcctggccaaggtctggcctcggaagctacgagctacaatcttccttcatcctacccacccacgaagagcgccaccccagctgcagaccaagtgaccagcccagttagaaggggctcggccggatcaaacctcggtgctgcctcaaagcatctgctgaagctcttcctcgaccaactgaacttcctcactgagtggttcttactagaaaattataagcccagtctgacagtctctgaaagaatgtcagtgttttactgtaaagccaaagatgggggaagaagcagttttgggggtttcctgatcagcttttattcaagcccttaaatctgtgaatatgcgatgttaatgccaccttacatttgtattagattagcagtatgcaactggctttccaaaccgtggtcctactgatagtaatgtagttgtaaaacgtacataggataatttgcctcctacacagtgtgtaaatagcaaacaacatctctttacttggattttttaaaattccaataaattcaatttattttaatgtaaacaaaagtgataacacgcaaacttcctgcctttgacacaattc

SEQ ID NO: 36869 - DNA, 1738 bp, Homo sapiens
agattttaaatttttattttattttttctggagacggagtctcgctctgtcgcccaggctggagtgcagtggcgcgatctcagctcacttgcagcctctgcctcccgagttcaagcgattctccggccttagccttccaaccagctgggactacaggcgcgcgcccccacgcccggctaatttaattcccagattgatatccattgcttctgagatgggccaattatccttcggagaagacttaggtcgcctggcagaaaaagatgaaagaaatctaagaaaacgacgacactgagagaggagcctagcgaaccagcagagcgaccccaagccgcaattcccccttccgtggatcgattacgaaggcttcctggcaggagctctccagggctgccgacgtgagccgaactgcacattgggaactgtagttgagtgggaaagccgagaggcgggggccgcacacgcgtacaggggccccggtcaacaaagacgcgccgtgcgcgcgcgcgccggagaaaaacacgggaagacgtgcgcgtgcgcggccgccgctgggagccaccaggcggcggagaggacagcgacaggaagggaggggcccgagccaccgactgcaggaggagaaggggttgtgctcctggccgaggaaggagaaaggggcggggccggcgggcagcgtgcggcagtgcggagctcctgagaccggcgggcacacgggggtctgtggcccccgccgtagcagtggctgccgccgtcgcttggttcccgtcggtctgcgggaggcgggttatggcggcggcggcagtgagagctgtgaatgaattctccgggtggacgagggaagaagaaaggctccggcggcgccagcaacccggtgcctcccaggcctccgcccccttgcctggcccccgcccctcccgccgccgggccggcccctccgcccgagtcgccgcataagcggaacctgtactatttctcctacccgctgtttgtaggcttcgcgctgctgcgtttggtcgccttccacctggggctcctcttcgtgtggctctgccagcgcttctcccgcgccctcatggcagccaagaggagctccggggccgcgccagcacctgcctcggcctcggccccggcgccggtgccgggcggcgaggccgagcgcgtccgagtcttccacaaacaggccttcgagtacatctccattgccctgcgcatcgatgaggatgagaaaggtaactagggggctgggggagggggcggcggcgccgggaagaaggcggtggggtcgccgggggagggcaacacctgcgtcccttttctgcgggaggggacggtgcacccccggaattgatatgccccgggagactgctttcccgtaggtcggagcctcatcttctagtattcttaaaacctctcccctttcagggcactgtagctgtcgactttgtttcagacaccagccttcccccacacttctgcatgacccaggtcactatgagacacccagacgtgttgatgacagtgacatttgtcctagagtgaccacactgatcctttctagcactgtgaagagtgtgcagcttcctctgaaccaaggtttccaaaaggttttgatattgaagaagcagtgccgccttactggcttttaatgaaagcagagtattgtagtgtcagaaaaaaagaacaaatggtgacaattttgaaagaaatagctgcatatgactgcagttgaatttgc

SEQ ID NO: 36870 - DNA, 773 bp, Homo sapiens
ttacaggtctgagccgccgcgcccggcctagaatatttgtttcgattattctaaatctggtgacatttcttttgtttttaagttaaatcttcagtaaaaagaataaatgccacctagaggacagaaaaatttttacagtagattatcacagacctcatgactcattactttggtgtataaaatggcctttgtatggtgtcagcacctgggaatgtctcaaggggtgttcattgaccttctggactatctggaaatattttgatatttattggctgggcgcggtggctcatgcctgtaattccagcacctcgggaggccaagttaggtggatcacttgaggtcaggagtttgagatcagcctggccaactaagttagttgactatttgtgaaatttccctctccaaataggaaagataggattggaaacattattcagaaggaagaagttttaaagaagggcaggcttaaagactatctaatgaatttaccaatatggtaaaaccccatctttactaaaaatacaaaaattagccaggcgtggtggtgggcgcctgtaatcccagctacctgggatgttgagggatgagaatcacttgaacccaggaggcaaaagtcacagtgagccgagattgcaccactgcactccagactgggctatagagcaaaactctgtctcaaaaaaaaaaaggaaaaaaaaaaaagaaattttgatatttatgtgagaatgacttttcacggtgttcttaatagcgcaagttttgtttaggagagc

SEQ ID NO: 36871 - DNA, 2055 bp, Homo sapiens
ggccccatccccaagataaagagccacaatctgaaacagttctggtcttaagcatttgggatgaaggatactcaacctatacccagttttctacacgacactacttatgaatatcttttaaaaatttctttatccctacttgttttctgtcttccctaccagaatataattttcacgagaccagtatctgacaaacacacgtgctacatattcaatctttatcgaatgaatttaatattttccaagttttctataattaacattacttctatattattaattttatagagaatccaaatagcattttattaagtagaccattagtcggtccgagttcaaattctgctactacagcaaactatatgtaggactcaaggcaagtttcttttttttgagacggagtctcgcgctgtcgcccaggctggagtgtagtggcgcgatctcggctcactgcaacctccgcctcctaggttcaagcgattctcctgcctcagcctccagagtagctgggattacaggcgcgtgccactacgcccggctaatttttgcatttttagtagagccggggtttcaccatgttggccaggctggtctcgaactcctgacctcaagtgatccgcctgcctcgccgccgaaagtgctgggattacaggagtgaaccaccacgcctggcggaggcaagtttcttaatcttctttcctcacttgtaaaactggaatactgtccattttcataaggttaaatcatacaacacaggtaaaagcgcttcagcacgcaacgaaatttttctaacgtaacgaaaaactcctcgttgctccttgccttgcccttaacctcaacgcttcaggtcccgaccaatctctcggagagctcagagggagccgctctagccgccttccgccacggagtgcagggacagccgggaaggggacggaagccggaggccagagcacgcacttcctcccacgctttcctcacagccaatcgcccactggtgccccaccccttccgttctgggaaaactcgagcacccagaacggcttccggcgggagctgtgcagctccttatcatggtgagttggctgttggggtgagggtttcggctgtagctgattcggtttatcttatttggtcccgaagcgaccttgaaatccctcagccacccagaggaggggtcattggagttgaagtcgggccccttggcaggagcggctgtctcccaaaatgttccccttcagagttctggtccctttcggtccctcacctgttccgcaggcgctcacgatctaggccccgctgcaggcagagctttcagctcctggcgagtttctgacttccctctgccgagatttctttaaggtaataaaagtttttgccagcgtcaacaactaggccaccaacaaaagatctgaaaacaagtccacagcaacaactgtaatagtgattcttagagcagtggcgataacgccagcggaaaaaaaaaaaaaaggttagtaatagggttttagggcagacgtctcactctgcaacttggctttactaaatattaagtagcctgattacggcagcaaatttcataagcgcagtaactacagaaagtcaaggtgttggtaggacattttattgctgctttatttctgggtttgtagaaactaatggaagacccagtagacgttatggttgttgggatatggtgttttctctcaaatttgttagaattagtcattctttgcctttagagctcaaatatatagctctgaactttaaagataagcagttggttgggatttgaagtgtccaagtggcgtgtgccttttgaaaatgcatttattagaaaaatttatggagtacttattgatagcctacgtatgagaaagagaccacatttctgtgcctaagcttttgtcactgtactaagttttttacttaagtggatatggtcgggaaaatgcctcattcacacactttatgttttgtaaattttctgtaatccttttgcacacagaaaatgggtaaaagtttacactttttggctaatgatcaaatagccttcag

SEQ ID NO: 36872 - DNA, 1862 bp, Homo sapiens
ggagcgaccttgtctctaaaacaaacaaaaccactacatttactcatcctttaagtaccaacatgttacctcctgtgagaaaattttccagaaataccatttaacacactaatagacatgtctctcgattgctctattgctgatcaattgtgtatttctccaagttggcctcctaatataccccaacccctctttcttcaagttggaagccacatttatgtagcttgaatattaaagttacgtatgtaaacatttaaaagcaggtgagtttgttaacttcggcaagcttatcagtagacagggccttccagtgaaaagagcacttgactagaaattaggagatttaggtactgtcctaaatctgtttctaccttactttctctggcctcagttttctccctcataaaggaatgtatctacagccctagtctctgggtggcgatttacggcttctctgccttttatcttcattctccgatccatccctcttcatcttacaggtgaggaaactgccatccagacattacatataacttagtcaagatcctacactattaattaatggctaatggcaagggaatcttgagatcctgtacggcggctgacccataaaatctacctagttctaaaattctttaacccacccacttaacaaaaacggaggtaataggtaaacaaaacgccaggaaagatcgcacttaaaggaacaaaagcacccaaggaggaaaaagaggcctgagatttccacgaattacaagtgaacttcctgtcctgggtaaacttccggaatcaacaacaggaagacccaatcagaatcttcctccgggagccaatgggagagcacattacaaagagccaatcccagcgccgctgtcactgttatggtcctgtcagggtgccggcgtcgtggtgcttgggtggtcgccaccaagaagactttggtggggtagtctcggggcagctcagcggcccgctgtgcccgtttctggcctcgctcgcagcttgcacgtcgagactcgtaggccgcaccgtagggcgagcgtgcgggtcgccgccgcggccgcctcggggtctgggcccagccgcagcctcttctaccgcggccggttgggagtcgccgcgagatgcagcctccgggcccgcccccggcctatgcccccactaacggggacttcacctttgtctcctcagcagacgcggaaggtgaggctgagcccctggaagggctatcacccggaggaagccagggcccgacgccgtagggtctttctggtgccgaggtggtcgtggccgggtggggacaggcaggaagctgactggtgactgcagcccaccacgcctgccgggccttccgagaggccccgaaggacggagggaggggtgtagggagctgctttttaaagcatcaagttactcggtcagcccttggttttccccataccgtctggtggctggtttttctgggtggcttagtctcttcaattggacccacaaaatcctaagcttttagttctggaattactcgcccttactcagaaaaaggacagattggccaagggagatctcaaagaatgagaaaaaggaaggagggctgttttcttctgttatgtatcaacagataattttttggggggggtctgggatcagattcggcactgcaaatacaaactaaatggtttttattgaatttgatgtcttgcccgagtccccgttttcctcgcattttgtaatgtttcacctcagtattcagagaaattgacgcaggtatattggaagtttagtgtaaaccaacaatgtgtttccagtagcctctacagatttccttgtattattctgaggaagcgattgtgctggagatattt

SEQ ID NO: 36873 - DNA, 624 bp, Homo sapiens
tatgacttaaaataagatacttaaactcctgcttcttgctcatcaactttacagcagctcttgtctacccagtatataagataaagccattatcactccctcctttcattctctcctcttcttcttccacccaacctctgtcagcttcacttttgctttctgtcttttcgttttataacttcaaggttaatgacagctacaccctgttctgtaactgtaaataaatagtcagtgttttgtctataactgattctaaactttgaacagcagtaagcagcatttgctttactatcactatgtaaatattactcaaggcagacacgggaggcacaccaggacatttcctccttcagggtccactttttgacactgctgtcacctaaaagagaatatatctttccttaaatcctatcaatgttaataaaaaatgaatccaggaggccgggcacggtagctcacacccgtaatcccagcactttgggaggccgaggtgggcggatcacctgaggtcaggagtccgagaccagcctgaccaacatggagaaaccccatatctactaaaaatacaaaattagctgggcttgggtggtccatgcctgtaatcccagctactcaggaggctga

SEQ ID NO: 36874 - DNA, 2233 bp, Homo sapiens
caactctgcatcttgactatggtgcgtaggtctacatgtgataaaatgacattgaactatacacacatcatacaactatcaaatccctccttttgagattgtactagaattatgtaatatgcaaccattgggggaaactgggtaaagagtaaattggatctctctgtactatctttgagtagtgtttaggtattttataaaaataatgtcctacagtttgggtttgtcaaatggttttctcatagttagataggggttatggcttttggagagaaagaccacagaggtctgtagtatattttcaactgtaatctatttcaaaataaaaagttttaaaaaaattctccaaggggggatgattagtaaattgattagtcctttctagacctccaacacaccccaccacacactcacacagacccacactcctattaattccggtaactcgggttgtttggaatgtggatagagaaactaagcttaactatgcgcttccagcacctcgtatctggtacttctgttcaacagaaagccttgggaatggggagggcaggcgtggtaaaaggtacaggtttgggaaggtcgctcggttccttccaatccaaacgagaggcttctgattgtttattctcacaccagagccgtgaccgagacccagaggtccgcttccggccacggccgaacagctgcaccgtgcgtaccgggaacggtcaaggcgcagctggaaccgctgcaaaaggcctccgggcgtaccggacaggtcgcaagggcgggggtccccacctagcggaaatgcacggaggccaacccctccccctgcccccgcgaggagcggggcggactcggcagccgccactccccaggctcacaggaagaaactgggacgctgcggacgcggaactggccagacccgcggcgcgtggcacgcgcgagccctcccgcgcatgctccacccgccggcctccagcccgcgccccgggccccgcctccctccctgcttctccccctctcccgtcagcctccctccgagtttggcccctccggccgggcgatcgacgttccgcgtgcgtgcgggcgcctgacttcacttccggctaacgcgctcggcttgccccctggccccggatggtgactggtggtggtgctgcacctcccgggactgtcactgagccgcttcccagtgtgattgtgctgagcgcaggccggaagatggcggctgcggctgcggcggcctcgggccccggctgctcctcggcggcgggggcgggggcggccggggtctcagagtggctggtgctgcgggacggctgcatgcactgcgacgccgacgggctgcacagcctgtcctaccaccctgcgctcaacgccatcctggccgtcactagccgcgggaccatcaaagtcatcgacggcacctcgggggccacactgcaggcctccgcgctcagtggtgagtcttccgcacgccgggcgggcgcgaagccggggaaagaagccgtccagccccggggctcggcctcgcgactcggggaagcgagatggcgagagggcagggctgggggttcgggcccagccgtgaagggaggcccggaagctgatggagggggaccttaggacttggctttttcagcggctgcagttgggaggaaagaccggcgagtcagggagtggtgggaggggagttgcctttcgggcctggagcgtccggtctggcttggtcctccgcgagaggtgaggagaccttggagcttggcaccggaggaagcgaggcccgggtaggccctggagaggctgtcggtcctgcgtccggttagatgagagcgaaaggctggaagggttgaccccgggcggagaggctggtggccggaggcgaggggcggggagcgtctgagccggcaaccaagccctcccttgtgggagaggagccggcagtctgctgttctcaggtcccgcagtgcgggggacagaccgcgggctgtgcgcccagcgtgggggtgggggtggggtgggggtggggtgggtcgtggtgggggtggggagggaagtaggcgggccagctgcctgaactgcttggtcgacgactgtaggactctgcggacgccgaagacgactagacctggtccccttgctcggggcttccaacttctacgccccagtgacgagaaagtcaggacctgtggtgtatgaaatagattcctttgggtttgtaacttcaggctgtctctacttgttt

SEQ ID NO: 36875 - DNA, 1206 bp, Homo sapiens
tgtgttttacatcttgaatgtgggtccctctttctttgcatgtcttgtaatgttttatttatttactggacatttaaaacaacactatagcaatctggattcgtatctccctaccttttgccaggtggttgttgctttgtttgttttgtgaaaacaaacaaactgttgaatctgtgaaatctgaatctgtaaaatctcttctgtattgtgcagctgctgatttctgtcatttattctgcctagttttaatttttaagacttgtttcttattttgtttcttttggggcagcagagcttagtattcagccaaagattgataggtttggtgtccaaatacctttagccagtaaggctgtgctcaagtgtgccctggcttttattttctgttgtgctttctcaggtctcttttgcataggcatagaggcttagttgactgaggatgtaataatggcttcggctccctctggtctttgctggacacgtgcacagcctctgatcaaggtgggatttgtggagagtttaccaggccccctgtgcttctctcactacatgtaattctgtgttaaatccctggtgtttccagtgctttgcttgccccacacagaattgtgacctcaagtagcagatctccttgtttgtttcccattgaaatcacctgtttaaactggacgctctccatcaatcaagtcccatctggagatagcagtgaatgtgctggttttcactgcttacctcaccctcgttaaattacagttttgtctagctttatagttgcctttcaggaaggggatttatcatcttccttcttctgctatgctggaagtgaatctccaaattagaatgttagaatatactattacccattaatttttttgtcttaattaaagctaaatttgctgtcagtttttttcctgtgacagagattttaaactagaaatttgagttgccttcatttcattgtgaatgctttaaaaaataagagtatttgttaagttttgttattgttgagattaagagatctggctgtggattccagtatagctagtgcctcatctgtaaaatggccacagtaatagttctaccacaagggtttttggtaaaaagtaaatgaattaattaaagcacttaaaatactgtctcataaaagtaaatactagataaatacctgttttcatgtatgtttatgtatttatcattttcttcata

SEQ ID NO: 36876 - DNA, 499 bp, Homo sapiens
ccaaatctgcttttgtagcagggaaactcgtgcctgctgttttgtcagttttcttaataccatgcccatgattcaagcactgtgtaagagttgtgtatttatatgttctaattaaaattgaagttgcagctataattattgttgtgactattgctttttaaaaattatcttcacgtgttataaaacttgtcttttgccattaggaaatggaaaggtcagtagttgcacagctgctgagggtagtttcacatctctcactggacttttggaagttgaacctctgcactttacttgtgtgtcaactagtgatggaaccagaatagaaagggatgatgcaagtacgtttactggtatataccttcttttattatatactttatgcagtaataaagtgatatttatatatttaaacattatttctaattatgtaattttcattgctgttaagtggaaatttatttgtgggaggggcatttgggggaaatataaatcgttttat

SEQ ID NO: 36877 - DNA, 1284 bp, Homo sapiens
cttcaccgactccacgtcagagggtctgtgattccctgagagggtacccttaggctgagagcaagggcccacctgcactctgcgcgaaggactgtggttttcatcgggttgtcgagagcgttctaacccaaaatgctttaagaatcacaactctagcccttctaatcaaactgctttggccaagacgtccgttttgagttgcatttgaaccctagccctcggtgggaggcacactcacttccacgttcacagttcttggaagcggtcccactgggggcggggctgagcgcgaccgcgccctcaactccccctattgcccgccccggggtggggcataaccacccaacaggctccttactcaagctcgggttcttctcctaggcggaagccagaccagagagcgtgcgtgtttttcccagggtgccccgcgctgctgttatggccgcctccttgaggtagtatccgcacatggaattctagggccgcaggtgtatttacggtaactgtcgccactagatttcagcgcctttggactctcctgttttcactttcttttgttgactcccgtgtggccctcgtgggagcctgttttggctgcagcggtgtctggggtgatgtggaccccggagctggcaattctgaggggattccccactgaggctgagcggcagcaatggaaacaggagggggtcgtcggttcaggtgagaggcgcacctaccgggccttaggctatcgtgggaactgtgaggaaaagggatggcagcgactgattctcatccctcccttcatttttccctaacacagtctagctgattccttgaggctttgggtcgtttagtctttgacatggtgggcgtggtcctcactttctttgcgcaaaacttcttaccgcccaggttcagtaataatgacaatggcaatgtcagttatttttctaagcccttaacatgtactcagtcatttaatgcttatagtagatacttaaggtagattcaatttttaatcccattttgcggtgaagatctgtaaatacagttgggttaagtaattttattttatctatttatttatttatttatttatttatttatttatttattgagacggagttttgctttttgcccaggctggagtgcaatggcgcgatctcggctcgctgcaacctccgcctcccgggttcaagtgattctcctgcctcagcctccagggtagctgggattacaggcatgcgccaccacgcccggctaattttgtatttttagtagagtcgaggtttcaccatg

SEQ ID NO: 36878 - DNA, 605 bp, Homo sapiens
agcctgaagcctgctttccctcggtatgacctgggagaggttcttcagctcctctgtgctccagtttgttcatctgcacaatgcacataaaaatagcatcatcctcatagggttgctgggtgggttacatgtgctcacagagcatgtggcacataggaagggctatatatgtaagaggtgttatctgcctcattgttttcatctcctcatccttatctaagctcaggagtcacaggtcactggtgatcagaatccagcttcatgactcacttgctgtgtaaccatgagaaagtttgttttacctctttaagcctcaggttttttatttgtaaagtaggggtaataaagtacctgcttcctagggttattgtgagaatttaatgaaatcgggtaggtcacgtgcttagcacagggtttggcacaaagcgagtgctcacagcagaagtagtagggaggtatcaagagctgacaccatggtggtgaattctgtttgagttctgttttgaaccatgaggaaacatggaagtaagctaacaggcagggcagtacagtgagtgagccagcaatgtggtgttactgtccacttccaacagagtaaggtagtt

SEQ ID NO: 36879 - DNA, 2179 bp, Homo sapiens
taaggccactgggggataccaaagaagagaggctaatcctccaaccagaaggttccattttgtgccttctctcaatacatggccaatttgtgatagagtaaataagggaattttgaaagcaccaaattgagtacttagtagatgtatcatacctatggactgattatgatccttatggttcatatttaaatttgatttggtgtaatctataaacatcatgatgtcatgatcccttttctaagggaaagatcttacatgctagagtaaagcacatctcttctgtgcaacatcatgagttttggaatggaataagttttcatgagttttcctgatttgttagtctctctggagcaaattcctttagccagttattcaagcaactatgtgcctttatttgtttataagatacagtccacagcacatactaatagtgaaatgataacatccaagaattttcagccggccacagtggctcatgcctgtaattccagcactttgggaggctgcaacggaaggatcatttgaccaggagtttgaaaccagcctgggcaacatagcgaaacctcgtctctacaaaaaatttaaaaagtagctgggcattggggcacacacctacagtcccagctacttgggagactgaggcaggaggatcatttgagcccaggagtttgaggctgtactcagctatgatcatacaactgcacagtagcctaggtgacagagcaagaccctgtttctaagaaaaggggagggggtgcatttttctgccagaagggttgataaacactttttgtctttctctaacattcatgctgggtattatagggtagatgtcttcattagcacatagtgtcgtatctgtgacaaaggtataagacctcatgctgcaggtcactgtctacatctctccctctgtctgcctctctctctgtttctcagccagaggagagcccctgcaagatggaggaaggtgacattaccctggggggacttaagtggcacatgtcaccacttacttcctcactcaaggaaaagtctggggagcaggagcaagatctgttgtccctttgtaaccccacagggacttgcacaaatagagttggtgattaataactgttggaggctgaacagacttttctgtgaccccttattagcagtgccaggatgcgaagattgctcatcagccatggtgagcaccacaaattagtcatgtttggaggcagcaggtttctgatggttacatcagagatctgggctcattcctagaaacatcactgggcaattttcctttttaaatcagaatcgatggtgaacttatctactggatcagttaaaatgtcctggtctgagagtcagacaaggcctgagtttagaggcttgtgaagccacatgaccttagataagtggccaaaccacctaaaggtacacttttctcatcagttaagttggttgatactaacgttactgccctcataggcttgttttgtgagtcagatgagctaatacctgcaaagtgctgggctcacaacaaatgcttgataaatgttggctattattatcattattagggtaaccatatgttttctaaatcaagatactttgacagttaaggagggcagaaaaattagaatgttaacttttctaaaagatttatttcttgaccagtaaattggtttatattagtggacctataaaatagttctattcaaaaactattttcaaagataaaatactttcaaagaaaaaatagcaggaagtcctagccagagtaatcaggcaagagaaaggaaaaaaaggcatccaaataggaaaagaagaagataaattatctttcttcactgacaatatgatcctatatctagaaaaccctaaagactccaccaaaaggctcctagacctgataaatgatttcaataacgtttcaggatacaacgatgtacaaaaatcagctgcactttctatacacaaataatgttcaagctgagagccaaatcaagaacacagtcccacaaaaaagataaaatacctagaaatacatctaaccaaggaaatgaaagatctctacaaggagaactacaaaacactgctgaaagaaatcagagatgacacaaacaaatgtctaaatattccattctccctctccctctccctctccctctccctctccctctcccttttt

SEQ ID NO: 36880 - DNA, 541 bp, Homo sapiens
cctccttccttctttccttctttccttcctccctccctccctcccccttccctccttccttccttccctcccttccttccttccttctttccttcctccctccctccctcccccttacctccctgccttccttccggcgggcgtacttgcgggcgggcggggctgcgggggggcgtgggtagggggggggggtggggggggggcgggggggggggggggggggggggggggggggggggggggggggggggggggggggggggggggggggggggggggggggggagggaggggggggtgagagggggggggggggggggggggggggggggggggggggggggggggggggagggggggggggggggggggggggggggggggggggggggagggggggggggggggggggggggggggggggaggggggggggggaggggggggggggggggggggggggggggggggggggggggggggggggggggggggggggggggggggggagggggggggggggggggggggggcgggggcgg

SEQ ID NO: 36881 - DNA, 2218 bp, Homo sapiens
ctttctattgcattcacataataaaatcatgcgacattgttttgaattcaaatgctaaaagtaaatatgtcattatttcatggttttccccaaagagcactatgaccccccagactctatccctggtacattctgccatctctcttaatgggtcaggtcatctccaagttgggtgacccggtcggattacggtcccgtgaactgattcgcctttattaaaaacaataatggcttagggttttcagggatcctgaactctagtcctaccctaaaggcccagggacagggctgtctctgcggttgtccctgggcggttctccccgtcccacgcgggcgccctctgctgcccgccctgcactcccatccctgccaagcgagaagtagggtaccagaggctgcacaccgagaagcagccacggggactttacagccccacagggagccacctaaacggtttccgatggagacctcagcgcgccccgacagccctttctggggcccgatttggtatctgaattcaaccccgcagcaagtatcacagcaaacacggataagaaaatgccggggcttccaaacaatatcaaacgcatggggcttctgaaaggacaggatcgttcagtaactttgctgagcgctttgtcctctcccgggacacgggaccggggcgtggggacctccgcctcggcgacccacgggggcaaccccagtggatgtggagggtggcggcgcgccttcgggctcctcgcacgccttccccaattaggatctgccgcctgacgtcacgtctgccggagattggctgctcaggtctgacactcggggccacgggagagaaacttttaaaagacttcgccgccggggctgcctcggagtgtcccgcgcgctctcgctcgctctcggccaccctcgccgggccccgctgcggcgcgcgctgcaacccccggccggacgcgcggaccctcaccttgcgcggcccgctcccctcgcccctccccgctccccgggctccgcgctccccacccccacgccctcctcctgctcccagccacaatcggccggggtctggggccgctcagctgcccgcagagcctcctccctcgccaccgacttggtctcctcccgcctttcccgggctctcggcagctctcgggggagcccgaacgcgcggggaaaggcgagccgcacggccgggggagggggccggaccgcgcgcgaccggtcgcgcccgctggggcccgcgatggcgggggcctggctcaggtgggggctcctgctctgggcagggctcctcgcgtcctcggcgcacggccggctgcggaggatcacctacgtggtgcacccgggccccggcctggcagccggcgccttgcccctgagcgggcccccgcgttcgcggacattcaacgtcgcgctcaacgccaggtacagccgcagctcggcggctgccggcgcccccagccgtgcctcccccggggtcccctcggagaggacccggcgcacgagcaagccgggcggcgcggccctgcaggggctcagaccgccgccgccgccgccgccggagcctgcgcgtcccgcggtccccggcgggcagctccaccccaatcccggcggccacccggcagccgccccgttcaccaaacaaggcaggcaagttgtgcgctccaaggtgccgcaggagacccagagcggcggaggctctaggctgcaggttcaccagaagcagcagctgcaggggtaagcccacacccccttccgcccgcccgcccgcctcgcgcgcaccgcccgcggagggacctgcggggtcagggccactcggagccccgcggtggccagggcggtcgcgcgcggtgggtcggctttctcctcccgcctccgcctgctctgggcgccgcgggaagaggggagtgcggggaagcccaggaacttttactgacgtgaaactccgagtgcattgttaccgagctgcgggtaaacacaaaaggcatttctgcctggggcgtaaccttctgcgcgcaaacccaactgcttctagaagatgggcgtaaacttgaggtcactacagtttaatccctcagcatcaattaaactctgcaactgagttttaattttggtctagctaatgaaaaaaatgtttcgagggcgggctagccgtaaagatccagctcctgttctgtggcctggaactttgcagcatcagagaaatcatgggcttggactt

SEQ ID NO: 36882 - DNA, 652 bp, Homo sapiens
accaagggggagaggtaagaggagaaccaaggttgttgacaggagggggggttcaaacactcaacccgcttcatctgcttcatgtattaagcttcagtgtacaattgcatttgaaaagaggattttttttccaaattttgaaaacaagtcatagctgttcattgataagggcctctttaaagttggcagtgttctccttttgagccacagttcaggacagcctctcgcccttgtgaccacctgtccttcctgacacgctgacctttagtccctgagctgcctcatacctggcccatgatgctaactatccacaatgaccctgactccattcacattgtgggattgcctggctctgccatttgccccaattaccaaattcctttactactgaaagaatgctggtcacaccagaaatatgctttgtacaaatcatagtacctcaagacagtgagtctcaaatatggctgtggctttcaaatatttttctgcacgagaatcatctggagagcttgttaaagcacagattgctcagccccaaacccagagtttctgattccatgggtctgaggtgggacgtgagaacttgcatttctcgaaagattccaggtgggactgatgctgctggtctggtgaccacacctagaacaactgc

SEQ ID NO: 36883 - DNA, 784 bp, Homo sapiens
gtataggccctgccagaatggttggcaatgacaaggatctgacagtagcttcttattgccagggcttgattagaatgtgacaagtcattgctgaacattggttaccataaaggcaaatattttgtcttccctgaaacaaatagtaagaggagaaagtgtcctgttgtagaaactcccatctttgtagagatttccatcctttcagtcttagacgcttgcagaaagctggcatggtggcaaggcagaggtgtcctgtcagtggccaagcaaacagcaaacacatgctcatggtcactgctgtctaggtcagaggccttcaaagctttgatcaaatacaacaccagtcactgttgggaaatcctcctggacatgtcccctcatttgttgaaatgttttgaccaggcaaatgactataattattgttatattaaaaaaatagcctttgagttttttaacctctgtaatggttcagctctgtggtggaaaatatttaacttcaattttcagaagtacacctgagtgactttattaactacccttgaacaaatgcaaggggtgagttaataaggtggttacatttgtgcaggtggtggagtgagcatctgtgagacggtggaaagaaaatgtttgtgttatgttgggtgggtaaggacaggtaaaaccaccttctccttttctgtgtgtgaggctggctggctgctttaggataaatacttccaggtgagtgtgagcacagatgctgctaggcattgtctgggagtaccctggaaggtcaggcccagcg

SEQ ID NO: 36884 - DNA, 1556 bp, Homo sapiens
gctttgcatttgtatttgatagtatttagtgcttgaaaatgcatggatatggaggcctatgctgggtcttctccctgcatcacaggattcatgaagttattaatcatatctgtgctgatttttattttgacgacttgttcatacagccacagctgtgagagttaatgcagcaggctcagcatggtggaattagcagaagccctggaatgaagtgaagtgactctttgggaagattcagttattcctgcaagatgacaaaatacctaaaaccaacacaaccatttatttgcttatggttttgcaatttaaattggacagggctcagtagggacaacttgtctctgctccatgtatcagcgtggacggcttgactgagagcagaggatttacctccaaggtggcacactcatatcactggcaaggtggcactggctgctagttgggagcttagctggggttgttggctggggacctcagttttcttccaggtgcacctttccacatggttgcttgggcttctccattacatgatggctaggtcccaagaaggaagaagtgttgctgcctgaccttcctgatgcctgggctctcaggtcttagtatggcacttctgcatgtcactttcagaacagtgacaagtccagctcagattcaagagagagggaacataagctctaccttttttttttttttttttttgagacagtgtgtttctggctggagtgctgtggcacaatcttggctcactgcaacctccgcttcccaggctcaagcaattctcgtccctcagcctcccaggtagctgggcttacaggcgcccgccaacatgcctggctaatttttgtatttttagtagagatggagtttcaccatgttgggtaggctgctctcgaactcccgacctcaggtgatctgcctgccttgacctcccagactgttaggattacaggcgtgagccactgtgcccggccggctctgccttttgatgggagtagcagcataaagtggtagggaggggtagaatcatttgaggtcatctttagagactagctaccacgaagaaccacaatggtcttttttctctttcttcctcattctcactccacagaagcctgtccctaatcattgtgtgagccagtgatgacaaatactggcaagaaatctaagaaaaaatttaaaaatcagtactaggaatacatagtatttaagagatcgtggcttggtctcaaactccctacctcaagtgacctgctcatcttagcctcccagagtgctgagattacaggcgtgagccactgcacctggcctgctcttaatgattatttaaatttatatttgtttagtgattacacattatttgcttacttctgacatactctgagtctcactcagatcagagattataggagggggaatatatttactagaataatttctccattcagaatgtcagaaataagaaagccttttttttttttttttttttgagacagagtcttgctctatcacccaggctggagtgcagtggcgcaatcttggctcactgcaccctccgc

SEQ ID NO: 36885 - DNA, 2923 bp, Homo sapiens
tgaccacctattttaaattacatcacatggttaacaaccactcctgctgagcttaggtttagaaaacttcaagcttccagaacacagctcttggggagctgggaattctggggctgtgtacttgacataaaggcattaaactcctgaatgaaacatgagattctgtacccagcctttgtgacttgtagtccctttaatttttgctatgctcaactatctggttggtgaagttgttactcgtaagattagaaaggcaaatagggtaggaaaatagggtggaaagaatgcttgtgtgacttgacgatctgactcagagggaagagagagaacaatgaaagcaaacacccatccctcacaggtttcaaatagattttcataaggatgaaagacctgtaaagatttattaaatatattggtgattgatgggcatggtccacgtatttagaaaatttcattatgtggaattcttcattattccaggagactggatagaaaaggcattgggatgttatgctaatttttttttctctttagggattttggaggaggctaacccagagacatttacaacgaaacaacagcatttatttggatttggtacaaggagcaagcagacagagtagactaaaatgtgtgacctcatgctatatttcttgtgatctgatatcacttagtgttattgaatgacttcaaagggcagctgggaattactgtgaagacacacacagcaaagcaatttctcacctgctgtctctgatcacagaagacacagttagactcacatttctccccaggacacatgcggtagacatgctgcaacttgtttggagagaaaggcaaggggcagagagtcacactgtttgcactgtgtggactgagacaagttttaaatataactaagggttacttttttagaattaaaaacagtagaagctgagcttcagggcatgggttacttcctaaaaatacaatcactgaacttttaaagaactctaggatcagcttgtcaaactggagtagatacgaatgtgaaagacatctgagactctttagtacttggcgcacagattgagaattaactcaattttgactgtttcaaatgatgaaagtattttcagaagaccaacctggtagccaggatggtgtagggttttgttgcttaacctgctcacctagatcttgatgtcagtgggctttctgcaagcccactatctgagtttatcgctgtcttggtggcagttttggccacttttttttttttttaagagatggggtcttgctatgttgcacaggctggactcaatctcctaagtgcctacaataacctcctaaatgttatgccccttgtgatgttctcttctctttgaccttgaccagtttgcttcactgtcgctactcttcagagttcctctacaacacattggatctggtttctgaacctgtttctatctgtaactataacataaggttaaatgtcactgcagactttgtgtctttgcagagtttacttgaatttaattttgatggaaaaacatctgctttgaaggattggagactgcttgattgaataaatcgcaaatcaagtctgcaagtgtagatgttaccatgtaatgaattaagagaccattggccatctttcctttatagacgtccttaaatcccccagcatcatttggaaagtagtggctctatgtttatatcagtcagtcaaccaagtttaggctcctatcccaggctacagaaagttctgcataagtcacttaactgacctcacagcttataacctagttggcaaataggagagaactgtaagaagttgactagcatgtggaatgtgaatgatgacagtggacaagagccagatggtacaaaggtcgtgatagggctgggtgggtgggtctgttagtcacttctcacactgctataaagaaatgcctgagactgggcgatttataaagaaaagaggtttaactggctcatggttctgcaggctgtacaggaagcatagcagcttgtgcttctggggaggcctcgggaaacttccaatcatggcatgaggcaaatggggagcaaggcacaaaacatgaccagaggaggaggaagagagagagtggggaggtgccacacacttttgaacaaccagatctcagaatcacccactcactcactattgcaagaacggcatggatgggatggtgctaacccattaatgagaactctgccccatagtccagtcacctcccaccaggccccacctccaactctggggattataattcaacaggagatttggtaggactcataccaaaccctgtcagtggacatttgggagagacttcatacagaagggtgggagaagggtgggcttgaaggcattggaggttttaattgttctcattggattgaggggcctgtgctcctgcatagggctccctctgtgcagagacaaggaggtgggaatcccagaggttgggtgagcttctgcaggggtagaccagtgagaagtgagggtggaaaagggggtttgggttagatgtagatggccttaacatttacccttggtcagctaaaatgtgtggaaagtttttgaatgaaagggaaaaaaatgattcaaagagtagcgttttagaagactagtctgtccgcaagcctggattaggtttttgttcctaacccactacttttcagacttggctgtatatttcagtcacctggggagttaaaaaagtactgaagcctggagccctcccccgctagagattctgatttaatctgtttggagttaggcctgggtttggggagttttaaaagttccccaggtgattctaatgtacagccaagcctgagaaccaccgcccaatccactgataagatcttgatatagcctccactcagcctccactcatcgagctgaaccacagca

SEQ ID NO: 36886 - DNA, 2477 bp, Homo sapiens
cctgctatgtgtcaacctttgtattagggcataaacagataaataaggcaggatagtcacccttaaataacccacagtttactggaagtctcagtctctccctctgtctctctcttgctcacacacatatataattataatgataaagatatgtaccagatgcatctagttgcatttatttgaagaggtgaggtagctgagagtgataatggtatgtgtatcctttacaggatactaccaaactgtttgctatagtgactataccattttgtttccttaccagccgtgtatgaaagttttagttgctccacatcctcatcagcacttagtattgtcagttttttctttgtgccattctaataggtgtatagtcgtagctcattgggcttttaatgtgaatttttctagtgatcaatcttttcacatgcttttgagtatctttgcatatgcgtacttgccatccatagatcttctttggtgaagtggacctttagcccatgtttttaattgtgctatttattttcttacttgttgatatgactaacttttaacagaactttcttttcaggaatttgttaattaggtttcaagtacatttgatataaacagtttataaaatgcttcaaacaacatgctctaggagtggttgccagggaaaactaaaatggactttgatcccgactggggcaagagtgatgaagatgaggttttttctgtgcttttcctcagtgtgattttgaaacaggaggacagagcaaagggagagaaataggagccaaaaagctcaggagggactttgatcttcagtctaaaagggaaaacagggattcttttggttgccagtggaagctggaaggattagacatgccaaagggatggtttactctgatgagaaaagcaactggacaacaacagcaaaaaacactgcaaggcccaattcccatccttttcagcccaaaattggaggaggccagaccaatgggaggtttctgtcactgaagatgaggtcacattattttgtcatccagactgatctaagcagatacttttaggaaaggtaagaatgccttgatctatgcctagatatttacaataggcggcaatttttgacatttatgttgttacgctaataaattggtattttttaaaaaaatatttggctgattatgtaaaaactgttttgggaaggagtctatataaagctaaaacactccctgcctcctgtctctgacttgcaggccttgtgccattgggaaaaaaaacagccaggcctatggtttaaggccttctgggcatctgactacctgcaccccagcactgtctacacagtttgtgtacatgagtatttttatggggaatggttacagagctcttctcagcctcagggaggcctataatccccaaacggctgtgaaccgctgttctagagggtgagattggcaaattcactacagtgatggcacagcaaatgttccatgtctcagcttgaaaacattatggcaggaagtcctgcgtcagatgaaattaggtatacattaaagtagtgggattgagcccagagccttttcaactcttgtatataacagctttgattctcttcctgacataatgagtctataataattggtcaagaattttttttttttacttattaaaagaaccacctcagataatatgttcctgattatgtaactataattataaaaaatcgtatattattgtgtttaataaaaaccaaaatttataggctgggtctaatatatgcatcttgccatgctatattttggagaagacagtagagtgtaagctatgatctttttgagaagacaggagccacgtgcgcagaccatgaagtccagaggagggtggtggagggagagagtgtttcaggctagaatggccggttttagctgtggatggaaaggtagtatttgatggaccaagaggagaggaaatctgtaagcaattgctcagaggaggaggaagtagaagaaggaatttggctgagcatgttttacatgaagtattcctattaggggagtagccataagtgagggtgagaatgcaacacaggtgaaataacattttgggaaatttatctggtggtggaggaccaggcggtggaggaccaggcatagagaagggaagagactaaaatgagagacggtgtttaaatagttaatgcaatcacatagtcatgaagagggagggcttaagcaaaaaggaagggatagctaggagagcccttgtagagggtggagaaggcaggctgtgccctattcaaggaaagggaggcagtgggtcaggtgattccactgactcttagactctatattcacagtatagatttctgttcgttttttttttttcttcaaaagcctttaaaaatgttcaaaaggaaagcatttagaccttttatgaaatagagttgttaaaggaaaaagtatttttttttttaattatactttaagttctgg

SEQ ID NO: 36887 - DNA, 2262 bp, Homo sapiens
cccgggttcaagcgattctcctgcctcagcctcctgagtagctgggattacaggcgggcatcaccatgcccagctaatttttatatttttagtagagacagggtttcgccagactggtctcgaactcctgaccttgtgatccacccaccttggcctcccaaagtgctgggattataggtgtgagccaccgcgcccggcctgaaactcttgaggtttcctcagccagaaaatgagcatggtaattcttcacaccatgattgtgaagctccatgagttggggcagaaggaagtgctgtaaaaactatagtccccgcccgttgtggtggcttgtgcctgtgatcacagcgctttaggaggctgaaggaagagaatcatttgaggccaagagttcgagaccagcctggtcaatgtaggcagacccagtctctacaaaaaatacaaaaattggctgggtgtggtggtgtgtgcctgttgttctagctacttgggagactgaagtggggggattacttgagtccaggagtttgaggctgcatgagctgtgattatgccactttaactccaacctgggtttcagagcaagatcgtgtttctaaaataagaaaaaaaacacacacacacacaaaactgtagtcctctgcaatattactgagtgaggattgcccgagacttgagaggcagttaggcagcccccttcattctgactgtggtggtcctctcctaattgagactgagaattctctagatgtgcctgttaaatatttgcatggccccggagtgccattcagagctggattttgtttctgatggctcagttgcccttgaggctgctcttgggttcccagtgcttgtgttgccaagttgtgtgaagtgtgcagagctgctctgggtttgcagagctggcttcatgtgttgtggagagggccctgagatgttggtgactcattcaaagccactttatgtctgcttctacatcttgctcaatctgctaggcttactaccatctaagtcctagaaggcctatcaactctccccaggaaatgtagaacccaaagacataggcacatactttcatttcctttttaaatgaatacagtctctttaaaagttttatttgaataccgatccatggtttgcacaagccatttgaattttaaacagatgtgtgtgcaaagctgggagtcagcattgcatgtctcagtcaagttttatagtcattgacttttagggttacagcctggtctcatagctgtgccttgggtggaaaggctggtaaggacttcgatgtactttcctgtccagagttttgagactttagccaggactagggcagctttctgggtgtccagtggagggccacgtcattcgaccgttgctatgggaaaaacccatgagctctctcattccaaagtttaccgattgccaaatacttgggtgtgtggtatttggaaaaaatatttagtgatgcagtgattctttgaagaggtgtcctctaatgtttactttttaaaatggtaaaccaattttaatattgttcatacctagctaagactgaattagattatttaaacatatttaaacatcatctctgtaagtgaatgggaaaataggaaccagaccaaacccctattattgaacgctaagagaaatggatttttttaaaaaccgaaataattaaaatctagtgttacatgtgagtctagggactggatttactatttggcaactacatattttgttggcaataaacttattgtctaaaagaaaatgcgtagagccaagatagaggcccaagtaaagaagaaagtgtgatcctaagggaaattggtttattgaggagaatgtatcttcatatactatttgtaagttttctgtatggaggatttctcccttttcacccttgtatttatttaatcgtttagttgtagtaccttagcctcatttgttttattcttcaggttatattattattttcttgctcaaattgttccatctttagtcattgtaagctctttcaggttgactcccggatcaaaatatagtttttaaaacaggcttttttttttttgagatggagtctcactcttgtcacccaggctggagtgcagtggtgtgatctcggctcactgcaacctctgccttctgggtgtaagcgattctcttgcgtcagcctcccgagtaggattacaggtgcataccaccacacccagctaatttttgcatttttaatcgagacggggtttcactatgttggtcaggctc

SEQ ID NO: 36888 - DNA, 3835 bp, Homo sapiens
gccatccaagtaatgaatatgcttaaataaaatcatatgctcctggataacagtattttttccatacacaaataggtgtgtgaaaagacattttcagagatgaaatatgtaaaatctcattagagattagcattagcagagtaacatttgcgattctttttttgtggggtggggggagggtgtaaacatatgtttttatttctcttgaataaatgcccaggagtgcagttactaagtcatgtagtagttgcatgtttagtttttttttttaaacaataaacattatttttcgataatttttagattcacagccaaaatgaagggaaatagatatatagtccatatactccctgcccccaaatgtgcacagcttcttccattatctattaccactcccacaccagaggggtaatttgttataaatgatgaacctgcattgactcatcatcatcgtccagagtccatagtttatattgctgactcttgatgttgtacattctgtgggtttggaaaaatgaataatggcatgtatctgccattacagcatcctacagagtattttcactgctctaaaaatcctctatgctccacctattcattcttccttctcccctaatccttggcaaccactgatctttttattattttgataatatttgcagttgattttgatgataaggaatactaactttgagtcccaattaagcaaattgtcctccctctaccaaaagaatatcattcttcacattaggaggcttatatacaaataattatactttgttattaatattatgttttgaattttgtcaatgaaaaatgtgtgtgaaattgttttctctcattaagtaccctctatgataccctcaatattgccttttggcccacaactaaaatatatactatatgggtctttatggaaaaagtttgctaacccctgattcatatcaatgtttaactattctaaccatttagatcagagaatgaatgtttttgtgcctcaataaatgtcagtttcaaaaaccaacagcagtaaaggaaattttgtttggggctcaggatattttgctccggaagttaagcttacttaaagtttactcttgttctgaaattgtgttaagttgtctgggagagggttgagcacaatacatgactgttgattcctctctgtgtacttgttaggtatccctggtaccctgagatgatggccccactcaaagccagacttccgagagcctggactggggagaaagatgcccctggctctgtgcactgatgcctccctccccgccccactccattcatacccacaccctctccctctagtctgcacctcttcctcctgtgcatgggaatatctagtccctcagttcccaaatttctgcagatgaagcacccattcttgtcattcccacttatgatccattttgatctagaaggtagtgttgtctcctaggagggcaacaagcaagtctgagctgcctgccccagagtttttgctgtttgctaaggcatctctggggtgaacagagggcaggtcaatgttacctgctgaccttgaaacccttggtgtgtgtgcagcacagcctggaagttgtcagtcaagattattctcaagcctcatagactcaggttcctagtacagacatctgcatccagaccagttatctgctcacaaaacaaagttgaagagaacaagaatgaacatcatgcagttttgatttttgcctcttcattctccctttcccccattttcatccacaaatgcttactgtcttcaccattttgtgcaatattaatttctctgggttatttatagggagtgggtgggcacagtgcttatgacttagaatggaagacggtattccccgaagagctctcaacagctcacagtctgagggagaccctgtgggtacttggtctgttgatcctgttgaaaagtgagcatagcatgtgggaaagtgactcatggatgtgacttcaccattgccctccttttaaacttcttacagtgaaagcataacccagttctgacaaaggttttcagccagggctgggcctgcctttgactcagcgatgtgtcacattctctctgccggaaactctcattcttaacaccagtcatcatggtcctggcaacacactttttggagaggtgttggtatttggtggatttattttcttttccagctgcccacaaaaaaacaaactcagaaatatctatttgtttttcctttgaaaagtttgttggaatagtgtgtcatttctccatctggagccgttgttgctttgccaaggatagtttgcttagggccatggcaaggtgacggtggccctaagtgaagggtaaaataactggggcggcatgcccgtctgggatggcgaaacctctgagctgctgtcaggcggtgggtggctagccatggctggtggccacaggccatcacttcaactgtggctgggatttgcttaaagaagtcctttaagtttcttaagtaatgtctgcccagtcactcacctaagcggatacctctttactgttcggtgattttgtgccaagagaatgcctagacttgccagcccacattggaaacttcccagaagcccaagggccacacctaatttacaagaactggaacccctattccattctttgctgcttacagcttatgggagaggcatgttctaacgggcttctttccttctaatttgtagatcctgtgcaggcagctccttgaaggcagggctgtgcctttcttgtatgttttcttagagtgttgagctcagaggagaccccagtagagaaggcactgtggcgtgggggagtaacacctgtttagtagtcaggggaatagggtcaaaactccacgttggccacgggctatgagatcttggcccagtcagttcatttctctgggcatttcctcatcatccaattgctgggctgagtgattctctaaagcagtggttctcacccttgctagatgtatgagaaacacctgtggactttttattctttaatcatacatgatctggccacagccactcatagtgggttcagcaagtctgggtggagcttgcagagtaaagatttttccagagttctttatggccagggttgagggccactatgtgcagtccctgactagataagcaatgggaacaaagagtgagtcgttcaggccacttccaagcttactcacgtggctttgggtaggtcttggttcctcatggcttttggcggaaggcctcattcatacctcactacctgggcctctccataggacagctagcttgccttcctcacagtgaatgagaatgtggacaaagtagaagctacagtctttttgtaaacgcaatctcagaagtgatgtcccatcatgtttgtcatattttattcattagaaatgagtcccttgatctgccttatactctaggggagaggattctgcaagaatctggactaccaggcagtgggatcattgggtgccatcttagaggctgccttgcacagcatctaggaggtggctgcagaatggattttggagcaggaacagggggaagggaagcagggaatcagaagggtgtggtccacaagctaatggaaggaggatagaattcaagtataggctaggttatgatgtcgtaacaagtcataatctgaggggcttgaaataacaaagatttatttcttcctcatgcagatagtagttacaggctgttttgggctttgtgccatatcatcacacgtgggacatgttcatcacgggtcgtctggggattcttctttatgtcattttcactgtgggacctaagctgacaaagcagcttgaatgtg

SEQ ID NO: 36889 - DNA, 731 bp, Homo sapiens
cttgtttggaataaatttattttgtatctcttcttcaatgacataagaaggttaaattagcccaatcatgcaaaacagtgagagagtcaaaatttaggggatttctgtttcagtttccttcttcccttaagatttttgtctctgatacttttttaaaaaaattttaaatttttgctgtatctaggagacctaatgtaagatattggaacaagcagttgtctctagacttgtttctgccattgttgacatttacttaattttttgatgttgcataagttatttaatttcttttgcaatcagtttcctcacctgtagaatgaggagactggactaggtgatttcctaagtcccttttagctgtctgaacactgcttttcatcggtgaagttacaactggcctccttcaagaatgtagagtactagaccattatcacatgagttacagataaggtctggggaattacataaagtcatttactgtaattggcttgcagtactctgtgagtaccacataataatgctattttattattcagtgtgttagaggttacagattccccagttgccagagatgtgatgaatccccttggccttggcaaacagactgctttcatgagttgcactgcacatggttataaacccaatggctttctgagctaatgtgcaaggtaatgccatcttccaaatgaaaaaaaagttgcatttacccattcctctaacgagaatatatt

SEQ ID NO: 36890 - DNA, 2352 bp, Homo sapiens
gtgggtaatgagctgcccgtcactagagattttcaagtaaaggttacacgaccacttgatacgtggaatgcaaacagtggatgagagatggttgcgttagaaaacctctggggccccattccaaccctgaaattggaatggcttctttggttaaagttctttgtttccaagctcagcttatgaccacagttttaatttgttgagggtcttatagaggcatcttgggatgattttctgaaaatataatattagccaaaccaaagcagtataaagagagacaagcttttctggtgggcaaagatggtataaaaaaggctggcccagagcctctctcccctttggccactccagtcatggagtggcgtcagaagggcactgcttcttgacggccttaaagcctgacagatgactggctgtcttcagctactgctaccatctttgctttctgcctagtctcctggaaagaggaaggacctggctaggggcctatcgcagatgtagcaatcaaaacagtgtgtgtcttgcaatttgccagagagttcaggttgcgatccagcagtgaagggcaggtctgggtgaagcagaactgcacagagacagtgcagttctgccgtcatagcacaaaagcagccatagacagtacagaaatgaatgagggtggctgtgttccagtaaagctttatttacaaaagcaggcagcaagctggattgggtccctgaactgtagcttgctgacctctgatagagacgttgaaagttagaagtgtgtagaaaatgccagtttcaattctctcaagttttggaaaaactgaactgaactggactgaaatggcatgtccggagtcacaccgtggttgagctgggattgtaaaccaggatatacttttagtctagggcttattttgtgataccacatagcctcggctgtgtggtcaggtgatagcatttcgtttttaagagaaggccacgctaatgaaagaaagctccatccccagtggctactccaggtggtctatgaatagagacagtgagagcccaagggtgttatttttagggaggcaaccatttatccctgtgacctggcttacccctttaaagatgggccccgttcacaggaaaacaaaatatatgttgcctaaattcttatggagaaatagtgccctggagttgtgaaaaagaaatgggctcccgcagctgcgtcacagcatttgatcacttcagccgagagtgccaggagatttgagacagatgttttcagacatgccgcatgcctaaaacatttccaggggtcgggctgcaaatagtgacttaataagtggagaaacagggaaagtatgcaagttgaggacacaagagtttattcaccgctaggtgcacggccaacccctttgcattacatctgcctgtcagggttggctctttaatctgtcgtgccctcggtattgctctttgtctgcccgtgaataaagtgcagcattgtggttagtaatcccactccagtgactcgacttcaaatgtggttttggagtgcatcccagagttctgtttgctaagcttcctactcctgtttcagagacaccactgaatacagagcagcgagcactgaaggcttccctctttccttaaacctgtcgggttgtgggctctctcttttcccctcttgctcctttcttttctttttttctgtttttttaaaccttccaaggcaagttcatggatactaagctgatgtgtttgttgttctttttctccctgcctccgctcctagtgagtaaccacactggccgcatcaaggtggtctttactccgagcatctgtaaagtgacctgcaccaagggcagctgtcagaacagctgtgagaaggggaacaccaccactctcattagtgagaatggtcatgctgccgacaccctgacggccacgaacttccgagtgggtgagttcctccacggtccctaactgtccttactgagtcgagttttatgagattgtagcatttagacaccccctccattcacactgctgtctgcttcaatgggtgtctgtctatgagtacgagtatgtttctttcatgggatcttttaaattgcttttggaataatttttaacctgattcttggtttcttaggggaatggcaactagaatattttcccttattgcttagcatttacacagccatgtggtaatgggaatatatatagtagaagagaagagagtaggttttagatttagaccctaaggcatgacttgtgctgataagcttcaaattttatcagcccagtgataagtggaatttgtcttagatttgactcatgtaataaattttggaaggtggtgatgaaatttgaagt

SEQ ID NO: 36891 - DNA, 587 bp, Homo sapiens
ccgaacatttctgtggtagttatcatctctgaggagaggccaagtttcagaaaatacccctccaatttatttttgcatcataggaacattgaatatgttcatcttttttacataaaaatcaattgtataagggtgtcctttgtttttaaattggatctctttaacagtgacctaaattcaaagcttgtttggcatctgactttttgattgtttcaaacatgttttattgattgcccagttcctggaaacaaacatgtagtgacctagttatgccagatggtatgaaaaggccttctatgggaagcatttagaatcacagtatagagttcagggtccagcttccatgctgaacctgcccactgcctcgttgcacaagcctgtgctctttgttgaacccaggaacctgcctcgtaatcagacagaagcgttataaggggagacaaaaaattcaagtgcttcaagatttcctgtttcaagatgctgaaagatcagaaaattttacatataaatacctgagttaattaaaaagcaggtattccaggactctggaaaaccctgatttatacagcatatgttttaagtacagc

SEQ ID NO: 36892 - DNA, 3020 bp, Homo sapiens
ttttctattttcaaaagctgccctcttgccatttacccagttgtgggtcatccttacattgcttttcactgagttcaaggggaatgtggttgtgcagaaaagtctgtttcctgttcataatgtgctaatgctgcaaggcaagtagatatctgggagtttgctttgtgttcagaagtctttttgctgtggctggacagcatttgttgagataagatattattcgtgctgaacttaactcctttctgctgtttgtttgagaaaaagtacagtcaatgggcctccaatcatctaatttcaaatttttgtcctcttgttattcctgattatgtttatctccagtatagtttcttccttttcctccctgtgaatgatatactttgtcctggtaattcttttttacatttcaggggaagtactagatatagaacactttacctttataaaaacattatctctttctccttttcctcctcttcatcctcatcagtctttctgtacttaccattgtttcaaagatgctaattatttaattggaagcaatataaacttttttgctttgagaaaaggaactatgatgcttcttttcccctgtttcctggttgatttttatatccaactgtacatctaatctcaaatttggaaaaccctccatggtttagctccacatcttctctgactctgcacacccactctttgttccttcgtattgacctgccttcccctgtctttaccctcctccgttgccactggcttttctcccagctggtggttggtgttatgcttagctagagctgttccatctctttggaatctctctccccagtagagccattgagtcacttccttgtttcagttcttgcctaaacacagtcctacttactcttgcaagagttacaatgaatcagacttctgttttatttcatgttttccctcagtgcagtctctacaagtattttttgaaacctgtatcactttaacgttttgggttctctcctttggctctaaaagatgttctctactgaaacttaaaatattttatactttattatataatagtccttcatagcataataaaatgagttatatacatgtaatgaagacaattaataagagtatttcagtttatcattttttagtgttttaaatagtaagattaagtagtaggttcctgacatgtggctatctttatggagtggcccttttaatagttaaatatctgaagacttttaataaatgtgtcctgagagtttatcaaatggctagtactttaatgctggttataggttttacccacaccaggcaccagttgaggaggatgattggggcctggagtccagcccatgctctgctcatccaactccatgtcctgatgcaggtcacatcctacagctgcccttttctaatccccacacaggggttgatggagtcccagtatctgggattggacaagcatcatttaatctcacaatcctttggggttgggattactggctcagagaggttggatgatttgctgaacttctcactgctagtaagaagtttctgggatttcaatccaagtctaatgactccagtccagcactcttttcttaccaccactgctggatcctccttccccaggactctgcacagtgcagcaaacactcttggaatgagggtacgttgtaggcactataggtaccagcgattttaatacgtgaaaattaaatcttataaaaccttatgaaaccatattccaccatctatcacaatctcttcaaatcatcattcagcctctgaagcaactccagtggggagtttttaattgacaaaaattgtaatccttggttaccagataagttttgaactatctttcctctcacattgataggcagatgtaaaagtgtctatgatcacagcccaactttgaatatcagggaagtgctacagtattacctcaaaaatgagattaaagtctgaagatatgtgttcccagtcaggccaagatttagatacatacattaccctgcaatctgtaatttttgatgactagcttcaaaattaaaggtttttttcactattgcttataataattttgtgttgtaaatgtagtaacatggatatttgtggaataattgtaatgattcttgaacagccttaccttctgcatcacagtgttcatacagatgtgcacataggaagggttgaaaagttattttcatgcactcagtgttccaggaatcatgaccagtgcactgctgaatcaaggctgggagtagctttgtttgtttttcttccttttgccttatttgtataagtgctgtagttagaggcccaggcagcatgagcaactctagagatgtggaaatgagggaggaggagataagacaaaaggaggtggttaggaggccgtctgcctagacgcagtcctattatagatgtgagagcagcagaaacacttgagttttgctgtggtgtgtagtaacttgtatttcctagatgggataatgtaacctatcagtatgtagtgaccacagaaccttagaccttgcagaaatcgtaaaggtcatctgcttcatatcctgggcatccctgagagatgggtttccatggtcagctcctagtgaagtcagcatcttccactgttaaggagcattaactgttgaaaagatcttctgcttaatgaggttgaatccactctttctatgatttgtagcctttagtcctgccaatacaagttaagcatcccaaatccaacaatctgaaatccaaaatgctccagaatccaaaatgttttgagtaccaacataacactccaaggaaatgctcgttggaacaatttagattttgtacttttggatttgggatgctcaactggtattttcaaatattctaaaatctgaaaataactaacatctaaaatacttctagtcccaagcgttttagatcagagatcctcaacctggaccttcatcgtgcaacaggcttcctcttgctcagggtatctgaacactgccatcatgtctgcacgtagtctcacc

SEQ ID NO: 36893 - DNA, 1201 bp, Homo sapiens
gacaagagattgccttaggtgggaataggaaggaccttatagatcattctagagtgtgccattttcagacaatggagagtcagtgaaagtttttaatcggtaatgtgaccagatttgtctttggaaagacaactctggaaactgttgggaggatttttgtagaggctgaggcagagaaaggcagaataaccccttggatgctctgtgtttgcacaggagacaaaaatgtggggtgtgttagcctgcatagcaggggtggagagtcagctggtcctcccctcaggctggcctttggatgggtccacagagcaggatctgttttcttaggcacttcctcaccccattgaggtggtctaacttcaggcccctgcctctcagctttttctcacttcctgtggttgaccaggagtcttacctggtcttaacactggacaaccagtgttgcaccagtagcctctaagtcctactcttctgcctgctcaagctggtctcgcttaaacatgctggcaccttcctagcttggctgacctccctgggtcagaatacttggctgcctggagccttcgtctctgctagagctgatttggcccagccagtaattgtttcttctgtcctgtctgtgcccaggccttggggttataggaagaccagaagcctcctgtaggtgggacctgtgccatcttctcacattttacacacatgccatacccttaagagttatgttccctgatggtccacacaagagatttaaacagacagatacaactaaaatctaaaaagcctatattgatcttacacactatgaggctcttattaagaaaaaaaggcattggaaatttaagttttatgaagtactctgagcagtgacagattttcttagactagaaaaacatcaaggtgctcccatttggaaatgtacttgttcatttttgtgttgtattgatttctgtccaggtattttctttccaagttttatagtttttttcctttctaattgtgtcgataacaagggaactggtttatagcgtggctgtgagggacagcagtgctctggggctgggcatcctgcactcaattaaccttcatatttcacacctaatcattgcagtgtggcaaagcgctccctggcctttcaaagcaagaggactgctgtggaactgtgggtacctcctggggctttaacaaatgccagaaatgcccc

SEQ ID NO: 36894 - DNA, 2003 bp, Homo sapiens
cttctaccagtataacaattcattttaagtaattgtctctcatttggacttctttgtctcacaaacttacagattttctaaatgcctaaagcaagtaattttatttattttgttgatactactcatctctttttagaagactaacttgtggaaatgcccaccgaagttcctcataattaatgaattcttcatttacaaaaataatccatgtaaataaggacattttcagtactgagagaattttccaagcagatgttctaagctgattcgatgatcatttgcaatgcaaatttccaggaagtaggttgagtgtgatggttcatcgtcactggaagatccatttgcttaaaattattttggcaacctgaccaaagggatagctatgatgcatttggtttgatttaaaaattttagtgtttgaagttaggtagccctgagttcgactcccagctctttcatttgctattgagtcttagagctcattaagcaggaatctatacctaaaacgttgaagaggcgttgccatctttttttttttaaacctgcctctttgtttaccatgtctgtctgtctgtaggaatattgaggaggatgatatattttccactgtttggtctaagaattaaggatgagggaagttaggttcatagaactttgttttggtcctaagtctatgttctctaatattaaataccttccccatctgtcttatttttctttttcattttcatttacccccttctttgtgtatcttttgcttagctgcttctcttctcttgtgtccaaaccccaaagtagcagggatgtgatagacattaaaggtaaagagattcctactgtccttttattttttttttaatccctaacttccactcttgaccttttgtcgtttttgtctagaattgcgtcatttttatctaagatgagttcactgatgtctgtggtttgtgagctctgtattttaatcttgataaggacttagttgaatgtgaaagtgcaaagttgctgtcacttttaactaaatgttggtgaaaaaaatccatatgttggctcatttaatgtataaaattgaagagactgccttcacttcaggaagggcaatgtggactatgaatgaagtaaactgttaacatcttgacatttattctgtttgtgtcctcttaagtgactcactcccaagaaacacactcagggtcacattcttcctgtgtcatttaaaaagttttcctttccttggttgggactcctctctaaatcatattcagtttggaaggaagcagactttccttggctttctacgctatggttttgtgttccacacctcttttttttcactcaaactagttcaaactttagttttcaagtggcttttatttaacatttgaagtttttgtttagccacatacagaaagacctttcattgttgatcattttttttgctgtgaatacttaattttaaatctgcaaatgatttcttaaatagtttgtgacccattagaaatgtgcctagcatgaacaagtcacttgtcctttaaaacttttgagaagaaaatgaacataaaatcctaagctgaggaggactgtaagagattgcctggtctggctctctgccttcaagtagatgactgctgaaagttctaaaacaagttcatatccatctcttttgactttgaggaatttgcagccagagatcccacagtctctgcaggatgcctgctctagaggtctatgggacaagacagacctgaggccaaggagctgaatggagggactcccacacgcccatatctcccgtcttttaatttgcctttcccagatgcctcactctgatcttctcttttaggcattcgggggaatctgaagagaggggaaatacagcaaagaaaagaattgaaggagaagagggacaccccagtacatattcaccctgttcctttagtggtgacagataaagagcatatggggaggctgaaataattttattttttaagagaaaatttccc

SEQ ID NO: 36895 - DNA, 1208 bp, Homo sapiens
ccatcttaaataaataaataaataaataaataaataaataaaaatatgagactcctgaaacactatattgttatttgaatttattccttcacaaataagctatttataaaatgacaaatattgtaatcaggttttatttgattaaagaaagaagatagctttaggcaatgaagtccaaatagaattctggtttaccattcacccgtcacgttccatacagttgttaagtctgaatagaattacggtttaccattcacccatcatgttccatacagttgttaagtctaaatagaattatggtttaccattcacccatcacgttccatacagtttttaagtataaatagaattctgctttaccattcacccatcacattccatacagttgttaagtctaaatagaattctggtttaccattcacctatcacgttccaaacagttgttaaactttggcctgatgatgtcatcacttggaatgttcttctctcatccagatacaatgcgttcagttcaaccaatgctttgttcttaacgtgtttgtgagtctctgacatcctttactttaatttagaaagcttgtgactacctgtctaggaaaaatcacttaggcagttgctcctgtttcttaataattagaaatgtcttattaatttattaatttctgaagtcctatgttaaaattatggggataagttgtttgttggctgggaaggggcacaaagaaccttctcaggtgatggaaacattctttttttttttttttttttttttgagacggagtcttgctctgtcgcccaggctggagtgcagtggcgcgatctcggctcactccaagctccacctctcaggttcacgccattctcctgcctcagcctcctgagtagctgggactgcaggcacctgccaccacgcctggctaactttttgtatttttagtagagacggggtttcactgtgttagccaggatggtctcgatctcctgacttcgtgatctgcccacctcggcctcccaaagtgctgggattacaggcgtgagccaccgcgcccggccagaaacgttcttaatcacaatctgggtggtggttacaccacaagtagatatgcaaaaattcatctagttgtatacttaagattgatatattctagtgtatatacgttaaatataggaaacagaaatctaatctctaatttgtagtagctcaggaa

SEQ ID NO: 36896 - DNA, 889 bp, Homo sapiens
acatcaggctaccctagatatttcaaggcattctgcttcatcattaatcatgagtagcctagaaaaatagaagttttataagtatctcctaaatggtaatctgcagtgtctgttaatttactttacctagagaaagtatggtcttagaaattgattttgctgttatattctacagccttataaatcactttccctggtgcatgaataattaaagagagcaatccatacatttctgagcttgttaacatttttgaaacaaaaccagatactaaacatgacattttcctgttgctgtctggaatttctatgcctggtgtctaggctcattcccattatttactttggctccaatgcttggcttcttctttcaagttgtttgccttcagtgtttacagaagtggattcccacaaccaaggaaagggtggttaatgagtcagtctggaagtgctatttttgttatcgtggactagagtcagctcaccataattagtgatattttgtgaaagcaacgcagagcacctaggcagtgccatttccttggctcttctcagtatgtgcagggaacacacccgtgtgcacactcacagatacgtgtttgccacattttagtacaactccgtttctgcattccactgtaagaaagaatacagtcttaatacagtgcaaatgcatgcaatctagactctgggtttgtattgtcagtgtgcttgtgactgccttaagagggtagaaagctttgctgctttcgtggtgtagtgagcattgaaaagtgaaacagatgctgtcacgtgtcttttcctccttgtttgcctggcttaggcttaagatgctttgattatgttatagacccctataagattaagcctaattgtgttattgtatgtgtag

SEQ ID NO: 36897 - DNA, 1999 bp, Homo sapiens
atatttttttctagagaatatagacatcttcatgttgcccctattttgagaaaactggtgtttggccctaaatcatatgaactcttggcatgtgtgttctccatccaatttgcaatagcatcttccatagactaaccctgaaaaatatcattttagaaaaacagaagtggaatacctgagctaatttatgtttagcaagggcagctaaagattctagccttgttatccccagatctgaagaagaagctccctgtttgtcatcagtgaattcctgaggttttctaggcccagaactttggtgccaatttcccacttttcatgtcctgctaaccatacaacaaaagggagaagagcgatctttggctaaccaccagaccagaattctgagaactgtaagttcttcatctttattttggcttaccttgatctaggcttttccctcatctttagaatcagtgcctttggtatctggataggagtgggaagcacattctagatctccatttctttgtctgtccagacccttcctaccttcctctcccacacgcagcctctttgactttggtcatggtcaggagatgtgggctgggccagttgtattacttctggtcacagtgattgttacaagagctgggcatattacccaacccaatctgagtcctgccttaagagttttctcactggaggtggaatgagggggccccattcctctctgtgaaggctgtgtggttgtgagtccagaagagacccatttctagtctcatgaagaatccagtctgagtgtgaagtagagatgaaagctagaggaaatgagtcatgatggtgctctgtgttggctccagacatcctaatgctcctccacctttgttctcctaaagtttagttaatgagttcataaaattcccctttctcatataagccagttaatttgggatgtcttgtcccttgcagccatgaattgtgactgattcatttcattaaaaaaaactacctcactcttgacatctaaccctctgtctactactaaaagaagctgatccttggctgggtgtggtggcttacgcctgtaatcccagcactttgggaggctgaggcgggcggatcacgaggtcaggagatcgagaccatcctggctaacacagtgaaaccccatctctactaaaaatacaaataattagctggatgtggtggcgggcgcctgtagtcccagctactcgggaggctgaggcaggagaatggtgtgaacccgggaggcagagcttgcagtgagccgagattgcaccactgcactccaacctgggtgacagagcgagactcacacacacacagacacacacacagaaagctgatccttgatcatgtcagttatcttgaatcacattagggtctccgttataatttttcatgggtagggacaggttctggggatttgggttcccagaagtaaaaatcttactaccttttgtactaactcccttcattctggggaaccatgatggtcttttgaggacacaaaacataaggcaatattccctattgttctgtgagcaaaactgtgcagcaccttaagtctgtacagatgcagtatcagaagcagcaagggattggcaggttgctgactagagccatagggacttcactcttctctcattttcagtcctcctgccctggacacctgccaacattccttctcaactcttgactccagcagtgaagcacgtggcccagcctaagtcaatcagaacttaatccagtcaaagccagttagactttggctggcccttctggaaatgtggtgttctctcttcaatactagatttgaatgtgagaggaggggtggttggagctgccatgaccatctcttgactatgaacagagccagcctgagaatgactaacatccttggacccgttgcctcaagccgcacccaaagtttttgttttcatttgtaagggcacattaaataatgagaccatagatttaattaaatatgataata

SEQ ID NO: 36898 - DNA, 1214 bp, Homo sapiens
caaatgaggaattttattcttaaaggcttaagtgacttacttggctcttacgtgactgattggggaacgagaatcctggtttcctgttcctggtgggcagtgttcttaaccctcaccacactacctctcctactacttcagaaaatggttaaaaaaagttttaaagtatatttatagtgaaattgtcaggaggattactgagaattttcagcaaatagtcacctatggaattagaatgcagaggacatatttcaggcaatttatattttcacctggcccttcaactgaggactctgacgtgagtgctgaggagctatttatagcaggtgacttttgcgcaccctggggaggttgtgaaatagctgtctatcacaggcagctaggaactgcttgcccacttttttttgttctgaaagaaaggatacagaccatctgggccagtaagttgggtccaaaatcggacttatgtttattttacttaataaatgtgttcttgaatcgtatgagttgaattttggttggttgaatgccatttttagtgcaccaggggtgcacacatttcttgtaatcctttaatgagtagctttctaaaacaaagaatgctttggcaatgtgaataattttcccttaatttatattgaatataatttatgattttttttctgtgcagcagggaaacttgtgctcagttgtttgtgttttagagcgtgttggctggtgtagccatatcagttaacagtaacatggaatatatatgctattaaaaatatagacagatatattgcaacctctcactacaaagccccagatcaaactctgtggtgaagccgtgtaattcagaagaggtgggtataggtaaaattccataccaggaggagtatagctgtagacactgggtgccccttgtccctgtttagatagtggaccctattcctgcctcagatggtatgtggaagagcgggctcttcagttaccaaggccacagtgcagaaaatagggtagaaacaagtgagaaggtaactgaccctttttccaccagcaccattgcatgctgtgaaagtataataaagtatttttagtccaaccttaacatttttgtccttaatagcacatcagttcacatttgctcattaaaataaattgtttttacccactcggcagttgattccatggcctcagtgatctttagagttgatcgaaattgtggtatgtgc

SEQ ID NO: 36899 - DNA, 3470 bp, Homo sapiens
aatgcctgtgagggaaatgtgtattttatgcattgcatttttatatctgaagtttatttctattactaacttgaaatgctgaggaagggatttgttttggtgcttacaaaattctcccatttgctcttcggactctcacaagttgacaacaaattactgccctgatagtatggtgagactgagggttttttgtctttttctcttattctagaaaacactgtatcctctatatggagggaaatttctggtttgattaacactgtaaataattatgagacaaagcctaaatataaaagattactcacacaggctcttacactgagtaagatattatgtgttaaaaatcagggttaatagtttaacaggcacattatggttcagaaatcccctgggggacttcaaccatcttttctggatgttcactttgccaaataggctgcctctatgtcatatctctacctgaagggcaggctcagacactgattcggggaagtgtcacccttactataccaagaagtcagacatccaaggtcagacactacgtaaagtcagatacttcaagggctttccttggaagggaggatgaaaagggaagggtgggaacatcagctcaggtgagacatatgaattcaacaaaacatcagggatggtttgccacgtttgcgagcagcacagaaaacggcagtttgctccaagttcccagcacaccaaagggggcagtagtgcgtctgtaaagcgcgttgtcaacttggtgataatttctgtttgcattcacactcgccggctgataatctcagctgctcgatgcaattcaacagataacaatgcggaagtttggtctaaagctacctgaaatcacttccaagagctcttcagataaagctgcctttgatagtcttcattaacccctcccatatttgcccctcagcgtcccttggcttagcagccccggcctttgaagtccaacctaagcattcttagatggtgagtgagggtctgccttccccagcaccagccacctagtcaggcttgtggctcgtctaacaaactggagcctgagattctgagaaaacgaaaccaaacagttgtactccggggttaacacagagcaacttccacctgctgtgcgagttggtgatcctctctcttgccgttcgagagccccagtgaaacttgagtgagatgagagagcatggagcctgccagtctccccctctgcgcacacacacacgcaaacacatttaactttccacttgcagtgacctgcccttcagtgtgacttatcagctgtttggcttttgtcactaaaggaaaacaaattgtggaatatcccgctctgcatgctcatgagatggctgagccaactcaggggttatgaggtggtttgcgagtgaggagaagaatgatcttcagtttctgacctcctggcacggtggcgggcggtatttatcaggaggtacatgtgactggttaagactcagagccccagcttgaaggaaacagctgctctcggcgtgctccggcacttggcagctggacaggcagagtgctgatgtgaaaaataccacgacaaaaccaccctagtaagtaactggagaactttcctctctctctctctctttcattccctctccgtgtgtgtgtgtgtgtgtgtgtgtgtgtgtgtgtgtgttgcaagccaccaacaacttttgattttgattttggtttccctctggcacgatagaaggagatattttatttgtacctgttaacagccattggtgttttcacagcccttttttagaacctgttattttcggcaacgtgtcttgtaactttgaggatgaatggggcatatggcttcattcctgtctaggaaacagaaagtttgtttcccagtgttcaagatttttctagtccatggtgtttaggttcaaagtcaagttcaggttatgaagtagagacttcattgaagtgagttgatgactagatttgattttaatctgtttctaccactgaaacctgaaaacgtagttgtttaaagtaacttgtgaatttattgtatggctgatttgatttttcctattcaatttttgagaatatctcatttaactgtgtagaactgtctgcaatatagaagactgacaaaataatatttagattcacattagaaatcatatttagatttcttgcatggtttccaactaattgaaagctgtattttatagcgactttttttccccccaacaagctaattcaccttcattactttaaaatgttcagttgcccctggtcttccttcaccttcattactttaaaatgttcggttgccgctggtcttccttattttagtgttttcgtgatactcaggctgttttttccttgtttatgacctgactgggaaagtgctgcctgcagctgatgattaactctgggaggcctggcatccaaattacggagagaaccggctccttctcaggttcattcagcagtaatggtgcttgcgcttgggcgagcagcaaagcaggcaccatgctggaactgagctgttgttcggtgacttttgtccttccttggtagtcaccagacagaatgcttcagaggaaaggcaaaaggggaaaagagagagggcagagctctaaactgatgacgtaaagctctgaaagtgacaggtctttgaatcagaggctgcagggagataaccaaacaggttcctgtttctggagatcgcgtggatcttgaggagggtgggcagagaggggctgtttttatttgaagtctcaccaaatagttgttttgcttgtgataagcctaggacaacctggagtgcgcttgtttcctcgtgtgacaaatggattctcatacaggctcaagctatacggttttctttcgccctctgccccctgccatgagggaacactgttctctccccacccttaccatcctttgttgtttgtggagaatggattaaaaatgacccagggcacggcacttctgcgatcgagtttccctcagcacagtgggtcttgagtaccgcaccaaccaatgttctctgatggaagcagtttcggatgccctgtctaaacaaatggctagtctgacattgagaagttctccaccttcttttccttcaaatgtagaagaatccacaaaatgtagagtggccaatgaggaaaaatagtcccaacttctctgttcctcggtatggcatttgtgtgaggtccttgggtcagcccgcggccatgtggtctgtgacttccctgtctgactgctgggggagggggttcctcctgagtcattctttagggagtttgttcctggtatagtttcagattttccacaggttgatagtggaagagaaccctctggtgaaattgtgtctccggaatcatcgagcctcccataataaaatggaatgtctaaatgggagcagttgaattatccaactgctgtatttttgagagccaacaggctcctttgaaaaaccc

SEQ ID NO: 36900 - DNA, 476 bp, Homo sapiens
gtaaagaagaaatgtccttttctggccacactctaacaacttgcttgtgactatcagggatgaatctcttcaagtctcaagttaatatagatttctggagctcataaactactcaagaattttaaacagttttaaataagaattgggtataatctccatatttggttctggaaaactcataccatgagttcaatttgactgaactttgaattctgctcagctttcagttctgttttttaaaagtagaaagtattccacttatgcatggaatgcttgccgttcaaaatcatatgagttgacacgatgctttagagatcattttttttttttatggtaaggacagcacccagtctgaatggtggtgctggagatttctctgtaatccatttctctccccagtcactcttgattctgaaattaatccatctctttctactttccttctcttctaggcatttaaattgtgtctgctattg

SEQ ID NO: 36901 - DNA, 779 bp, Homo sapiens
ttagaattccagaactgaaagagtgttagtaattcccttattttgtagatgaagaaactgaggtctggagaagttaagtgacttcccccaaggtcacacagatcattagcagcaaaaccatgagtcacacccaggtctcctgactctcagtccagtgtgccttacaccacaattactccaaatatgacagcagccggtggtctcaaatcaaaggactgtgggaaatactcctgcatacccatccacatgagttcatcctctactgttcttggcaggcacactgacccagtgcctcttcctagctactgtttgttcctggctattaagtaagcattagcaaacctacctccccacccccacccccagcacccttgcttgactgtatctttttcagcagttcctgcagcaatgctaataatgtaacatatctggatattaggatgtctcttcttaaatcttatcctttcttgtcccacctcagtgcctttgctcacacaacagtatgcaggggcaatggcttcctgtctttccctcaagtgacacattcttctttccctcactagctatgagaccttgccaagggactttacctctctgtaggtcagtctcctcatctgtaaaaatgagaaaaatattattacctacaccataaggacatcatgagcaattaaataagctaatatgtataaagagcctaactgtgcctttcacatagcaagagttcaagaaatgttaactatcatcattattattgctattatcattaccaagggctccag

SEQ ID NO: 36902 - DNA, 1512 bp, Homo sapiens
gtatctaaccatacaatttgtttctggaaccacatttagcccaagagggtccacgttctcaagtttaatagagtacactgatctgggtgacccagtgagataacaaaccctatttccagcttctagatactgatgaattatggttgaataaatatcaggagaaggagagacacaatgcaaaacaaatacgcaggttcttcgtgggtgaagacgaccctggtctaatggggctcaacgaggcagagtatcacagagtcaaagcaaactgctggtggttcccagggacgtggtgataggttagatgcacaagcgagctggccagcggaacagatgcagcgcccatacaagtggcttagcgaagcctgggtgcatgcagagatgactgggcaaaggagaaattttgagagaagtggggtggggtaggaggaggggctcaagatgggagtaggaaatttggagaacaagtaggaaagcagaatcaactttggcaacctttagagttgaggggttaaggggtagggcaggaggatgaagcgaggagagaagctcggggagtgggggtggcgaaaatcagagcccagacaatgacacgcatgactgacaaacgctgcgggtagctcgcctgcagggagcactgggcaggcctaggggtgttgggattggaggaccccgagctagcagtgcagacagtggacgtggcattgggggtgccggggccaaagggaagcgacagccaggagccacggggtgcggcgtggagaggcaggtgtctcagactggggcgcaggaggtgttcccagggggccggcagcgtggggcttgggagacccgtgccctgacaatcttaccctagatcttccaacgactccaagatgtcagtctccatgaggtcacactccatgctactgtggtattcaaatttccgagtcgtcaggctcccctcttcgccggcaacgcgtacactcgcgcatgcgcgacttccccggaacttccaaatccacagctggcgcctcagctcccgcactgcgcatgtccggagcgtgcgcaagaaacttggtcccactgaccgccccacccctgcccactaaagaattacagggcccgcagttttgcacatgcgcgttactggatcgtgaagctagccgcccagagaagggtaggaggaccggctgcgtggcagctgggcgtggggaccacgcgaaggggagcgctctcggctctcgttattgggtgtacgcatgtgcgaatgtagggggcgcggcgggccgggaaggagcttggaagagtctcgggacgcgggtggagtcggctgttaaaccgagtctctgcatcccagacaggagatcgggtggctcttcgtagggtgccggcatgtgctagccttagcttgcaggtcatgtagaaagggagaattcttgcgctcccgtcttcaggacgcgggtgcgggccaagtgcagacggcagatagcgtgccatttgatttcctcgtggctgcagtagctttatttcagg

SEQ ID NO: 36903 - DNA, 533 bp, Homo sapiens
aaagatttgggaattaaatggtccaggccaaggaataagaagagaaaaggctctgaatgggaaaatatgattttcttgagcaacaaagaaagaggccagtgattgaagttgggtggggttggcccaagatgagacggagaagtcgactgtagccaggtcagaaagggaaactatgggaaggaggttgccctttattcccagtgcaatgtgactctcttgcagggtgttgtgcaagagagtgacatggtctgattggcctttgtaaataatcatgttggcagcaacacataccgctttcaacaattgggattctgtgtctctctctgacttgagtatcttcctgaggcagaaggaaacaacgtattctgcagaagggtccatttaaaatttgttttggaagagctgctctgtcagataatcagaatagaatggcaatacaaatgtaagctttgcttgtagctaacccgtgtctagtcagtgaagaaactcagccacttgttggtgactgcccatcttttttctctgttgttcag

SEQ ID NO: 36904 - DNA, 945 bp, Homo sapiens
tactagacccagaacccaggtcatctggcttcccagtgcttttcatgctgcactggctgtctcacactctgtcacaacattatttgccaaatgagctctgagtttagcattaaggtggaagagatgttattccctgtggcgatagttcagctggagactttagtagagagaaaagtttcttgcacgcgtgggttttcatctgtgcaggtggctttctggggcgagtggacaggaatgaatgtatttggtgagttacaggcctgtgctgacctattagggcactggtctctcctttccttctgacagcaccagtttctctaaaaatcaccccattgacatgccaataacagagtagaacatgttgacatccagctgttgctttcattaccaatttgttttaattggtctcacactgttttcccttcacttctttgtgcggtgttggtttaactctgtctgaaaccagcttggcttgagctgtaaaccttttatgaggggaacttgctgatgtgtggaaagtcaggggcagctggctgggcccggctggcaagtctggaacattccagccctgaccttaaccattcaatgattttgtttgctctttcagtgtctcctttttaaaatgtaattcctgaaaacttaaagaaagactatttctctggccaaacctctaagaacatttattctaaatgtgtaagtaacacattggtaaactgagaattagataagcttggaatgaagggtatttggcaattattgctgttgtgggggataaaagcacttataatttaaataatcatgagtaggacattttgttccagtcggcgttactaattaaccactaagcagcagctcagtatggcgaatgcacttggaggaggcagaagtccagatggtgggctgtgatccagaagtttgagtgtcagtcaagactgcaaggtgatt

SEQ ID NO: 36905 - DNA, 1568 bp, Homo sapiens
agattgcctaaatgtctgcatttcaggaaccaacatttttcttctcttctttaaatttatctttgaattaaaccgtatttattattattgaagaataaaacagatgaatgattgaattagtgaatattattataaaatatgagaaaatcaaggccttctttcagaattctcatctcttgagaagttcataaaacagcagcagtggttctgttaatgaaaataaaattgctgtgaattaaaacacaccttgaaaacctccagcttttagttgagatagaattacccatgacaaagtaaaaaatttggttcacagattctagcatttagcatcagtgataaaaagtaatgaatgtagtccaagtactgaagtctccccctggaaatttctccttccccttttccttcctcctccttctcttcctcctttttctcctccttctcttcctcctttctcctccttttcctcatcctccttcccgtttcttttattgccattaagataaaaaatgattaacagagtctctagcagagtcaattttacgataatcagtaacatattaacagaagaatttttttaatctcaaaagcatttacaaatatttaccaatatcctgctgtgaggtcaccttgttgctgaactgaaaccacctctagtgaaacacaagagcgatttagtagaaactcaagcttttttggtgtttagttctgcagctgaaagacagaaccgtagattttcaattttgctctgaaagagttaaagcagaatttttcttagttccaaatgtagtttgtattgtatttgaagctcctttaaggcttgtggctattcagaaatttctctgtgcattaattcaaatgtttacacagttggtagtaaggctcattctcctgttatagtggtttacagcaattttaccttcactgttgcctggacacttggcagggtggcttcatgggttttaacctatgcagttacacagggccccatgcccagaaaggcctcgtgcttagtttaatgctgtaatgtcaccatcttgaaatttttatatttttaaacgaaagactccatgcctttattttgcactgggtcctacaaatgatgcaatgagtagaggcaccttttaaaaagtacagtaagacttcaagggtctggatgatccccagagacacaagtacaaaatctctagtgtttgagtacatgtgcccattttgacaagacaaacagggattatatatacagccaggcttcttcagagtggtgtgtcacaattcactgaatgaaaggtagagtgattaaagtgatctttaatagaaatgtgtaatttcctatgataccaaaagttaagtatctttagagtctgtgagctaaatgatattacgttctgctgggagagtgcaatgatcttataggcaaataaagggaaagaagccagtattacatgtagccactatatcctgaacatattcctgtccaaacaatgacccaccatacactgaggacattgaaggcagaattactatgaagataatactgatagtactacttatatttataaaaaaccatacag

SEQ ID NO: 36906 - DNA, 870 bp, Homo sapiens
tctgttaatggtataaagaataaaatatcttcttgtaatttatgtcattggatataaatataaattgaaaataacctttcaatgcatgagagaagcgtcttggaacatttgttttcaagtacctgatcagtaaaaatagtatttggaattaaaatctgagtcaataaaacagcattttctgctaagtacacacacacacacacacatgcgtgcatacacacacatatacacataatttctcagcaggctgtagccaagggggcaacagaattcaactgcagtgaggctaataggggcatcagatactaaaatagaattaaattgagagtcaggaattaaacttaacagagagattaataattcagctggaaacatagaaacacacatggtttcagcctttgcttggtgattgaaagaaacacacatggtttcagcctttgcttggtgattgtgtcatctgaaaagtaaataaataatgtgaaatgaaatcaatcacactgtagaccttgatacttttggaagtagaatactgactgcctgccagagtccctgaagttaatcctgtgccccgtggaaggctgctttcaccagtttttccttacgctgatttattgattggtcatagctggcaagcattagagaaagaaagaaacttactggcatcatataataatgtatatattacatatcatatatacacaatatattaaatatatttatatacacacatttaaatagatgcattataattttacatatttattaagtatagaatgatatatccatacctatagacaagtgtaatgattaatttagggttactagcatatctatcacatttattattttttgtgttaggaacattcaaaa

SEQ ID NO: 36907 - DNA, 1317 bp, Homo sapiens
tgtcatattttgatttttctctgatcatttaaaatgtctttacatatttgcaataaaactagaatataggtaaagtaaatgcaaaagacactcacatccagccttaatatatcactttcaagattttgtgatttttcacagctatatagaaatatgtacattatatgagtggctttctttacatgttagatccaccacttacattaatagttaaacaagtgtagaaataaatgttgtagaagtagtttaatagagaagaaatgtttattcttacttatacctaggagttctgctgctggttctccaagtccagcatgtctttgcttgtgtcggtaatgccttgctctttgtacttgattttgagtaagactgtcatactgaaccaagttttacgagtaaaaatgaagattggtcttatactcttaatttgctagatgaccaaactgatcaatgccttaaatgttcagaattgttgagagctaattctgaaacacatgattagaaattcctctgcccctgagtttacagagctcagctgttaagtatttccctgttgaagtggcgtgcaagggggtgggttgctctttatttcctctgctgtctacttcccatacctaaaagggtattattgctgggagtctcataattttcctactaagacaataattgcatctaatagatcagacttgggcctgctaattttcatctaatcaacagaggcaggaaaacatagtctggaatgctaactatgtgaatgaaaaatatttagtcattcttgaaatgataggaatgtttttccaacaagcttaaataaacacaatctcttttgagactgtgctaaactttttttggatgagacaactcttaggcaaccaaacagaagttaatgaaggttattaagagacatgcccttcagaaaaggcctgcagactttaaaaagaaaagattccatcttctttatgctgcaaccattgataaatagcagaattggtttactttttagcttttgtctacccagtagaatttaacattttaattagtaatcatactgcccaatgttcaacagataccattttacctaacatggctatatgagaccatcttattttaaaatcctcatcttcatctcctactgtttgcctcagttccaaggaattcattggactcaacactcctgtatttatagcacctgattacacttttcctatgaagcatgtttgtttattcccaccaacacaaggtcccgccagataataaaattatttttaaacatactaaaatgtacatattcaagtgaagtgtttttcctttcacaag

SEQ ID NO: 36908 - DNA, 448 bp, Homo sapiens
caaatggccaaccttgttttttgaacaagataattagtaattgtcatgaagtgtttatattttaatccttctaatgcctcttacattaagaaagctacatctttcttaacatgggatcatatatattaatacattttttctgagtttctaaaaagtctaaaaatacagatttcattgtgtccagtcacctcacctacacttgcgcctgggttttgctattgtgaaatcttggccacccggtcatgcttatctaagacttcggtcacttcacacggaatctttcatcattaagttcaaagaagcagtttccctcaactgcctttgaaggaagagtcaaaatatgtcccttggcaaatagtcactggcaaatagtcatttggcaagttgagactataaggaggatgcatatttaccctatctttaggttagtgttttgtttggcatttta

SEQ ID NO: 36909 - DNA, 3263 bp, Homo sapiens
aaaaggacagagaaagaagttcaaagtctattagtaagaatgtaccatgatgacttatgtgcccaagaggcaagcagttagaaaatgccactactcatccagataaagcacataaacccatgctctttttaaaatgctgttgcttccatttctttgcaagttaaatgcaaaagcaactgtttttatgctactatattcatgcaggcatttttctgatgtagctaattgttccaatgtaaatgttgtaagttgtacacatatttgttctatacaaaatttactgtgtaatttttaagatactttttgatattatttacctacattttatcagaagtctgaaaacttaagatgaacagtatgcgtattttcagcctaagtttgtataattctaccatcagtttggagaacattaacataacatttagcaaatgaaaatgctgttacttggagagctgattattgcttcccactcactcttcgggccacctgccactgccttggtgcagaaatgcgaactagaagatggcatacgcttcctggagagcagagtggatcccatgtgccagccaggcccccaaaaacttctccaaagacttttccactccgtttctaggaaacaattctactttctttctcccagcaacctccaagacttcctagaattctttgtactgaaaagggagtatttttttcctaaacaacttatcttgatttgtaaccagtctacaatgtcatcaagcatagtaaaaagcgtctggtggcacctctatggcggctgagtcaaaggagtgagatggattcttacagcatgactaattaaggggaaaggcttcgtgaaaaggaagtgaaggcctgactcacttgatggttccttcccctggaattttatagaggaaatttaaatcagtaaacacatttgaggagtcaacataaagaatattttaccaggccccaaggggcagaagaaaggaaaccaagggaatggtcatcaagaaatacatatagtttcatccagtggttctcaaagtgtagtccagggaccccctcccacccaactcctgccaagaggtccctgaaatcctctcaggagttcaggagttcaaaaatgttttcttaatactactaaaatataagttgtcttttttactctcattctctcatgacttacagtgaaatattccaaatgacagactgaatgcagaagcacatttgtgaatctagctgtctttaatcaagccagatgttaatgagattgacaaaaatgcacagcaatgatattttttcatgattttgtaaaatattatttttcataaatatatgctctttataatgaatttatttttggtatttttcatgaatttatatttttaattttatcacttttaatttgtaacatggctaatattaagtttcttggggtccttgataaattttaagagcgtaaagaagtcttgataacaaaaagctaagaaatgccaacaggctgaatcactgagggagctatgtgcttctgtatcagtcatgtaactctatggagttactgaaaatctgagttccaaattttactaccttacaggagactgtacaaatatgcctctcctcctaaaccatccaacttccctacctagcctttcccagatttgcaagccagttttgcttcagcaagaatcaaatgtctagtcaagatactttgctgactactcttcacttcactgaaagcataactattagctttgatggaggaggctagttataaaacaaaaacctacagaaaactatttctgtaaatttttccaatgctatcataattcattcatattttttaagcagattatcaaatgagataacatcttaggcttcagagtatataataacaattatgagaaactattctcaaataaccaagtcagtttattttttaaattattttcataaaatatattttctttcaaatgtgacaaagagaagagtacttgtttttaagtacttagtctatattacctggctccattatctatgagcatgtttaagctagatacaaattcataaaatctaaagctagataaaaagtttcagaatccacctatcaggaaactaagacacactttctatttggaaagcacattccaaaaacactagctttgttttcgcaatcagaaagccaattcctgtcactagaaaaaacaaaagttgatgcagtttcaatttcgtaacatgcagatgtaatttaggttttctttattaaatgtgtggttgcagacattactgagccatctcaactactgacagcctgactacttgtgaaagatggcttttgtgccaccagaattttaggcttaggggaaattagtgaaaatgcaaccccatgggaagccaaggtaacctggaaaaacaaaactaacagctgatgccagtgaaagaaggtaaagtaaggaatgcagcagaacctctgtccttgctgctgatggctgctgagtcagtggctgcagctgacaagaccctactgtccccagctctttcactggcaatgaaccagggaagcaatgtgcagcatgtacagttcaatcgcctcttgatccattggaaaattacagaacaaggaaatcagaaggttctacaggaaaaaaaagaaaaaaaaaaaaaactaaaatctacgtctgagaacgtgctcctatcaaacgcttcagttgcaatcaactcctacctccccagaagtcaggcagcatcaatattctccctccactgcatttccaaactctccctctctactagctccttcctgacagcatcccgaaattctcaaaccctcaacctctttcctttcccaaggttttcctgaaacagctcttcccaacatcatttatttgatctggaagaccacggccacttttcagatctctgagacatccaggaatccctcctccctgaaccgcttccttggattcagagacaccacactctcccagatttccctcaccccaaccctcctgctctctagttgcttcttctaagaggggccactttcttcactcatcccttaaatgccagtgttccctaggatcttgtgcctctttcttgactcacctctcagatgctgctgtgcctctggattctgtccctatttaattatcatgcaccccctctgggtattaccaatcaatagcttcatcttctgcttccataaattgatagctccactttactaagatcagtaaagtgctaagaacagagactggcacatggcaaagctcagtacatgttag

SEQ ID NO: 36910 - DNA, 969 bp, Homo sapiens
gtgggagggacagtgcccagtcgttttggtgttccctgtgcgaagcagcgcctggcactcagcaggtgcttaataaatgcgacttgagtgaatgaatggcgacacacgtgccccaggaggtgccccaggaggtgccgtctctaactatgggctctgcatgggcgattcccttctaatacaaacgagggtttggtttgcaggaaggagggcgggaggtaccgaggcggaggttttcagggctcgtggcggcggggggcaggggatttaaattgctgggcgagccgaggccgacggccggaggaaggaggcgagagggcggggactcccgcgtccgggcggaaggagggcgcagggaggagctgcggccgtagggctgccggtcgggcgaggggtaggggaggctcccgcccactcccggccggggccccgcactcactcgtccccctgcaggaggctgcgctccgtgatgggccgcacggccgtcctcgggggctcggcgcccggatccgaggggcggaagcacaggctcagcttctcctccaagctgcaggccggggccgggaaaccgtcggcgcccccacccgcctcggcccccgcctccgccccaggctcggggctcgcgttacagttctcctggtccaggaggctccgggccggctcctggaactcatagaaatcctgccagtccccgtccgccgccatcgccgcccggagcagtcgcgcgccccgcccaggccggcccagcccgcccagcccggccccgccccggcccgaagccccgcccccgcccgctaccgtgctgacagatcccaggctgtcccaaccctgggtctccggtggcctgagtcttcctggagttgaacgcggtgctactagaaagccaagaccttaactgccttgagtcacttcctatattctctatcatttaggaataacttccctgttagcttcccttattagcaacttggc

SEQ ID NO: 36911 - DNA, 697 bp, Homo sapiens
acccacacaaacctgtaaatgcccagaaacagcgatcagccaagtctactctgcatggagatgtgcttcagtccccctgggcccctggctggctaccttgagcttcagaacttcagacagtgccttggcctgaacctcctctggagtggagcctttctggggttgtggagccaggctcctggcttcttatgactcctgacacttgggtgtcctgttacctgtgagtcatcttgcttgttgactcttggcctgctttcacttcctgacaactgagcttgtgctggtaactctcacccttcaggcaccgacccttggcctatggcagacactcctggccccaacttcttgccttgactagtaacccctagctgtccattccttggagcataaaatctgatcactcatttttaaagactccacaactttctcttactcacactaaataatactagtatttttaaatgttaaagtctaattaccagtggtctcatacttgatgaaagcagaagctgacaggagttagataaaatgtgatcatgaaagctaaaagagggctctattacgataatgacttctctttataaaaatatagtaaaatggtaattgtttacagagcacctactatgtgccaggtactggtcgaggagttttacaactattatctcttaaatcatctaaatagtcctacaaggaattt

SEQ ID NO: 36912 - DNA, 559 bp, Homo sapiens
ctaagactccctttcacttctcttgcctgcaatgactacaagatgttacttgttatacaccattaactgctgaagagctattcagactgccagggcggcagatgtgatgcttctgggatccacttctgtttctagtataaaggcttagctgaggagaaatgtcctatataaataaccatccacatggaaaaccaataaggttcaaagaccacagtttcaaggaagtctttgctttttgtttaatgtcctttaattgaaaaatactgagctgaactttatccctgccatccctcttacacaaacaggtcctgcgggcaataagctgcccaagtaaacaaatactctatccagcttggcagctgagatcctgctataaaaaacacaatccccactgaatagctcctttctgcaacaactccagcctcacacatggttgaggtgagcagggtgtattcaggttaacggcaaactggaatctgggttctcaacaaagagctcatacatgactgtccagggcacagaaactgggagggttcgtaagccatagaaactgtgcaaa

SEQ ID NO: 36913 - DNA, 2252 bp, Homo sapiens
gacacaacttctgttgtcttcttgatcaccttccttgaagagaggggccaaagccggcacgttctgcggagactgtctctagacctaggaaggggcacaccagggcagcggacgatttgctccgcgtctctcaaaactactgccagcccaattagtaaaccgagagggcagccctgagatgcaggatggccagagagttgaaatgagtctgggagttaagagtgggatggggcggacgaacaggcgtggggagggtaaacaacgcaccaggagcgggagtgagaacagggtcgaggtggggtcagcgaaaggcaaaaggcgaagagaagaaggggacggggctccgggtgggatgggcggcagcaaagggggaggggacgcgagaaggctgggggagggggagaagggtccggggcggggcggaagggagcaaagaggcgggatgaagacggccaggccgggagggtctttacctgcagctccgcccgctccacctcccactgggctctctccacctcgaagcgggcccactcgtgctgcaggaagtgcaggatccccgggagactgtactgggctcgggccgcccccgccgcagccgccccgtcgccggccgcggcagcctccgccagaggcccgagccccttggcaccgccggcgcccgggtggttgttgctgaagaagacgccgggacccgcctgctcgtccatggcggccgcagatacccggggagctgccccggcgcccagcagcggaggcaacagcggcggcaagcagcgcctcctcctccctccgccgctcccgcccacaccccagtcagcagggagcagcctcctgggcgcgggggccggccgagcccgtgacgggccgggaaatgggtcaactgcggcgcgctggcggcccggggcttgccgggaaatgtagtcgcggggcggggcgcgggctagcgcggcccgggcggcctgtagggctgtgcctcagcttgggcgtggcctcgggcccgccccgccccggctcgccgcgtagggggccggctgggcggggagagcgggtttcctctggggccggctgggcgcgggcgggcgggtctccagtcttcctcgcacgcggaagttcgcgggcggcgcaccctgttgcattcaaaaacacacacacacacacacacacacacacacggaagttgtcacgccaagatacctgcccgagctgcacatcttttaaggcttcctggccgttctgtgaaggaacaggctcaaagcgagctacccggtgcggccgcgggaccggggttctcccgccagctgccctgcgtgctctcgcttcggcttcgtgttcggagtttctctcaccctagacgctcctccattctgccaatctgcgggtcgctgtcgctcttgcctttctcttttgactcgaggggctcaaacctgttacctgaccagttttcatttctaaggaacgccgatcacctttctaagacaacgccgcagctttctgctgctgcttccaaattgtggtttgttgacagcccatctgaaaaactgctccgttgaagtttctttccctttgcagtcctcctgcagtaaatcctgtaaaagttttagcatccaataatagatgttctgttatttcggtctcatttttcctatcttattcccgctgatttttactctacttaattgaacaaatattttgattatcggttttctcttgcgctgggaatattaagataaatgacatcgtttctgtcatcaaagattggcgtataatcaaatatcacaaaggcttaatttaaaagctacaccaccttgaaaaagcaagttccctttctgctccctagcgcggtcttagatatcctggcccctctccgttttcacttgtcctgttcccagtttctttcacgattcacctgccaactggcaacagcatccgcctaccaaaggtacaccaaagtcctttcaagttactctctgtaaatatttgccttctccgaagtctgacaatatgtcactataaattcacactacaacagtggcaaaaaggaaggcccctgaaaacaatttaacaaatgcaaatgaaattaagcacttattttgtcaccctaacaagttatctgaaattcttacgttttgtaggacgtacttgtgggttatcagacttgatggccatgaaaaaatgtaaagatctaggctgctgagtgacatgtcagggaaagacatcctgtccctgtcctctctcccctccccccctttccc

SEQ ID NO: 36914 - DNA, 1103 bp, Homo sapiens
actcatggagtgaaaagaaaattaaaagaaattattgccaaaaaaggcattattccagaagaaatatgtccagcaacacatatgtcatttacccgttctataaatgaaaaaactgaagcactaagatcaaacaccccagccgggcttgacaaccatcctcctctttttctcgtccagggttcggtacatagcacctttaccctcccgcgctgcacctggccagagggactgaggtcaaaacacccagcacagacatcccgaactgcaggtctccaagactcttcctacgcggatgggtggggcggccaggcccggcggccgaagcgtcagtgacaacaccaggcggtccggaatgcacccgagaagcctcgcgcgctcggggtctggcttcacctggctactccaagaaccgcaagcggcggacccggggaaacaccaagaggccgccgcaagcctccgtggggttccgcaggctgtcaatagcacgaggcggcagctcggaactaagcacggagccagaaaagggaaaatgttcattacgaactcaaatgtcttccccacccgtctgaaaatgtacgtcggacaggagtccgtgcgtgtcaacatgcatgcttcggcgacctcacctcgtagtctggaagggaagatcagctgagctccgggggtagaagcagccaccaagagacccggatgccccacctcccgcactcctacctgcaggaaacaagggaagagcgcttgcgcggagggctggtcttgcgcaagcgcagtcaccacgtcctcctatccccacccgccgcgaatttccaatagagtctgcactaggaaactggtgggagccgaggtccggaagtccgacgctggtcggtgggcgcatgcgcagcgcgcgctctacggcgctgaaccggggcgagcagagagctgtcaggtaagagagctgtcaggtaagggtctggggacaaccggtagaatgataaaaggcagagtgcgctggccatgactaccgtatcacaccgtcagccacttttccatccgtgggtggttgcgtctgtgggacgcttgcagccaggaggaacgcgtgagggaagggatcagcggttcct

SEQ ID NO: 36915 - DNA, 867 bp, Homo sapiens
tgagccaccatgcccagccagagtaggaatattaaaatgaggtcagtaaagataaggctacattctcactaactggccacatcatttagtgtttcttttgaatatagcctcattaatcaaaaccagatattgtttttttaaaaaaagatttctctctacgcagaacatttccaaatctacagaaaagttcaaagaataatacaacaaacacctgtgtactgtcatctagatttaccaattgtacaatggctaatattttgccacatgtgtgccctctttctctctccatgttgatttttgctgaacattgaaagttgcagacatcatgacacacttggcctctaaatgtttgtgcatgcattgcctaaaaaaacatttttggctgggtgcagtgactcatgcctgtaatctcaacactttgggaggccaaggcaagtgaatcacctgaggtcaggagttcaaaaccagctgggtcaacatggtgaaattccgtctctactaaaaatagaaaaaattaacctggagtggtggcagatacctgtaatcccagctactcaggaagcagaggcaggagaatcacttgaacctgggaggcagaggttgcagtgagccgagatcgtgccactgcactccagcctgggcgacacagtgagactctgtctcaaaacaaacaaacaaacaaaaacaaaataaaacaaaacaaaaagacattttctacatatactattatcacacctgagaaaacagttatttggcattgttatctaatatgcagtctatattcaaatgttctcaattgtcccgaagatatctttatagctgtttgctgggttgttgctttcttttattattattattatttagata

SEQ ID NO: 36916 - DNA, 1756 bp, Homo sapiens
cagttatctggggaagaagctttccagaaagaagaaacaagcagtgcaaaggcctagaggctggaggatgcttggctgtgcaccaggaacagcaaggaagccagcgtggccggagtagggggtgcgaggggccttgcctgtgagccttaataaatgtttataggattctgatgagacaggaaagctacggggaaggtcggagcaggggagagtctggttcttacttaaaggaacattccagatgctgaggtgtggagaagaggtagggggtggaggttcaggggtgaggatacggagtgggaacaggaactgcggccaggcaattgggaaactactgcaactctccacggaagagatttttagccaaagattgttcagccagtctatgagtatttcaggcctccgtattttccatgtgtcaagccactaggcctattcgtcttccactagaccccgccccacaactgctgcctgggaaatatttgttacttgcactgataaaaattcttcacgggaaggaaatggctttcagtccccaccccgctccacgatcctttccctggatttggggagggccccacacccgggctgcggacctgggcctgctctcccagtgctgacccagccggggccaggggcttcggatcagcgtccgcgtcctgagctggggacgcaggattggcgagtcccgccccggctgggcctgcagcccctcgtacgtggccccccggcccccgctccccgcgctccctcggctgccccctgccctgctcacctgcgccgccgccgccgccgccgccgccgccggccggagacccgcggcttcgggagagctggttctcagtttcgttttccccttggactccgccttccctgcagccgcccggccccctctcgcacaagccctcgtctgctacgggattggggtaaattggcgctggatccagagtgcgcgcgagaggcactggcgggcgggcttggcaccggcgggcgggcttggcaccggcaggcgggcttggcacccacgtgctgcccctgcacggccaggaccctgcacccccatcccccgcccccggggctcctagggttctccgctggcctagtccgctggccgcactaggttctcgaatcaagggttccacttactctcaacacaaatatttggggtggggttgggaagatggatcttaccagctccattctacaatagaggaaactgagtaaatgaactcacccaggggtcctgccgctcgtaagtggcaaagccaggattcagttcaagtcggggcctgtaaacaccaaagcactctttccctcttgccacaccgcggccccctcacctttacaagcctggggatcagaggcctgggggcgtaatctccttcactccgctcccacccatccattcattcatgagcagacacttgccagccgctgtaaaagcacctgtgggccagtcctgctgctaaatagagacacctgcttcctacagtaccccagggagcttcctaccatagtccaacaccagtagtcctcgatttatagaaattctactcacctgatggactgcgacacactcccagagtcacacagagttccagagttcattggcacagtgactaatgagtattgaggcacagagaatttggattaacacaggtagtaagcagcggagttagaattataaccaggagtttgtactctcagtatcttagctgggataagagaggaaggtggtccaaagacagacctcaaa

SEQ ID NO: 36917 - DNA, 502 bp, Homo sapiens
cgtgtgtgtcctgagacttcgcacgcatggcttggaaggtgctctggactgagatagtttgaatttgctccccagttagaaagaatcccaagaactcagcaatctgttttattccagcagccagattctgtaaaaaaattttcttaaagataaatttcttcctatggaaattgttctctgagctgagacagactttttagtcatcagagttattcagcctaactccctagttcatctcatcccccactttaaacttagagtactttcatcttcttatgtaaatattgagatatctctgtaagatattctgtattgattatactttgtagtttcaatttatgactcttgttgaacttaccagataatagtttttagcatgtaaataatgacagtaacattaattcacaggttataattttatctaggatgatatcattgcattaaaaagtaccaacttagaccagctgaagaaattaatgtattcctatgtgctcatttgaat

SEQ ID NO: 36918 - DNA, 1556 bp, Homo sapiens
ctcggtctcctgatgtcgtgatcctcccatctaggcctcccaaagtgctgggattataggcgtgagccaccgcgcccggcctagttcttcatttctaacaagttttcaggtgatgcttatgttggtagtcctctgagactatcacactttaagtttcagggtgttagaaaaacgacccagaacaggctacacgtagtcagtttcctgggtttaaatgtgaattctgattttactaactgcgattgtgggcagtgtaagcctcttgctttctccgtaaaatgagatacactcagcacctgttgcatgtgttattgcgaacattccgtaaaataatgtacatagagggcagtcaggttcgggtcgcggtcagagtacaattaatagtaattacgaatgtgggggcggagccgacaacggaaggggtggagcgtcgccaaccgttgcgcatgcgcagtcccccttgaacgcacctcaggtaagactctggcgagtggcttcccatgggcggtcggatttcggggtccctagtgcgacgagagtggggcggtcttctgcgtggggcctcgtcacagttctgggggcatgtggaggatagtcaggtgtcactgccttaattcactggaggcgagtgtttccgggtcgctaggcggccgtggtctggcggccgggccgtgctccgtgcgtgcccgcgcgtgtcgcctgcaggcccgggcctagcgttccgcgggctaggggagagctgagggcagccgagggcaccagggaaccgggggaagcgggagctgggtgggaccgcggcaggagccgggagccgggggagcggaggcggccagctctcggcctctgttgaaaagtcgtcctctgcacagctaggctgggagagacgttgctgcttgaaaccgcgtagcctgcagacgctaagctgggaggccgccccgattccctggagcgcatcccgggataaggggcttccgacccagcattgcacatttggcttgagcttgtgtccccgagtcagcgtctcagccccgtgtgatgttaactgcatgacacacagccctgcgccgaatctgtcagaggcggcttcgtgttaaacttcacctaaacttcccggaatgatgcctttccctgtgccgagaaggcaggcgctggtctgccgtgtctcccttgccgcagctagtaaacctcacttctttgtgggtggacaggtgtatccctggtggtctgtagcaaaggaacttgaagttttatcagcctcctgaagccgagagcctcagtgcaaaacgtatatgtatttttaaaaaggtaaatactttgttgtacggtgttatttggaggcagctatgctcaccactatacaccaaggcagccgtacagtattattcgcactttattttcttttcttttaaccctggcctacagatggactttatttcttagcaccaccctctcttaaaacaaaattttacttcgattccttgaataatggaactggctgcaggcggtctttgttcattccttgaacattaaaaataaccccaagaggccgggcgtgg

SEQ ID NO: 36919 - DNA, 1999 bp, Homo sapiens
acttaaatatacacaagcacagagcaaactgtgaatctgcctatctctaactaactcctccaccttgaaagtccagtctccaaacaaaataatattaaaaacaaagttaatttctgttccttatctgcttaaaatcttccagtggttttgcatcaaactcagagcaaaagcctgccctctgacccctcggccctcctttcttactattctccccttaactcactctgcctctgctacactggcattttggctgctcatggaataggttaggcactcttctgcctgtctttgcatttgctgttccaactgactggaatggcagctcactccttcctgtcctttaggattctgctcaaacatttccgtgatgtgtttgtcgatcatctcatttaatactaacgcgctcccactccttatcgtccttccttgttttattttcttttatagcactaccccgcgtctgctgtactatgtgtttaaaagtttgtttactgtttctctcccttaattaggatgctccaaaaaagagggcttctggggcatacagtgacacgtgcatgtactctatgagaacagaaatgaaaattccaataccactggtgttcaaaacactcataccacaaggtcaggaccaagaaaagccactctccgacctgatggtgtgatggttataccacgtcaataaaatcagaagatcgcctacatcctaagaatagccagagaatacaacgttcaattcgaaacttttcttttgtaaacagcagtggaaaccggcgtgggaagcgcaccgaacacatgcttcagaggctgggatctcggtcctggacgcccgcgctctacgcagcgcggaagcggcggggcagtcagcctagccaccttcggaactctccacgcctgatcccgttccccggagcccgcggccgttaccttggtgcctccgagccgtaacacttcctccagggagaacccattctcggcttcactagtattatcctcatcctcctcgtccggatcttctactgcctcctcggggcgccaaggccgcttggcatggaactccaaaggctccttgactgcggccatggcgggcaaagcatacgcgcgtgaaactcagcctatttccgctctgccagtggcgtaattcctgtcggggcgtgtcttctcccggaaatggtctaagccccagctcctggcggagcgagctagcctgcgaatttcagcatgagtgtactgctgaggtcaggtttggggccgttgtgtgccgtggcgcgcgcaggtaagcgtcagtcccctcgaagcccggttgccgtggaagccgcgtggggcgccttcctcagctcttcagttgagggtaccgggggatcaagggctcgggggctcacttccaccttgaaggtaccctgggctggaaacgggtccggtacaaacgcaatagggctgcgtagtcgtgggcaagtgggtgctgtctctgcgccccgtgggcgtgctaagcacagtagcccgcggtctgcggtggggcgaggttaagggttcacgaagctgttttgaaaacgctcaggcggcttgcgctcgtgaatggtcagatttatcatggggtctgtttaatttgtgtttttcgcagccattccttttatttggagagggaaatacttcagctccgggaatgagcctgcagaaaacccggtgacgccgatgctgcggcatcttatgtacaaaataaagtctactggtcccatcactgtggccgagtacatgaaggaggtgttgactaatccagccaaggtatgggtcgggtagcccgaggactaggccctctctagccgatttgcgaggtgcaagccaggagggagaagcccgaaggttctcagcccaggcagtgggggtgcctgccaggggaagagccatttctgaggacctggggacagataatttgtcagttggtcagggctggctcacgtcagaggcagtgccagtaaagaggagaggacacggtccaagg

SEQ ID NO: 36920 - DNA, 2200 bp, Homo sapiens
gcaggtcgcgcgcacacacttgtcgcttgaatcgtatgtgtgcctgcagacggcaaggcctatgcctctgactgcgttcacctgaaataaaatacccaaccggcaatacagtagtatatggttattttcactgctcaaagaaacagtggcactcctcagtgtttcagcttaaggaaaacctcccaggagggagcaactcggaacaatgctgcaactagcaaatccaaacgcagtcgggatactggggcgaggggcttacattctccaagcaccatttactcacccctttgagacgactacaacgcaaagtgaggaaatgaaacgaaaaagctggtccaaaattcggcactgcgagcgccgcgggtctggcttcgggaactagtttgggagacccgggaacggatcgcctccgatgggccgggcgcggtggtctccagcggagcgcgaacccaagttgccctccgcgcggacgccggaacttggcccctctggcggctgcggcggcgcccccgctccccctcagccgcccacctcccgccgcgcgctcccccaacttcccgcccagcgcggctgacaccgcccagcccggcgcggggtccgagtcctgtcgccgccgccgccgcgtgcagttggggggttgggggtttgggggatgggggaggggccgccgccgcctcagcccgacgggccgggagaacaaagcggcggcggcggcggcgcgaactttttcggtgtctgttcagcgctccccgaggcgactacttacagtggcaggctcggcccgtcgtgagaaactgcgcccgccagcgtctgagtaccggacgaggcgccagcgaggcttcacgcgcctcgcaggatcccgcccgcctccggcgccccttcctccctccctccccgtcccgtcctggggccggagggcggggggccggggcgcgcggggggcgggggcgcgcggccagcgcggggcctgccgggagctgtagttcctcggcccgcgcccgccgggaggtggccgcggcgggaggtcggggttgtctctgccccgcgaaggggcgccgggagcgccgggtacagtcgggctggctccgcaccctcgagttccgggcgtcttcgtgagcgcgggggcacggggcaggggcgccgcgggagtcgcgagcgtgtctatcagttacacgcggtacttgatcgcgctgttgccgacggtactgtcttttcctctactgccgtgcactcttgagggaggcggtggcgacaatgggccagaggtgatagttggaacgggggacttgtaaggcgtccagagcagagagctgcttccaccctgagatgtcacagccctcccgcatgctcctccctgctgcctgcccccggggtggccgccggcaccgcagctcggcgcccaaaccggcacgtcccaagcccgacgttccggtgactgcaggggttttcccggtgctcggtgtttcctccccgtcggcctttaaacgcgaatgtgaccctaccaccaaagtggagtgcagtccagaatcaccaaacctgggcttccaggtgtctggaaacacaatgttaacatttgttttgctccaaaacaaagtatgaccgtgtcgggtgagtggggcgggagtgggagtcagcagcataaggatctagagggaaaatacactgtgcataaattttcgatgtcttatgtgagagaaaggcctgagaagctgacaggcattgtcacagaagccacatgattctccttatgtcaacattttatcccaaaagtacttaaatatattgaaacaatcagagggactacaatcaagagggcagttttctttcttctctctttttctttcttttcccctttctctctttcttctttctctctagaaaaggttttactctgtcatccaggctgaagtgcagtgacacgatcatagctcactgcagcctggagctgctgggctcaagtgattatcctgcgtcagcctcccaagcagctgggactacaggcgtgtgccaccacgccccactaacttttaagttagtttttgtagagacgaggtctcttgctgtgttacccaggctggtctcctgacctcaagagatccgcccgcctcggccctccaaatcgttgggattacaggcgtgagacaccgcgcccagccaagagggcagttttcaagaatagaaagaaaaataaacataaatt

SEQ ID NO: 36921 - DNA, 1766 bp, Homo sapiens
ttgggccagaagtcaggttttgggatttgcacccagtctcatgccttttcactctattatgctaatcctgtatctctgtttcaaatcgaagtgactcattttgagttttcagatgaacactccaagtattatggagtacctggttatttgaagtaaaaaaaaaaaacaaaaaaccaagaattgaagcttctagctagacaaacaaagcttgaagcaccagacagctattgaagaccaaatctacccacagggctggaattaggcaccgagggaacagatgcagggagagatccaagctcacagccaggagccagatgctgggtgtaagctgtctgtgcctgtcctcctttcccaaggcccgccaaagggaggctctgagcttcagagtggggatctagacttcagttgccagtaggttctgaaagtgctgccctcagggaaatggtgacttagaaacagaactgcaacaagtttcagttgaactccagggaattccctaggtatgcctcttgcctcctcctcatctctctccttcaaaagaaggacatttgaggaagtcccagggaagagagatgagaaatatggttatgaaataaagagaaatgaagaaccacagtatggagtacttttctgcattgggtaggatttgtgggtgagacagagaattgggtggagggcagaaggccagaaggagtaggcagaggaaggagggggtgttgaacctccttcaggcatcgagcgagaaacctgacctcggaatagtcacacttgatctccttttggcttctgtgtaccagcaaagcctttaggtttagtctgtttcctctgtggcagaaaaggaagcccaagacaatttgcataggcagctctcaagcaaagcctccctcaaagagtttctgactcatccccatgacttcctcccccatctgtcaacaggggaaactccaggtgggaggttacatttcctgcctccctgttatggactagtttccttcctgggaggtgaggcagaagtggaggggactttctccctcctcatcatcccatgccttctctcttctcccggttcctctctatcaaactctatgttcccattttgagctgagaataaggaacagcagagttgattagaaacattttaaaatcaagtgattaaactctgataatggcagaatttcaaacatgagtcagtatgtaaatccaattgtaaagatgaagctttgaagatatttctgtgttctcagaacctcagaagttaattcctagacattgcttcctcctaagggcaacttcagcacatggtccacaaggatatagggcaggatcctcatagaggtagtgggctacatgtctcaagttgtaggatgctctgggtcctcaagtctatctatcctcttcctcgagttctgcacatcatcttctacatgctgctgggctcctgaaagcagcacaacaccctgacggggagcttgtttgagcattcattctttctgtgttttgatagtgttaggtaggccaccatctgtgggttctgtttagatccacagttcttcctctggacatgggatgtatcaaagcaggaaagaggctgcccatctgagcttttcatgatgtcgcggctgtggctctggctgttaccagagctatacaggaaacccagggagagggcttgaaatggttgggcatcaggtataaagaaaaaagcactcagaagtatggaatttgtttacattggttcagggaaccaaagaagattcgagaataga

SEQ ID NO: 36922 - DNA, 1348 bp, Homo sapiens
gtattgtgagaataaattgtaagtgcattagaccaaggagaatagaatataatatgaggtcagcctgaatttattgatatgggtgcacttaccagagattctggatttaatgtgtcagcataactagctggaggttgtcctgacagtgtggttagttgactgaaacttgggctaaatgatggcctacattccgaggctgagatgtcacaacttctgtggcataatgtagagtatgagtcaacaaattatggtccatgggtcaagtctgtgagctaggaacagttttcataatttaaagaagaaagaggagagaaggaggaggaggaagagaaggagaaaggagacagaaagcctatatggtccacaaagcctaaaatatatagtctttggacatttacagaaaaagtttgaggacctttggtatagagaaagaaatccaaaggtttgggggtgggtataaataatggaatagatttatcctgtgcaaactctccttttctctatgtcttccaagtgtgtttacagccatggctcaggctcatgtgtgctcaggccgagcatcactggggagaaggtgtctcttctcctgcctcactgtttgcactgaagggagaataatgacattcagagagtcctccttgtcttatctctgttcccctctggtaccccttgggagatgggggacatggaatgttaaaaaacaaaacaaaacaatgaggctttgagtaagaacagattatctgttggtttttttctttctttaattaaggtggtttcctgagaagctaagggaagagaagacttagacattactagaacccattcctcaagacactgtattcagacagaggtaaagtacctgtgcataactccacatacctccttaatcgatactgtggctgataaggtgattgctgattaggtgtttagctttcatagtgaccacaaattcttttttggggagaaattcttttctttttccagcttaccttttccaactcacatgcttttaaaagcaatgtttgcagtttctgccactccaatgtcaacgagaatttattttaaaatgtgtatgaactggcagcttctcagaaaaaaaaaacattgttttgggaatgaagtcatctgtttggagagcaaagcctcaagtatcatgcaaggggcgggaacccagtgccctctgcctgctcaaccctttggcacacacagccattgtcaaaacctgtttccagagcaactgaattctctgttgaaattacttggcagttgacaagctcctctccctaagggtctggagtaactcctttcaagggtcttattttaatgtagcttgtccctgatggagacc

SEQ ID NO: 36923 - DNA, 1961 bp, Homo sapiens
cttctttactccaaaaaaataactccccaaatagaatattttcgaaatttagggatagggatattttgccttgtggggtggctaatagttaagccaaaaaaaaaaaaaaagtcttggttatgaatgttgtggctatcagctttttttttatttgcttgacaaagaattcctttctttactataaatttcttgactgtttaacattataagaatacctgatgtacaatacaattaaagctaaagccccttctgaaaagttgatagctattgagattctgactatttaaaacattcaaaagaggctttaagtgatcacatgtaaattagatctctacagaggtgacacgagaataaaaaactgcttatgtacagtgattgaaacccagcagtctcctttgagaggcacagagagatgatgatggtggttagtgtagctagctggtttcttgactagcatgttaagccaattaataaaggtacacctggcatctgagtattttccttccaatttttttctttcgagaacaagtatgtttaagaaagctagaaagaaagaaaaaaaaagggaaagaaaaagcaaggcagctcattttattttatttttttcatgatttgttcttaaagttttctttttagaaaataaatgcaagaatgtttttggaaccatctgaaaaatgtgtgtttctatttccagtaggacttgaaccaggactgagataattttaagtttaactgacagctcttaagcagaaatgctaaaccttcaaatcctcagtcctctctgcaactggagttttctttaagattgtcaaataaatatgtttggggaagatggtaattaagtgtgaacagatggttgtttttagctgagatattaagtctcagtgtttaatagaatgatttgccctgttggaatcagtgggtgtgatgtagtttactggctggcaagacatcaagtttgtcaaagctaattgggaaccatgatagagattcaaattccttatatggtttttaggactggggaagtgttagaggaagattacgacactgctactccatgccaaaacgttacactacggctctgcagactgaagattgcctcacaagcagaaatatactctttccaacaaacactggtggaatgaaaaggacattggattcctgcttccagttactgcttgcccttccctgactttgtgacctgaggcaagtccccaaatccctctgggccccagtatcctcatttttcaaatggaggagggttagaattaagatgcaatcatgcatccagttgttttccaaagcattgtccagctagggaagtggtagcacgtggtgactgagagcttccccgatccttttagatcaaagaacacttctatgcctttgtgcaactggtgtgctgtgggtacaggtacttttacatcctctagttagtgagtgcaaagtactcttggaagctcccaagcactcaaggtttcaatctgcattcttctcctctatatgcactttatatttcaggttttatagtttgaggatttgaaaggtaagaaaagtgtgagctacagattttggaagaatccaggagctgagctcatagctaagaacatgtcaggggtgttaagcagctctgaagtatgtaacaaaggccatttaggtctcaggaggctgccaccagaacactacccgcccctctagcccatgccagccaggtgggggacaggtggaaagatggagatgtggacagcatcagagatttttcagctttcatatgccacatactcatgctatgtttatgcacacacacacatacacatgcacacacacgatttaaataaaggttttcactgaaaatcttgtggttagattgtgccttaaagtttttggttagcccaagggatagatgctgttgtgagggcaatttcacagcaaagaaaatatttaatgaaactccttacctg

SEQ ID NO: 36924 - DNA, 2229 bp, Homo sapiens
tccattcatcctcacatgtctgatacttgtctgtgtcaagccacttagtttcaaggagaaagggaagaaaacaaaaaacaaaaaaccttgtaaacgtctcagctgttcaccgtcaaaaaacaaaaaagtcaatatccagatctgcaggttggcgccccactaacaatgtcctccattaagaaagaggagggcaccgggcaggcgatgccacggcagagctgtgcgatgcacccatgtgcggccctggtaccaatccatgatgcgaggggcgcggtagccaagcgcggcttgttctcagatggaaaaatgctatacgcgcccagaatggctctgccaatagctcggagggtgcaatgtggccgcgcagccccaccctgaaaagtagtgggcacaaatggtggagctctgagtcctggtcgtgccgccggaccccctcctggcttgctttatgtccccttcgttccgttggacactagatgggaaagcgatgccctgggtatcccgactccctgctggtttcccagcctaacaccagcgcacgccggaagcggccacggccgcgggcgggacagactcacagacaggtagagaggaaggagccctgggctgccccgactcaccggccgccgctgaggatcccagccgctgccccgggcctcccgcgggcgcacgcaatccctgccgctgtgcgcagatccagccgagtctgccggcgtggtgcctgctcaccgcattatccgctccgagacggcgtgaaggcgccccaggccggtggccgggtctccgggctagccccgcgctgcggtcccccggccgcgagagaaggtgcgcgcgactgagcgcggggcggccggacgcgaggactgaacctgcggagggcggggcggcgcggggcggggccggcggcgcggggactcactggggcggggcggagggcgcgggcagcggggccgaccctcccagccgcggtacctgtgccctggcccggggccaaccggtggccgggcgcgcgcgcgggggggggtcaccgttggaccctcggaggacaatgggcgcccattgttacctccccagcgccaccccccagtaggcgacttctctcggagaagatgccgctttcgactccctaagcacaaagaaaggtcgccggacgctcggtttaaagagggacccggaggtgctgccgcccgggtgcacggggacaataggactccgcccgcaccccggactcccgcactaaaactcgtgcgcccacctctcccgatcccaacaggccgacctagctgtgcgagtggcgggcggtgacccgcagggaagcgaggccacctgagtgcgccgccccggccaggccgcagctccccaggtccctctcagcccgggctccggtgggcgcggagggggagggtcgcgttctgtcagtttctagctcgctcccctcagagctgcagccaaaacccggagagtggaataagcgccctgaagatgccggagctcccggctgagcaactggacacgcgacgaacagcagacgctacaggttctcctacccagagggaggcgtttcttctccctcagggtctttcaaaaggatttgcctaaagctggggcaagccggtggcggctgccccagacgcgcgacgaggcgcaagtggcgcagctgccggcccgagagagtaaaattcaggccgcggtggcacctgcgcccgccggtcacccggccaccgccagcgccgccgcccggcgcgcccctcccctccgccggggccggagcgtgaaccgggttaatgaatgctaattttcttaatcggcctccgtctcttcctcctccgcgagtcgtcggcctggggaaggagtaggcgacaggaaagggcggtgttttccggctgggaggtcccagcccgcatggtcagccaggggagggggctgggacccctgggagtcggacgctgggggcctggcctctgccctgagactctcgggttggatggaaatcctggcacaacgcggagaacctcccggataccttggctttgccgagagatatcagcttcaggtcatcaccgcggtgccctgggtctgtctgaaaccttagagggtgcgccttaagccgatgttgtaaacccaggctgactttaaggtgaagtgaaaaggaaacgcacacaatctggaaagcaaaatacttgggtggggtgttaaaagcctcaaagaaaaatagtagttggcaggtca

SEQ ID NO: 36925 - DNA, 1516 bp, Homo sapiens
tagactctgccttttattggatgacaaattaacattgcaaagaagcatgtatctaggaatggaagaaatttctggggccatcctcataatatatcacagtcactaaagctgcatatttataaattattcctttcaccctttagaaatggcctgttccttattggcaagggcagatggagactccaattgggatgactcatttaagtggggctatagaatgaacatttttatggaatgtcaactgtgtgtaagcattgtatacatataatcctatttaattctcaaaacaacttcatgataggtcttacctccattttattactaagaaagctgatgttcagggtgagttaatgaattactgaacgtaactcagttgtcatggagggagttgaggatttcttcacctgtaaaatgggaatcataatacttaccaccagcatagttggtaggatgaaattaagtgctttgtgtggaagtggctggtaaaccccaaagcactgtacaaatgttaattttcattttcattgagccaagcagacattttgaggggaggagtgttgtctaggaaggcgccagagtcatctgagccagacaccaactgttgtgtgtctctcagctgctatttactttggcttcagaccaaatccttcatgcaatgcctttggcggtcacagacgagaaagagccctgtgggccaggctggcaagccaggacatgctacaggtgaagacagacacgcttccattggaaaaaggaagaaactgaaacaaagctctaagtgccttgctgctatcctcaactactccggttgcaaggatttttaatatttcactcaaggtcacatacacaaccttgaattgctctgaacctactttctcccaactcttcttttcactaaatctcatcccaattctttccaaacctcattctctcatcattatcccatctgcatcttcaatctatacacccaatgtttcctccccctccttgtcttatttggattctgtaagacctaattcttacagggaccaggagggagggtcagccttttgcaaagtcagccttcaccagtcttctctttgcacatctaccatctacctaaactaagatctcttcctcctttgaggtttaggctgctcagatacaccatgttctttttgcctgccttgttgctgtcatctgttgacctcccatcagtcactaccatccttctttgggagttctggcatctcactcatagcctacctgccgtcaccaaggacaacttcaacactcattgaacatcctggactcagaattcctcaacttttacaaccccattatgcttcatccaagacagctgaataccatccatccaccggtgaaaaaggctgcattgcattgcagattgactagttcaactcacagaaattgttcacaaaaaatgcctaatgcaggtgacaaaagaaaagtcaaatttggagtcaggaaatctggttttagagtcttatctcaactccttaccaagtgttgaaaa

SEQ ID NO: 36926 - DNA, 682 bp, Homo sapiens
ctgagggtagaaaaatgagtaagacatggcccgtgcttttaagaaaaattattcaaattttagaaattaagatctcataggatattctttcaatgctgggcattgcctaacaagcctatagaagcattttttaaatctctagaagaatgtacctgtgtttgtgctgtttagtgttaattaagggcttagatgctgtgaaattacatgttaacatatgttagttgcagaggccagagatgttgctaaacatcctacaatgtagaattctccctacaacaaataattctctgtccaaaaaatcaatagcactgaagttgagaaaccctgttccaaagagatcaaaagggaaaccaggaaacctttgccctccttggaaagagaagttttagtggtttctgcagtaggttggtacatgggatagaagtcaggaagtgaagcctgtgagaggacactgcaggtttttcccagtggaggttgttaaataaggaagtcctaaaatgagaggggagccagggttagtggaagtttcttttaggaatgataattggtggtaccaaagtattttaaaatgtttgaatcaactgaagtttttatttttcatttggatgttagatgccttcgaaactttcatctaagccatgttaacagtgtgttatcttgatgaaagatctttacagtttct

SEQ ID NO: 36927 - DNA, 2317 bp, Homo sapiens
aagccttctggattcttcatggctttatgggtgttgtctgctgttgctgttttgagaaagagtgtacccatttttaattctgctcaatatattggtgggaagtttagagattaatgttatgcaaacctaagcttgaggcagtaatactcaaggtgcggacaatacagaagcagtgtatgtactgttttgtttttgtttttgagacgctctatcacccaggctggagtgcggtggcgcgatctcgcctcactgcaacctctgcctccgggttcaaacgattctcctgcctcatcctcccaagtagctgggattacaggcgtccaccaccacgcccggctaattttttgtatttttagtagagacaggggtttcgccacgttggccatactggtctcgaattcctgacctcaggtgatccgcctgcctcagcctcccaaagtgctgggattacaggcgtgacccaccgcgcccggcccagtttttaagagcgtatttagcagaattagtttcattatacaaaccacagaaagctgggtaaaaccttaaatgtcaggcatctgaaaaaacagcggctttcatctaaaggcaactcggaatggcggggagaaggaagaggctgtcaaaattgctcattaaaagaaaacgtgagataaagctatgaacacggggctgcagatatcagtaattagtgcaaggcgtctgcctttaattcagtcgtgaggagtaaagtgcaaggttgtgcctagaaagggcacagaaaaaggtttaactaggggagagggagtgggtttgagagccggaacgaagcgagctggcggtgggcgtgcggagtggcagcaacgcgagagggaacgcgctggggctagcgcggaggcccagagcccaggcgggggaaaaggtgccgaccggcttcgaagggaggcgacggccgagacacacggtccggcgcgagccaggcgccccgcgacgtgcaattttattttgcaaaaggtgcacccaacgccagtcccggtagagttgaacccaccacgagagggagagggggcgggagcggggggccgagcggccgcgggctcctcccccggcgcctccgctatctgggtcaggacgcgacggccgcggcgcgggaccttaggacccgcgggctccagggctactgtccgtccgccactgcgcgccagcaggtcctggtctccgctctccaacagctgaaaggccggcgcagtgaacacaggtgcgtgcgcagtctgggagggggctgctcagccgctgggggccggaccgcgccggggacttgcggagggaagcggaaatacttgcggtgggggcgactgcacttccgggtcggtgtgtccctggcgaagcttgagcctgctagccagcggtgctctgcgttcccggggctggagcagcggcccatagtggcttcccgggttcatccctcgctgaccctgcgccacggaagccctagccccggaggtcgctggtatttcctcgcacgcggacccttctggggtgcgtggggaacaggcagtttgctgcctcggcccggctggtccctgcaaaccccaaagaatttcaacagagacacttgctgggctctcgctcggctttcagccttgcgcaaacattttgtttttgtttgtgtggggttttttttgctctcagactccgtctgtgcctatttcacacaaaaacgaaggccggattatcagtgctgccaacataggggaatgaggcaaacacttgggagccctaaatttaaaataaattataaaatacaaaaaaaccatgaaaacctgatgaaatgaacaatagaattcacttcgaaagtaccaggttttccaggacgctgtaggaaatctgatcactagttcaaggtctcagtgcaattctcttaggaaacttaaacctcgggcttttttgtaatgtctctttatccttgcaaaatttgtcataccttccccgagtttattagagttatgcattttatatttttctcctctaagggtctgctgatgaagttaatgaatatctgtgctagatttatggtgaaagcattataattaatttagtaaagcataatttctacatcaaaaaattaattttaaataaaactagaacatggaaatgaaatgtttcttcagacatttcttcagaaaacatttcatattctattttctttagagtcaacattttgatgtcattttagaatacttgattctcatctcaacctttaatattacacaataatacacattaattaagtgccataatctatattaaaatgtcattttccattgttatttactagcac

SEQ ID NO: 36928 - DNA, 532 bp, Homo sapiens
agaagctgctgctatactttctgtacagcctgcagaaccgtgaaccaattaaacctctttgctttataaattacccagtctcaggtatttcttcataggactgtgagaatagactaatacagagcccattgaggctatctgaacagtagcagagtaactacccaggaaaatgtccgactcataatagcagcattagaaagccaccttaactcttggaaatttaaccttttttctttggaaataattgtgctcctcacatgccttgttcttttgacctgagtttattttctactggagatgttgacttctctgcctttgggaaaaacccaggtcagtgtgagtcagccctgtgggctagggaagggggtgaaggagcccagggtggaaaaatctcaggtatctgaaaaatagcattcaatctctcatcatccattgacatagctctttaggtcaagccttcaagctttgccctgcaggaagaagcagcatgaggggaagaccctctttgaactttaattcccagccttggaag

SEQ ID NO: 36929 - DNA, 2100 bp, Homo sapiens
tcccactcgagtctcttggcgtcgtcagtgccaggagcgcttggattgggatggggacggagaagggtgcctcgctcgccgagccccgctgcccttggggacctggcaaagtcgaggtttcctcacagcgttgagattgagactgggggtcggtgagtggcgtcaattcccatgcccttgcggctctcacaactggagtcgcagaagcgctcgctcccactcccactccagagtcaaagcgcgccatcccgctcctccgggttttaaggactgggtagaaggagggcagcgcgacctggcagggcggggcctgcggggggcggggcgcgccgcacaccaggccgctttgacccggactcccgtccaggcgcaccggccggcctcggagctctaccagcaggctttcatgggagcggaggtgcccacgtttccattgtgcggtaaccgcgcttcatcacagccacctccaatcgaggccgcacggtgtccccagaaccacgctcggtacaacctgccccggccgctgcgctcgacttgggagcgcgccccgccccgagcgcacgacctcccttccctctccgcgacttgagcttgcttcccggaaagccagtgtagtggcagcggtttgcctcacagcgcccctggttggttgtttaaattttatcttaggttctcgcaaacaaattgccacctcagtggaggctctttggcatgctaaattttttccagttcttgcggcgagatcaggaatccctaaaagtagccgctcccccgccccggggccccgacagtgcttgggcacacaaaggctcctggggcgcagctggccctgagatttcccgcgtagaggccactccaggtggcgccgcccgctggtgggcgcggggccgcccaggctgcgatggaagccgttggcgcagggcggggagccaagctggggcgactgggggggcctgggggagctagcggggcgggacccgagcggggcggagagtggcaggaggaggcgaatctccgcgctccggcgaactttatcgggttgaagtttctgctgtcgcctcccctttgcgtgcggagctgggctttgcgtgcgccgcttctggaaagtcggctccagtcatatccctgggcgctgcctgcggccgctcctcccgcgcttctcacggcacctgacacgcggaggcggcggccgagggtggggtgccggccaccaccacccttggcgtggggtgccggccgccaccaccctcggctgcgcacgcacagtcgcgcctgccaggccagcgaggcggacgcttgggccaccacccgcaggccgagcccgggcgcgtatcgccacctcgctgcgcaccggcggctctgtggtcttcctgggcgcgcttgcggtcgcgaagggggccctccctttataagggaagccggaggcgcttgggcgggggtggcttcccccgcctggcgcgccctttcctacatgctgatgcataggattttcaagacagctaagagaacaaggacttcacgaggcggggggaagggcgaactcgagggaagaggtgggatgtatctggttaaccaggtaggaattgtactggcttcatcaaaggataaatataaaagtgataggttcaccagggacaaccctgcactttgagctccactcgcgctgcgaatctcgtgctattattgacctgtttacagatgaataaactagggttcagagaggttgcgtgacttaacccaggtcgcgcagccatcaagaagtggagccagggcttgaagccaccaagtcccactccagatccttcacataagtttacacggaagaaaattgcagataagaggcccaaatgccttctttcctgcctcccttaaaaaaaaaaatgcacgtggggctaggcgcagtggctcacgcctgtaatcccagcactttgggaggcttaagcgggcggatcacttgaggtcaggagttcgagaccagcctggccaacatggcgaaaccccatctactaaaaatacaaaagttagccggacgtggtggtgcacacctgtaatcccagctactcggggatcaggggggaaggcagcagaattggttgaacg

SEQ ID NO: 36930 - DNA, 798 bp, Homo sapiens
ggacacttacactgggaattcaatcgatggtagttaagcgtcctttttctttaataattgggataagtatgacacatacaactttacatagcatgctcggggagtgaggagagaagctagagaagactgagatgagtgaaatgcaggcttgattgagaaactaagcagaatttctactaacagtgaggattgagggagaagcgttcctgtaatggaggggaaatgaataaaacctcgactcccagctcgacagggacctttcttctcctagccagctggaatgcaagctttaaaaaaaaaggaagtgtggggagggctattttttttaataagacgtctcagaaatgatcatgaacacagtaaagctggttttcaaaaaaggaaagtgagaaaagtagtgacaacttgaagctggtagttgaggaagaaggagaacttctgaacccatgaagagagtatacccggtttgggtgggcaggactccaaagcctttaggatcgatggaccagaacagagaaatgaaaatgcaacaagaacagctgtggggaaaaggcagaaggggggtaggaagcgaagagggtgtgtacttttcctttctgatctgagaaagggaaattttgtgctgggaagagttacgcgggaggaggaaggaaaggcgccaggaatgcctggaaggtatatgatgtctgaccttatgatctcttgcaacaatttctacaccgattgtgtcccttcacctctgctctaaaaatgtggttaggtaaatatctgttttattaacattgtgagaaattagcc

SEQ ID NO: 36931 - DNA, 2256 bp, Homo sapiens
ccttaaacatgctcagaacacttagattagcctacagttgagcaaaatcatcttatgtaatttattggctaccataccgaaagtgaaaatcgaatggttgtgttgttcgttgaagtatggtttctacaaatacatattgcctttgtgccatcataaagtcaagaaattgttaagtcaaatcatgagtgagggatcatctgtacattcatacacacacggtatgaatacatgggggtgtgtgtgtgcatgtgtctatgcatgtaaatgtgtgtttcaaagctctggggtccttcttccttcccagctaggagccccttttcctctgctgagctctcgaatcttgcataattgctcaccacatttctgaaaagacaatctcttggtacagcacccccagccttctaccaagggattccagcagatgttcactcccagctcagcttggatagggccaccaaggagcctgcctttggtctccacagtcacttcctgaagtaagattgaagagggtgggagcaccatggtttgttgacctccagctctgcttgtatctcctttggcagaaggggtcccaggtggtgcctacattctagattttagagaggacaccacctccagagagctgaacccaaaaactgatgagctccaaagacgtgaaaaaggacagaccctgccagacgagcacccttaggttgttggcacggaactgagggaggaaactgggactacccgcctgatgttgcagcttttttattctcccctcgtcactgtgagaggtctggacttcttctgacataaacagcctcctttcatcaaaggatcgtgccatcctttctattttctaagcattaaaaggcagtttaagcagatcagtgaattaggcaaacgtttatattctcccttgcccttttctttttgcatctggtagaatttctcctgttctattgttgatctctttgtaaaagcccgtacattcttagctgccagggcatgtctttggaagcattaccacatacctgtgaatgattaataagctgtgtttggttaataagcaacattcagctctcatattaatcacagatttttaaagttagacacagctggtgacaatttagtgacacagggtcagcttagcttttcttgagcattagctgggaggagaggctgaacgctgccagatgtcaccaaccaaaaaaaaaaaaacctaactgggtcctcagagaggacctgggggatgcaagtgcacacacacacaagagcaagagatccctgttcttttcaagaactccttttctggaggactgtcacctccagagaccccatgcttcctcctcatggttataactttccccaactcttcaagtgtctagagaaagcacattttctgaaccaaaaatcagggtttattgattggccatgagtctcaaattaagaatgccctggaaaaactggagaaaatattgaggcattagcggcattctgcataggctatatttgttcagccacattgaataacttactctatgcttagtacctccagagagtggggttacaaagaagaataccccctgtctagtgggccttcactggtgtgtgaggctcctctgggcaggaactcaattctgacttgtgcaggttgcaagtggagggtcggccgtgctcagctgggctgatggtttcccctattcgagcccttcctggcacagtgtgtctcctctgatttctcgttcccagagcctttcctcaagtagggattgcagttcttgctctcagttccttcagctagagaagcgaggtcctttcactggccctcttcagatcctgttcttgagctcagtccaacaggacacctggcttctctgttcacataggatcttctttgggccaggccaaactttcctcttccatctctcaaattggcccttccctctctcaagaactggctacttctcatggccctcttcttcatctcttcattactcccagtctgacagtggctttgcaaaaatctttcacatttctcctcaccatggtctctctatcgtaaatgaagatccagaaacgtcttaatttatctttaatggataatatagagggtgattcctgtcttcaatcaaagagaaagaggtataaggacaatacacccaggccatttcacctacaaatgctgaccttacaaaagaccagtgggtggggacaggtgagtgaaggtcctaacccagggcttctctgtgctgggaagtcacagtttttctt

SEQ ID NO: 36932 - DNA, 1925 bp, Homo sapiens
gggcagaatctcttcagtaagttggctttattggttttagtcatttttatctattgctgatgctcatgtgatactttgtttcttgggtgaatttcggtatctcagacagacacatacaaggagaaagaacagaagttcttaggtagttttttagtaatagaagttcttagattttttttttttttttttttttttttagtaagaaagaaaagtgctgggagagattgatcgttccttataaaaaggccttcattcctcacaaaaatacaactttcagtcaagaatttggtcctttaaaaaagaaagaggaagaaaagaaagcatgagctctatccctcttttgactaaatactaccactgactttcctgtttagaactaaaggctgtctcttgttccacaggtcaaatgcatactttttaaaatgccacttgaccccttgggttccccattctcagtagaaaaacaaaatggtcattaatttattttgacatgcaaactcagctgaacattttttggtgattcaaccccacagatgtaaagtgaaagagtgccagaaaagcaagtgagagccatgagattaccacaagtctgtgagcacatttttttcaaggcttacagaatcccaaagcttgcccttgcttcaggaaaaagaactggttgacacctgagaggttttaagccacaagaagctgaggcccgttgtgaggagggcagggacagtggggccaggccacacgcgacgcgtcacccacctcctgcctcacctccccccactgagatgtctgctgggtgggaggaggcttattgccagagaacagtctggtgttttctgttcctgcttcaggaagtcccccttctcccgccacccccgcagctcctcagcctggaaacaacttttagagaggagaagggaagcaaagctttcaaaagcagatacctgtggggtttgaagggaggtgccccttgttcaagtatttctcccccaaaattgaaaggacacttcagattcattcattttagttttgatgtatcttcagtaattaagaagccactaagaaaactgaccctgggaaggcaaattcctgaagctgagtcagatacagccagctcttaccataccatctgaccctcagttccctctgacctcatctcttcccacctcctctctgtctgactcagcagtgaggccacacaggcctccctgctgattcgagaatggctcccacctgaggccttgggccccccttgttttcgcccccacatacccatctggcttccccttcactgcttccaaggctctcctcagagagcatcctgtcagaccagtctttcctggacatgctgagtgtacctttcccctatttcattttccttcgtggcaccttttaccacctgatatgttcaatggctctatgtttgtttgtagtaagtctcgcctgactagaatataagacccatgggagaagagactttctgctctacccttggcacataccgggtgctcaaaaaatattcaagtgctcgcttcggcagtacatgtactaaaactggaacaatacagagaacattagcacggccccttcacaaggatgacacacaaatttatgcagcattccataatttcgagaaatacaaatcaaaaccacaatgagataacatctcacaccagtcagaatggctattattaaaaagacagaaaataagagttgctggtgaggctgcagaggaaaggggaaagcttatatgctcttaatggaaacacaaactagttgagccactgtggaagacagtttggagatttctcaaggaactcaaaatagaacaaccattagacccagcaatcccactactgagtatatacccaaaggaaagtaattcatcctatcttaaagacacatatgctcctatgttcactgcagcacca

SEQ ID NO: 36933 - DNA, 1380 bp, Homo sapiens
gggaaggaagggagcagggggcatgggctggagtgccacctgttgcgtcctatacttattccctgggtgatgggatcattgggatcccaagcctcagggtgatgcaatttacccatgtaataaacctgcatgtgtaccctttaatctatgataaaagttgaaattaaaacataaacaaataaaatcctgagtactgtttcaaaaaatatatttgaggaaagaaggaaggaaagagggatggagagatggaggaagactaaaggaaggatcgtggccctgagagaatagagcacaggccaggggtgagatacagagtgagatgggagctgaatggggtctctgaaactagacatggaagacaccaaaagaaacattcctacttcatctttccctgtgcctgggataatttactcctggatggtaaagatatgtcttggtttcatctgtgttaaataaacctgcacgatgttacaagctggcattgcttcataagcttgaccttagctttcaaataggacctcgatcattgctcaatgaccaagtcacaaagttgcctaatgatattggcccacagccatgttattgcaaacatggcaatgactggccaaaaccaggtgtgctccttacatttctgcccgggtgatactctcagagagctcctcgccatgagaactaagtcagtctcccagtgccaggagccaggacaattacggggctttccctattgtgtgttcttgctgctaaccagctcccaggcctaggcttctgagaaacagtgtaggcacacaagctgcagatctctcctccctttattctctctccccttccccaaacccacaatagcctctaccatagtgcttattcttttgacctgttctgatctgctagcctaactattccccaacacctttaggaagataggtcttccctgaccctcagtctgaggtctagaagcccttctgccttgcctcacaggcatcttccctcctcccccgtcccctagaccagtccaacagcagcccgtgcagcctctgaagtccactcccagtgctagctgatgggaaccccatgggctcctgtctgctatacaaatggaacagactttcttcagagccaaccccagctgccccactgaagctggttgccacagtgattttcagtctcataccagattctgatctcttctcttgcccacctttggtgctgcagagtggatcatcttgttttatactcaagtcatcattaaaatttatagaaaaagagagaatttaaaaaaaaaaacactaaaaaatcaccttgtacgcatatacctcagaagatctttggcctaatggtaatctgtgacattaaggcaaataaccaaaaatatgtaatttttct

SEQ ID NO: 36934 - DNA, 828 bp, Homo sapiens
tataccttaaatacatgcaatttctatttgtcagttatgccccaataaagctgaaattttttttttaaatgagaactgatgtttgcatccagttgctgctaaaggcacaaattttctttaaaaactattgaatgattttccagctcttacagacatactgggaagaaaaaagttaaaaactatttgagaaatttggattgaactacctcatcctgtatgaggtaaggccaatgtgcaatcttgcattgctaatcactcaagcagagtgctcagaagctgggaaacaggctgcggttaagaacattgcttaaggaagaataattagatcctttccgtgtctcatagccacaatttttttccagctttggctgttgtttgagcaagaccttgtgtatcaaacattgatctagccaagtggcttagtggagaatttgctcaaattggttttttagtatcttgttggcaggaggggaaatgactgcttgaacgtttcagccttaatgctgacatgtggtgacttgaagccaggtgaatgaaggttcctccagctagagaggtaagatgaacatgccggaccaggaagaaagcaggtcatcatgttagacaggtgcaattatgtgcagagactataaaagaagagaaaaagacatttagtcatcagagagcagccattcaagtaagaccttgaaggaaagggagggtgaatcaaacagaaaatataatgtaagcaaacgcacagaggctatactgtggagaggatgtggggaagagggaagtggtccatttgactggaacagagggtaaatttaaggcagtaggaggtcataa

SEQ ID NO: 36935 - DNA, 691 bp, Homo sapiens
ggaatcatgtaatacataattctttgtaacaaattttttaaatttagcataatattttcaagatttatcactattttatttccttttattgcaaaataatattccattgcagggatacaccccactttgtttatccatctaccagtcatgaacatttgggttgtttccatattttggctgtgatgaataatgctgctatgaatcttcatgtacaagggtgtttttttgtttgtgtttgtgtttgtttttgtggacatgtgttcttatttatcttgggtgcaatacctggaagtagaactgctgagtcatgcagtagctctgggtttaaccttttgaggatttactaggctgttttccaaaactgttgcaccatttcccattcccatcagcaatgtatgagggttctaatttctccacatcttgatcaatatttgctattacccatctttttgacctgcctttttgtactcaccatgctactgagtgcaaagtagtatctccttgtgattttgatttgcattttcctgatggctagtgatgttcagcatcttttcatgtgttcataatgggtctttactttttaagataatggcaggaaatttaacagagaaaagtatcaacatagatagaactccacaagcaccaatcgttttctatgtgtcaaatgtacttctcacttgaagactggaaa

SEQ ID NO: 36936 - DNA, 2723 bp, Homo sapiens
cctatttcaacaacaatctgaagagtatcatctcttctcaagataccacagcacaacaacgttcacaaccataactgaagtataaatttatgtttcttctaataaggtaaatacatagaatattttgaaactgcatctaaaactcttacctcaaaaaaaggaaagaaagaaagagaaagaaagaaaagaacacacacttcttcccctagggtccaaccaaaagagcgaaattaatccatccgcattccaaaacaattaattacttaagaaatccaaccagcacacatctaaggcgaagctgcttctttggtagttttttattctacagagtgctaccactgtacaaacagtcaagcgttttggttggcagacaataataaaataagctttatttccttttcttcttcccttagcaaaactccagtctgtcatcacctctgacatgcgccaagaactaccaggaatgatgaagtatatttcaaataaactttcctattaaagtgagtccttgtggttaacatcataccaaaatgctttacattttatccagcaaaacctttacacaccgtaaaaaaagaaatcttaagacacgagctcgtatctgtatttaataataaactcttatcttggccgtacttaccaaatcgtaggcttttactatttataagcctttgaaaaaactttatgcctttcttaagtaccatcaaaattttcaatcaggatttcatgcgatcaattcgcaccacagtgagagatcaaacgctaaactcctataaataggggtgttatgagtgagagggatacactgcgctgccaacgcaactgcgtcttcgagggggcaggggcgctcctggtacacgtacagtaggagctcacattcagcaaaaccagggagccaaggatcaggtgacttcacactacagacactttcagagtgatcaggccttactatcgtccaagtgactcgtaaacggctcataaccccagtttgacacgaaaatctagacttgcaccctagccacgcacaacccgcgcgaatgggttcgggagccgaggagccccgaaacgcgagcccggggacagagccctggcctgcggactgcggttccctccaggaagggtgtctaaggagctttcggacccggcagcaaggtgtctgctccccgcgcgacctcctcctccgcggggcccatcatgccctggccaccccttcctccctgtccgcgtaagggacagcgaacgcccaccagctaacgggtcgccccgccgcgtccggagctcgccggacggagcggagccgcagccgacctccccgcgccccgggcaggcggccacggctcaaggccgccccctaaggtcggggcggacacggcggcagccacgcggcgggctggcgggcagggggccgggccggtcgcagacgcgcgcgccactggttctcccagcagctactggagccgcggcccacgagccgccctttcaggccgcgcgctgcgggagcgcggggcgcggctgaggctaggcccggcgggcaggcgcggcggcgggaggagacctgaaccagccgcggactccgaccccgccgcctgcggccggtgcccgcgagcccgagcagcgagcgtctctccccatcagggccccgcggcctctgcctcgctggcccgtacctagggaggtcgtggacgagacgtggttaaccgcggcgcttgggtcgctggtccgtcgccggcgccacagcccctggtgcggttgctgccctcgcgctgcctcgtccccctccgccatcttgtaccgatttaaaattaactccccactgacgtcaaacgccgccgccgctttatcaacctcccgggagccggcggggtggccggcgggtcctagcgccgctctccgcctgtatctcctcgccctccgcctgtatctcctcgccctccgcctgtatctcctcgccctccctccgcccccgccccgcccatcgctcgctcgctccgccctcgccctgcccgcctgcagatccgtctccccggctccaagtttctggttggactggggcgggggtgtccctgccgccgccgtctcacacccccacctccctgagctcagcaccacacccccttagcgctgggccaggctctgcaaacgcagaagggagctccagagaactaagtccctccctcccaattcgctttacatctctaatcgttgattcgtgcgtcctgcacgtgaggtggctttcgcaccccttctctccttttcatcgccccctcctcatcacagccattcccctcctctctccccatccaccccccaagttgttgccagtgccctgcttttcctcttgatcttttctttcctcacccaagtccctactgttgcttcccctcccccccaccatcctaaggtttgtttgcattcgctccccatctacttatgagaccttcccccatcttctcaactgtgtataccctggccctgtgctcctagcaccttgcagaggcatgccagaaagcactctaatcggaaaatgaatcgtggcaggttcttacctaattgtgatgaaccttcttctggggatccagtgacatccagtagaaagttcaggtcactttttaaattacaagtcagcccgtggaggcgtctgtgaaacatgatccctttggatttttaccatactgccagctgcattagaaattcctcttctccagtaaaaacagatgtccggg

SEQ ID NO: 36937 - DNA, 1756 bp, Homo sapiens
atagggatgaagcttcgctcgccctgctcacttcctgctgtgtggcctggttcctgtggcccaagggttggggacccctggagtagggagagggtatagatagaaaagagagcacgagactaagacctattcatagcagaggaagaactggcagcaaaagacttttccccaggaaaattgctgtgcgatcatataatcaggcctgccttcaacttggaatattttggacaaacaccaaacagagattcagaggtggcttcactgtaaagctaatgaagcattatcttcagggtgcttcacttgtgcaagccctttccgaggccctgggaggcaccccagcttcttgtaatcaaattttgcattttttctttaaaagaactttccccaaacctgcccctccacccttgaatacatccaaatgtcattgcaaatttctgaccttcagcaacaagtcagtacctagaggtttgtaaatacgcttcctttggtaggctcagagtccttccatccagcacagaaagtctgacattgacgtacatatcttttttactttttatgtttttgagacggagtttcgctcttgttgcccaggctggagtgcaatggcgcaatctcggttcaccgcaaccttggcctcccggattcaagggcttgttcccttgggggaaaacaaaacaaaacaaaactcttcctgaagtcccaaccagaagcaaaactttcccagccctgtctcaggccatttgtctgtcaggcctctggatggtggagttggtctcagtgtttactaaacaaaccaatgtggttatcccatggagatctgaaagagaaagacaaaaaattagcataaatacaaggccacctattcaattaaagctgcaaaccagggcagctagaaagctgaatataaaacagtcagggagagttttaatacaagtgagttacataacttgagacatgcttgagactcaaacaaaggcattcttatctcaaggttaaaggaaggaaggaagaccagcaacagtttccaagcacttttcctataaactttctaccaacaatgagactcaacagttgggaactggcgggggtggggaggacagaaacctccacagctaatcattcctttgggttaattaggacgtcctctgcataaggtgtggttccctactggtggtggagtcacaggctttcaaaattatcaccatttcacaacccaggaactgctccagttggaagcaacctttgagaccatatggccaaccccctcctgttacggataaaaaacaccaaaggtcattcagctagttactacagaacagggactagaacccttgtggtccaggccagtgccacttccacccctgtgcctgcaccttcagacacatccacagaccatctgtcagcagcccacggctgggagggcaactgagtatagcctctccaacaaatttgctggtgctagacttgaccctccttccctgaagccttccctttctcctgttttttttcctcctctcttctttcagccctcttttctttgttcacctgcatctatgtcctcaacccactgatggcataaagaggtccctaagcattgttttaatttgccagtggcactgggaggcgctgggatctggggacaaaatgtttcctccaggccaactcctggaagaggtcaactccctcttttccatctcttccagcctaagccttgagaatcagtgacagaacaaggagttaaaaagcataaaattcc

SEQ ID NO: 36938 - DNA, 533 bp, Homo sapiens
caaagtgcggggattacaggcatgagctaccgcgcccagcttttgtaggttattctttaaaactcaacaactttcaatcagacacgaagtcctaacagtggacatattaaaaagagaaatacatggaggcaggaccttcctgataccctttaggtcataactttgaacagtccagtctacttcctgtggctaaaaggggaaatcggacctgcccaatacccctatgccaacatcggggagcagagtccattcctagtgtccatcacttgccctggcaggggaactctttttttttttttttttttgagacagagtctcactctgttgcccaggctggagtgcagtggtgcaatcttggctcaccgcaacctctgcctcctgggttcaagcaattcttctgcctcagccacccgaatagtagctgagactacaggtgcatgccatcatgcctcgctaattttcgtatttttagtagagacggagtttcaccatgttggccgggctactctcaaacatctgacctcaagtgatcc

SEQ ID NO: 36939 - DNA, 2073 bp, Homo sapiens
agaaaggtaaagggtctttaattaagtctctggccccctggaagaaggaagctggggaaaagacagccatgagggcaaggttaatggtacatttttaagtaaaaacggctccagagactcacagccacagtggcagctaaaaagtcaaaattaagtttctctatgtgctctggcccagcctaggggcatggccttgtagccctgatcactatgcagttattcagccgccctcccaggcgggtgcaggcccttgggtaatcagccgacaatctcaagttgacctcctgggaggccaccaaagccaattaaactagaggtcacctgggttcggcaagaatggtggccagcctaggcttcactgagcagcaagtgaacagtaggctgcagtgagtacagtaggtgttagagcctcagcaagctgatcacatgctgagcacagtaaaagcctgaaaggcccatggaagattgggcaacagtggattgcaggaccaaagtctcagggcagaagtttatctagtacctcacagtagatattcctaatccagctgcccagtgcattacacagggcaggctcttttccagggcataaaggtgttttttctgttgttttttgtttttaattcccctcctgttttctttagttttgcttttgtttttttatttctctctagactttccatgtacactatgaatgccaagtgctgtgaataccaacccatgctttcaaagagcctgctgcctcagagcatgtgatgtggaactttctggtggcctcggcgtggaggttctcaacctcagctgcacactgtgtttagttggtctggagcgagatctaggcatcagtatattttttaagctccccatgtgattgtaatatgcagccaagaataaaaaaaaaaaacactgggctaggtcattcctggccgaggtgaggaggtggtgagatggattggaaggggaccatggcaaggattcttaggggtgtcaaggaggagatgaaaggaggactcagacaaggggatctggcaagttttcagaaatcacctgctgatgccttttaaagctaatgccattattgaatcttagtcatccattcatcctctactcaccagtgactaatattgatgtgttttagacatataaagatgaattaagacccagtccctgcccttaggcggcacacagtaggagagacagactcatgaacacatggtggtgtaatcaaagttagtcatggactgtatatgtactcaattctggggcccacagggcaccccattctgtgggtaaggggcaagctcaccccaatgtcaggcatactaggaagaggctaaagctaaaatatccaatgagagcctgcaaggagggccttggacaggggaaagacaagaacttcttgggctttctgggcttcctctccagagcctgtgtcctgagaagtctgtgaagtaggtacactcaaggttactctactggacaactccgggggtgtcattcatttgtattttatgaaaacactgcccactagagttgtgcacctagatggcattgcgagtgtggtaagagaagctgactctgaccagagggctccggaaggtgcctctgccgtttgataaggaagctcctatgagaaacacgggaacagatctatgcctgtgggctctgagaacagccacatccagaagccaggcagaagatcctctatttttctttccggttttcccagagccttcagtgaagtagaattaagaacaagtctgtggccaccctttgggctggcatggttccagacactggcatcctctagggccagggtagttgtggcatccccagaactgcagagaggctcaccacagcatgggcagggctatggtttgcacgtgtctcccaaaatttcatgtgttaaaaacttaatcctcaatgcaacagtgttgggaggtgggacctagtaagaggtgactgggtcaggagagcaaagccctcatgaatggattaacatcattattaaaagagtgggttgttacaaagcaagtctggctcctggtgcctgttggtcttcagtgctcacttctg

SEQ ID NO: 36940 - DNA, 1275 bp, Homo sapiens
cctttacgttttctggttaggaacattgaaatttcctatcttgagtccaggatgaagtggacatttttaaagggggttttatttccagaacacagtctgttcttctcagcaaagcccttaattggaaacagttgtcactgaccccattggcatgccccagggtggggagggcatgcacccagcctgcagtgattttgctctgccatttccaaggaggcagcctgaagaactgagccccatatgctgggggcctcgctgggctgaccagtctgcttggtaaagggccggggcagagggtggtttcagctgtgcacacttggtttctgcagtggttctaattcaggctgtccagagacgatcatctggatgacccctagaaagttcccctctggagcaggagaacaggagaggaagagggtggccattgcacttagagtgactcttctgtgttgggttagctgctggctggatttctgcacttggctgcagcctcttgtagctgatacattcatacccagccagaatgacagccttggctgcaggtttggatttcctaacacccagatgtgagctgtgagtggcacacagcagtgaccagttcctaatatttgctcagatgacacaaaagtctttgtccttgaagcagatcccaagctaaaccttggactctgtcaccccggcttccacagatgcttgcttcataagtcctaaggtaagaaatagcacagctccatcctccagccttaccacgaacggatgccaatgtgcaatctcaggaagcttctgtgttaggaagatgctgccggagcacttgcagtgagtgacccggatcatgcaggccctgtcagatgacttatgtcactttcctcaaggagaaaattacactctttatacttggctgaggggaggaggcattgaggttttctttgtggaggtaaaaaaaaaaaaaaaaaaaaaagttttgcagattttgccttttttaacctcaaaaatatttttaaatgtaagatgttttctgaggtagagtctacgtgaggtgtgacactgtaattgtgaatcccaccatccagctaagctaaggcctatggagcataattcactctttccttcagcaaatatttgaacagtgtaaaactaaaacagcccattcattaagcaatgtgcaaggttctcccgctgaaatatcctggagtcataagatttgatcgctgggctgcagcagtcagtctgattaagaccttcagagaccatgaagacaggacccattaaggaacc

SEQ ID NO: 36941 - DNA, 1408 bp, Homo sapiens
ccgtgaacactctgccccctgccaggcccccaaaatactcttctgtctctacagttgtgccacctttccccagcaccagggagcagctcggcaggaccaggctctgggggtcagcacatgcgttcttcacaagcgtaagagggctgtcgtgagggaaaaaaaaatggcattatatgacgtcattccagctttcataccctttctggaaataagtgatgatataaagaaatagacatagattatgtacacacatacatgaagggtaagtacttggaaatgttaaagagttcgttttaaaagtccttaggcagcacccctttctcaagttaattcccacttgatcaaaggtggagctgcgggctccgaggaggcgcggtcagggtggcaggcctgggctgcgcggaccgcgagcgagcctcctgggtctccctccttagcggagaagatcctccaggctaaggtccaaggcccatctcccttggggttgtggccgcccacctcctccccgccaccctgggctttggctttgtcctcaaccacgccccgggagtgcgcggagcggtcgcagttctgttagccagggttgcgttcccaccgcgaaggcccgggcgcgcgctgctgtggatcgagtctggggctccggccaccaggtggcgccacacggctacctgcgcgccgctctgaggcggtcggatcgccgcggtgcaaaggacccaagaccgggggtaaccggtcacccgagccgacccaccgcccgcactgccgaggctcaggcgccccagttcggtgccaagaggcacgccccggggccaacctggacaggtagcttcagcaaaattgccggacagttaaaaaaaaaaaagtttccaccccaccccccactcccaaatcaattcaaaaataaaaattaaactgtgggctgggcgcgtctgaaaccccgtctctacaaaaaatacaaaaattagccgggcttggtggcgtgcacctgtaatcccagctactcaagaggccgaggcaggagaatcgcttgaacctgggagcggaggttgcagtgagccgagatcacaccgctccactccggcctgggcaacagagcaagactccgtctcaaaaaaaaaaaaaaaaaaaaaaaaagttaaactgtggtggggaaagttgttggcgacaatacagacccgcatggatacaggcagcggggagcatgagttctggagccaaaattgctgagttcaaatcctgtttaatgaccttgggtgcgttatttaaccccgtatataaccccattacctcatctgcacatgcaaataatttacttagaactcacgtcatgaattgttgacaggaattaaatgagttgatacaccatatatatttatacgtgtgtgttttacatatttaatgtaagtgc

SEQ ID NO: 36942 - DNA, 2252 bp, Homo sapiens
aatgcaaccctgagctcacttcatcctttcatggggcaaatgtggaataaattaccaatgaaaaactttagtaattttaagatttgttttacttgaaggtaggggtgtaccaacagctgccaacacttctgttgaagtgttgtaaccgaagaggtaaaaagtgtactgagtaatccacaaaattgggtagagcaaaggatgcacgccatgcttataaagagtttaattttaaaattttttaaattaaaccttcaagggaactagcatgtgaacgccaaggcataatctgttatttaattacgggtctccataggaccgaggcggagagagctcccggtagaaccgacgcaaccatcccgggatggtgaccaacgcgcggctgctgcgggcagagggactgaagagaaccggtggtcccgacgctggccccgagcccgaggagttaaactaacaaagagctccccgagccgcgaaaccccccagagcggaagcgacgcctccccgccgccgccgccgcgccgcgaccctccccaagttcagggcccggcagtggactcgctgcggggcctgcggccaggacggcgccgggttcgcagtcgggatgcgggaaacaggtagaggccagaatacgagccccaaagagaagagtgggcgcttccccaaacgggtcggcgcagcggaaaaggctaactgaagcaagcgggaggccccgcaccgaggccctgcttcccggggagcagccaggcacagcggacaggggggccgcgctttgttaccggctgagagaagctccggccgccgccgccgccatcgcccccgccccggggcgtcgcttcccggcggttctcgccttcctcggccgagtagtcgatctccccctcctcggtcttgagacgcttggcctggctctcgtactcccggtcctcctcgtacgtctccctgggggaggaagaggaggaggacatggcggcggccggagggaccggctggcaggcgggtgggggtggcggtggggcgcgcgcctcggatgccgccggccagtcctcgccgccggcagcgcctcttctgcgagggtctccgcggcccggccgtccgcggggactgcgcggccaggagactggcggctgagaagcgcggacggactgaggggggcgccccgggaggaagctctggagcggccgctcctctcaattaccgagccaacattcagcctctccctcctcctcctccgtctccgctccctgcccggaggagcgaatctaaggatggggacgcaaccgtggcttccggtcttccctcctcccctaagccgctcccagccgcgcaggccgagcctccgcccccgccttcgcggccgtcgcgcaggatcgaatccagccgcagcctgcgggaagcgccccccccggcccgggttctgctccctattggcaggggcgggaaagtcgaccgggcttcccattggctgtgagggccgttcgtcaaaagccgcccgctgctcgacctcacttctctccccgcgccttctgaactcgccgcggtcctgggaggcccggcgcgcaaggcgcgccgcctgggagtagttgcgacccgcaaccgttggcgctatgcggctcctacccgaggccaggcgtggagtgaacacggacgagcgacgagaagtgcggagaggctagggctgcgggtgttaaccgccctgccgctaatttaaatgctttttatcacctcttaaaaagagaatgaggaaaaaaacctctaaaatccctgcagtcataccccccgaaaagccctaaaattgcaggcgatgaagggagaaaacggcttggagccatgagaatggtctttccactgttttgtgtgcaaaatctggtagaagtgggcggaccctcccgcccctagctgggtgttggagaacagctgtcagcattgactgaaggctgcgaggcgcgcgtcggcaggaggcgctgcacgcgggcgctcgtcggtctgatcggttataactcgtttgtaacctgggccctttactgacttgcctgtccctgtaagtccctgctccagttaaatatgttttaatccttccatataaaatctcatcctccatcccaattctttctcttctggacaatgtatttacttcacttgatcatttattgtcgaaagatacaaaagcctttcaaagttctgtgatcacagcttgcttcctctgtggtgtcctgagggcttttccaagattttagttgctgctctctttttgc

SEQ ID NO: 36943 - DNA, 1910 bp, Homo sapiens
ctgtacttcttaccccctgtatcaaagagttaaaatctaattttttcccaagatcggtctcactgtaagtctgctatctgtattttcccattcttcgtctgatagccaccgacattaatgaccagctcattacatgttgaggtgtggggagatgggggtagaaccccgtcaacccaggattcgagtttagaaagactacaagccccaaaatgcaatttcacctcccaaaaactaccattcccaacatgcaatgcaaccaggacgagccaaggaaaaaaagtacaagtgtggctgcaaagtttgcccctcttgttaccctcaggcaaatgattgatttagaaaggccccaggggctattttttgcaggaacggtcactccctaaatccaggcagggaaagggaggagtctgagccgagtcacgccccttctcctgtaaacttgggtcgcctctagcttagcgagcgctggagtttgaagagcgggcagtggctgcacacgccaaactttccctatggcttcggtgaccagggccgtgtttggagagctgccctcgggaggagggacagtggagaagttccagctgcagtcagacctcttgagagtggacatcatctcctggggctgcacgatcacagccctagaggtcaaagacaggcaggggagagcctcggacgtggtgcttggcttcgccgagttggaaggtgggttgaactgtgccctgggctgcgagcaggccccaggcccacgctacatacctcccggatctagcgggccacttgcaatgcgagggaccaagggggaaagtcgcctagcttgggaccgtctgacttgcaagcgcatgcatcatagagggccgtgtggccatccagcatttgggaaaaactgtaataaataaactatggcagttggcctctggttatccgttcaggctttgccccagttaacgtaaaaggtcagctgatggtatgatacacttcagcgatcctggagcgatctttgaactgcctaatctttgaactgcctgatacctggagaaggctggagaggaaagagcaggcaagagggggtgtggctcccacttcttcccttctgaagaaggaaattcaaatacttgcctcttctacttccttcttccttgatcagattctctttgaggcctggttgtctcagaaatgctccactaagctcagtggttgcctagtacaccagctacccaataaccatttaggaacaaaatagagaagaccaactcagtgtcttctcagagatcaggtctcctaccaactaggatggacttttatcccagaatccatgggcaattaggatcaggcattaattaatacatttgacaactctattaatccgatgacctcattaaacaggacagacaaggtccccactcttgcggtttggctggggagatagactttaactcagtaattgcataaataaagaatgacaattgcagcttgattgcagcaaaggaaaatgtacatcatgctctcttagcaccatggtgtaactagacagaaaatgaggtgtgaaataaagctggcaaagggaaactgagagttaatactctctgctcagtggttggggcgtagacaaattctgctggagaggaggtttgaggttttccttttggtgtgtcattctgtctgtttggttcttccgatacgtaagatatgtaacttggctcatggttacatgttggccagaccagcctggccagcatggtgaaaccctgtctctactaaaaatacaaaaaaattagctgagcatggtggcacgtgcctgtaatcccagctagtcaggaggctgaggcaggagaatagcttgaacccaggaggcggaggttgcagtgagccaagattgcgccactgcactccagcgtgggtggcagagcgaa

SEQ ID NO: 36944 - DNA, 1054 bp, Homo sapiens
tagaagccctccagccaactttctctgatttctcattggccagaagtgtggcctatgctctgcctaacccaatcgccagcaagggaattaggccatgatgattggcttagaccagtcaaaatttgccctctggaaatggagcgggggtgggtcctcttccctgaatatctggtctagcataggataaatcaacaagcctagtttctgcctgggggcacagagttgctggtaaaagagttgccatggcttgtgggtagtaacccacagtgtctgtaccctcctgctagaggtgatgagagctgagttaaggctgtggtagtgatattgcacaatgtctttaaagtcccctgcaaatcataatgggctctataaatggttaatgttacaaacaggtagcagccaagcaaagttaaccaaaacaaacactgaacccagagatgggcctcaaggtctgtttgtgaatcagcatttcttgccaagttttcatcagccttgaaaggaaatgattccaacagtaatattccaccagagtagatcattgcgtttttccagcctagaagagtcataaaaagaagcatgcatttttatttttattttttattttttatttttttgagacggagtctcactctgtctcccaggctggagtgcagtggcgcaatctcggctcacggcaatctccgcctcccaagttccagggattctcccgcctcagcctctggagtagctgggattacaggcacgtgcccctggctaattttttgtatttttagtagagatggggtttcaccatgttggccaggctggtcttgaactcctgacctgaagtgatccgcccatctcggcctcccaaacttctgggattacaggcctgagccaccatgcctggccacaaagcatgcatctctttaacgaaggaatgttactactgcttggtgacccagtgacccttaagagggtgggtgcctgatgaatgttcttttccttctcctcctaggcttcttcctaaatctcaggctcatcagtttatttggagtgtgattttcatgttgat

SEQ ID NO: 36945 - DNA, 1055 bp, Homo sapiens
ttgagaggccaaggcggttggatcacttgaggccaggagtttgagatcagcctgagcaacatggtgagaccccgtcttatttttttttaagattaaaaaaaaatttttttaatgcaaaagaaactaaagttaaaaaaaattttaaataactttactggatactcatcttacactaggtaacagcttttgttttagctggcttttttgggaggggggcggtgcgggaggggatagggtctcattctgttgcccaggctggagtacagtggcacaatctcagctcactgctgcctagacctcctccccaggctcagatgattctcccatctccacttcctgagtagctgggaccacaggcacacaccaccacgcctgttgtatttttagtagagacagtgttttaccacgttgcccaggctggtctcaaactcctggactcaagcaatctgcccgcctcagcctctcagagggctgggattacaggtgtaagccactgcgcccggccactttggcctctttaatgggttgagtttatggctgctagttcaaactttttatgaggaagaaaggtaagcatgtgagcctgcatacccaacagcaacttcaggtaacagcaggcattaggaactcccataaatatagtgactacaaaactaattggaataataatgaaaaattgagctcaatggggtcaaatttttggcatcacagtttttgaatattttcctggctccagggctgagtttaaaggcttttctgtttgtcttggtagcatgtgtcatcttgtgatatttacatgactcaatagaagggcatgagtaagctggcccatctggtcctagaggcagaattactgcagtagaactatatgttgtgaactgcaaggaaaaaatagtggtggctgctgttttgtgactgataaggaagaaagtgaatcaattagcttataagtggaggttatgaaataagtgcatatttatttgtgtatatttataaaatcttctcatgctatccggttgagttgatcagatgaaaatcacaacagggcataattt

SEQ ID NO: 36946 - DNA, 600 bp, Homo sapiens
tcatgctcttcctaccttcatctcctccttatatcttgtccctgctctgtggctgggtctgattcctgtctcaaagccgcttcccagcttctactcctccccacctgcttttctgccctggactcatgttgtttgtatttcttaccagggtgcatcatgctgcaagcgggcgggtactagaagtatacaccacccagcccggggtccagttttacacgggcaacttcctggatggcacattaaagggcaagaatggagctgtctatcccaagcactccggtttctgcctggagactcagaactggcctgatgcagtcaatcaggtaatgccacaggctggcttttcagagtagagttgtgtccaaggtcacactgtacgacagagttcactacactcgaatcagcttgtatgattcaaaagttcatgctttgtttgtttggtttgttttttgagacagagtctcactcttgtcgcctaggctgtagtgcagtggcacgatctcagctcactgcaacctccgcctcctgggcacgatctcagctcactgcaacctccgcctcctgggtccaagcgattctcctgccccagccttccaagta

SEQ ID NO: 36947 - DNA, 1188 bp, Homo sapiens
ttctggattctactttgccctccagtgggagccctggcattttcctacctaacagttaggaaagctatctcagtggaagtagctttccacacctcctctttctttgtaaccgataataaaccaaagatcttgtttattttttaattcacttcagcatggatttttctgagcacctgctctgtacacagccctctgctgggtctgtgaagggattcaggtcaggtgtgatgctgcccacagcagccagtcaggtgaggtacatgctcagttgtcttctcactggtgaggttaactttggtgacttgagcaagatgctgcctgcagatctctccactcttattaaagttaccaatatatacattagccaagaggcctcagaggtgaactattaagctgactgcaacctagctaccaatttgattattaaattgttcgacgcagggttctcatactctaggtgccagcaatcatttaggaaatcccagagaagaagagaatgaacattttcttattcacaagtgtagagttgccagttgcccctgctttctgtatcctgaccaaaagtcacagagtgccttgacctttgtcacctagccagctgcagatttttcctagcaggcttgaacccaaaccgggccttgaacattcccaggcactgataaatctgtctaggttgttccctaaaacactaaaagaaactggcactgggccgggcgcagtggctcacgcctgtaatcccaacactttgggaggccgaggcgggtggatcacctgagatcaggcattcaagaccagcctggccaacatggtgaaaccccgtctcaactaaaaaaaaaaaaaaaaatacaaaaaaattagctgggcatggtggcgggtgcctgtaatctcagttagtcgggaagctgaagcaggagaattgcttaagcccaggaggcggaggttgcagtgagccaaaatcatgccattgcactccagcctgggtcacagcaagactctcattgcactccagcctgggtgacagcaagactctgtctcaaaaaaaaaaaaaaaaaaaaagaaaaagaaaaaagaaactggctctggccctgagccaaattcctttaactgtcatagaaactccctcactgctgatatacctgggcagaacaccccttttctctctcaaccattgctgcagcactctgtaag

SEQ ID NO: 36948 - DNA, 1814 bp, Homo sapiens
gaattccacaaaggcaaatcctggaggatttctcgcaatccatacagttcttaaaggaccataataactgaaagccctttctaactctcctttgccagcgccagttcccaggttaccaacatacaccttggtttctgtttaaaaacgcaaatagaagaatgcacgttacgcaaaatctggcccaagtttcaattacttatttgccttaaaacgggccatcctcaagattgggtaaagcacatttaatgccctctatccaagacaaaacttagtcgtaaaactggtgaaagtccgcaaatccctgagaaactagacttttgacaaaattcttaacgttctaaataatgcggggtgaccctcccgaacacaagcagaaacgcgtggtaggatacaccgaggcgtggggcggaacctggcccggccccacccatgagtcccggcagccccgggcgcaccgggagcgcgcgggcccgcagcggcagcggcgtcggcggcgggagggcctcggtaggggccgggccaggagagcagggctgcgccggctctcgtcctccgcggcaaacgtcccaggcacaggctcgcccaagactccagctccccgccccagagccataaaccgcgctggaaataactaaaaaaaacccagccgccagtcgcagattacgtccccattcccattccgcaatttaaccgattgtttgacgagaacatgcagctcacagctgccaatttcgttctatctcaaacacaaccacgatcttacagctgcggccagatctgtccgctgaagtggcgggaaagcgctgaggaaatgcgccaccacggtcctcaatgtgcgcaaaatggcagccgccgccgagggcggggggggaggggggccggcgggcagctccgagaaaggcaacgcgaaaaccgtcatctcaaccctgctttaggctggattgggccacaaaaatgcccaagagtacggaactcggcagagatgtacacccgccatcccgtctcccttcagcaccccgcctccgctgcctccggcttcgtctggcgtgctcctaagccgccattacgcacgcggaataaccgtctcccaacctccgcgacaaccctacggcctcgcagtgctcactacacccacaccaacgtccctcaccggactccagcttcttacctcctccgtaccgcccgtaacgcgacatgatgacagacccgcgtgctcggctctttagcaagcagcgcccagggctcgagtgacgcaaaagctgacacacaccttcacccgccaagagtcccggcggcactacgaggaagagcccgggttcgcgtttatatatgcggccgctgcgctttgcgcatgcgtcatctcgttgttctgcgcggcacaaaggagctgggcggaaacagccaagaaacgacgcggaaggaactgaagagactaacacgcgggtcatgggcggagggatacgtttctatgggaacgccacgatctctccagtaaacctgaggccttccccatgctgtcccgccccctcctctccccgttttctacaccctccttgtcttctttcccgtctccctaccctctgcctcctttcgtttttccccaggctagggaccctcagccttaacaatcttagtacggatgcattagaccggcctatgaaaggctgtacaatttaaccgctgatgttgcagccgtcgcgcccttctgctgggggacctggcctagtcagctactctgatctttggggctcatcagaggtaatcgaaggtttggccatggtgaaaagtccatgaaccccgccattctgagtagt

SEQ ID NO: 36949 - DNA, 1175 bp, Homo sapiens
actacgcctggctaattttttgtatttttagtagagacggggttttgccatgctggccaggctgatctcgaactcctgacctcaagtgatccacctgtctcagcctcccagagtgctgggattacaggcgtgagccaccatgcccagccttgggtttgggttttaaaggctatcatgtagggcaaggggccagaaatttggggttatcaactggtcggggcaaaggggatgaaatcatcaggatgtggaaactgcattctttggtgaatcagctttttgtgaggtccctcagaccagctggcatcagcgaggtcctgcagatcagctggcataggagttttaccagtatgtgggatctaaaggcatgtctcaaagggaaaccctttagtaatgttcaagttatctctagagcagttaaggggaactaaaatcttctaacggggtctacatgatcctaggataataggcaccaaacaactatgaggaaacaggtcagggagcaagctgacctcaggattaatgctgaatgtgctgcaaacttggtttagttttgtttcttcccctcatttcttccccgattaatcttataaagtttataggggcggtttcaacattagagttagatgaggacttgctttagttctataactaaaaggtcttttctcacaacaaagcaaagaccttctgcaaagatgaatttaagtttccacttcctgcaatgtaggaaacttctcaaagctcaaagtttcaaattccaaagggctcttgagggccttttcctcttggaaatcctctctctctcattagaaagagagctgttttctttttcttttttttttttttttgagatggagtctcgctctgttgccaggctggagtgcagtggcccgatcttggctcactgcaacctccgcctcccgggttcaagcaattctcctgcctcagtctcccgagtacctgggattacaggtgcccaccaccatgccccaactcttgaccttagatgatccacctgcctcggcctctcaaagtgctgggattacagtctgggccaccgcgcccggcccttaatctcttttctaacaaaatttggtgtatgctgtgttttttcttttagacagggtcttgacaaagtgttgggatcacgggtgtgagccactgcacccagtgaagtg

SEQ ID NO: 36950 - DNA, 1501 bp, Homo sapiens
cccctttcctgtagcaaccctatcgctcttctccacggcacgttcacctcacattcctagagctttaggatttactctgagggttcatgtgctttgattctaaggcgaaagtgcatttccaagtctactatcattgaggacctggcacgagctttttcctctttatttatttttatttttaatttttttgagacggagtttcgctcttgttgcctaggctggagtgcaatggtgcgatctcagcacactgcaacctccgcctcccgggttcaagcgattctcctgtctcagcctcctgagtagctgggattacaggcgcccgccactaggcccggctaatttttggtatttttagtagagacggggtttcaccatgttggccaggctggtctcgaactcctgaccggtttcgaactcctgatccacccgcctcggtatcccaaagtgctgggattacaggcgtgagccaccgcgcccggccgctttttcctctttaaagaaaaaaagattatttgaactgtccgtcgtggcaatggagagggatagccttagaggacatggcggttcattattattattattattacagaacaatcttagactctgtccgcaccctgcactctaggtcccgcgactctcagacctccaagtaggactacaaaacagaggtttctgggggaaggaagtgacgatcggcgcaaagcatgctggtctcaggcggtctccgctcaacgatccttcctcaaagcatggttgctgagtacccagagttgcgaggagttttttaactggtatttttctcgtttgtcagggttaaacgttaagtaccatttggtttttagtacagtgttaggtatcgtgtggctgcaggacaggaccagaaatctaagctctagagctgtagccgctggcccttcgtttgtgcatccttcaaacaaattttaaggggcagttgtcataaatcgggggagcctctcgatggcgggatccagcggagacacagagccagagagcgcgtgggtggatatcaggagagttttctggttcagttgaggagtggggtgaactcctttgatcgatggaaggaaaagcagagttgaagggtttgagcatcatctgcaggccagagtgaaagcgatttggaatgtggttgtggatcggaatagacctgtgccagatgaatttcctcagactgcacccgcggcaaatcggtgacccctctgctttaggccgaattgtacatattaactattttccttttcctgataaaaattctcaagcagcctttacacgtgttcttttccccaactatagtatcagttcctatcagtacatgcattaatacttaattgtattaagttacttattacgaacttgaggcaaatcacagatgttctctgtctctaggataggatggagattagggataagacatttgcttacgtggaacatatattaaccagcactggtggttgtttcagatttagccaggtggcaatca

SEQ ID NO: 36951 - DNA, 682 bp, Homo sapiens
cgagattgtacgcattccagcttgggcagcagaacgagactctgtctcaaaaaaaaaaaaaaagccacgtaggaaattatccacagcatcaattggacttgatcttggctcagggaccaggcccggtgccttgatattggtagatttatttgccatcagactaatgagctggggacattgactgtttcctggcaactgagtcctctgattgtgtaaacaatttgcctgcaaacaaaacctgagtgcttgaaagggtaagtgatcctgatctgccatagaaaccttcatgcttagggagtttccctagctaattcctcagctaagattctccccaggagtttcactcacctgtttccagtgcctcctttgggctgtcagcatctgtgattccacattccccagagggagattcctccccaaagctggttgtatttactgccagtcctgggctgtagccagggcagtctttgaacacattatcaagaatactttttaaaataaaagtctgtttcgacttccactgtgtattttttgtctccttggaagcaaagtttccactgtttgcactgatttctcaccatccccttttcatctgatttcctaagtccacttttttcttctaaagatactgaagttgatttttccatgcacttagttttttttaagtgacatttaaaacatt

SEQ ID NO: 36952 - DNA, 1775 bp, Homo sapiens
caaatgctgggattacaggcttgagccaccatgcctggctgtcctgcatttttatgaaacaacaccatggccaacatgttgaaaccctgtctctactaaagatacaaaaattagccaggcatggtggcgcacgcctgtaatcccagctactcaggaggctgaggcaggagaatcacttgaacctgggaggtgggggttgcagtgagccaagatggtgtcattgcactccagcctgggcgacagggcgagattccatctcaaataaaatatttgttttaattctattggaatgtagcaagggaacaatattaataaaatacttgctgtgaaatgaatctgctcttctattttgtactatgactaattgggaagatcttaggaaatgagacgagctaagcattctgatcgaaggggtcaaaggccgacaaagcatgagctttgtcttcttcctccttgagttccatatcagattattaacaactcaaactccctggcaagtaatgaactttgatctttatcctcctatttaatattatctgagcagcttaatttagataaaactaagcctagcatgtggatctgtaggcatatggtaatgttagttccttttcctttctgggcaatggtttgaacatggtcctaagaggttaacataaaataagattttgtgggctgggcacagtgcctcatgcctgtaatcccagcactttgggaggccaaagcgggcagatcacctgaggacaggagttcaagatcagcctggccaacatggtgaaacccagtctctactaaaaatacaaaaattagccgggcatgattgtatgcgcctgtaatcccagctactcaggaggctgaggcaggagaatcaattgaacccgggaggtggaggttgcagtgagccaagactgcgccactgcactccaccctgggtgacacagcgagactccatctcaggaaaaaaaaaaaagatcttgtgaaagcaatctgtaaaattaaaatacagcaaatgtaaggcattaagactgaggatgtgatttttcaggtgcagcccgggctggctctgtggggactccagtctgtgttgtgttttcttgattgcaaggcccatagcgggtgaacttggggcatcacactattgaggttgtctcgtggatgtcactcagttgccacataaataatgaattcctggaggcagcagaatatgctcatactgtattatgcttgaacaagcctaggcagaggttggctttttcctcctaaatcacatgggaattaagcataattcctctggcttattttcccccacatgcaggggtaaagtttgcttaaaatactcagctagttaataaatacaaggctagttgttgttttcagaagttagatcttggtcacgaatctgtgtcagtcaatacttgcatgatcacagtacagaggtgccctaaatggaaacaacgtggaaacagctcattcagtttgttgtcagagcaatagtttcagactgttccagagtgataagcttcttccatgtcttttggtcccataaatgtaaagcgatggaatgactgggtgaacagttaaccgtgatgaatcattaacatggagagactttctgctgtttctaagctgtcacctctaaaattatttatcaaagacattggtcttagatgagatttgtagccaatcacttatacttaaggggctttaaaatcttacaagttttaatcatttgtttatcaaagagcagaaggaatctgcactttgggaggccgaggcag

SEQ ID NO: 36953 - DNA, 1399 bp, Homo sapiens
ctgtaatggtgtccaataccactctcccagagttttcaagggaataggaattaggttgtataatccacgtggttagattccactatctattccatctagcccgggaagactccaactatctttcttcaccatggatacagggacctaagtttggctgtaagagtattctttgtttgatagccaaggcactgaaaagtgactacacactactctcctcccaggcagatctctgactgatcacaatatatccagctccatccagatatccagatctcgtatcctttttcgaactcacatcgtccccacccttctccccaaaaaagccacacagacggagtcagagaacggagcctgatcccttcaatcaaccccttagcctgctccaagactgaatttcacgccccgccccccccggccccaacctgcagtttgagcgtggacaacctcagcggcagagcccgccttggttcggtatcagggcctgggatcctgctggtccagattcaccggccccaggcagactggatgaaacacactgggccgcgatgctcgtcagatcccgaccactcctggagcaggaggcggcagacacactgacaaacagggtgacgcgcacaccgtgcgcacaacgcgcatcacttgtccgcagaagtggaagacgtacctggctcgcagagttgggtcccgagccggctgtcgggaggtgctgcccaagggtcagaggtccaaactggacttggccaccctcacgattctcacttggagcagcctgcggtggcccagctgcagcggcacagtcccggcgccttctgattggctcagctacagcccctcgcgtattcgcttccgggtgagaggtgcccggtcgccccagcaaccaagtcgcacctggagctgtcctagcgcctagttctctcccggccgcagagctggccgcccagggggagtcgcagagtttggaagatctctctaacacctctcggccaagtgagtgtccctcctcctaacgacccgggcagagaagagctcctttaagtcgaactagcgtggagtcagaacctgcttggctcccggtaactcctgtgggggtgtgatatatttcctgaccgtctagccgaggggcacgggggaacccctggtctgggaatctagctctgattctgttgttaattcgctgttgagacacccgaggcgcgtgccaacctccctgggcctcagtttccgctatggtgccgggtggtctctgtgaggttccctctagctctgacgttcccaagtttcgaatgtagaacattttagcggcaattgaaaacagtccagtttctgatatgattacgtttaatgctctgcttcataggcacttaacgattccttccgaagtgcccttcattcactagac

SEQ ID NO: 36954 - DNA, 1040 bp, Homo sapiens
gtacgaaggttggcagatgggctgcacctattaaactttgtgtgcctatcaaactacctacatgtttgtattcactcaataaatcacacagctcaccttaaaacaccttatgaaatcatactctaaagtgggtctgaaacttcctcctttcacttaagaacatgttatggccaggcgcagtggctcacgcctgtaatcccagcactttgggaggctgaggcaggtggatcacctgaggtcaggagtttgagaccagcctggccagcctggccaacatggtgaaaccttgtctctagtaaaaatacaaaaattagccgggtgtggtggtgggtgcctgtaataccagctacttgggaggctgaggcaggagaactgctgaacccgggaggcagaggttgcagtgagccgagatcgtgccattacactccagcctgggcaacaaaagtgaaactgtcttaaaaaaaaagagaacatgttatgaagatcagttaagtttataaagatctgagagaggactttggacagtttcagtttgtataaataaataccaaccattaggatgttacaggagcaggggccaaatagtgagtcagtgaatgggtcctgaggtttcttttcatgtctgtgtaccggagaccatgggatatcatgagtagcatgactataagctaggtgagcagactgactgtgtatttttcacttttctaagcacctgacgtagtcctggtacttagtaggtattcaagaaatatacgttgacagattgaatgacataccgtcagatatatccagagcctttccagttcctcttaaacgaactggtaatatctttaagcaaaaacatataggctttaatatttttccaggaagagaaaatcaatgaactcaatatttttatcaagaatgtagagggtcaggctgggtacggtggctcacacctgtaatcctagaactttgggaggccaaggcaggtggatctcttgagctcaggagttcgagaccagcctgggcaacctggtgaaaccctgtatctacaaaaa

SEQ ID NO: 36955 - DNA, 2623 bp, Homo sapiens
aaaacaaaaatagtctggttgtcacactgctgctttagaagctttaaaaacgtaagaacacttcctaattatactaaaacatttaaaagcacagatcgggggtatgtaacttcaggtaacaatgtagcaaacttaaacatacaaaggctaaaaattcttaacaagccaaatgacagcaccaagaatctcgaacgctgcaaaaacaaaacaaaacccccctgaaattggtagcatgtgcaccagcccctgttaatcggaggagcgggggaaaccaggagaatgaggagtgaatactgacggcgagcagagcaggccacgttcctactggcaggcgagctcgcaattcctttgagcaagccttacggccagggcattctcaagccactaaaaccagcgtactggacacctaaaacggtaggctgacagcagctccgggctaagaccaagaagacggaaaagtggcctgctttgacctccgctgaaaactgaggctcctccaactgttgttgtcctggaatcaaagggcaaagcattcacctctcaggggttggattatccggataaactccccccggctccctgcggcattcccacacacccggtggatgtcaacaccgagagccagccgtatgaggggggcctctccgtgtgcgccgtccttttggagacgcggcgagaccgggaagaaagacggccctgcgcgcgccccgcctccccagcccttccccagcgcccgcgctggggggctgcggccgggaagcggggtcccgcgtgctcctcacctttttcagcgcaggcaccagtagtccccgccacttgggcgcgttctcttcgctgaaaaactcgtagggcagctgctgcgcctgcatggtgcccccggggcgcctctgggcggggagaggggcggcggcggccgggccagggagccgcgagagggcgagctcgcagcgcggaacagggccgcggccccaccggacggcccggccccctccgggcgccgcgcagccgggctagccctggcgagggggctggggggcgaggcccgcgcctggccacccacccgacacaggtaccagccgtggagaacggacgcggcccggaggcggcggcatcccgcaccaccgccccggggccaggccccccgcccctccccggcccgccggcgccgccccgggctgccctctgccgcggccgccgcccgcccgccggggctgcactcccgggcccggtctggccccgcggcggagctggcggctgggggaggacgtgtggagggacgctccggccgcggcgcccgctccgcgtagttgggactccgaaacgcaagagccccgggcggggcggagctggggcggaggtctcgcggggaaggggaaggaccggaggtcgttgttggggaatctggctgccctgaggtgccgccgcggccgccgccgccaccgccgccgccggtgtagcgctggagcttcctactagcgaactgaacctgctcgctactgagcatgcgctgccgtgctgggctggttcgctccgggttttccggctcccggtgaaggaggaggaaagctcgagagagaaagagagagagagacagggagggcgcccggccgggctgtggctgcgctcctgggggctgcaggggaggggcgaaggggcccgagaagtcgcaccctggcaaagtggggcctgcaagggtgggtgatgactagggtaaagaggctccccattgtgtggcctggccgtgagggctcccacccttctcggagtccctgggcccttcgtttcggaaaggggtgtgtgtactttgttcctgaacacgaagataaggactgcccagagcacgcaatgtatagtaaacagactggacaaaagacaggtgctctgtcacgaaacctactgctcagtatctgctgagtagtagaagtgattgcggtgtttctaagtggtctttccacaaaataataaaatgtgtacgtgtagtattgattttgtgtgaatgttttagattccctctgttcatcttttaaacccactccagaaatgaactccagtaagcactttcctccagtggatatcgagacctcttttacagctcctagagcactgcacttatgcccctctcagggcgttcagtctattgtgttttgttatcttttgcggttctttcgactagataataaactggaaggcagatctttttcaccagggcctctacacagtgtagaacaggcactcagtcaatgttagtggaatgctaaaggagcagtatttataaactgtccctccaggccactgtttgtttataataggggcactttgtggcagacaccttatgatttatcattaattatcatttttttgagtatcatctcatttaatccccatagcaaccctattattttcatttcaccgataagaaggcagtttagaggaactagcctgggttaaagctgacattgtgtcctgctattcctgagaacagtaaccaggatcacataaacgagaaaggttcagtggttcttaatctttacaggacctctttgaaaatctggaaaaacaactcttaggttatttcctttaaaaatacacaggccggccaggcgaggtggctcatgcctgtaat

SEQ ID NO: 36956 - DNA, 1900 bp, Homo sapiens
ctcaagcaatccacccacctccgcctcccaaagtgctgggactacaggcgtgagccaccgcgcccggccgagatcaacaatcttgtgcgtttcgttcttcattggttttaatcgtatccccggggcctacaatgcctgcacacagtaggtagcaataaatattgtcgaaggaataaaatgtgcatgcaggaaagttccaggactacataatcaacgttgtttccagaaaacgggcgattttcggggtgtgcaggtaaaaagcgtacattcactcactcgggctaagaggttgggcatgttgacctctaagatccccttcaactccgaatctctgatttgactgcagaggaaaacaagccctagaaacatgggttacagcctgggctaggcttgcttagcggccagggcaggttttcactagcatggccgtttgggccgtagacagggcgggtaactggagagaaactgcagtgaagagactcagtgcttcgcagcggggagacctacagggagtgccagggtcagccccgctaaggtcaaggagcactccatcacccctgtactgcttgcctgtatctcttgggacaaaacaaaacacctatgtccattcagcaagagaagacaaccgtgcggactcagaaacgtgcagacgggtaggcacgtgtagacgtaaaagtgtcgcccaccaatcccccgcgccagcccctcagcttttaccgccgacgggtgcgccctggcgcaggcgcagaggcttcttttcgcttccctcctcagctctaaggagcctcacgccacggcggacgtgacgcacgaggcgcgtccgggcggaataggcgaagaccgagaggggcgcgtccaggcgggctagccgagttccgagcgcggcgcatcggagtagggcggcgaggacgggggcgggggtgggcgtttggcccttcagtgtgccccctgcaggtgcaagtgcaacgctccgcgcctttgcctgccctgctggccaggacgcggccacctggttctctgccttgctgcagccacagtgatccttctgacgcgaacttcggacccagctacttacttttctgttcaagaactcacactggcgtcccaggataaattccaaagtccttaacctggtatccatggccttgcacaatcggaccgctacttatctttctagctgtatctctcactcaaaatgaactgctcttgcctcctacaaacacatcacttctgtctctgtctcctgctattcagaatgcctgtcgccttttttctctaatgccgcccaccacagccccaccccagctcccagatacacgctcgcgctggaactcttatccaccctgcgcgccctcagctcaaatgctaccttctctctaaagttttttttttgttttcggctctgattccttcagagccgaacaggtagaaggaacagcagtttcagccatcagcagttaaggtactctctcctccagaacatattcaccctctgtctttccctcaccctctgtctttccaatgcctcctttcaattcctctcctccaaaaaatgtatctccaggaaacacaccagagaaaatagtgactgagaagaacactagatgcccactctttactcacctttagctaatactttgagtcccccgccctcttcctccctctctgtttccatccctgcctttgcaaagatggtacagttagaagagattatcagaggttctccaagacatatgggactattcctcgcacttctttctcgggatttctgcagggagcttataggatatgcccaagtttatcttctaagagagaagagaagactttttgcaaaagtctctttccagttgattcaagttgtaatagctcctcaaattgatcacatccaaatgcaatgtga

SEQ ID NO: 36957 - DNA, 634 bp, Homo sapiens
actggcaattggtcagagggtgacaacccatccccaaattcctgaggcagccctaggtttacaatctgaggttctggaatagttcccaagatgcaattatttccaaatttaatcaaacctcagaaaatagctaattaaaaataatcatataaaacagcaggccctttctccaaaattaaacacacactttcttatatcggctgtttagccaagtcttacaaagacccggccacctgtttggggtggggggaggtgttagacttcctaagaggtgactgttcttggcagccacctctacccaggccgtcctggaatctgtcattgtcagcttctgccaagaaatgtttttgtacttgctggataaagacaggcaaggaattttttgacctctgttcgaatcccaaatcccttttccatactcttatttgtattctttaaatgacataattacagtaatgctcctaaaacagtggatggcactgaaaatgaatgggatcctccctctttcatctatctttctagctccctgcagccctggctgacctatttctccaggctctgccctactacccagaaagttgggtgtggttccgagaaggtttggttggggatttacatttcagtttgcgttgat

SEQ ID NO: 36958 - DNA, 2949 bp, Homo sapiens
tgggcaaaataaagttaagactgaactttccaatgcaaaattaagtttctttgtgcatcctcaggtgttatgtgaaactggaggagttcaacttcagttaccagtaagaagatacacaactaaatcaagactgctgccacatttggcaacaacctcctctcttcttggcagtaactgtgaggccaagagttgagttggccagggaagagtgatttatcttcccacatttagaagtggtccctctacaacaggaatgctgtaccgctactggactttgaattctaaccttgtcaaaccagtaccttccctaagtattcaagtcactttttaaaaaacaagtttaaatggcatcgcagtccaattcgacttagagaaaacaaagttgctctttccaaaaaaaaaaaaaagtcattactctggaaaattaaaagaaactgacagggggatgaataaggcgctaaaggctgagagctgtcgatggaagatggaggtcgctcagcatagtataataactaccaccgaggcctggtgggcagcagctcccaacctagagcggacgaccccaggttggcgtgaagcaggcaggtttgacaacaccagacccctgctgtccggttcgtcgcgctgaccctgccaacgcaacaaacgcccagaccttctctgcactatggatgagcagtgtggcctgctctcgttctgcccttccctggaaatgcgcgcaagaagggaggtggcaaaaatcatgtccaccgggggggctcaggtaagggctggggaggtctcggggttaaacattcggccctttgttcaccaaggcagcagagcccttggcgtccgcagctcctcctccccgactgctccctggcgccagcgtctcccgaggacaggcggcaagggctcggacgcccaggcttggctgcgggtcgggatcccacggcctcggcggcgcgcggcccctgcctttaccttgtagacgtcgccgtaggtgccgctgccgatgcgctgaatcagctcgaagtcctcctgcgggttccggcgggacaaatcgaagccggggttcatggcgggccccaggtgccccccgcctccctcccgggcaggggaggggggccgctcagggggccacacggagagagggcgccgcggccggctcccggctcccccggcggtcacaatcacccggctccacgctgcggccgccgccgccgccgccgctcccctcacgccgctgcggacgacgacaagcggccaatcgtccccgccccccgcggcccgccgccgcgccgaacctggtcacacccacaaggagaggagaaccctcgcagcccctcgctcggggtgaaactccaacatggcttccgctttcgccgctcctccccctccccttactccggctcctccaacctcctccccttttcccgactcccgcccgactgcgcagccgcgatcccggagggagcgcgccaggcctggcgcgcacccgaccccttgcgcgttccggctccgcgcgcctgccaggccggggccggcggcggaacagcttgggacccgaaacgcctcggcttttctgcggacccgcgcccggccgctgccgccggacgcttgaaaaggtttgcctggcccagggaccggggttaggactagcagaaagtggcttcttttcgtttctgattcccctaacgacaaagttggaccttggtctatctggtcccagttccaagcaggtagcatagtggtaatatccaagacagccaatgtcccagcctttattattttagaagcagctacatgtaggataccatggagtgctgcagcctttctgggattgcggggaggggtcactaaacacaccgtgaggaaaacccccaggaaaagtgagctgtgcttgcttgcccctgtcaccgacactcggacccttggagttggcctgccagggtgcaaaggagggcaggccaggagggccgcgagggaggtgtgtgcagtgggcagagcgtgaaagctccgggaggaaaacacgcggaacagctgcccaccatcccgcgtgggaggcaggcagagcgcagaactaaagcagtgattgacctccctcttcgaagagggttggattatcaaagacgggcggggactgcgcaggctgtcaagcaaccctgtaaagaaggggtggagagtggactagatctattaccgcacctgaaatataaacacgtgacgatccggaagctctttagctgtgaccttacctacccaaaaaccccaccctgcttaagacccagattgcgcgtcttacatctgagctatgtggactccagctccgattgttaatacttgcccaagaaagcttgagggtaatggaaggttatttttctgttctcattgaacttcccaatagacatttgcaggagctttaatcaattaggtgatggccactttggcaataccacgttggagttttgcttcagaaatgctttcctaatccccttaggcaccacaccttctaaccactaatattccctaatacctcgtggctcctgagaaactaggtctcatcaaacctgttaaggataagtataataaattaatagtagagcaaactacttagagttaactgcttcatactttttcaaaaaatcttttgaatccttttgctcataggaaaattgcatatgtactaaattctcaaattgtttactttgagtatctgttgactaaattgatgtttgaaaatggttatctcttcacctatataagtagcctttcagttgtgtaatttttaattattaaattttaaagcatcagtaatatgaaagtatcacttaaattattgccttaggagtgcatatcattgaatatcttctcgatggatctaccttcaggctctggtatcttgagaaactcctgactataaatgttattccatagccaaaggtcttgcttttgcttgtttaaggt

SEQ ID NO: 36959 - DNA, 482 bp, Homo sapiens
aaataagaaatgattgcctgactactctgagggcccaggtgagctggaggcacgtagcagtgaatggttgagagtagattttgataatcagagccaaagtgaggactcactacaatagaggagacaaactagtttcagaaagaaaaggcatctaggctcttttcagaagaggcttgtataagtgaaaaatagaaaaacatccttctatgagtcatcattctcattttcatcagctccctgggcctgcttattttcctttgatgtttacaaagggacatgtgattacataagggaagggtaaagggtataataaaccagggttgtaagagaaggaccaacagaaggaagagacttgaaacccagctgggagcagacaggggaaagggcttccttgaattgtcttcatggttttgtgagaggtgtgtgaaccagagcaactccatcttgaataggagctgggtaaaatgaggctgagacctact

SEQ ID NO: 36960 - DNA, 615 bp, Homo sapiens
ttatggatgatctctccagggcttaatctgtggggtaaaaggctgtcttatctgctctacatttactgaaaaagggtgcaagaaaaaccgtatctagctggccagatgggtagggaacacttggttgcactaaaaattttccagcaatggtatccccagcttgcccttttgcccgaatagtgcacaaagtcagcaagcatttcccctgaagtgtccacctccacacggccaagactggcttggctggttaccagaggcactgagaagattgaggaggcagcttatagaatactttgcttgcatcctcgttctcatcccattgtgaggtaactgccccacaactgagctagataagagaaaggaactgaaactgatttgcccaaggtcagtctgggtggatattgagcctagaataaagcacagaatagctgcacctggggctggcccagggcatgctcagatgaatcactggcttcaccagaaatgcagctagtctggaatgcagtgcaggggcccagatgcctgacactgaacagtaacttagaaaggggaaggtcttttcctacacatagtgaagcttcaaggaatctttaagaaaatcacataagaaagatg

SEQ ID NO: 36961 - DNA, 1793 bp, Homo sapiens
tcggcctcccaaagtgctgggattacaggcatgagccaccgtgcccagtgaaaaagctttgatcctttgtcttcaattgcacctatgaaaaggaagtttcgtataaaagctgatataaatggctaataaagcagagaaatagcttaaaatttgactgtagacatttgctatgtatgattaatatgtatcagtttacagttaattttaggaaaacttaaattttataaattgccaagaaatcacccatgaaaaactaattttcacttagcggtttaattttttaacattaggatttttaagtttcgctagtcttatcatctgggacactggaattttgtcttgttggaattgctgattaaacaaaataattcttcaaaagtgcttagcacaatgttaggtaaatagtaagcactaagtaaacattggctttattattattaggtggtcctatactatgattcctcctatttatatcacgtgtgtcttgctgcatatttaaggacgctcccatctatatgtttggactagtgcaatagtaaagctgccagctcaggtgaagaaaaccatttaaaaatttaaagttaagcacatgatggaaaattcttgaatatgtggtgagttaggtataaaaaatatagggggattgtattgttgaatacaaaaaagccattagactattttaagaatgctctcttctgtcattagggcttggttatgaatagtatatcacatgcatgaaaggaggtggtggctagtttcatttccctaaaacatgtttcaatggtaaattagaggcagctgtggtttactgacgcataaacccagtgaggtctatgataactagtatatatttacagtttgactcatggtgcctgtcaggctttaatcataggggaagaagtgatagtacttagacttcactgtttaatcttccgttcatttgttttccaagtttgtttcagtctgtgggcaggttcccttttgattgcaacatgcagtccctatttctgcagtttatcttcatttgccattttgagagggctatgaaagtcctatgataagctccttgttctccaaatccatgcatataagtctcatcgagttggatgcattctaaagacattttgaaatcacatcaacactttcagatcagcaagttatttcttaataaattactgtcttaatgttagatgctattttaaaaacacgaaagagagcagtttccaaatatgtgttactacttccagggaattgtaaactggagtgtttaattaaaagaaggccctaaatttttattatgctgtcactggatatttgaataactagctgtaaatgagttctagttgtacaaaagtgattttctaaatccagttgtccctatttcaaaatatagttctagttcctgggtgaaactgaaaatgaaatggccatgtctttataactaaaacaaattagagggttgcagcaataaaatgaacccacagaggggaaaaaaaccctttgaatcaggtttttattttcttctcctgaactgattgggtaatttactcaactaattttgtctagtcattaggaagttaatactccattctataatttccttccactcaagtgagcaatactggtgcatataatttggattaagaacattcctctactcttacaaatatttggatatatgccttgaatatgcttcctcatttaggccacagaaatttattcaaagacaaatcaatcaaagataataacattaactactatttattaagcatctccttcatgacaagactttt

SEQ ID NO: 36962 - DNA, 3768 bp, Homo sapiens
ttttaaactgaattaagaaaatgattccaagaaagaaaaggtaattcagtctttcactaaatgctaattgagcacctgctagaattctgtggcggtgctagattactctcttaaaaaaaaaaaaaaaaaaaaaaaaaaagaaagaaagaggccaggtgtggtggctcacacctgtaatcccagcactttggaaggctgaggcaggtggatcacctgaagtcaggagtttgagaccagcctgaccaacatgatgaaaccctgtctctactaaaaatacaaaatcagctgggtgtggtggcacatgcctgtaatcccagttactcgggaggctgaggcaagagaatcgcttgaacctgggaggcagagattgcagtcagctgagatcacatcattgcactccagcatggtcaacaagagtgaatctcttgtctcaaaagaaaaaaaaaaaggaaaatggcagagcagggtatagatgagggtgagtgaagcaatggacctaaggtgcactgttcaaggaggcactcactctcaggtgaccttgcacttgaatgacctgcaatccccgaagccgaagctgtgtgcctcacttgcctcaccctggtcccagccctgccttttgcccttggggcgttcagtgtttagcaaggatcccatatcagtatgggtcagacccgaagagagaaaccacacagtgatttgaacagggagttttaatatagggaattattaaccagtagtctattgtttagaaaccaacaaggacacagagggagagaatacgacaagccaagccatggagttttgaccttcaggacaaagtgaggactttgtttttcccttacggctgtgcctgagagagcatgacttcccctatttattagcaacattagaccgcagcatttcctttcagatcaccccaagcatttaggctatttcaggaatctaaataacatctcagtcaaactaacattccgagagagaaatgttttaatatatcttttcccagagtagcctttaggtctcggagtgggtgcaaacaggctgggtgatggtcgatatatttgaagattcatgggaatccagaagttttggcagaggtacatatgaatctcaaggaaaaattaaatataatttgatataatgcaaactgcacagtagaatttgaatgcaggacaaatcacaacagctgtttgtcatctcactgaaacagcagtaacaggattgcttaaacaaattccgttcctttctagaatgttcagagtatttaatatttgcataatgattaatctcctgctccagaggaaattcccaaaggaagagacaactcagaagcactttaaattgcaacaccacggcaccacggcaaagagataagagggagcatgccaaatccctagttttggggctactctctcaggagaattgtaaataatggtggtcaccttgctgaatattaaaccaagaacaggatggctaagaggacacattcccaaacactgggacaaagcatactaactgggccaaaggtacaccaccaattaagggattacatcatgcccgtattatggggtggtagatcttaaatatttcaagttttattctgttctttgaaaaggctaaattcttattcttggtgccgtacaaacccacccaaacctatccccacccacccatccaaggaaagttctgaatatatatatattttttcatacagggtcagttgtttatttgctgtgatttgggggcctctgagaagcttttggctgcagaaagggcagcagacttgaagtgtacccctaggcttcagtaggagtttgcctggatcaatgggctttaacctggctgtactttagaatcacctggggaactttacaataccctggcccgtaacaaaaactcccagcctcgtatggtggctaatgcctttgggaggctgaggcactttgggaggctgaggcgagagagttgcttgagcccgagtttgagaccagcttgggcaatgtagtgagacccccatctctataaaaagaaaaaaacaagaaaaccccacaaattattaaacactaaacactctctccttcctctcccttttttgcacttttgggtttcaggctgtttttcagaaggctcttaaagtctggcctctgaatgtgataaagacatcaattggccaggcatggtgactcacacctgtaatcccagcagcactttgagaggccaaggcgggcagatgacttgaggtcaggaattcgagaccagcctgggcaacatggtgaaacccccatctctactaaaaatacaaaaattagctgggtgtggtggtgggtgcctgtaatcccagctactcgggaggctgaggcaggagaatcgcttgaactcaggaggcagaggtctcagtgagccgacatggtgctcctgccctccaccctggctgacagagcaagactttatctcaaaaaataaataaatgaaaataaaaaaaatctatcagtatcatttagtcacagcttgtcaaataactttctgcctctgctctgaaagggtattttataaaagaagttaaaaattttatatggatattgacattctcattgctgaggggttagtatagtcatttgtaatgactaaacatattattcagttataatgactaaacatatctcatgactctgttctgaaacctagtactaaatacatagttaatgaataatattcattaaccatggccgtcgtaaatattcatctaatgcctgtcttcatttgagggttagtaacatgttaaggatatttgtggagagaatgaaagtgataaattctatctatatttactcttatttaaaaaaagcaaattcattttttagaatactctttgataaaatcctttaacaaaaggaaatttccttttaaaaaagtcttctgtctttgagttaatactcttacacaaagacagtttactaatgttttgcttgttaaatggccagttgatggacagtgtaaacaatccaattcaacgaagagtaatacaaagcagtgttctaaaacgttaaactgatgccttcctaatagtactttggagttatttttctaatgaaaagaggtagcagtaattcactgccaccctttcctggtcttcttgatcaacaacccatcttaaaggttgttggatggagttggtatatagtctgtgaatagaatggagcagggactggtaacctttttcttcaaagggccaaatagtaaatattttaggctttactactcaactctggtattgcgatactaaagcagccctagaaaatatgtaaatgaatgggtgtgactgtgttccaaaaaactttattttcaaaaacaggcggcagactgagtttggcttgcgggccataactcacccacttctggaatacagcaaaccccatagggtggtaaattggctctgaagttgcaatggaagtacaatctaggattaggaagaagccaatgggtgccagggttctctatgagcaggtggctccactatgatgggaaaagtcatgagaaagaattaataataatgagtggtaatagcaatggctaatgtttactgataatttgctatataacttgggttaaatacatgttttatctcatataatctttacaataaccttgaggtaggtattaacctactcctattttgtagatgagaaaattggggcatggagaggttacatacaattcccaaagtcacacagttagtaagtgtcatggctgagatgtgaattcagatag

SEQ ID NO: 36963 - DNA, 2433 bp, Homo sapiens
ggaaagcatccaggacgggaatctagcttagtacaaagagcctaaattaatgcttcttagcctgcacaaaaaaataattttttgttatcttctctttgttgtctaatctgatccaaggtgacttgcaggaaagaaatgcttccactagcaagttaaaagtgttcatttttgcaatcctaatagctgtttgaaatataacagcttgtttagtcctctccccagatgaatgtaccttcatctttagatttatgatttggtttttatctcttctgaaaatagagacagatgtactggaagttcccttatctctgcctctcagaactggggcctcttttctgagttttacttgtcttctagacacccaaagcagccactagttaggtttattcttcttaattctcattttctctccatatgttttcttctctgagcccataaacacatcaccactcttctttacaaaggcagggccccttacatgatttagaacattctacatactgacagagccctccaggtggctcagctaactcaccacagcttttatgtctttccaggttagggaaggcattagggccagaggtcagcatgcccttcctgccaacagacagccttgctccaccccactgagtgttctgtttggagtgaaggccaaaggtctctggactaaaaaaaaatgcctttaattcaagcccaagttataaaagaaagaattccagcttctgctgtcaggcctgcgaggctggccaagctggagcatccttgacctttcttttttccttcagccgtccaatgaatttgtgtccaattcgtcctccaaccctccacagacagttgcattctatgatgcctctggtgatttggaaggcggccgagctaggcacaaaaataggagcgcctgaggcgagagattcttccaaggttcttggttgtcagaaagatgaacatcaccacatggttctaaaagaagagatgaaagggattaacattgtaagcagttgtgagattagactctccaagtcactaggctccagatgaagcaggaggcatagcagagaaaatcctgtgctggtatcggtaaaattatgagcaaggttttagaggattcatcagaggaaggctaagttgaatgggcactaatgagctgatgactcaaatctaggaaggaataagatcataacaaccaaagctctgcatgaaggtgggtgctgtataattgtcacatctactagagacaggcactggtccccaagatgagactggctggccccttacccagtgaacaagttatcaaatacttaactaaaataagaactgtgaatatgcccagaaggattctttgcgcatgcacttaaatatgttactctccctatcttttattaaggcccttgtttggagaagggactgaactagatgtgcgcatgtcttaaaaatgcttacgaatcttgagcctggtataacgtaaacactcagaaaacactttattgtttacagtatagtaggactcatcccgtcgtggggagctatggcagtggccttgaaaagagtgggtattagtacacaaatgttcagaatgtcccacagtactacatagtgcccagttcatggatgagctgccactctgctgggacaggcttcatctgtttatttcaaatgtataaatgttgggtgttctcttggtcttaaaaggggttagatgtagcacagggcatttatattgtcatgaaatcagtctgagagtgttggatgggggcattaatatatgaaatcagggaaatagcttttccctcatcctcttcatctccaagaatatctttctgagatattctctattgttctgcccagtgcagttaggtcttacttagtttgccttgtaaggtcatttcagattttaatcgctctccccataggaagtttttcctgctgttctgcctgagttgccttctgcttagttttagtccattatgtctgtaaagagagggagggttttatggggcaaaaggcccaatcatcgtgggaagaatgaatcattccaagaacagtgagatgggctggaaagagaaggcagcgaaggggcaggaagttgtgggtggaatgggttactgagaacagcaccaaaacagtctgtcttctctctccattactcccactagggggtgcccagcatcccagaataatcactattgttaggaagttgaagtttgatgtgtcatctcctaatagaagggcactggtttctccctgagggttttctatatctctgccctgagttgagaagagatctctgtgtgtgtatgtgtatgtgtattgtgtgtgcatatttgtttgtgtgtatgtgcttgtgtatgtgtgggttagaatcagtaagtgcacaaatgcctcttaagcattcatttagagattctcaattcatggaaatccttagggatacac

SEQ ID NO: 36964 - DNA, 514 bp, Homo sapiens
gttactcaaacttttctgggccaggtccagaaaaccattcttccctcctagacctctgggcctgttatgggaggggctgccacaaaggtctctgaaatgccttctaggcatttttcccattgttttggctgttaacattcggctcctttttacttatgcaagtttctgcagctggcttgaattcctacatagaaaaatgggtttttcttttctaccacatggctgggctgcaaattttccaaacttttatgctctgcttccctttgaaatataaattccaccaacctctttgctaatgtgtaacaaaagtgacctttgctccatttcccagtaagttcctcatctgcatctgaaaccacctcagcctggactttattgttcatatcgctatcaacgtttcagtcacaacaattcaacaagtctctaggaagttccaaactttccctgatcttctggtcttcgtctgagccctccaaactgtttcaacctctgcccattacccagttccaaagtc

SEQ ID NO: 36965 - DNA, 890 bp, Homo sapiens
aaaagaaagcttctcaagggccccagttgctcttgcagtctccagcatgtaggtgacattctcaccaggattccttgatgaggtgagaatattttgaaaatccagaaaccagcaggtccctttggaagtgatatttcactactgccttctcatccctaaaatcaatgcttgtttctggcccagagctgggtacagatcatctttcttatttgtaaacagtatatgctctaaatcagttcatcactatatacctctgctcctaatgacagatggcagcttttccttgtttttcctgctttaggacacagacattaatctgtggactaaacattatggaaagtgcactgaccgtcctccatagcacatgtgtgaccttgtcctgtggtcctcaggaagctgggccctaggaaataactttaacattcaccagcagaggaagctgtcaatattgcactgtttgcttaacttgtaacattgatcttctgtggctctgggcataacataataaggaaaataccacaacttactacagcaagtcaatgggctgataagataaacgctgttatgtttcaaaattgtgccaagtttatgttgataaagtgactttcttctgggaatctaaaaaacagtgcctatggttctaatcctgtatgactttaactttgtcttatatttacataagacaggaaattggcccaagatgacctcattcatctttataactcttctcctgaaggaatttatagtgagggtagtgttattattttttcactacagaggtgtagagagcttaagctttcagtcaaactaacaaattcagtattggttctagaaccaagagaaaaggaataggtctgcggctacggctacattaataataacaacaaaca

SEQ ID NO: 36966 - DNA, 701 bp, Homo sapiens
gaagggctgtgattttcccaagataacctgaaaaagttttccatagaagtggaaacttccaaaaaggaatgaaaaattaactatgggcatggttattacctctcatcatcaggcagagtttacgcagtaaactattgtcattaaaagggaacaaatatcttccacatgcttcagagtttaacccactgtacaaagaccatattgctaagacacaattttacataaattctggcagaaagccattttttttccagtttaatgcagccctagatttcatggaaataaagttttgtttgggagggatagtgatagctatttatgcacagctaattcttgggccctgaaatatagctctgtacttcctgtctttctaggctgaccatgactcactgaataagaatccttcaattattttgaaaacagctggctaactgcaatttttcttctgtccttccatttctgccattcatcagtgtcactttcaggcttgaaactggcttctctactagggtctctctttccgggcagcgcttggaggtacagccacagggcatgtccttgccctgtaatggtgcagttgttcctccccacgttgaagggagagccctcattccccatctcagatgaggcctccaagaaaaatgaaccaggtcaagactgcatctgggttgtggctgtgttttattggctaatcttttggc

SEQ ID NO: 36967 - DNA, 595 bp, Homo sapiens
aattaaatgctgttagtctttaagaccaacactaattaacagcatttatttttactgtgattgcctacgtgaaagtatgcaaaagtaaatttatattctgagaatgtggttgctttggtctgaagcggtaaagggaattaactgttcctgggaactcatcattctttgcttgaaattctccagagagcagtgaaacaccagtgccaggggcagaatatagaaacaagggccgaatgctgtggccaattgagctgccagccaccagtatgatcattctcaaatccaggtctgacctactttctctcctgttgcaaaacctgagatggatctcctgcctgctgggtcaaggtgaagctcctcagcctggcatttaaaacattttgcagtctggctccctctctctccagccttatctccctgtactcaccactgcatgccaatgctccgattgtagccctgcccctcatcattctttttacatctctgtggctttttggaaatgactcccttttgttttaaggccttccacacccaccacacccgtgctacctggtgagtcttgtcatcctttaaattgaaggttggagcttgcctt

SEQ ID NO: 36968 - DNA, 1051 bp, Homo sapiens
gaaacctgtccaaacactgcattttaggaactgctaagaagcactgatgaaaatgtgagcactggaggcacaaaagaacctttgaaactaggacacactttccttagagcctacttgcactctatgggtgaggcagtttgcatgtgccaccctctcctcattccaaatcaatttttcaacttggtttagactctgggaagcagtgaaattggggctttcaaatgagcctctcagtccagatgtgtccataatagaagccagtgggcagtggggcataattaacaatctctccttcactgagaccacagaatggcattaattttgccagctaggcttgatgtgaattggctagaatgtctgagtagatttccagctgctgctcatgtagctctggcttccagcagtatttgcattccaaataaaacgaggcctgaaatagatgtgtgatacatgttcaaagctatttttaatcaatgatcacttggttagccgtgaaagattatcagcaggtcacaatccattttgaattttgctgtgtcctgcagaactgatctaaacacgcagcgacttcagcttcccttgcaatccttgtgctttgtcagctctttgggtgaggggtaggaggggagttaggtgggctgtggcagcacagatgtgccacagtgacaagtactggagctggagggccatttactcagggtaaggctgtgtttaagttggccctgcttccccagagaaaccttgtggtgcaatcataagactgaaaactctgtcccctgaatgtccctcctgaaactcaccacgttactgtcccgcaagccagagaaatgtttgtttcttgtttgctaacccctgtctagctgtagggaagctgtgggcagtgtacatttcttcatagacagtgtcttactggaagcttgaaatttctgtggggactgttgccaatatcattctctagttgtgtgtgtgtgtgtttttaaataatagccccttacatttccttaccacacttactatttccaagcaaatctataatctcatttgcaaaagg

SEQ ID NO: 36969 - DNA, 616 bp, Homo sapiens
tcgaagctaaagacaactctgaaagttgggatttgttccagcattttcccaggaggtggaattcagatgcatgggctgggactgtgggagctgagagatgctagagtggtgagcagcccgctgggcagaaccttgcctggctggtgagagattgatgttccctggttccaaatggagactgagtctgacatatttgcagagtggaagtttgagcttctcttgtttttattcattacaaagtcatttatgaatgcacactaactgtgacatgacctcgctggtatatttaaagcaaccctaggctggtggggtcaaaagtttcattgtacacacagatgcggcttgtcagcaggaatgcagattttggcagggttagaggcaatggatgtgagggctgagtcaccctgcagagcatgccagataacccctccccaacccacacaatgggttctattctagtgccattcctaactgcacgatctatactgtatctgtcttggatttgtgtgcgattgtctgcatagaggcatagttggtgacaaaagaatgatgaaaatcagaacagttacttaaagtgaaaacaccaaagtctgggttctctgagctctctcgcagg

SEQ ID NO: 36970 - DNA, 1565 bp, Homo sapiens
ctgttgtgaaaagtacgcaaataaatatagggtaaagatctaagaacatgtgcctgacacatattaaatgttcaataaatgtcagtagttattatatattgatgctttttaagattagctacattcaatactctattaaattctgtgacccaaaacacaagtggcaggtagtctaacaaaactgacataattcttcacgactccaacctttcactgcagaaactccttttgtgggcttcccacactgtaggagctgccagggtggaggggttaatttcatttaggaagctctccttttccaagagtacatcactcacagtgtcccatacaccccatcaagataccttttctattataccttcatcccctactttcaagaaaccagttttcaacattctaaaacctaaaccgatgcttaaaaccttgttcatttcacagaaatcaataacagataactatgaggcctgcaagagtatattatttttctggctgctatttactgcgtgtttaaagtgtactttgcatacgctatataatttaattctcacaacaatcctatgtagtcaaatacaatcactgtcaagaaactaacaaaaagtcaggtaactgaacttggagattatgtttgcatttaaagagcgaagggttctaactctgacaggccagattctaattacaggcactacttactactttaaagaatccaggaaataacttgcctcaacacctctcttaaaaacttgagccctgagaagtgaggaactggatttgctatacaaggaaagaaaggaatggtggcttctctcggccggagcggaagcgcctgccagtcaacctcgggggtcggcgaccgtcgcgtggaacagagaggggcgccagcgacgctttcccgcgtccacgactggggtgggcaacagggcagggacagggccgcccacctccccaggcgcgcagcgaggccaactcacctgcgtggccgccagccgcgcccgcacctctcgcattacgaacggctccaggccgcgacccgcagtgcagaagaatcgggcgccagcctcaggcccggaccctggctctccacgcgcctccgacatggcggctcaggcgcgccctcgcgccttcgggtcacgtggcctcgggcgcgagcggctcgctcctggaggcggcgcgcaggggcgtgtgatgccaaaggggagagggagagggagagggagagggggagggggagagggagggggaaggagagggtgagagagacggagagcctgggagggtcgcatcagccctctgtggcccctatgggtcttcctggttgaccatctgtcccctccttgattaggcaccagaatgggttagaatcacaggtggaagggttagaattgataattcagtccagttgccttattttgtagattgaggaaattaatgcccagagaggtcaagagacagcgagttagcagcacagctgaggctggagcctagatttctccctatctaacataatgccttttcctccattcctcccaactccgtcctcttcctgtccttcattcctctcctctact

SEQ ID NO: 36971 - DNA, 1054 bp, Homo sapiens
aaaggaaactgagttaatgtggagctggaaccgacgacacgcattctgactaagagctctcttattcagcacgactgattcctattcaagtttaggtatttctctttctacttcatttaggttaaaaggctttcctctccaggagcctggcaagccaagcccgccctctgcggggcaacagcacgaggcattacccctacagaccacttggcggcgccgtccgtcctgagttggagagaacggtgggcaagtagggctccttccgcacgctgcacggttcttctccgggcccgcccccttccagcaacagccaatcagaaactcgctgacagcgctaggctctccacggtaatggccgtggatgataattggctaagtctcttaagggacgtctggtttccggggacgcagtgataagcgcagaacgggaggtctctgaagcaagatggggctccagacataatctttacctgaataagtcccaacgctgggagtgtcagcccgatcctcctacggtggaaaaggcggcagccaattgctacagtccctttaggcttttctctcccgccaatcctcactctgccctacgggagggttcttggccgcttcagctcggtttgctgcttaccaaccccgcggcccaaggggagcacggctccctggcccgatgcccccggggtatgcagaagggcccagccgggacagcagccactgcatttctttggcttgcgctgcagtccggatggagctcggttctgacccagaacatgagatcgggttctcattaattcagcccagggccttgcacacgcgccccgcccctgcttgaagtggctcaccccggactttcaggatctcacacgaagtgcttcgctttcccctgcagggatggtactctctgagcgcccttggaactttgtaaatagctgcattgcagcacttctccattgttttatttcacgcatattggactcagggtagagaccatatcttaaacgtctttgctttgagcaagatatttaaactctctgtgcagcatttttctcaactgtaa

SEQ ID NO: 36972 - DNA, 2485 bp, Homo sapiens
ttagtagagacaagacttcaccacgttggccaggctggtctcgaactcctgagctcaagcaatctgcccgcctcagcctcccaaactgctgggattacaggcatgagtcaccgcacccagccccagagaagatccttaacacacaggcaaacacctgtacatttttattggtggtcattgttcaatccaagctccaaactgaactctaagtaacagcttcttttgaacctaatccagatatgttagaggtctttgaaaagtggtcaaatgttcacagctgaattctggttgaaagccttctacacttccaatctgtttctccttaggagaaactccagctggcccctctcttagcaagttctcattctcctttaagacctttagagaaatgtcctccagtgtggtcagaagtagctggaccctagtggtggcctctgcatagccaccctgagagtcaacctgccaggacctctctctgttcccctgccacagggctgccttccagtccctcagggagtccttctcctcctcaccgggccagttccatgtcccttatggtgtggggaattggagagggggtggacataaataacttacttttataataactaaatatgttaaaatatgttataggaaaagaaaaatgttaaggattaccctcttttggaaatgtttgttagtagctaacatttattaaatactatgttctgggcacggtactaaatgcctatttaaatactgtcaccatgtttgagatctaaaacaggcttagagaggcgaagtagctctacctgatgtgacacatctactcaatgacagcaaggatttaattccaggtctacccaattccaaagcccgatcctgttttgttttgttgttttgttttgttttgtttgagacagggtctcactctgtcacctaggctggagtgcagtgtcacgatcatggctcactgcagcatcaaagtcctgaggaattctctgacctcagcctcccaagtagctgggactacaggcatgagccaccacacccagctaatttttgtatttgttgtagagatggtgtttcaccatgttgcccaggctggtcttgaactcctgagctcaagcaatctgcctgccttggcctcccaaagtgctgagattacaggcatgagccactgtacccggctaagccactgcacccggcacctgatcgtttaatgcttaggcagcactgcagtttgaaaatgctgccaatgttctaatgccactagaacacacattctcagcaagggcgatattgccctcaagagagcaaaagctagttcttggtggccaattgaaaaaaaaaaaaaagtatttactccttctaggtataaaggacagatatacatatagtgcccaatggatttgcagtttactcgtagtatcaaatttccatgagaggagggggcaattagggaaaaaaatctaaaaaggctccttacagggacaatcatcaataatgaaaacaaggttgagcaacagtgtgttaggacattttggcaaagagcatgtttactgaaagcaagcagtgtcttacacaactcccagggttttctcagggcacagaagacagcgtcaacacctgagctttgttcactgaaagcttttagtcattatgccatgtgatgctcccaagaaccccctcatgaaatcgctaaggaagatatttactctccacttttaacagatgaggaaattgaactttagagacggtaaccactacctagatttagtaccaaataaaactaccctttaagaataaaaagtgatataaagaaatttgtaaacaaagcaaaatagtttgttataaacagatcttcagtaagagaactcaaaagtctgagatgtacgaaagaatgaaagaaagaaagcaaagtggttaacatgtgaacaaatctatatgaatgttggtatataaaacaatagttgtaatgtctactgtaggggcttccagacataagacacaactaaaacactgggcaataatggcatataagtcagtggggagtggttagagtttaagcatacttaggtcgttgaattggtcaggagaagggtaaagatattaacttgagaaattaagctaaatatacatgttaaatttccaggttaaaaaaaatagaagacatcgagaattaactgccacatcagaagaatgaaaagtggaaggaggctgggtgcggtggctcatacctgcaatcccagcactttgggaggctgaggtgggtggatcacctgaggtcaggggttcaaaaccagcctggccaacatggtgaaaccccatgtctactaaaaatataaaaattagctgggaatggtggctcacgcctataatcccagctactcaggaggctgaggcaggagaatcgcttgaaacggggaggcaaaagttgcagtgagctgagatagcaccactgcactccagcctgggtgacagagtgagactgtctcaaaaataa

SEQ ID NO: 36973 - DNA, 2085 bp, Homo sapiens
tagattgatactctaatccataagttcttttaactttttctggactggattattacaaataaagaaataccaatatattggtttgtttagattgctcttcaatcaatacaataccttaatctagaatggccacaaaacagtcgtagaagtcagttttcagattgtatatgtgtgaaccttctccttcatagtcatgcaaatgtttttgttttgttgttcaaatttccttgtattttgctggaattttacttttgtttcatatttatcatgcatcttttttatttagaataacaattttctttaaatctttagatatatttgtagaatccatttaaaagtgaaataaaacttagatcatggttttgtttttttatttttcagttaacattgtttacagcaagctgtagttcataacaagtaactgaatgatgagatttaaaattaatttcacattctgccaaagactgagatttgctctttgaggattttctatggttttgcttagctctattaatgtatttcatatcttgcttaattaaatctaattgctttgacagtgtttcattagaatttccattgtgtacctaagcgtgttgtaaggtcagatttggtgtgtgtttcatcatgttccacctttagagagatatagaaaacaatgtaaataatacttgaattgttccaaggaataccattgctatcagcacaggtaaagctgacatttccttgttaaaattcaaactacagttcaaagaatgcttctatattttcaaccagaattctggattgcatacctttttctttaacaaccttattaacatcattatcataggcttaccctcaataatcttttaaatcaatggctaaaatttaaagctgtgtctttaagacaaaagctgcatttttcgaaagtgtaaaaccaataaaatacttattaatttcaagttccttgtttgcctctccagatagtttaacaatgagtatcataaatgtgagtcattcaggctgggcatagtggctcatgcctataatcccagcactttgggaccctgaggcaggaggatcacttgaggccaggagttggagaccagcctggacaacatgatgtaaccccgtctttactaaactacaaaaagattagctgggcatggtggcacacgcctgtaatcccacctactcgggaggctgaggcaggagaatttcttgaacctgggaggtggaggctgcagtgagctgagatcgtgccactgcactccagcctgagcgacgtggcaagactgtcttacacacacacaaaaaagtgagtcacccaacttgacttttgaccgctgctagctagttgaactgaataatatttgcttttttaaatgttaaatattgttatcattttattatcctttaatttaataatctcttttaattctcaatcctcaatagagatcatttgtgtgtgtttttaatctctttcatgtttgatcaccctagcagcaaatttttaagtcattcatacaaaacccagaaaacttcattgttttccataaagaatgtattattaaggctataaaagcatcattttgtttggctaaataacatgtttcttttaggaatattatggcagatgttctttattggtgtttacttgtctttgctgactactactcattgtctgctgtttattaacctttttttctcaaacaattgattgtgtgctttttgtgtgtgcacagggatttcctcttctggccataatacattatttaaccaaagctaatcttcaagattggtgataattggtatagaattcacaaaatattttgtattgaacttagcatataaaagccagtttctatgacatctttcccagttagaagagttttgatgtaaaatggaatactggatgtcctaccatgttcatccaataattgtaaccattcacttggatgggactgtgttttgaggacacagtctcctgctataagaaggccattttggttgggtgtagtggcttacacccgtaatcccagcactttgggaggctgaggcaggaggatcacctgaggctaggagttcgagaccagtctggccaac

SEQ ID NO: 36974 - DNA, 1631 bp, Homo sapiens
agcatatagcagagctgaaaatgcataatcaactgcgtgactctggaacacaagctcttagaactggatcctgctgcttctcctctgtgctctactatgcaagttcatgatccatttacttattgctacaaaataaaccatccacaacttattggctgaaaacaacaacttttattttgctcatgaatcagcaatttaggcagggcttgttgagaacagctcatccctgctccacttggtatcagctgggacaacttcaaggatgatctgacaattgatgctggctgttagctgggaccttaggtggggctgctggtccaaaatttcatgtggactctctatgtagcctgagctttctcctaacataacaactggtttcaaaggcaagcatcccgggagacagagccaggcagaagcttctctaaacagccgtagcagacacacagcatcactttcgccacattctcttcctttgaagcaagtcactgaggctggtccatgttcaaggggagaggaattcaatgccacctctcagtgggaggaacatcaaggaatttgcagacatgtttcaaaaccattacaatgcatgtgccattgacatgcctgaacatattttatgtcaagtgtttatttaccaccagcacagtatcatcgaaaggacatcagactggaagtccaaagtcctgaacaagagcctgtcagctgtgtggggctgggatttcaacacccatctatgaaaaaaccagtacctgcttgtccactcagttcagccaccctctatatggaaatgaggtcacttaaccccattccagtctctaaaaccaatactaatcccagtcagcaggttagttagaatgctgctcctggggcactttatttgactctcagttatgatagcctgggttctccctgtctctgtgcctgagcctgtcttagaaacgtagcagtctatgtgtggagcacatcctcaggactaggcactgtcactggtgctttatgtttgctatctcattcagctatttcaaccctatgaaggaggtttctttatgcccattttacaaatgaagaaactgaaattcagggcaggtaagtcatttgcccaaaagttagtaaagggcagagccagaactatgagttgtgctgtggccagctctgtctcctccaggatctgctgtcctgcccctggactgcctgccaggacatctgatggcttctgggttgtctgtacctctgctcctcttgccttttagggcctcaccatacttcttgttgaaccttatccctgtctccttcatgaacgactcactggacttctaccatcctgcattcatcctcctgatctaactccatatcccagccctctgcatctgccccagcctatcgtgcccaactgcacagtgtcctggcatggctagagagcaagatcaagcaagagagcatcaccagtgaaaaaacaaaagctctggagtcagaccgatctagatccaaatggtggagtgagctccaccgtttattatttgtgtataaaaataatgacacccatgttgcctcgttgtgaggattctcggtgagttaatacaagtatagggcttggcatagtgcctggcacctagcaaatgcttagtaaatat

SEQ ID NO: 36975 - DNA, 536 bp, Homo sapiens
tcccaccttgtggagcgttcctgttcgtggattaaaactagcatagtaaaaacaaaggggagggaaagggggagggagaaaaggagcggaagtgggggagggattaattatattctttgaggtcctaggtccagcttcacctaaccaggatgtttctggttttactaaagctggtcagggttggttttccaagaaatgattgactaacacagttggagtcaaagttaaacttgcaataaaaggcagacaactttatctgcaggcaacagtccaggggttccctgcagttgaaagagataactgctcaccaaaatatatgctcccacctcctaactaggaaagagaagcccagctaagaattacattaccagcccccgacgctcccttgcaactatatgtggcctgtgactgtcgctcaccagtggaatgtgagcagaagttctatgagtcatttccagaccaagactttaaaagtggccctgccttctccatactctctttaccttctgcctgcatggggaggatgatgagaggtc

SEQ ID NO: 36976 - DNA, 1358 bp, Homo sapiens
ttctcagtcttgggtgcaacactaacacgccctccagtcctatcccccatgctcccaacccttgggtaaggcactgctcccacactcaatggggagccaaggaacagttacactcccttggctcctccactgtctgtcacaacaaacacattcctcagggccaccttccttggtggcagctgttttaccctactatctgcagaaagactctcaggtccctactgtgatcctgtgtgccagcccagcacaacaagtattgtggagacaaggggagagagagagaaatgggagacagaggagagagagtggggatggcagcactggtgaggattgcagctcctcatccatccattgatactggattttgtgtcaaaggcaaacattttcctttgacctcagtgttcctgtctgcaacgctgagctgcaatctggcatcaagcaccctgggaaaagggctgattgccacagagagttgagaattcaagaactggactctggttaggaccgggtcagacacaacatggagaaagaggattatatcttggtagggaggtagcatttttgtttggtttttcttgcttttcttatgaaacaggaagtgccaagcaatgcccccaggttttggggtttccaagtgaagaattttacccctgataaccacagtaacccctgaaagaagtggaggctttcctttcatatttcggggggctgggaggggcaaggagtaggaatcagacacaaagaaaactgaagtatgggtgatccaattccccttcccccaagtagccttgctttttagctccatgggttagaagtttatgggaattctggatccatggtttcctatggtctcttttacagatcttgttaatttattacccttggttacacttttaatggaaatcatgaagaaatggcaaaggaaacatgagctaattttttttccagtgacacatttcactgctatttaaatagctgttttgccaaaccaaacacagcgcttacagccagcggtgacacatgaaggagatcactgtggccgatcctgcctgcggcatccagaacaggcgagactttctctcagcttccccaagggccggacgccaaggggggcgggtaggagagctggagcctggggcacagctggagccccagagctgggtgcgtgcagcttccacccaccctgggcacggctgcttctctgttgcctcctgtccactccttacccctgaggagccctggggtaactgttttctcccagcagcctgggggaccccccagagtgggccacagcaagagcaccagcagggcctcctggccctcactgcaggatgatctgctcaggcctttagtgggga

SEQ ID NO: 36977 - DNA, 2168 bp, Homo sapiens
tagcatgcacatggtttcttatacgcggctgaccccgtcagaccccaggcatcttgaggggtagggagcgacccccagctgcatttggggctttagaggcaaggaaaatcagaaacactttggtaaaaggagttgaacagggcatcctcggcgagctcacgagcattcctctatgcctagagctcctgtcccacgcgcgctcgcaggtgctggcccggctgtgcccgcttccccctcaccatcgccccaatccggaatccggggctgagcgaggagccgccacccccggccccacccgcgagagacggggtccacgcgccttccctgcgcccaaaccgccccgaggcccccagtcccaggagggagcgctgagatcactcggatctccgcaccccggacttagctgctcgtcccctccggagcccgctacccgccggcctcgcccctttatctttcccccactccgcccggccggctccgttatccacctcccaatcccgttatccggccgccccggccccgttatccgccctcgcgttgggcgcggagcccccgcgcgcctcctggccgccgccgccccctcccccgctcccagacggagctcgggggaccgcgggctgggcgggaccgcgggctgggcaggaccggagccgcctccgcgccgcttcccaggcccggacggccgcgggaggaggtcccgctgtcagtcagcggggaaggccgggccgggcggccggagggggcggcgccgaggacgggctcgggccgggagctgggaggtggaggcggaggggcgggggagggggcgggggagggggcgggggcgggggcggggggcggctctgggccttataagcggcgggggcagggcggcagggaggcaagtgtcaggccgatgtgtcgcccgcgaggggccggggtcggggccgccggggccatgcgcgcgggctgggcagggggccggcggggcgcagagcggagccgcctcggagcctgagccgcccggggccggggccggggagccgcgcggggccggccggccggggggaggggagcgatgcggcgccggcgggcggcagtggccgcgggtttctgcgcctccttcctgctgggctccgtcctcaacgtgctcttcgctccgggctcggagcctccgaggccaggccagtcccctgagccttcgccggccccgggtccgggccgtcgcgggggccgcggggagctggcccggcagatccgggcgcgctacgaggaggtgcagcgctattcccgcgggggccccgggcccggggcgggccggccggagcggcggcgcctgatggacctggctccgggcgggcccggcctgccgcgcccccggcccccttgggcccggcccctgtccgacggcgccccaggctggcccccggctcccggcccaggctcccccggcccgggcccgcgcctgggctgcgccgcgcttcgcaacgtgtccggcgcgcagtacatgggctcaggctacaccaaggccgtgtaccgggtccgcctgcccggcggtgccgcggtggcgctcaaggcggtggactttagcggccacgatctgggcagctgcgtgcgcgagttcggggtacggaggggctgctatcggctggcggcccacaagctgcttaaggagatggtgctgctggagcggctgcggcaccccaacgtgctgcaggtacgagggtggggacgcgggggtaacggtgttggctgggagtgcccaagaccttgtcaacctggctggaagagaaccccttgatctggagtgccagtgactgcacccaggctaagctagacgcagaaaccggaccatggcccttcccactgcaccaccctgcttctcactcctgggtgggcgtccctttaccggagaactcctgggtttctcggcttccacacatctcttaaagacaggccaggacagaggctcccaaaactcagggggtggggcagtccattaggatttaggactctactccgggctggagttaggaggttgaacaccagggatattaccccaagccaaaatgaccctaagccaagacacttgagtcagaattccaactgtgtgataaagtcccccttcttgatggaacttctcccaacttccagtgatttgtctggttttgaaaatgagacgggacagc

SEQ ID NO: 36978 - DNA, 1459 bp, Homo sapiens
tctgatgagatgtgagctctggaaattgttcaccttatggcttcccggtagctgtgttgctaaaagctgttcacctggcttagcggagtcttatcccacacacgcacagcttactgttttgccaaaattcaaggaaaccccatgcagattgctggagctccttctctgcatacctcccttctctccagtactctgtccacaaattccagctgcctcagcctagcggacttccaatctcaacacatcaactaaatgaggactcccaactctgttaggttcccctctcctgtgcttgctctgaaaagtgcctccaggcagaaagcctgagtgatcaaagggttctccacgcgtctctcccatttctgcatatcttacaagccaaggcactaaccacctctgttcctatcttttcaagaatgtttgtacagtaaacagctgtgaaagatagagattatgtctccctgtggaggaaagggtaggtttgtgtattgtccactgctagaaagatattgtcttcccccaggacaaagttcaagtaggcaaagtgcccattttgaatgctcgtggttccctaagctcagggttcctcttctgtaatgcagccctctacatgggcacatgctactcagacttcttcattactcacagaaacagcagtggccaaagtacaaacatttgccctggttctttgagtctcaggaagttgcacaggaaccagggcaaatgtttgtactccggccgctgctgatgctgtgaataataaagccctttgtctctgacctagaagtcttttgtcttctgccagcatccgtgaaatggtagcaagctaacttgttaacttacaaatacagtaaatttcagactccttcacaattcttgacatacctactatgtgtgaggctctgattgtaagaggggtaccctacaaaacatagattataaactgctcttctgcagacaacaatctagtatgagataaagattttaaaagacaaacatatcatttttaagtggcagcaagtatcaagaaagaaattaggaaattgcaacagagaatgacatgggggacaattttagattaagtagttagaggaggcttctctggacaggagacacttaaactgagtcttagagataagaacaagcagacctatggcaagcaaaggcaagagcctcccaggcagaaggaatcacatctacaaaggttcagaagcagcaaagagtttggcacattttgaggaattaagaaatcaatatgattaaagcatagtgaccatgtgggtgctaggtaagcatggagttaataggcaaggtctaaatcagggacctcaatcctggctgtactttagaatctaccaaggaatatatcaaaaatatcagtgccccaggtccatccgagagcaattaaatcagaatgtttaggtgtgaaactcaacctctgataatctttgaaatagtc

SEQ ID NO: 36979 - DNA, 2527 bp, Homo sapiens
cttcgctgggccccacgcgtgtcgtgcgccaccccagaaggcagggcctgattcggatcagcaggggctgcagggccgctctgcaggtgggtgactcaggcccctcttgaacccttaggcctgaggcagagactgggcaggaggctgggcgtggccggggagccccttcacgtgctccccttctcgagggttcacggggctctggaggcccagatgctggcaaagtggcgggagcgctccagggacgaggactcaggtcggggcgcccccgccagcgccaggatccccgctcaccctccgccgcgccccgcccccgccccgacacactgggggagccccgccctccccgaggcccgcgcggcgccgcaggaggaatcccagccatttcctccacgctgcgcggtatgtggcctgcccgccgccaaccgcagcgcgagccggtccccagccgcgcctggcagctgccccggctccgccgtgctgctcgggattccgggaaggccgccccctcgtcccgggccaccagaccggcctttccagcggctccaggcccgtgcagtcccgccggacgccggctacaccacgcgccgctgctggaacctctcccagccccgcgtggccgcccccggcccaggcaccccctccccggaacgcccccgacggcccctcgcgtccgagctggaaactgaagttgacgcttgctccgtcaccctggggcaaattgctttgcctaagcctcagtttctccatctgtgaaatggggacgttggcaggagtgcctgtctcgttgtgctgcccgaggggtgaatgagaaaaggaaagcgttggactactgtcaacgcgattttcatttccctaggtaccacgagggtcctggcttttcgcacaggatcttagcacccaccctgcccctcgcctctcctccagcccagttgccggtggagcaagcaggccgggctttgcgagtgggcagaggagagggctggggcctgcccaagactgcgccctgcacagattaaacaatgcctgaaggtcccacgacacagccttcctcgagattcaccgttgccctctcctcaatcactaggttcttgaaagacccaaaggacagttatttacattttttttaaatgatgtcatcgcagtctgagagcagccagacacgtagtgatcagggaaagtcgaaagtgcagatgggttcgcaaacgtggactctctagttttgggtctgcagatggggccggccaccacgtgctctctgagttctctttccaagtacagatccctccggagacggaacattgttccgcctttaattcttcccaggagctgcggaggaaggcgtgagaaccggagcccggggtgacttgcgggggaggggatcgcttccccgtcgcccacacctgcctaacccacgcccacggcggccgcaaaggcgacaccgcgtgaatctggaaagccccgagtttcaacaggcccaaccatcggcggctttgcaggcgcagcaccaagtgctgctctgcctgtgttcccccagacagcccctggttgtgatttgtcgtttccagtccagctagagtcccaaggccaagaactagacccttgcagcgagatccgcgcccccccccaccccaccccgcctcattctccacaggcgccacagccacaggccgcataaataaatccaggtggaggcagacccagaaacccaggtgctataaatatcccagcccagccgggagactgacctcccaggcagcccctcgcccccacccgccctagaccagcacttccggccaccacagcgctgagggcggatctccccgcggtgggaggagcgggctccaccaggatgcaggcctggcttccctttctttcttctcctgggagcctctggcggcccaacctgagggcttgccctcttctctggaaccacctccctaactctcaatcgcatacctctccctccctccccctggtatttttagagaggccttctctcagggaccccatactgcgaccagacttcaagaaatgctgacttctctttctagatgaataagcatagttggaaggcaacaacctcaatcagagtttacaatctaaaatttgattctaaactttttctttttgaaacagtcttgctctgtcacccaggctggagtgcagtggcgtgatcatggctcactgcagctttgacctcccaggttcaagcgatcctcccatctcagcctccctagtagttgggactacaggcgctgtgccaccatgcccgcctggctaattttgtgtttgtttgtttgtttgtttttgtttttgtttttttttttgagacggggtttcactatgttgcccaggctggtctcgaactcctgggctcaagcgatctgcccacctcagcctccaaacatgctgggattacaggtttgagccactctgtccagcccttgattctacatttttaatagcattttttatgtgattaaaacacaggctggaggcagagtagacctaaaagaggggaaag

SEQ ID NO: 36980 - DNA, 1021 bp, Homo sapiens
taatgttagcaacataattttgtaatgaaaattaactgatggggctgaaatgtgcatcagcagatccaaatatccttgataaactggccaaaagaaagatgaattggcagagaggcaagtgttcatctcagttctccagatatccctgcaaatgtggcctctggagtagaagatttagggagaaaaataagccatgaagctcttctggcaccaacatgaacttcagggatcatgggacatttgggccagtaacattcctctttgttcctagagatttaatatctacctaccaactaaatggccttgatttggaggagagaagacaagaagaggaattgctttcagctggtccttgcctttaactaaccaggggtacaaaaattttaaaatacaaaggagaccatgtgtaaaacattagttaagctcagatataaatctagtctttgaccagtccagagctaatcaatatgcttttctactctctttgaacttttgagttttctggcaacaacaaaaatcccaaacctcatccaaaaccgtagtccagacagcccagtttctgcactcccttccttgtgtcacatattgttgacagaactactcccgttaccacattcattccagtggtgattcaaattcttctgcagaaatggacttgaaagacagaaaactgctcctgtaatcacttaataaggaatcttggatgaggaatacagagctatgaatatggatttactcttagcctttatggatgcctttttctcagttattttcactgaaaatcatgatgaactgatttaaatatcaaggtaaactgagatggaaaattaccgataataagagttttctgaaaatatagattggcctctttaaagcacatcgagtttgttttgtttaaattacaaattcacatatatttgaaatgtgtttaaatgtgtcagttttaggcaaaactaaactatttgattcctttccaaaaatcaggaatttgctttggaaaaaaaccatgcagtttgattta

SEQ ID NO: 36981 - DNA, 834 bp, Homo sapiens
aattatttccagaaaaaggtaagaaaaatccaaccaacactttttaaacatcctgagctattcacagcaagtgaatctttacccttaccagatgtataaacatttacataaggcaggaggttcaacacttggagagtgtaatcaaggcagtagtaacgcagtgctcctctctttgacttgaatgacttcctccccattagggtcattattgttttgcagtgtcccagggatgaaaggactttgaaaggtcatgtgtcttgtgacccaactagcagcatcagcatcactggggagaaactcaagcagaagcttgagtctactccactcttgctgacaccaaatctgcatttttacaggattcttgggtgagtcacacacatattcaaggttaaaatatgccaccctaggtctttctcctgcttctgagcaaaactgggcacaagggacaaactagtttccttcagccactttcaaatcctttatagagtgtactgtgtgagtcactgagaggaaagaggaaataatacttatttagggaagtcttgcataacttaacaaagttagtaacttcttcaatacactcaagtacctatttttggaagccctacaggttaggtcaaagtaaagagaagcaaaaaatggagtgagttctagtaaaaaactctgacaaaataagggaagtgtagaagctgagtctatgagggatgagagaagcaatttaccaaattatcagatccaaaatcatctctgcactgtagatgatttatagccctggaagcttagaggcttgagtctcttgctgtatttcatttcaaattagtaatttttatctag

SEQ ID NO: 36982 - DNA, 1706 bp, Homo sapiens
taccacgcacagaagcaaaacttggcagtatctgaaacagaggattttgatcctgttcctaccattgcttccagagaaggaagcaaaacaaaccactgagttctatctactccggctcctgagcaccaagaccctgcttggaagagaatctcaccttgccgtctgctcaggaaaatcagcccctctagaggaagcaccaaaagacctaagtgcagggctggagtttcctaccccttcttatttcctgtggagttctgtttcttgaggaaactttccccaaataatctagctgccactctgacaccattttcattgagtaattcatggtgatgtcacgccaactaggcactaggggaagccctgcttttatgggttggctcttcatttaggaatttttatttttctgacttccatccctttttcactggactccactttttttgaggcaagatgcctgagtggtgaagtgttgcttgcttttgagaaaaggaattccttctggttgagaggcaaatggttgagtgaaggcaagatgcatgtcctgtaatagtacatcttaattggagagctggcaagagaggaaggaggtgtgggcctgctgcgggctctgttattcctaatagggttcattgagctaagcacggaagatgggctgggggcactaggactaacagccaccccctgaagacacaatcacgcatgcctggggagctgaccacctccttttgacacctggacagccacatctaacccacatccccacgttcccgccttgcctctcagctgctctgtgcagcaagacagcaaaggcaagtttggcaaagctcgcctgtaaaagcctaatccaaacagcatgtccgctgagctcagcggggtgactcatgtgcagtgatgtgtgaggccagcgagcagagattaggatctggcccgcccgccagcctaccttgcacttcctttgatcaactctgatggtttttaattctgcagaagcagcttcctgccagcagcaagcagctctcagtggcggctggagctgcgtctgtgctgacctacttgtcagtggggagggaggcatgtgctaatggcactgggacatcccgggctcacaggctacacggagcgagagggcagcctcttttgctgaggtgcccatggtgacatcagaagcttgctcctcagccaacaccagcaaggccatgcgtgtgagcagcctgggctctgaacgtgctgctggtattggttagaatcacggggtaatcaagaaaaatgggactctccctgggggactctttttgggaaactggggcatctctaaggacgccatctggcacaaaatgaagcactctctgggttcttcagaagtactcttttacatctgttttgcttgaaatggaacacattcggagtatattacttttttgaaccgctccttccctgcttggttggaatgcgtttgcctcttgattcttccaaatcccctcgattaccactgccaagcagagcacctgaaatctggtctcctgctttctcattccctctcttccacgtctctcctttctctctcttttctcaggaaggatagcagtgattctaatcttggctgcatgttagcaccaccctgggaaggggctgtggttaaaaaaaattccccagtcccaggctctgccccagattaattcagagtcctgagggtaggaccaggcatt

SEQ ID NO: 36983 - DNA, 1511 bp, Homo sapiens
atctgtgtaaaagctgctttcctccctggtggatgcttgaaccccagcaagtggtggcggacgggacccagagctgccataccaagatggaaaaaaaaatttttaaggaaaagttaatttcaagaattatgttctcagttttgttgtagggctagttgccaattccttttcccactggcagcaggcagggctgactgagccagcacacagaggcttctcaatgagctttgatgtcaacaaaggtaggcagggcaggccccggtggaaaattgtgaagtcagcagagttatctccggcactcctcccttccccttgcttcccctttctccgcccatttccccctctctcggcttccagcttctcatttcccaggggaccctgtaatgtacgaaaacccgatgtcataagatacgaggggccggcttgtggctccagctatcaaagtctgctttttcttcccaagtctaaaacaaacaaaggcatgcattccatacatttcctaagaaaagagagggcacacagaaacgttgtccttcgtgttctctcagttaaaccccaagagtttggagcctcaagtttaaagctgtcctcttgcctcctggggttttaagaagattcaaaagtgcctcaaaccaatacagctgcttggtttatggctcaaatttaaaccacaaattataaaatgataaattgctgctcaagtctcttccaggaaagactatattttcagattaagttacaacctcatggacgtatgagtgagtctagctgctgactaactctcacactcattttcccgctggagatttttttttttcttcatgaacattcactgtttctaaatgctttaaacaaagaaaatgaccgaaggcaggaaaaacatcagggacttcttaacccatggagctttgtgctttattatgtaatggctatttttattttatgagaatcaaaggaagtttaagaaatatctttgttcttgagcacttacagtaagaaagggcttcatgggggcggctacacgcacttcaaacactagctggcatgtgaagtgtgtagtaagtcaaagctgttttagggaatttggatgttaaaggatctgttcagtgatttgggcaggattgcaacatcaattactgcattttgttcccataaaaataaattctttggaattctcttatagggtctggtccagcaacagagaagtatgacaggtaattagggtgcatgcatgctttgttgtaatgagttccctgccagagctttggcaggcaggaggttaggaggagagatgaaatatggacttgtttgaggcagccatcttgcctcgctgcaggctccgtcacacagacctcattttgatcacctgtggctgcaggaggcagctccatagtccatcctgcagagtaccttggttatacaactatgacctggtttctccaacgccactccagccttgaggaccatgaggctgtgagtcataatcaccgtagcatttactcctaaattca

SEQ ID NO: 36984 - DNA, 1043 bp, Homo sapiens
atccctatataacagatggggaaattgaggcactgggtagttaagtaacctgcccaggatagcatggccaggaagctggggactgggattccaacccaggcagtctggctcctgagtccatgctcttcaccaccacactcagaacctctcttctgtgttctaaaatctgtggcctgcacttcattagaaccccaagcctcatctcatcacagtttgcacctatactgtggatgggaattcaccgtctttggaatacacttaggaatatacaagtaatgtaagggataacatgattgctaaaccaacctgattctttgaactaccagaagcgagcctgtctaaggactgctcctgacaacagccagccagcattgagaaagctcttcagcgatgataccagcacgttcctccagaggccccgggtctggtctctcaactgtgcttctgtgccacgctggcccactgagcaaactcacaatgcagggcagcagacagccttaaaataaacaaacatgtttttgttgtgcctggttagggaacagtatctatccaattaggtagtagaaaactcatgtaaataatctgtccttttttttcaattcctgctatgtgggagtctttcacaactgacttggccaactcaaattcctaaaatgctaaggttcagaaagtctggtcaaaatttgctagtaaaatatgaaactctgtcttctctgtcctctatcccccacccctaccctcaagctactttagctttcaaacatgtatgaaatgcttttttctttaaagatatgggtgagctatttcttttggagtatgtccagatgatctggcaaatgcacacttggcattagccacagggaagcacattaaaaaaaaaaaaccagaggagcaacaaataaaattagggcagactatgggcctacccttcatacaaatcagaacatctttccaagtggaaaacttcatgaaactcggtgggtttaatttttttttcttttgctttgttaatggaaaaatatacattcacagacacatgtaat

SEQ ID NO: 36985 - DNA, 1786 bp, Homo sapiens
cctcttggttgcttctttagtgtccttgtaggacccacgtggtggtcatctcccgtcacgggggtccagtcttggctctgcgggcttcccaggggccacatagggagaggatccttcatgcatcagagtatcgcaggccagagtctatgccttatccccacctgtttggaaccagcttccaaaccgtggtccccagccttcagcaggcctaccgcgcaggcgcaaccaccagcctggcgcgaggcggacaaacgccgaggccgaggcaaggtgagagggcggggctggcaagaccccgcctccgtggcgtcacgtgggaggcggagtcggaagtgtgacggcgtgcgcggggcggggctactgctgcgcgcgggcgcgggggcggggcggggcgcggcgcggcgcggcgctcgcggctgctgcctgggagggaggccgggcaggcggctgagcggcgcggctctcaacgtgacggggaagtggttcgggcggccgcggcttactaccccagggcgaacggacggacgacggaggcgggagccggtagccgagccgggcgacctagagaacgagcgggtcaggctcagcgtcggccactctgtcggtccgctgaatgaagtgcccgcccctctaagcccggagcccggcgctttccccgcaagatggacggtttcgccggcagtctcggtgagtacggctggggagtcctgcgtcttctgcgaagggtaggaacttttttccttccgcacacagcccaggccctgccctcccgcctgcccctcggggtggcagcggctccactgcacatgttcccttcgaggctgccgcccctccgcggactccggtggactgagggcccctcccccatgtccaactctcctctgtgtcagaccctcctttcctcccggagcccctttcagtgcggggccctcgttcccccaaagtgggaaccccttccttctcaggccccccgatagctggcacacccctccccgtacactcacggctccctccacttaccccccttcagagttgggacatttcttcaaatccaggctcctcttcagggtacaaccttccaccacctttccacatacacgcctctctttcagggtggggatcgccttcacccgaacagaggctcctttttaggggagggaccctcattccctcttcaggaagggggcatcccccgcccccaagtcttcactttagatttgaaggcgactttccagtatccttcagagtagtaggcaacttccttttcaatccctccacttctctgagcattttgcagtggtggagagacctagaagcatcggagcatcatttgcttaatgcaggaaaggaagaggtgcatctgtgttgggggaccctctttaagagtgaaagcagaagtgttttctggttctgcatacatgctggggagaagtgattctgcccaatgaatcaataggaaagggggcctctatcagggaaggaaaggattctccatttttggaagatgttgtctttgtggaatggagaaagggaagaggttattaaataggctgaagtgccttttcagtgttcctttcaccagatgaaggtaatcttctggctaggaaaatcaaaactccaggctagtattcgctgccctagaagctgaatctggaattactattcttcgaggccattgaaatctagtaaaagattaagttcaactgttagaatggtgagagaaacagtttcagctttggctgataacgcagttgtgtgatacctactgctggaactgtattttgag

SEQ ID NO: 36986 - DNA, 1098 bp, Homo sapiens
agtttacaaagtgcctttatgttcattattttttttaattcttagaataaccatgggaagtgtgtgtcatgcttaatataaagtaaaatatgtattatgtacataattgagggtaagttatacattatcattagaactctgtctcttccatttctctctatatgttggctttattctctgaaatgatcttcccccagcagcagtggtcatggctaccggtagctctggaacaacatcctcaaagtttccctccctcaacactagtttgagaaattctaaggcaggactttggtcctgttacatcaaaatttcatccccctgttaatcattatgtgttgaaagggcagggtcatgtaggaagataagagttctcatttagaaccaatgtttagaaaaataggagggagagtggatagtttctcaaatgaaggatagggtagtgcagacatggccacctgggggaattatgaattagccaccccaaattgtgtctgttgacattgtttaatattgatttaaaattatttaattttatgctcttttcatttacctatttgtattatgctcagttctctttgccgttgccactttatgttttatcaccacctcaaactgaattttaaaaatccctagttttgccgggcgtggtggctcacgcctataatcccaacactttgggaggctgaggcgggcggatcacctgaggtcaataagaaacctggccgggcacggtggctcacacctgtaatcccagctctttgggaggctgaggtaggtcatttgaggtcaggagtttgagaccagccaggccaacacggtgaaactccatccctactaaaaatacaaaattaaccaggcatggtggcacatgcctgtaattccagctactcgggaggctgaggcaggagaaacatttgaacctgggaggcgaggttgcagtgatccgagatcaggccattgcaataagagggaaactgtctcaaaaaaaaaaaaaatccctagttttgaatgtaatttccccaagagtctgggtcttatacctcagtgaaagttactcttttctttgctggtttttttttgttgtttttttgttttttt

SEQ ID NO: 36987 - DNA, 723 bp, Homo sapiens
aagcaaaaataaattgattttagtaaacattagaaataatttttcagagttttgtatagagtgggaaatgtagatctgacactgtgaaatccgtttgttaggttttgtgggtaaataatgctaagtataaaaatacaagacatagaaaaatttaaaatgtacgtttgcatatgcttgtgccaatatatagaccattccataaacccaatcattggcttacatttctgagataccagcattaaacatgagttatcttttaagaggctgaatttgaattatattactctgttaggatttgtgccagcttttggttaatcattatcttgttgattatatttggttcaagatgactcatttttcaaggagctttattgcaacactacatatttactacaggaagcctggatggaaatggagcatcaggttattggagatttttttctccaatctttattgtaccaagtgttattaaagttaattatttttcaataactgaattccctgtggaacctagtgcttcattaaccaactgtaggaggatcatttactcctttttcatggcagacaaatatatctttgatgattgtttaaatattggtcatacttctatactatacattgaccagacttagatatagtattttattctcatcaaattgagtatggtcattaactgagaattttggaatcagagagatttgagattgaaccttgtttgtaaaa

SEQ ID NO: 36988 - DNA, 2285 bp, Homo sapiens
atccttcagctcaaagaacaggtcctgactcagagtgatgggtggggggacacaaagttataaaaccaactttccaaatgacaatttgctcaagagtacttagttccagaggaggcaagggaacagctaccaagtataaacaaaggctgctctgtgtaactcaactttaattagaatgacaactaattgaaagtaatttaatgctagttcatgaaagattaatggaattcatgttttggagatgctgaatgcaacacagatttggcctgaaacacaaatctaacctttattcactttaattattcagtcagaatcatttcctgggagcaagtctagtctctggacggctctaatcaaacaccactgaactttgaagacatcaactcattcagctgcaactcaattttcaaattaatctgccacataacatggaggctttgtggcctaagcagggggcaggtgggaggggaagatggggttaaagccctcccaggtatgaactgattctagagcatctgaccttccccaccctctctagtggcgaggcacttccggaactggtgccaggtcttcctatgagaggctgagctgagcaaccacgctgcctccatgcttgagctcagggctccacactcacaactgaagcctaagcctggtacagctggaaccctgaagggggccctggaccagcagagcctgcctcttccaccctagcctagctgcccttccctgctctctccctctccctaggagagctgagacgagggacttgagctctctgcttggcaagatgccctcagaaaccaccccaatttctgcacccacttattccttggcccttcaggcaggcaccaggtacggcccacacagactcagcctctccttccctgccttggaaaacccaggtccctaactccatctgctttactttacagcccttccaaggcttcttcctaaaaccttctctgccaaaggggaggcaacgccaccatttctcacagcctggggcagcttggaatgtgatatttggagtcagcaaagattccaatctggctaatacacattaggcagtgtagagacctgtgctttggccctgaggcacagccatgtgaccatgactaatctatgtcatagacgaggtcagaacaagagaaggcaggatgtcccaggagggctgtgtcagaactcaaggaaaaaaatatgacctaaagaatgctcttcctggccattcagcgccccccgtttcgggttttgcagcagacttcccctgggaagtcagctccagcagtcttgggaccctgggcaagcagcatctgggccccccacctgcccatcccaacacatcctgcagcagtgccgcacccgggcaccgtggagccacagaggtcaggaggcctgattccagcttatgcaagtgacagtggctgatggcagaggagactgcaagtgatcgtcccactcccctcctacctcaggaggtgctgagccaccctcactgctctcgttcacgtcatgagagcaagagtcagctgctgccgccctccaggctaccaggcctgacctgctaccaccaaggcatgacatgggttcccagaacagcagccacagccagatttccctccaccacacccacccgggcagcctcctctaaagtcaccaaaccccgccagtcacagagagctcccagatcagaacaggtgaaggataactgcagaattcctcaataacaaggccgtttgctagccatgtggtctatcaaccctaagaggtggagagacaccctgaaaatgaccctaagcatggttcatctctgaggctccagcacctaatagtgtgtgcttctgcgcactaattaaatgtctagaataacagagaattaatgcaactccttgaagactgtgggttagggagtccctgaggagccaaagataccggccaatgatcccgacaagaggagctctagggacagggccccatttctcagccaacccgacatgggcagtctgtggtactaaatagtgacccagcctaggaggtgtggaggcaaaacgtcaaatatatgtattaaatcactgggaccaggcagtatcagaatttctcagcaaccaatttttatagccccaggtataacctctagctattgaagatgaatgggacagaaagtgagaggtttaccaagcttttgaccatgaggaaaatcagaaggaagacgtggggatgaacagacctcaatgtcagacaagccaggggagcctgcccaaagccacacacatgaagagaagaaa

SEQ ID NO: 36989 - DNA, 2914 bp, Homo sapiens
ttctcacataatctgtaaaagaagtgcaacactgctgactattccttccttacaagtcattaccaattcggtttcagtgagaccacactggtttcccttctcatccggactattctttaaacacattctccttctccacccttccctcatgtttctatactctaactataatccaacctttcttccctacaaattaccacctatgggctgaagacacccaagtttattaaactccatattcaaaaatctagctgctaccaagcatgacatatcacaaactcaacatttataaaccctaaactcttccttcccgttcccaccgcaactcccccactaacccccgaaaaaaaaaaaaaaaacttgcccttcttatctgagattagaatcatctgtttttgtttttagagacagggtctcactatgttgccccaggctgatctcaaactcctgggctcaagcgaccctcggcctcggccttccaaagtgctgtgatttacaggcgtgagccacggtaccagacctgaaatctttcttaaacatctgcctcttgggcaagctgcagtgtcccacagaaaaaggaaatgaagcaacagtaatggagtatcctttacacctcatctgggcccctcactactgcagtctaactgcgtatctcaccgacacttcccacacttctctagaggattaggagggaatatactatctcagacagcttctggtgaacagttaacacttatccagaaccaaccacctgcccaaactgctagtcacttgacacacttcatttaatgtgtactaacgccgccctggatgaaactgagctcacaataaattaaataacttggccaaggtcacacaattaaagcggaaaacgccatgatttgaaaaggcacgtctggggctctaaaatccctcatgtttacccccaacacatgctggagagtcaaactccaattggtagaatctgcgtgaaatggaatacttttcagacaacccaaacaacgagcatctgtcaaatattttacaatcgggaaagtgtaacctcgctgcatgcaacttccctccctggacgtgttaagtaacctgttaaatttcccaacccagatcatagccccccaaccccctgcaccatggtttctctaaacgcctttatagccccgcgctctctaatctcgagctcaagtgaggctgcctatggggctctggcagatgacaaacgacaaggaggccgaaagccagatgtcttcgaattgagggagaaggccggacctctgactcgggtcacactggggacccccacaaaccatcccttttagacaagtgaccccgggggtcaccttgacccctgcagtgagccagaccaaacttccacgccaggccagcccccgccaggtgagcaggtacacaaaaagaagcctcagtgaccaccgtacgctggtgtggagaggccccgggaggtgcaaggagaacagagacgaactcgaccgcgggcagaagcctcccctggctccaacgccgcgactgcctgtcgccgaggctagggccgccacttctcatgtccgagctggccaggcgccactcgtacctgcgggctataggcctccgaagcccatgctcctgccaacttctgcgtgaagccactaaacttgtagtacatgacgcccagagtccggcttcccgcatccgctgccaacgcgaccgccccagagaaggaccccgcctccccggctgtggtcccgagactcagcgcaaggacccggtgctgggactagggctgcccgaagatcgcctaacttaaaacctgcacacttaagccgcattggggaaccaaaagccagggttctcaggaccacgaaaggcaaaaccagctctaagagagcacgcaaagtcgctgtggcggagtctgtaggaaatatgaagttccctctttcccccattcagatttgggcagtgccacgacaactcaagaaatgcgcaagcgctccacggactaagcccggcggactaagcccggcagtgtcggagtcaggtggagcatgctttaggaggggcgggctccaggcggggcctgggggggagagggcggtgattggtgggcgtggtctgggtaggggcggggctacatcgaagccggttgggaattccaccatccgagagagtctgtgctgcggagccaccgtctggtcgtcgggttgaaggcgtctcttgctttaccgaactttaactgatcgtagtctcatttatttccttccgacctagagcacctcttatccagaagccaccacctgctgttgctcagtctgcccaggagtatagacttgtcggccaagcttcccctggcaacctgggagttgaagcaaataagaaaatttggaagcacctgctgaaggctgtttagtacccagggctgttgggagatttgccccaataatataaaagtagcctcctgggctttgtgcagaggaaatacacatgcagagtgatctaaagctcaggtaccaggatgtaaatgtcacacggtttctcagaactggtttttattctcacctgagttttaaggtcattgattattcatccttttcctggcctctgctctttgcgataaatgaggtagggggagggtgatcagaaacacttgtaaaatctggaccttgagcctgaaagatctggaactaccactttcagttctggtagtattcgcttcagttcaatttaaatatgtctgttaagcctgtgctgtgtgcaaggtactgtgtaaaaggagtatactagtttcttactctccagggatggactcaggcttttcttagcttcatcatctaaccataggtttacacaagcatattctagatgcacttatgaaatcatgttgcaaattgatggatgatactaacctatatatagcattgcccta

SEQ ID NO: 36990 - DNA, 1696 bp, Homo sapiens
ttgaatctcaccgcgaggaaggcaccctgctgcctgcacttatttgcatccaagagtttgcattgagactggcgcttgcctactagggcagccacaggggggttccccagggacagaggtagggaaggaggacctgtcttggggtggacaggtgacggggtaccctgggtgggggaagaggtgctggggagaggctaagccccagcccccactctaattctctaacagcccctggtccgcatttgagtgcaggcctctgcctcagccaggaccctgaccccagggccctccacttccagcaaggccccccaccctccctcccactcccactccctttcccctccccctcccccccaattcccgctggccccgcagcgctccagcctccccgggcctcccccggcccggcccactcggccttgctagcctggcgctgggggcgggcaccagcccccacccctcggcgtaccatcccctttacttcccccaccccctgtcccctcccttccctcccttcccccccgtggcgaggcagcagcgacggcggcggcggcagcggcggtcgcggctgaggctgaggaggaggcggcggcggcgggcggggctcggctcgggctccgcgggcgggcgggcggacatggcggccaacatgtaccgggtcggaggtaggcaggctcggcccgacccggcccgtgtgggagcgggttccgggagcggggggccggggcgagtgcacgccaactgccgggagccaagggcgccggggctgaggtcgcagtgggctggggcgccggggcccgcagaggggccgggactccccacccccacccatcccttcccctccccccacgcgggctcgcgagggcccggggccaccttcaccctcgcaccccgcccagtgtttagggccaggcctctacttgggggtacgaattaccagacacccccctccacgaaaccctcatcggggtagggcccgtcgagccccctgagaaggtggccttcttgcgtggcttctaggcgctggagaggatgaggggacatcccctctcctgcttcttccccactcagtgggagcctggggtgggggtgggggtgggggcggtgggggcccagccaggggcccagctggacgggcctgtttgcgtgccggggccctgcacctccccttcctcggcccccctccttttcgtttctggtccagtcccccacgaatggggcttcgtgggagctgggaacctcagccggaggtggggagttgagctctgcctggacgtttgctctgctgcctgcctccttcccagtcttctgcggaagagagaaataaggtcaaacaaactttctccctactcacgacgccctcctccctctttcctggtaaaataataattcagataagtggcgtgtttgtatgagagactggctcttccttctctgctcattagccgagcttctgatggatggtggtgggaatggcctggctaaatgaggccactttgcagaagagagcggcgaaagagccactaagatagacaataacaatgcagctgcctttcggataaacacacagtgggaagtttccagcaagcctattagatgagaggaaaagccacacttgaaaaattttatccttttagttgaaagcctgcagcaatttcttaatcacaagacattaaatggatctggattaaatatg

SEQ ID NO: 36991 - DNA, 1314 bp, Homo sapiens
gcttggagaaaccatgggatggggcatggagcagaggcagcagggggcgagaagggaagcaaagacagagggagacaggagaggcgggtgctgagaccagggccaacagagaaggcagaagcctctggaagactccgcagccagctgtgcctcccatgccatagccatgccaggtctacccacctcctcagtatagttttagattttcctattgactttttccaccaaggaaacggtctccagtgaggtgtgtttgtgagaagggggtggccaggggaggtgcagggcccctggagcgtgagaggtgaggagttggctggttctgctggcccagggcccatcgttcctccacacagccttgggtgtcccagtgcacacatgaggtgctcagcaaatatttattgaacaagtgattctcccatgctcaccacagtccctggctgtggcctggatgccctcagtggggacagaggctgttgatcaagctggactctggatcctgaacccccagaatgaggctccctgagaggatggggagcccctctactgatccttttccaccagaggagattctgtgtctctccttaaggggacacacctttctctttaaattttgcttttgtttatttattttggggtaggtagtagagaagcacagtccaaacttcaaggtgcaaaaggtgattcaaggcaaattccccctcccacctgccccagccacaagccacgaatgggttttgcagcctctagttaaggaagggccaccctgccccaactcctccttcagctccaggcacctccctaccatgcctacccctcagccactagctcctcctccctcagcccctcgaactccctctgccacccactcagcccagccctcacccacggtgtttttgcactttgcccccgtctgcgggggaggatctcattttggagaccaattgaatctgtcaagtttgtggggaggggaccaggacgtcccccttcacatggccagcccctatatccagggggaggatgccccatggctaaaacctctcacccgcagggcatgggttgtttcctggggctcccccagcagaggtgctagctgtggaggcgtcactgcctgaccaccagcttggaggcagcagtcgtgccctgtgatttcagctgtgccccctccactcatcagccacatgtccacccctctccagtccatcatctctgggcctcgagtgggaagcgccccctcccgctagggccaggctccttgcccgcaggcctagatccagggagaccagtcaaacctacctcttcaccctcttcgat

SEQ ID NO: 36992 - DNA, 3371 bp, Homo sapiens
gtgcgtggactctggagtcgaactgctccgtgggttgagtctggagcctatcgcacaggcgctccgtgacactagaaaagttacttatgaaaatcccccctcacggtgctactgtgagaatgagatgagatgatgtaaaaacacttggcatagtcctgggcctgctgtttgccttgaggtgccaccctactgaccatgtcctgtggacacagcaaaaatggggaatgtaaaccttgatctagctggcatgtggggccccgccatggaactggggggatgagggaggtgaccataccacaggggagggcctgagaggtctgcctgagaaagatggcagctggatggccaaccctgttgggtgctgcaggcagaggctactggcagaggtggcctagggagggtctggtgtggtgtgtgtgtgtgtgtgttcgtgcacacctgcatagaggggccctgaaaaaagcaagacatcaagatcttcccaaaggagcggattctctgcctccccctttgcctgtggcttctgggacagggttggggtgtatgatttggctgcccccaggcctacattctagtgcatttctgccttgaaaaccaccctccccacacttttgagttttcccaaaatgcacagtgtcacttggggttggagaattgtttctcagccctggaaggagaggtgcaccctgtcatgtcatctcctacagcctgagaaccagctcagccttcttcagaagtcaaggccacagtcacaagaaagaggaacagaccgatgtggtggaaccggaacagcctgtctccatcttcccccaagaaccaagagattaaagcggtccttctgcaagcttctgggtccaggaactcggagctggaaggtgagggcgcagatggaggagggggaggaggcgagggcagggggcggccatgggggtgctggactcacatgagcttgttgcagaccgggggctggaaggagccccggttctccttcacccaggccctcactcccaggcggcgctccatgactgtcccgggcgcctcctcgcagcgctgtcctcccgccgtcggaggcccgcagctccgcccagccgcctttttaaccagaatcccaagctcacgaggcggagcaaacccccgcgaccccgtggtgggggcttggggcccgcggactttgccccctggtggactttggtctgagcccgccgccctccgcgccactccaggccctggcgagcgcggcggcggcagcgctggggaacggcgtcccgcgccctctgcttctccgcggggcaggggctcggtccccgccaccgtctccggggcgccccacacactggcgcctgcggtggggcctgctcccggcggaggacaaagaatccagacccttcctggacgcttgtccccagacgttccttccctctacgccccgaggggaatcccagggaaggttcccagaaatactacagtgaggagatcgcgggttggaagtcccagcacctgagaacacggtgctggcgctgggctcaagatttggctttcccatctggaaaaggggaatgactgccccgccactcagggctgcggcgctcacccagcgggaagccgcacggcggtccccgcaggtcccgattcaaggtgagccccagacctgctgcgtgcggccggcagactccgccgcgggctcggcgaggggagcggtgcaggcgccgagctgcggagcccgggctcagggcaggaccgcgagccctccccacctgaggcccagccgagcggccgctgtccgcgcagtgtcgcagtggaccccgagccccgtgctgaactccttaggcgtcttaggaacatactcagttcgcacgcagctatgggaggaatttggcagatgtggacaccggcctcagtgtcctagccctcgggaatctcggggtgttaatgatgacagccccgtgtgagagactctaacagttatcctgggggtgaggggctggggcgctgggcctgggcgtgcatgtgtgaggaaagagaaatctgcgcgggtgtggaagatggagaagcctgtctttctgcaggactcagaactttcttaggaagtttggagggagtgggagctgacgggtaggggaggaggaaaatggctcaggcccctgacaccggaatccagactatagagtttaagaaactaaacgcctctaaatcctgccctcacagcccgcctggcctgggctggttttctcagcattccagacataaagactcctctagtacaactcaaaatcaaaacccagacgacaggaagccgaattccccactgagaccctcccgtttcctctctgacgctctttttttttttttcatttttctctctccttttttttagttatttatctagcacagttttagctgagcacttctagtgcaaaactagaatatcgttttgcacccaagtaactcacaccaccttctttatttttctcatctacaagtaatcagaggagacgtaaacaatgacacatgaagcactgaggatctgagatgtgttaagtttgctttgagtgttagttaaatggagggatgggtgagtgggtggatgaaggcatcaatgaattcacacaaaaaggagaaaaaattgatttcagcccaacagatgttccgttaccatagtgcaaaggaaagaatgataggtactctgtattttaactgatgtgatcaaataatgtgaataattaaggccacaagtagaattttgggggtctgaaatatcccgagtaaccctctacacaagctaaatgactgctatgttatcactatcaaatatgccctctgatttgtgctgtgtagagcaaataccacgtctggtctactgaattggcaagcctcctggctcaggcaccactggactccaatgttcagaaaacggacagttgctatgttgtgagtattctggcattgttgagttggaaccatctggaatccttctggatactgactgttgggccccttgtagtttctggaatttacccgcttctaggagccacctctctcctctgcacacaggagctcatctgcactaaaggattagaagcaaatagaatctaccccacgatccaagctcaaaggatctggcctgcttgctggtgtcttcccctggcctccgctgggtggtgtttgcctgcccaggtcactgagaccagcagatccttctaggctttgctgaacctggctggtaataactatctgacccttcaattcttccatacactgaactcgttgctccagtgaatccctttcccagcccaccttgttttgtctctgcctttctgtctctcccactttctcaccctttcatgtaattcagcaactattttaaaacaaat

SEQ ID NO: 36993 - DNA, 1806 bp, Homo sapiens
taagatttcctttgcagtttagcttatggtcaatttttgtgaatgtgtatactctgcttagaacgtagttcagaatatttctattaggtcatgctattgtgttagtcaaatagtcttgatctttattttttaaagtgcttaatattttattttccaagagagatatgttaaaatctaacactgtgatttttggggtcaatttttcctttttttttttttttttttttttgagaccggttctcactctgtgcctaggctggagtgcagtggtgcgatcttagcctcaatctctccgggctcatgtgatcctcctgcctgtcctcactgtagctgggactacaggctcacaccaccacgcctggctttttgtattttttttgtagagatggggtttccccatgttgtccaggctggtcttgaactcctgggctcacaaagtgctgtaatcacaaagtgctgggattacagctgcgagccagtgtgcccagcctctccttattctttaacagcttttgctttacatattctgaatgtatgtcattagacgaaaacatgctcatgactattttatcttcttcttgtagtgtttcttttatctctaagaaatatttcctcttagtttcttttcaccttgacttcaactttgatattaatattcctacacccactttgtgctagtgttttccagatatggtaagttgatcaaaaagatgacacaataactccttcccttcctgaatccatacgccttgtgactttgcctctgttctaataagaggtgaagtccatttccttattcgttgaatcatgtttggcattgtgacttgtgaatacagaaggcagcagaactaatgctatgggacatctgagtctagtcctcaccaggtctcccagctgctgatctcatcacctggaacgctgctcccaccatgtgtagaagcctgggttagtgtcctggaggatgagagacaatgtggagggtgaggctggccaacagcctgcaccagctgtgtaagaccatctgagatgactgtagctgcatgagtgaacccaggggagacatgcagagacttgcccagctgtcttacttgttactttaagccattcagttttttctaagataaaaaaggttagtttatctaggcagaaatagtatgtaaataattatacaagtagtacatggatatgacgaaaaccttgaagctgatgtgcaaagagctgaaatttggaaaatacttaatgagagaatggcctaaagagctattcggtactctgaattccccaaaggcaaggaccaatatttatccacctccgatatctcctccggaaccttacacagtacttggaacacagtggactctctacaaataccaaattgggaattaactcttattataaacactgagtgtcagccctggttcttccgggctccaaaactaacatatgagtagatttctccaggtagacaagagtgaggtaaacccccaagaatcaggaactagagccaagtaaagaataagccccgagaagctttgagtaaaaaaggatactgtttgcacattgcgtattggaaaacaagtagaaagtccaaaaacaaaataaaaacttacagcaggaagaaaaaaaaaaaaagccccacaaactctacagcttaagttagcctaaccacagctgagatatttcttccgaaagaactaaatgacaagttgagagaaaggccccattgtcaggtcagctgttcctgagaagaactaaattcaaaactagacaaaactctctcactactaaaaacgcatatagacaggg

SEQ ID NO: 36994 - DNA, 2384 bp, Homo sapiens
ttctgtccatcgcttgctcatgcagtttcccccattattgccataatcattctgttgtttgctcggctggctctcccaggagagcagacgtcatcaaacaggtgaccaacatgccaacaggtgctcagagaccatcaagatgtgtgagacaagcctgaaggaagagacgggggtggtgggcactcgggaggtggctggcactctggaggtggctgctaccttccctggaggaccagcttcctggcaggcttatcaattaggtacaacaggcacagtgcatagaccagaaaaaatttaaatgttaatttcttttgaaatgagaagaaaacgaatatagtattaaatgaaaaatagtaatatgaatatagcaataaattcagcttgaaatacattcatttttatatcatcacagtggtaaaatataattttccaaaactttttctttttttttttaaatggaggacaggagctcacgaagacaaaagtgcctacggccaagaacagtcataattcagccctgggtgcagtgtttagattttgttttgtttttaaatggatatctagatatttgtatgagatcgcctgattttaagtaatggaaattagttttaacatcaaacattttgtggcccaacaaaacacgcagggtttgggctgcaactcctccaaagccggggctatctccgcgtcctccgcttggggtggcctggccgggtttcggggccccgcctcctgcctggagggcccaagagctgccggaacctcgcgagccggaccaggcgccaagccacagccgcgcgccgccaccggcccctggcctcgcccggccggggcgcccccgccagccgccactggggggctccggacgctctccttccggggggccccgcgggcagtcggatcgggcctccccggggcgcgggagcaaggccgcccggctcagccccagccccagccccagccccacccccggaccgcgtcaccaccgcggcgaggcccgcctgccgcttccccggcctgggccctgcccctcgcgggccggctccgggacgcgaagcccatagagggggttttccggccgcaggcgctggggccgctcctcctacggcgaggcccggggctgcgcgctgcgctctttgcagggcccccgtggccctcccgtcacggccaggctaggcggcccctccatccccgagggcgacactcgcaggcttccccggctcgatcggctgcggaacagccgggagctcggcgcgaagtcgcagaaggctcgggcctgggctcgcgccgcgaacgcgcatgctctgccgaggcccgccgcgggcgccagcgcaccctgatagagccatcacgaggcccattcagcagagctccagtggcgcaatcggttagcgcgcggtacttatacagcagtacatgcagagcaatgccgaggttgtgagttcgagcctcacctggagcaagacccttttggatgttcgcaaccccttttgtgtatctcgttgccagaagtaaggagtctctctttagtcttctcccttcttgtttctaactgctctgccgcacgtccccattggccgcaagcaggaagcagctcgcagtggactctcaataccccttttccgagctacttgttgccaccgcgcgacatccagccgctcgaactcggacatccacccactgcgtccttctagtgctcttcttaggcgggtcctgtaactgcacctagtcccggaccacaggagggcggatggaggtggcgaggcgctccactgtggcggggtccctagctggccgtggggatcgaatattctacagggcacttcattctacagtgtgagcccgagctcccggtgcggagatgaggcctggggccgggccgctgcccctcgcccccgggcggggcccaagcaccgccgaccattcccaggcgttggggcccgaggcctagcgcggggcgtccggggagctgtggggagacctggggcggctgttttccgcccttgtaactcgtgatgagttcttccccctcgcttctgtctgcagagaccaataagactgcgggcccttctcctcaacccaggcgcccagccgtccctgggcagatttgcagtttggggaatgtgctcggagagttcccctccccatcatgtgccccttctcctagcggcacgtcacaaatcctggttcagaagtcctcccgggggccgggaaatcaggccaagtggtcgccggcggatgcgccctgccccacatcgccagggggggtaggcaaagcgggcacaagcttagttaagggatggaaagcctcctggacgtgttctttcaaaggggagattttcagctgttttcatggacgggatcgttgctagattttgggtgga

SEQ ID NO: 36995 - DNA, 787 bp, Homo sapiens
tacacttgtgtgcatgtctttgtgtgtttacatgtgtatgttgtgtgtatacacacatttatgtgtgggggtacacgcttacatttgtgcatgtgtgtttacatgtgtctgcgtgtgtgtgtgttgtgcctgtgcacatgtgtgtgagtatgggagatggatggtagaatgaacaccaggcatgagggggcccagggcagagtctcaggccttgacccgggtttccaaatggccacagatgtgacccttcacccttccctgcggctgttgaggtcattgcccagagaactttcctttggaaccaagtgggccttgctgcctggagagggagaaagcaaaccggatgatcctcatcctggggagcctggagccagcgggcccttgtttaattctgaaggaatgtgcgaggttcccgcccagcggagcaggccccagcctgactgggagcctcagcactcctggggcagcagctgcgtctgcaccgggtcggcgtgggggtgggagctgggccagctggggacctacagcatccagggagagacaatcacacaaactgggtggctggagtaggctaggggcgagggaggcccataacaccttcctccaggagccggggcctgtgtgtccagctctgtgctcaggggaggacaagcagggaagaggagacggtcctggcagtggagagcaaagtccccggcaggagatgaggtgccatgggaggcaaagcacagagtacagagaggaggcagcgaggagcgttccctgggggctgtgtcatcagggaagg

SEQ ID NO: 36996 - DNA, 4887 bp, Homo sapiens
tccccatttgtggtggggaccataatgcttcccttgcctccccacagggccttggcagggttcagaggagcccatgctaacaaataggacatagctgttcagactcagaggccatgagattctgttcctgtgtttatggcaagatggctgccccttcctgttctccacagggaggcaccaccatatatgtcctggttaaaaagtaaatcaggagcacatgttgtcaaagcttcctgaggctgtgtcatgagtaaaaaagaaaaaaaaaaaaaaaaaaaggtaaagcagcctgggagggtctccctttgaggcttatcagcctcccactcctctgtatgaatatgataatcagactctatcagaccagatttttgaggaaagacagagtgttgggatctgagacagatggatagaaaacaccacccaggggaaatgggggcaccgggttttcccagcagtgagcccttcaaggggaaccccaggcctggtacaatgcctggcacaatgcctggcacagagtggggggttccatgcagcattgatgacaggatgagccaacgttcccacagcctcaccagcagaagggagacttccaggcaacaagggttccgagatcccaactcccttcccctctccccgtctttcttcaattcttctgtcgtctgcccccgcttttcttgcaggctttggggggtattcatgctctccgtttcccagtggacaagtggcggggccaggggggctgtgtgtgcgtgtgtgtaggcacgcgggctgtgagggggctggggacaaaggccccggagtgagattcagggcacagctgaactgccctgaactctcctttttgttttcaaggaaatgcataatccaagaaccacccacggccctggcggctctgctaagcagggctggaatgtgctgcctttcccgttagtaattgttttttctagttagcctgtaacccttcgcctgccattcccctgctgcaggggtgaggcccgcagggatggacacctcggctgccctcctgagatatccccgcactctccaccccactcccacagggttcaggacctggtcctggcagcaccctccggaccatctgccttcgtggcgactctttcctcactgagaggggccagggctgctggagactgcagagtcctgcatggggcctgcaaatccttgttatggagtctccgtgtctggttgtagccagggctgtgactgtgaatgggtgtcagtgcaagctggtggaggaatgtgagtttgtgtgggtggctgtgacctgggatactgaggactcagagagagagagagagagagagagagagagagagagagtgtgtgtggaccctgtgaacatgggtacacatctgtgaaagccagcaagcatggttgtgaatccagtttgtgtgcaagcaggtggtgtgagtgtgcgtgtgcctgtcccgggaaggaaaagccatgtgcacctgagctgactcagcacttctctttcctgcccacccagttgagcgcctgagcctttgctccagggaggaggcaatgccctctgcccccgtgtttgtgttgttggctgcctcaccctcaccagcaggaggggagcaaatgtggcgccctgggcccggtcccagttagctgagctgcgtatctttaatccctagggattaaaaaggtcacaggctcatgctatttcccgacccctccctgccaggtcctgtctggagctctctgaagtggctatagctaaggccaggcctctgctcagatggaggtggcctctgtggagtaagaaggggtactggggtgtcgcttgctgtaccctgaatcccaccttcttgcagcactgactgttgctgcttcatccttggtgaggcctgacctgtggcctttaattcttagtgtgagctctaccaccctgagcggtgaggggtgctgggctggcctcagcacctgcatctctcagggaggtctgcccctccagaagtcggggctcaggatcacagaggggctgggaagtcaggaggtggagacaaagcccaaagtctcccgttgcaggctttggggcagaggccagcctgtgccctgagcagctagcagtgcagcagtgccaaggcccggtccagtgtggctgctgaacatttggttcaaatcaaaggccttttccagccaagagaggaatgctgccgagtaggatttgggaacgggcccggcagggcaaacactgccttaattgaggcccttctagacttttaattacaagcaatgttttcccaagcttcctaaattgaccatggagacctgctggtgttagtgcccatggcagggacgaaaaaaaaatcgtcgttaaagctttttcagcaggtttattttagcaaatgttttgaggtggaaaggctcacacaaagtggaggccggagtcatttttctcagagggccaggcacagacacggagagatccacacccacaggtgtgatcagacacacaggtggaacacacgcacacagacgggcacctgttgagagaggcacgtgtacaggcggaggacgtgaccgtggcgtggctgcagaggctgtaaacaccaggctggaaatccagctcaagcacctggagcgctttagaaaggcaaacactgttggctgcccctcccgcccgctcccaccttcacctcctcccacccctccaggctggctgggcctgggcctgcttcggagcccctgtgcccttcaccaggcctgtttacaaggcccaggacagccgccaaaaccccagctgtgtccctgtccttgtctgtctccagcggacatgactgacttggaaggaaggcgtgcccttgtctgtggaagaggacccgtattcagcacccagtggaatcctcggggcaccttctgagggaaacgtctatggctgttcagggagcagctggtccaggttacagatgcagaaaacagaggtgtccctgaaaaacagacgccctgggaggaagctcccaaagcaccagccctgcttgtgcacaagaattgcccggactccaggactccctcagagccaatctggatccccaggcggggacctgtgccccggttttctagcactgctcaccattgcagcgtcagcactgaaagcctgagctcagaacctgtttgtttaatagtgactgttcactgctgggctctgggagccctgacagctggaaagacagagcaggtgccccaacacgggtgattttggaagccccagagggtccctgtctactcgcttttcctctttccctgatgtttgtggcccatgtctgtgggcctggacactcaagcagcctccagaatccctcccagtgttcaacaatgagcccagaaatggtgcatagtagaaatgggaacaagtagggtgcctggagaggtagggaggccagagacaatgatgcctgcgtcaccgttttgccaagggtccccttgactgtgggcactgcccagacacagggaggccagaggccaggagcagagggaggccattccctaggcccagccctgccagccagggtgagccttgatggccgttacaggccgttgctatcgtcccttatctggggctcctggctcttacaccatgtccccaaccgcccctggagtgtgtgtgtgttgagggggggcctgctgttccctccctaaacagaccgttacttggtttccgttgtttggggagggggtggggagctgtctgcttaattaatcattttaggccatcctgggaaactcattaagccacctctcagggctgggagcaggaacacagccctcaaagttggaactttttggtttgccatatccgggtctagttttccttccactcatgtgcacacatgtgcatgagagtgtgtgtgtgtgtgtgtgtgtgtgcatgtgtgagagagtgggagtacaagggagagtgcccttgtagctatgattctgtgtgtgtttgcgtttcctagattctgcaaggaacttcccctgattcttcttaattaccagcctagaagaaattcaagatgcttagagcaaaggtcaaactccacctgttttccctgcacttcattttctggcagttcccacaatagtacagataagtaaaagattaaggcaatcttttctaattaaagtaattaaaaaacggcgatgattgcacctttcatctgaaagggaaaatatttactcatccaactgcaggcccttaaaagcattcaggaggtctattttgacaaacggatcctcctcccctcccccagcccattctgcttgtcctggacacacacacacaaaggctggtttatttagtaagcggaggcttgacgggggcaccctgaaagctgggaacctcgggcagttttaagcaaatggacactttggttcaatccctgctaggccctgttgagaggtttctgggaccgttgggattttgatttgaccaatcaatgttttactgttgtaccttcttcctctcctcctttgggtgggaaaccacccaaaggtccctgtctgcctctgatagctccactcttccctcagacctggctgggatggagacctcaaaaaggaagaaccggtcagagtcttggatgcagtccgtaacaaccatatattacattgctgtttcgcacaagcctgtgtgcttgacatataagtacttgctcagtgccaaagggggcgctcttggggtgtgtggcccagtccctaagaagtgcaaagtctaaaaactgtccttggctcccccaggagaaagcaaacttgcatacaggctgctgtaattcactttgagtttttgaggcaagtataatcagccagtttcctggtgcatggggcttgatctcacagattgcaatttttccctaagtaggtagggacaga

SEQ ID NO: 36997 - DNA, 1454 bp, Homo sapiens
caggctggtctcaaactcctgacctcaggtgattcgtccgcctcagcctcccagagtgctgggattataggtgtgagccgctgcgcccagcaccagcctcttgattttttttccaaccctcactgggtggtttgaatgcaaatgctaattgggttcagctgaaagccacagttgaaccagtgaccttagattgttgattaacacaccaattgcaccattttaccactcacaaaaggaacaggtcagaatgctatctaagtggttacagatatgtgtcatagtttcaccagattcccaacgtgtaaaaatggttatccttatttcctggatgagtaaaaggaggctcagcaaatttaagccaggattgcagcttgggtcttgggactgcctcttagtggcccccatggttggcttcccttctcctaccttggcccctgagatgcgggaggggttggctgccagggcccctctcgcgggggaaggtagtggggtgggcctggctccccagatggccacagtggagacagggcaggcactgggtcagcccaggtgggtgggagaaggtgccattgaaggctggtaaaaaaggggtgaagtgctgtcacttccttcccaacttgggcctcctgcaacagaagggcgccgagcccttgtggcgatcctgagggcactacagcagctgctgaaagtgattcttaaccaggagctggccctcaggggcagccagcatcatggcctctccctggttccctgcttgccctagacatgtgttaagggctctgggtgggccctaagccccagctgctggctcatctggcagccactgttcttctcttggctcagcttgaccatcccatcaaaggaaaagcatggcatgaatgggaaggcttagggcttggcaggagactgaccttggctctcagagtggggagccctggagccagggaaatctagcaggagggatggcctcaggtccttcaggggtcctggatacggtcagcactgggggtgccactggtgccatccagcttagggacatatggattccttctctcagactcctctgcctgccccctctgctctcctttccagcgttcacaaccctgcctctccccgcggaatgcctgactccacaccacatgcattaaagctgccatctgtaccgccctcatggtgtgccaggcatccaagtattttacatacacacacacacacaatgtcagtcaatccttgcaatacccaagtgaggaaggtattactaccattatctccgttttacagatcagaaaactgagaagtgaagagtatagggaagtctgcgtggctccggccaggctgctgctggaggacctctaccttctcacccccaaggacatgggcatggtgttgatggagaaaggaaatggctcactccggggggtgtccctcattctggtcctcttgagcagtcactc

SEQ ID NO: 36998 - DNA, 867 bp, Homo sapiens
ctacacggagcccaggcctctgctctgaaaagtctcttgaccccagcattccagctcgggacgggcccagcgaatcccaaccccaatctgccgtcctcatcccagaggaatgctcagcctactggaccttggcctttctctgggggacggtgaggcctgtgacgggggaagccctggggcggaactggcagtcgtggggaggccccccaggacgctgtggccacgggggcggctggaggagaggaggcagggggctgggggagtgagccagtagggagccgggcagcacactggccacctgagaggtgtgatgggggagacaagaggcggtgattcctggggtgggagttaccccctcccccaattctcaaacccccgacaggagtgagctgcgctgcccactccccgcagcaggtggcgccgtcttgctgggattggacttgcgggcctggctgggaagcgctctgtggagagggacgcgactggagcggctggggggcagccgtcctgcgcctgggaccctcacggggcctccctgctccagtcactcccgcccgcctgccagcctgtccccagctctcctgcgtctccactctgtccctgttgcccttcctgtcttcctccagccctccagtcctgctttcggctggggtccccggacagggtctggtcagctggttcactccgaagcatccctaccggataagggaactctcagcccagcccagcgggcgtttggccatggcgtggcaccgtggggggcctctctaagcagccccgactcccagggtttgcctacattctatgccctcaggaggtgttcagtgccccgagctggggcttggggaggaggggttcctaggaaca

SEQ ID NO: 36999 - DNA, 1190 bp, Homo sapiens
tctaggccagagggaagagggatgagagatcccccagtcctggcgggaccatgaccacctctggtttctggccctgtgtgaatatggtcttgtccaccccatcagggaggcctcagccaagagcaaggaggaaggtccacaaagggctgtgtatcaagaggcaggaggagaggagagagagtgagtgatgctgtttacagcaggaccagctctagtgcttgttatatgcgtacgtgatcctgtttgatcatcctaaacagtgatgagagcagggtgctattactatggccatttcataaacgaggaaactgaggcataaatcgggccacttgtccaagtcctggagctgggaaacagcagagcaggggcagtctgattcctgacctgggtccggtataactctgttatctgcagggagcagggcagaggggcaatgcaggaaggggaaggggctccatgcagctgcgggttgcagagaagaggcccagcgagaccaggcctctggctcagggcatgcctttgaggtggaggtggggtgggaatctggcttcttctcgatagggaaggagaatgtgtgtgctggcctctgggtgtcaggcaagtgtgtcccaggctggcttgctcccacagcccccacctcctcttcccctggggctttaccggtgagaagtcaatattgatgttttatgacccaagataaacacacatttttttcctcccatggagggtttatctggtctagagggttaatcaatgaccacttggaggtgggggaagcctctgagaagaaagcagctattcaattccagccctttacccagcctctccccttccctcctccccactaccacctcccctcccaccctctagtggggactgacctggccctgcaagtgggtgggggcaggacatttgggaatctgaggctggagtccatgtgggtgcgttcaggggactgttaagtaggatgcatccaaggagagtgtccctagagctgtgtttgccctgagcacggtgttggcagggcaggtgggccctgcatgtggctgtcatgggaccagcctggttaggagtgggaaagagaaaataagtctcgtgtcacagagcactcagagatgacacaagataatgcgggttgctcctcttgagaacaggggcactggagcacagtgtggggcccgaccctgcct

SEQ ID NO: 37000 - DNA, 1118 bp, Homo sapiens
atttttaagcacattccactagaagttcagcaacttgaatccccccagcacctacgacagagcctgcatatttaggtgaataaatgaactattcttgtcctaactagacttcaagtcctaggaagcagaatggctatgcctggtttccactcccgcaccatagtacccagcatagcaccagaaccgtggggcctcttccccagcccttgacactcccaaccctgccttcagctgccggaactgacttttcccatgattgctaatatttcttcctttttttttttctctaaatcaacattagctttgctagctccctaccttccacctgataagaatggggtacgggatctgtacgaacttggggtgtgcttttctcgccttgtcaaaacagcagctcctatctggctggcgatgggctgggagccagaccccaacaatggagccttgtgagccggccccgggggtgtgctgggagcccacggttgagcacacacacaacccttcctggtgccaccttcttatctcctgccaccaagcccttgccagtggtgggactgtaacccaaccccctgtaattgcatgtcccagatagaacattcctgggctcaggccacggttaaacattgacttagggtgctgggggcagtcatcacagactgtaggtgctcctgatgggggaggcgctagctgggtgtccaccactcccctcccagtggtcctggactaactgagaaagccacggcacagagcaggcaggctcagctgcccacatctttgagtcagtgtgctggaggagccgcgggcctgttcaaaaagaatcatttcttttctcctgcctgccctctgcctacctcccactctccctagctgcctcttcggatttctccaaccttctcatttctgcttctccttcttgtcttcctctctcctatcttcgatctcaggtcctctccctccttgggcctggcctgtctcttctcgtcttcccttgtcctggggccctttcccatgtagtgagcccagatgtgcccaggcaaaggggctctgctctctcttctgcacccctctgcctctggcctctctgggaaatggaaggtggggtggaggaagcaggtggc

SEQ ID NO: 37001 - DNA, 639 bp, Homo sapiens
cgtctcaccccaaaacttagtgacttaagcacttagtagctcatgattctgagagttggcaattggagctgggctcagcaggctgattctttggctggcctcacctgggcttacttaggtagctacagttagcttgtggttcagctggggactgtttggttaggatgatctcactcacgcatctggggtttggaactgctattttttggttatctgctggagtaatgggagtgactgggacatgtctccagcaggctagcctgggcttattcacatggtggcaatcataagagcaggaaaggagggcaagtccagtgtgtaagctcttttccagcctttgctttcttcacatttgttaatgatccattggccaaagcaagtcacagggccaaactcaggttcaaaggacagaaaaatagacttcacttcttgatgggaggtgctaaaaagtcacattgggaagaggagttctttcagggatgggagggagtattgctgctatttttgctaagtctacacgtcccttttttgttcctctccacaaacttgcttatagaatttcactgctagcatataggattaagattctagtcttaactcttgtccatgtgactctggatatatcatgtgcccttatca

SEQ ID NO: 37002 - DNA, 1185 bp, Homo sapiens
tctctggatatttgaagttgcaccttcaagggctccttccagaggatgctggacccctgagcctgcctcacagggcccttcctcatctcagccccagccctgcctcctgccctgccctcctcccattagccctcccttcggccacatttcccaccttgggcaggctttcccttttcactgtgccttggtgcacacaatgcctgcagccaggaatccctttctcatcacaataagcccatccttcaagacagagacgtctgtgtacctccactttaatggtgtgacatgcaatagggcctccaaaaatgtttgttgactgcctgactgactgacttgctggatgaaatcattagaagtgtaagttagctcagaattagtgccagacagactggcctggacttgctgctatcagttctagtcagagcaggagagcgcccatggattggaggattttgagcccccataagcacacacatgtgactacagcccccctggagtgagtcctgcaccctcgtaccctccacatgccatggaaaacatgcgccactgccccgtgccaggcctggacacacagcgagggctgcgggagggtctcagccacggtcaggggctcccaagctcctcttccctctacccactgacacctaaggaagccccaggcacttttctagagcgttctttggggctggggagtgtcagggcaggccctctgccaactcagcaggccggggactttggatgtgctgacactggctgccctgacacaccctatgtgggcccagttggccagagctctggccggcctgggcctgggcctggcaataatcgattgactgacatggaattccattccttcagcaaggaccaaccacacctgcatagagttgacgtaaggcccgtttctaaacacttcatttatatttgctcatttcattcttgtaatgaccctgtgaggtagatacagttctgatgcccatttcacagttgtggaaactgagacacagagacagataaactgacttcacaccatcaaagcagttaggagtgggcagtcacggtccacacccaggctatggggtctggagtctgcactttcctttttttttttttttaagatggagtctcactctgtcacccaggctggagcgcaatggcgtgatcttggctaactgcaacctccgcctc

SEQ ID NO: 37003 - DNA, 2987 bp, Homo sapiens
attacttgcaccaggcagcctttggcattaggggcatggacatgtgacattccaggtcccttccagccctgtgtctcactcgcgcgcacactcctacctgcctcatcctgatgttgcccattgcatccctgtgacctcccggttcctccacagccaggcattggctcgtgggaactcggtgctctcgggtttgggtcccagtagattctggaacatcccaccccacgcctgtccttccctgccacccctgctccgccccaggccagcattcctggaaagttcaaaggcacttggttcaggggagatgtttccacacagcttctgtagctggaactgggctaggcagagagggggcccacccacagccccacagggactgcatcttgagaccagaaaacttggagtggccctgggggagcagtgctgttcccattctctgtggcaggggccttggcaggtgcaagacccagagtgtccccccacaacctgagggggctgcttctggacacagagagctcaggcctcaaatgcatcttttcactagccttcctgggtcctgcccattcctagagacggagttcactatgctcctagccatgtgctgggtgcggggcgagccccagatggctcatcgccacgaggtgcaggcacagcctctccatgagccatcaggaactcggggttgcatcaaatccccaaagactttactgggcccacgctaggcatcagcctgggattctcctcccaggtctccaccagctgctgagcacagcggaggtggggaggcaagagcatgtcctatcctgcctcctggcccccagccccagtaacacagaactagggtgcctattgtttcaatggcagaaatccccctcccctccgacccctgccccctgcagcactgctccccatcactgggctaaacgaatgacccgccactcagcaggtgacgacttactcctccttggccggcccttcagctcctcctcctcacccatcctgactcagaggcctgtcagctgccactgcccccgaggcctggcagatttgggtgggaaggagctatctgggtgccaggacctgaggggctggccatgccctcactccttactgacctgacctttagcagggcctctgagcattctctgatctagaaatgccacatgtacacgcatgtgtgtgcacacacacacaaacacccacacactcacacccagccgctctatgacctgatgaaacagtctgggtgcagggctgaggcaggccagggaggagagttagactgagcaaaagcaggatgtgtgtggagcagcctcctggcctctctcccgcagaggcacttcctggtactggagggcaaagcggcccggggttgggaaagagaccggtgctgcttgctccctctccagaacaggcattaattctggctgccccttggtattggcctccaactttatagttctctccctttctttctctctctctctcctacacacacccctctagactcctcccctgcacctcctcaaaatttctcacccaccctcaccccacagaaggagcatcaaagccccacatagcctctggcctctctcaacacctaggagttgagatcaggcccttgtggcccagtcttggggacttccccctaccagggttggccctcttgggtccacgcctctttggctagacttctgatcgctctggcggccactccgcagtttcaccacgcctgctcctgcctgcaacacacagaagttggcagtgactctgcactgctcccagcaccccggatggctcagggctgtggcattttgttttctttcgtttttcgccttcatgtctgtgctgttcactgtgcctgaaatcccctccccgctaaccctcctgcccatagcgtcagtggcccacatgtcagcacccagcacttaccactagcgaggctgtgtcctatcctcctgaccatgccaatgaaaaaagtcccattaattatacccactgttggccgggtgcgatggctctcacctgtaatcccagcactttgggaggccgaggcagaaggatcacttgagctcaggagttcaagaccagcctgggcaacatggcaagccccatctctacaaacaatgcaaaaattagccgggtgtggtggcgtgcacctgtagtcccagtcccagctacttgggaggctgaggtgggaggatcactggagccctggaggtggaggttgctgtgagctgagatcacgccactgcactccagcctgggcaactgagggaccttgtctcaaaaaaaaaaaaaaaaaaaagataccattgttcagaggaggaagctgagctgacagaggtcaaggaagatgcatttctacccagctttcaagattcactttggacatcaccttcctcagactctgccttctcctcttcaccgccccactacgccccaggcaggagaaactgctcccagcctagagccactgcccgttgtagtgacttctgtttgaggctgagacctcagcccccaggtcctgatttgtgccctcctccctcagttttggggcctgtgagagtgggtggctgggcctggggctgagtcactgcctagccttgcctgcccagccccgaaccaggcaagcctcggtgcaggtgaccctgctgcccagagaagtgggcggcaggaagaatggtcaggccctcctcctttttctcctccctcctactcacccacctcctggccactttcctcccttttttttctttttttgagatggagtctcactctgtcgcccacactgcagtgcagtggcacaatcttggctcactgcaacctctgcctcccaggttcaagtgattctcctgcctcagcctcccgagtagctgggactacaggcatgtgccaccatgcccagctaaatttttgtatttttagtacagacggggttacaccgtgttagccaggatggtctcgatctcctgacctcgtgatcc

SEQ ID NO: 37004 - DNA, 1986 bp, Homo sapiens
gtgggagctcagttctatggactgagtggttctgtagacccaacagtggatagggccaagacagggggcctgggagattgtggatatcatcaccccctggccctggtgcactcatactcagttcttaagacccagctctttctgactcctccagaaagacttctctgtccctcaggctgggtcaggcccctcagcgtcccactgcacacatggcagataagtcttgatcgatgtgctgtgataaagcagttatctgtgtgtacagctggctccccaagagaccgtgccctcccttctcactattctctggagtcaggctctgtagcagcccaacatggttttgatgaatgaattaataaatttgctctgtgatcatgagcaaattccctctgtcctgttctcaacaacgggaaggcactatctttactagataagtgagaggaaggggcccggaggtggaggaggcagggccagaggaggaatggagtggctcgtgacacccactgtgggcagatgggatctgttaggagtggctttggctcactggggcaggccagggtggagaactgtcacataccctggtgtacctctggcaaggagctctggtgccatgtgggaatagaagtgcatggtcccttggcaaggctaacgttttgtttttaaagaagtctgtgtttccagcctcttcctatctagtgacctggtccctgagacctgcccaccctcccgggccatagcaccagccatgcgaccttgaaccggtcaccactcatccctgaacctccaagttctcagctctactgacagggctgcagtgccttcatgggctggtgcctgcctgggagggagcccagggatagaagcctggttcgctggccacctcccgctggggcgttggcccaggctgccaggtttcacgtttcagctttcagagtgttttcttgtctagggcactttctatttttcaatacttttcctatcacagccaaacaacaaaaaaggaaattggttgagccttctgaagaccaaggtctgggagggtgggggtgggcagaacccaccatgggaaaagctggagtcagggctgagggaggagaggcctctccacccgattccccagcacccctgctccccttcctccggggctgactcattgttttgcaacaaacagccggcagccaggtcccagcagtttctcaagcctggcccccaggctggctgggctcaatcctggccctcccaactgcctggccaggccctgaacgattgagttatctccactcgcatcccctttgtttggggcggctacttgcccactcaaggtaaacaaattctgggcctgtgtgaaaagaaaggaacggttatctctgaggccctcagcggcctggctggggagcaagactttcagaggcttctgtctccaaagagaggagggatttcggagcatagcgtccagaggccagctgcctgggttcaagctccacctcggccactgactgctgatgaccttgggcaagtccctgaccttctgcttcaacttttttacctgtaaaatttgggcacaataatatctatatcataaagttgttctgaggattgatgagttcatatttataaaatgctacataaaggatgtgaggttttttggggtttttttgttttattttgttttttgagaccgagtctcgttctgttgcccaggctggagcgcagtggggcaatcttggcttactgcaacctctgcctcccgggctcaagcgattcttctgcctcagactcctgagtagctgggactacagtcacacacctcacacaccaccacgcccagctaatttttatatttttagtagagacagggtttctccttgttggccagggtcgtctcgaactcctgaccccaggtgatccacccgcctcagcctcccaaagtgctgggattagaggtgtaagccaccgcacccggcctgatgtgagttttttaaaaag

SEQ ID NO: 37005 - DNA, 2186 bp, Homo sapiens
gtttgtgggtgggtggctgactactctgagtttgtgggtgattcatgtgtaccctcgcgacaggctgtgttcagatagtctgcttatgtgcttgaattcaaggacacaaacatccctaggtgcaagcttgcacgcacagtcctccctacacctccacacgcaactcctaatcatccctcaggatcctctccccgccctgcttcagccttaaggcctgctctgaccctccagcccatcccactgacctgctgaccttcatcccagacactgctgggttcagccctggagcctggtcactcttgctccctgagggtgaggttgactcctttttaaattacccctaaagccccacttagggagacacagccttatcaatcaacactccttgaatgaattaaaacaaactccaaggaaaggaactgcatttgggtggatggaaacaagagctctcaagctgttttctttcctctttaccctttgctctctgtctcttcccatctgtactttctctaacttgtttgctaactcaatcgtcagcttagaaagtacttccttgtataccctcctctcattcaaatctcatgacaatcctccaagacacgaataattatcctcattgcacagatgaggaaactgaggttcagggaggctacgtgagttgcccaaggtcacacagcctggaaggagtgggtagggactagaaccctcatgcgtgaatggacaccacctcccaccactccccaccagtaagtagagggtggagggtaaagggcgatccaggggctcggagaggattggcctcttcaagccctctccatggcccaaggtcaccgtgggagggagatgcacctggcccccagggccaggggttaccccactcggccagcaatgggagaggccatgagatctgtggacattgttcctgggcctgtggttactgatttgacaacagccctgttcctccccagccagccagggagttaatgattaaggaggagattaaatattaaccacctgtggggccacggcgtaatgtctccatctgcacctgagcctacctaaaaatccctcccacctgccgtgggccagccccacacagggcctctaagccccttgcttagggataccacttccccatgcccccatcctgccctggccctggccctggcccgtgtccaccccatctcactctctcatacccacagcacagacccaaggactcttcctgtagcttggaagctgcaagctacaccactgtaggcactcctggtgggccttctggaggagaggacctgcctgaacccagctactcctggggcttggagagtccgcaggttacattcctacctgtgacctcgtttatcagtgctcttatcgctcttatctcccaagtcgttcctcctaaagacccctctgaatctacacatcccaggccccaacaccctgggctacagcaactccccaacacgccattctcttctttcttctagcagttagaatctgggtgtgttctgcctccaggaagcctctcatattaacctgggctaaggtctctgcgggcctctgctccccagcttcccttaggccggggtgattcaggctggcattggctgctgcacggctgcaggaaaccagctgcatctgttggaaggtcctttgaagtttaagtgcacagcctccgagcgctgggggcggggactgctctatctcacctaagcctagggcctgcccctgggtgaagccatggtcaccctccccacagcaggaaccacaggcagtatgacacagggttcacctgcgtctttttctataaatatagaaaaatggaattatttattcaaataataactctattgatatgctctcattcctgtttgtggggaagccccagatgactgtgtgggtaagttactatggtacgtaagccccaccgtagcctgggcctgcactgctctctctgcatgtcagtgaactgcattgacactgcaggcctagtgacaggcaatgtcatccccattttacagatggcgaaactgaggctgggtgaaattaaaggacttggccacgctcaaacagacaggaaatggcagaagctggcctgcctggtgcaaaagccatacaaaactgaaaaggacctaacaccgttcttgccacagctgtctaggccccaagctcagcttcttttc

SEQ ID NO: 37006 - DNA, 11602 bp, Homo sapiens
tttttaaaaattccgcctggcgtcccagaccagctaagcaccctgacacgagggccggaggaatccacaagaaaaacaaagcttatttttagagaaatattttaaacttggtttcagcgagctcaggagttttcttgtctgtctcgagtccttaatatctttccttctatttcagagctgcctctcgccccagagggcacaagagctgctatctgacaggagctatttctgcccagatgaaaataaaagggcccctcccccttcccacagagtgaattctttctaaaaatgtccctgcagacagccagcggcaccaaggcctgtccttggcaggtgtgcccagcaacagaggtgagtctggggtccctgcaaggcaggggcccactgaccaccctcccacccagccctgcccggcctgctgccctgcaggaagcggatgccagcctggcggtcatttccgggttttgaaagcagtttttaaacttgaaagagccatgctaaaaaggtctgcttttcctccgtaggtgttggtaacacccacatacagacacacccacatgcacaccgcagcagacacatccagacccaaatacacagcaacacttacagctgctcaccccccacagagccacacacctacccacacacagcagcagctacacacaggcacacccaaacccactcccatagatcacacacacacacacacacacacacacacacacccagactcagacataccccaaggacccacatacctacctacacagcaacagacatacccaaacccccaccagccctcacacacatccacacatacttacacacagacacacccatgtataccaacacacacgcccctgcgtacacaccaacccccacatcacaacagacacacccacacccaggcacaccccaaagatccacatacctacatagcaacagatacacccaaacccacaccagcactcacacacatccacacacacttacacacagacacactcacatccaaacacagccatacccacagaccctccccccacatagcctccacatgcagaagcacacagatccacacaccagtactcccctagggcgacatcacacatgcagacccctgaacacctgcagacggagcaacaccacaaacctctgcacacccacagacagaaaaggacgcagaaacacgtactaatacacttcccatacaggcgcacccctcaggcctccacacacgtgcacggcatgcatgcgcgcgcgcacacacacacacaacacacacaacacacacacacacactctttcaaggtctagcaaaacccatcaggagaggttgggccctggaggtgctgtggcttcctgctgccccgctccctcccgcctcctccctgcagggctcctcctggggaggcctgtccagctgccaggccccgccccgccacagcccccgctgtcctcctccctccctcagccgtgccagcagcggcacagaactggaattgccctggacggccacagctctgcatatcccccaggagtgtggacaagaaaaaataaacacaattagagttcacgacaatgggcccctgatggaaggtaagcccggctagcctctaagggctgtgccggctcccacgaacttccaaggccgaggacggtgccgagacccaacttccggtctcaagaaaacttggtgagagtcacatccgccctcacttgtcaccacaagcaaaactgaaggagagcgggtgtttggggacggttcctttccgaggttcagtgctctctagcgggcttcctccctgcacatggccaccctggcgtttttctgagcgcccccaggcaggttttagcaccgagcattctagtgccgggccaggctggcggccaagagctaggcctgcttgtttttcctgcgtcgggcccaccaggcctggctctgtcatccggggtcctgagccactgcagggctcacaatcctccatctattccctggggctggtgcagagctttggccttctgaatagtttttttgtgtgtgcttttttttttttcttttacacacccagcagtagattcagacagcatgagcggtggaaaatgtgtacatgcacacatcctttctctgaaataagttagaaggtggcacacactaattgggctgcttaaaaaataccttagtcttcagacatccagtggaaacgccacgatgaagacattctaaacaccatcacattctgggctcattttcacaactgactacggaggaattttctcctgtagtttctaagtgcaactcagtcttagagtcaacagtccgggatgggaattttggtttgtcattacttgcaatctttacttctatttccttaatttacaagaaaacttttctaagggtgatcaagcaacggtagaggtttttttgctgttaatttccaggcgctgcaggaagacaatgacagtaccctccactgatctggggcaagaggaaatttctgaatgatccccccgtagctttccacgctccactgggtctgcgatacaaaacttcagatcctaacagttgggcttttcaaacaaaccagtttttaaaaatgaatgtggcttacccccaacattccagctgatcaaaagtacttgtttagaaaaataagtttaggaatgaagtggaaacaaggcctttgaaatgcagcttaacctaaatagcacattttagacttttcctccccactgcacattctttatggtgtaggggccagggagcctgcagtcttcacccctcctgagccctccttggcctcgggcttcctctcccctgctgctgaggccttcagtcaggggctggcatctgggagaaccttgaaactgtttcccatcccctttggcagcaagcaacaagcaccaaaacgctccagttaacaccagtgcaatcatcgttaacgtgaaacagctgcccgaggcctggcgtatccaccagaccgccccctcccctccatgctcagctgtgagtcaccagagaccccggctaaggcagggcccgggagggagcggggatgcgaggattgttgatggagcccagctgttgtatatgagaaagcaaactattgctaaatctcttacctaccttggaaaaagtgtctgaactgtgtgcatgagggacggcggtggaggagaagaaacatgaattgatttatgaacccgatttaagttcctaaagtgattgttttaaagttagaaacagccagagtcactatagtaagattttgttcaaccgtttgcgaaatcagcaggcaaatcaatgtctttttttccttcctttttctagagacctgggttgaatttgctttctggtcacttacagtcctctaaagcacagacaagaaatcttttttgcataaataacttgtatgtgttcattcccagaggaagttgtccgcataagcaaacatcacccagatataagtttaacctctttaatcttcccctccaccctgtccacaaggacataccaagctttccaaaatccaggcagaactccagttctccgacccagaaaaagcctggcctcactctccacctccagctcagcactcaggcctggcaggccaccggctgcagaaagatcctcctccccttccccacccaagcagttgtgtttcccagcaaaaaatcggaccctcagctgctaccgcagccacatgatccactcagtgactcacaggcaggccacaccccttcaggcctcccggccaggctctgctcccagccagctaactctgggatgcatcttattaccaaagggaacaactagctaactaatgcccttgacagtccaaataattactttctttcattagaagaacttgcttataaaatatatacgggctgagaggacgcaggctcttctgaactctggctctgccagctctccaagtcctcccccaccatgccaagacctggggaatggcagacatggttagctgggaagctagaaagctaagacattcctgtttaaaaagaaagctcttacatgttaatacctttttttcccaaaaattttattgggggaaaactacaaaacatttacagtacaatgtttacagtcacaatttgtagtgagctgattccccaaaatatattacaactcaagttgacttatcttgttacattcaaaaacctacttctgtccaaagtagtccagagagtacatatagtgctccaactgtacctacgtacaaactaaagctaccgctcattcatctgctgtccaggaaagcttaggagacattcctgcctttctacatggaaaaaaaaatagtacaagttttggaattttctgtaattaaacaaggcatattcatgtactacatatttcagcactaaggcggttgcttcactttatatctatataaaaaaagtggtaaaaatcttttccttttgtgcagttgaacccatcctacattcagattctctcaagcactaataaaatacttatttggttgaggaagatttaaggcaagttcgggcccttccaaaggcactgtgagactccccccccactccccgttattgctacatgtctttatactcgagtatgtcacagtagaactggtggaataagcaaacacttttttgctagtttataaagttggaattagaaaagcatgccacatttcagcctgattgcaaagtatgtggtcatttttttctttgaagttggatgggctacaacctttatacattctaagaaaactcataggatgttcctcaaactacttccacagcatcaagatcgatttctgtcaagaaatcatgcaatctttcaaaatttacgtaaacaaggaaagaaattaatgaaataaatattacatacaatctcttaaattaagaattttgtactcatttacaataaaataaccaagtgaagttacaaaaggcatatattactgtgaaaagaacatacactccacattttgccgattaataatggcaatcataatttaacataataaaagaatatatatctattgcttttcatcatacttgataaatacagtatgaacaaaattttcattgtatacttttcacaagataataaataagttaaatagttttcatattgagttgtggtgcagtggtgcgaatcaactcaaaacagctaaaaattcagcagttattctccaacaattacaaagtaagctctgcgcaaggcttccagagggagcagacaaaatggttctaaactgaacatccactaagtggtggcaatgaaaccaagtaaccagtatggacctttggaatgcaagggttttttcacccccagacatatataattctgttaaaaaacaaaaaacacctatgggctgagggctaactatcaaggcatattcttggcagaatatattggattttaaaaagcttataggtttagcaaggtggcggctggctggtttgtttacaccggtctgagacacaattaggaacttcttccaagagaagggttcccacatctggacttaactaatgctgttcaagtgaagagatggaatggtggttggtagctgctggtgctgggttgatttttcctgaagtcccaaactcatcggagtcctaacaaagtttaagtgttttttttttttttttgttctattcgtatcacaactgccctgttgtgaatattttgttcaacagaaaaagttcgacttttttgctcaaaaagaatgaaacttcgtaataaaaataaaaaaaaaaagacaagaggaaaccgaaaaaggaggggtgggggcccctcccggcacagagttcgagtccaagtgctcggtcgggcttgcagtctgcctagggcccatgtcaccccccccactcccgtgcccccagcaagggcgagatggcgaggggtgtcctccaacatctctgaaccgccttcccttcctcctcactggcgccctcttgcctcagtcgtcggagatggagaggcggctgaagattggcaggcggcggccagggtcgaggctgggagactcagagccgctgaggctgccggagctcagggagccgcttaggtagctgtcgcggtccgacagcgagtccggggggctggggggcgcgtcgaacacgggcgagtcggacaggcggcgcggcagctggaagctgaagggcggcgagggaggtgcggcggccccggcggggagggtcgcgctgggcggcgccggcggctgcgcggggggcgccaggccctgctgctgctgctgctgctgactgcggtagtaggcggcggcggccacggcggcaaagttgtgggtctggatggcgagcggcgtgatgaggctgctgagctccggaccgaaggcgaaggcgttgttggcgcacgaggccgacgagcaggccgcgcacggggcccccggcgccagcaggtcctcggcgcccccggtgccgtacagcagagcggccgcagccgcggccgccgcggaggcgcagcatgtcggggcgcccgagggcgtggaggccgcggaggccgaggaacaggaggaggcggaggaggagcaggacgaggccgaagagcaggagggcggcggcggcgtgcgcgacgtggggctgtcgagcagcagcggcgactcgaggccgcccgggggctgatggtggcccgacgggaagcccgagaagctgaggctgtggtgcaacttgggccgcggctcccgcgggaagcccaggtgcaacgcatcgcgcgtgccaaaggcacgcaggtccccggaggcgccccccgacggcgcgggccgccgctcgtccgcgttgtggatgaagtggcagcgcggcccataggggcagaagccgatggtatgaaaggtgcggcacagctcggtcttgtacttcggatggcgagtcaggctgcgcagctcgtggaagccatgcgcgaactggcacttttcgccgtacttgcacgtgccgctctcctcgaagggccggcacagctcggtcttgtagcgcgtggagttgatctgggagccgccgccccccttctgctgctgctgcaggtgcaggaggtgctggctgcgatcgccgttctcgctaaacgagcggtcccggaatttgttctccttgttgagcagggctgtgccgccgccccccgacggctccttaagggtgccgtaggaggtcggaccgccggccgccgcgctgccgcagctgctgccgttagcggcgcccgggaacttgggcgagcagctgccggggctgggcgcggggtgggcgagtgcatgcaggttgctggccgagtgccgtcggaggaatcccggcgcgaagcccgagctgggggcggcggccacaggcgtccccaccgccttcttgtccagcatgttgttcaggttgaggttggccagggatttctctgtctgccaaagggaggggagcggggaagggatgaaaaacggaaggggaagacagactcggggcgagccgcagaggaactcccagcctgattcttttcctttttttcccccactcttggcggatcccgactcggcctccaccctccacctatacacgcgcaaaaccagcaagatcttgctggacggagcgggagaggggaggacgcccaccgtgggccgcgctgggtttcgacacgtgatcctccgccccggctgccgaggtgggcggcgcgaagcctgtccgggaagccccgggcagcgtggccgcggtcggcagtggagaaactcaaccgcgacaccggcgccctccttgccgccctccccgcctccagggcgctcggacactcttttgcaaaccccgggactttcccgacctgaaaggcagggcgggaggggcgtcccccagaacctggggacagaggcaaagtccaagaactacaacggctgctgccggccgggcccgctccctggcctaccttgcacaagaagtcgacatcgtagaaggcggacagaagtgtggtcgacatgtttctggatcccgcagtggccggagcggcaggccgggaggtcgggaggagcccttggggcggcgtggccgggcttgagccacgacgaataacgggcgaggggcggggaggggccgaaagtttgccggggggcgagaggagagggcgagtgcagcggcgcgggccggcgggagggtccggcggagtgcggcaggggggaaggagagaagcgaggagcgctcctccgcgccccggggtgcccggcccgccccccccgcggagccgacggcagctcgcggactgctggaactcggcggcctccgagcgcgcgccctatatagagcccgggagtgcggctgcggcggggcgggcgcgccgggggaggggacagaactcggcccccgccggggtctccaggcaacgccgcccgcccgctcgcggacgtcaggcgccttcccggcctcccattggccgccgccaatttttttcctccgggggagggtgctggaggcctccgggcggggccggcggcccgggcggccggtgtggcgtgtagctctcggccccagtggatgccgccgggtggcggcgggaaggcacggctgttctcctccggggctgcgcggtcggagagccccggtacgtttagcgtggccgggattctgcagccctggacgtgtctttccctgccctgttctccgaggcggacctgtggagctttaagctcccaccttcggttttgtactgggcgcgggaattgcaaaatgccagaatatcgcaaccatccccgcggcccggcgggtttgcaaagggtgccccggccaggaggcgggggctcggggcctgcgtccagtcggtggcggctccagcccgactgcacgtggagtcgcggtgggggtgggggtggccacgcgggcggccgccgcggcagtcttgccggtggagcccgggctcgtttctccgccccctccccgcccaggctcagtaaacagggcttgagcgccggggcctgccgggcagggctgagtgtctgaggacaaggcgctggctttgctaatcacatcacaagaccttgagccagggccaaaggcgcggagtggcgcgggacgtcccgggcgggggagctgactctgaggacaggaggaaaggccgggagagccgtgcgggcttgaaggcgacttagcgccacctttccgtctgctggtcgggccggccttccccagccctctggggctgggggtgcagctgcctgccgaggctccccgcccggcacagcctgggcctgttgcgtcctcccagcctcttccctccccggcagtgggggcgccgcgcccagcctttgctcgatgagggctgcaggatccggctgagaccaacccgcggcgcaggtggggctgcacagacgctgatggtgggcgcgccaccctctgttttccctcactcgccagccccgcaccccaacagcttgcgctggaaaatgcgctttgccagcgggcgccccgccttcgtccgggtacggaggggacactcccatctagcgcccagtgaggctaaagccgctgacagccccactaggaacgatctggagtctggtctagggcacttctccctccgcgttcatacaggttgccacaaaaagcttgggcctgaagctcgaaggccccggacccgctggggaaagaactaggcctgccactcagggattcgagtccctggagtgtatcctgcatttcccactactgtactcccctcatggcccagggagccagagtccagggtaaggatcaggaatgctgggctggagttcaggtcctgccccagagaaatcatgtggtcttaggcaaatcacatcatctctttggtacttgggtttccttgttaaacgaagataatattcttgctttattcatctctcacctttggcaaggtgcaaatgatatctgtgaaggtgtttaaaagacaagcaagaactaaaccatctttatgtattaaaccaaattgacaaaagcgtaagggtggagaaagcctggcttctgaactgtggccagatggacagagagccacagaatcatgagtgcagagctgtgggggcacccaagtcctggaccctaggactcacagccaagagcaggtgacctcagagggaccagtttcacttttagcacctaccctacactgaccccttgacatacctgggcaactgtggtctggtttgttctttggtgagatgaccccaaacatctcaccaaactgtgaaacagccacttccctaggcactcctattaggttagtaacaagatttcagatacagaaccagtggaaacatctgtttgaaacaacgtccaaatctggggtgagtcccagtcaacagctgtgagaacacccactttgcagattaggattctggagataacatgtggacatgttacgggacatgcttgtgtacagagtacctgctagtataaaatgtctaatgtagctgcttttatttcattttaaatggagaaaaaaagaagtgctggccatttccaatgagctgggctttgttgggccagtttcattattatttttctgtggttatcaccacatttattttaccaagtccctcacttctcaccagctaggtcttagaacaaaaagtgttaggttggcagctttccatcaggtgtgggctacacagtttcctaactaggtaattaattcaggatcacaaaaaccacatttggggccgagtggttgcaaaaccacccagggaatttcctgttctctttaggacaaaactttggacactgagttaacttctttcctgcctcttcctacaaagcccctttcctatacttccagtatggctgcttttttgttcttaaattcctttcttttagtgatggggtcttgctgtgttactcaggctggagtgcagtggcctttcacaggcatgaactcctgggcgatcctcccacctcagcctcctgagtagctgggattacaagtgtgcaccatcatgcctggcttacagctgcatttttagtgttagatggttttctctcgaagagcgatgaattacatttgaaatatgagcttttctgcagtaggaaatgattgtaaactcactctcctctaacccgccccttcagactctgtgaaacatcaatgaaattactctaagtgatcatttacctgagtacttttttttttttacagaccctaaaatctggagcaaatttacatactatgaaatgtttttttcagatcagtaggatgaaaaatgaatgcggatgaagctactacccttccaaagctatgattctcaagataactattagtgggtaacacttattctgaaattataaatgaaaaatggtgagccagtgaaaaactggaccagcagcaaaacgtttgcaagagcgccacctgctggatgtgtgaggaagagggctgggctgggcttgaaaaggaagaaaatcattaaggtttctagattaaaatcactgcaaaggatgtgagagagagagagagagagtgagagtgtgtgtgtgtgtgtgtgtttgagtgtttgagacgagtctcactctgtcgcccaggctggagtgcagtggtgcgatctcggctcactgcaacctccgcttcccgggttcaagcaattctctgcctcagcctcccgagtggctg

SEQ ID NO: 37007 - DNA, 1461 bp, Homo sapiens
cctgctcttgtagcattagagctctttcctgagcatttcaaggcctgaagtcagagcagggaaaggaggaaggcagagccttgcctggagtccagcccacaaattttttttctcctagctacaaatttcaataccttactcttaagtcctggaaatgtcatttcttccattcccttctgcaggctccatgattggtacagagtggggagggaggggcagagagggtcctgcagctggggctccctgatgtccatacttctaagggctgagggtgctttggacattgcagggagagagttgttaacaggctgtgagtttcatgcttccctgtgtgggctgcagcatgtgcaggagattccagcaggcaaaaaaggtgaataagaaatctgttctcaggagggccggctaaccatggcattattttctccaggccttctagaatcattaactaatcaaatctagacctaaagccaattatgcaaaaggatatgttagggtgaggaagtctgaatgactgcatttaatgcttgcctattctacaggttccagaaagtgcccgtggggaccgataactagatctgttaaggagcactggagatcccaggatagctgtgctgcgttctgaggaaggcaggacagaacccagacagtttattctgttcccacagcagataaaggtctccctttgccctctccatttcgaatgttgagctctccaagacctaaggaaaactttgtcctggatcacagtgacttgtggcctctgagtgcctttcccgatttcctggtagtttcacttcctggaatgccacagtctgacttctacatcagtgccagaggcatgccttgttattttcccctggacacctcacaggtttgaaactctgaagtcacctcatgctttcccttctctcccacctcccacagcagcagtccccatgttgagattacccaacccccaaccagtattctcatacatcagtcctctcctctccatcccaaccccactgagagcagctggagaggactgttgctgccagcccccagctgatttccctgcctggcaaatcccctcactcagccccagccctggcccatcacacacactgctgccagagattccacaagtatgtctccggtaacatcagtctcctctgagtgccttcccacctcattcctgctttaaaccctctctagcttcccattacctgcagaaggagatcgggccttggcactgagccatcccacaagcaagtgcccctgccttgctcagttcatttcctgctcctcttccttgcctggcctgagcctgtgttctgaccacaaaagtccactcactgctgcccaatcagctcccgggttctccccaactcagggctttggctccaacttctctttctgcattgactgttctgctctcatttgtgtcacatctctcccttcctttgggcccactccact

SEQ ID NO: 37008 - DNA, 3244 bp, Homo sapiens
aagcaatatccatcgtccagatcaagaactcctttggggtcagatggacacagtgctccgtctggggaagccactcaccagggtccatgcagtggagaattttcagtatctgtgtaagccaaatccgcacacaaaaaagagaaataaatactcagggagatgtctctagatgttacatgataatcaattgtatcaacaagaggtctacctttcaaaaggctcccactgacttcttatttcccccataatacctttgggagactgaggcagagtgatgcaatgactaaccagagggcctctagtgacttgggatgggagccagatgccctgattttaggccagtgccctttccttttgattatgcttcccaggtggccaactgccctgaaatagccatgtcagcaaagactacctctgacacactctacagtgaatttttaatgatctgtttcctaaacatcccaaagtggtttgctctgtctttggttaatctctgccatcaatactcctatcatcaaaagcttttcttggtgccctaccaggtatgacgccatgccaaccaccataaaaagagagtccttatccactggctgccgaatctacttcctattgcccctggagagcctaaacccaatcttgccttcatgatcctaccattccagtggctcacaaaagaatgtggggagtgtaaagggccagtcagtacgttggagactttaccttgcagaagcattctgggtgattttccttcatggccaacaataagaacttctctcccatgttgcacagcaagggtggcacgcccttctctccaagtccagaggctgctgctaagaacttttccaagagggcttccagtgttagtgagcgcacttcagggaaggcagattctaacagctgagagaaagagatggggacattcgtctcccgctctccactcttggctgccgcggcccacactgcagcaatggctagtctggtgaggctctggaggtactggggcaggcctggcaccttgaaggcccaagggaatcccgttatcagctctgatcctgagataatccctctgacttcctcccagaagccaagactctccagaactaagaagcaaaaaaagcaaaagggaaagagataatcactttaaatttccacaaaaggacatgaaagaatgaagactgaatccactgcgtgaggccatcagatgtctcccataagcagatttcaaacactgtcataagtgagtggccctctaaggttcagacttctagtccacaacaatttccatttaggtaatgtataatttttccaacaggggcacaaaggcattactattagaaaatgcgttcctggcacccctcctcaacattcaataaatacgaactcagtgacctcttatcaccgagcctcaaagctgaccatgagaagaggacatctagtataaacttccttcaggggtgaagctcccctctgtaacaccctttcccagaagctcttggttgaaccctacagtaccctggagctcatgagacagcttattccattgttagtagatctaattgtcaaaaagttctttttgtgtttctactcactggcctaatgctacattttgaggctcccaatgacagctctttagacatttgattacaattcttgtgtcccctctgtcttctccagatgaaacattcctacttccttcctcaaatgatggggtcactgtctctcattattctagctgctttcctgtggacatgcctcaccctctcttaaaggatggccaataggctggatcacaaatctcctgcatggtttgacccgcaggactattactttctctgttctgaactggagttgcatcacactgttgactcatatggagcacaaagtcaactgaaaccacagcccttcttttttgacgtggtctactgatggtggtgagtcatctttctcccactttgtactcagtacttaagccaagatgtgttttctttgtttattttaagcccaagtatatccctgttaaattttatcctcctgttaagttttatggtctacctttcatttgccgagatcttttcatattctcagttctgattaaaaaaataaaaaaaccaaaaacttattgcctgcttactatgtgctaggagctaaataagatcactgcccttaaggagtttatagtcagtctagtttgagaaagagaaatgcatgaacacataattccaatatagtggtacaaatgataacctaggcctcaaagaggaagacaggtgacaatgtgttagcaccaccaaaggcaggggaaccagctgagcaaaggctcaacaaaggcatgaaacagaacggaccatgtggggaactacaggccatcccataacactggagcataaaatttgaggtgggaaagggcaggagatgaggctagggaagaaatgtggctagagtacagaaagcctcctagacaatgtgaagcagctagttctgtatgcaacggaatgccactggggggttattttaagcagtaaggtcaggggcccattttcactgaagtgctcttatcgttgaggaggcaatattagaggcagggagaccagttacaacactactgcaccgtagtccaggagagaaataaatgacgagggccttaagttcagaaggaatcaggagaaggtgggtttaagaaacgctgaaggtctgaagccaaggtgatcatttaaaaaggcaaaaaagaaagaaaaaaaaacactgaagggataaaactggcaggactagggaatgagggtgcggactagggtaggagtctcgggtacctcccagcacccagttcttcacacatgttcatcatctaatagaaattgggtaaaccagctgggcgtggtggctcatgcctgtaatcccaacattttgggagcccaaggtgggaggactgcttgagcccaggagtttgagaccagcctggacaacactgtgaaaatctatttctacaaaaaataaaaagtcagctgggtgggggatcacttgagcccaggaggttgaggatgcagtgagccaggatgctgacactgcattccagcctgggcgacaaagtgagaccctatctcaaaaacgcatacaaagtagttggcaaacttcaatttcacaggaatgcctaaatgcccaaaatcaaataattactaaaaatgtgggcaagctggagggtggaggcctttggtgagcaggctccctgctggcccttgcctcaaacgct

SEQ ID NO: 37009 - DNA, 472 bp, Homo sapiens
attgtagcattggtcagagctctgtaatcagatccaacaaaagtttttatctgaaatggtggataaactggttctaaaaataatcacagatgataatttgtacactcttaacgtcaatgtcctgttatgcaatttctccgttaaaaaaattatatttgtagagaaaaggaaaccataggaacaacaacaacaataacaacagaataaactgacttaataaatcttggcttctccttatcaaagggaaattccactcttctatttaatccttgaccctcccagtaaactgtaatcctgaccccaggggcccctccagttacaaacatgttgaatgacctggtggagggatttggaaactaactttgtctcaccctgaactagtactggttgtttatttcttgccttggtttgtttctggttctctgaaccccatcatctctgcttacacaggtgtggcccccatcacacacac

SEQ ID NO: 37010 - DNA, 587 bp, Homo sapiens
gttctttgaagatatataaatgaccaactagcactagaaaagatgctcaaactcattagtcattagggaaatgcaaatcaaaagcacaattagatcccagcactaggatggctattaataaaacagatggacagtaagagttggtaaggatattgagaaactggaaacttcatacactggtggtaaaaatgtaagatggttgcagactctttggaaacaatttagcaattcttcaaaaagttaaacttagagttggcatatggcccagacattccacttctaggtaaatacccaagagaattgaaaacacaggtcccagcaaaaacttgcccatgaatgctcatagcagcattattcataacaacccaaaagtgaaaacaacccaaatgtccatcaaactgatgaatggataaacaaaatgtgatatctatatactggaatattattcagccataaaaagaacaaaatgaccaacatggatgaaccttcaaaacatgttaagtgaaagaatccacacatgaaaggccacaaaggtatgattccatttacatgaaatatcttaaatagactttcaaaaactacttgca

SEQ ID NO: 37011 - DNA, 778 bp, Homo sapiens
ccccaggaggtcaaggctacagtgagccgtggtagcgccactgcactctaacctgggtgacagagcatgaccctgtctaaaaaaagggagaatagactaacagactaaaaatgagaggctcccaataactttaccggcatttcagacacaagataatttctccatcaatatccctatccaaagctattaatgttgagacaataattgagatacacacatccacacattgggaaatccaccgctggctccttcaccaaaaggtttcttacaggagctttcactgtgtggcctgggcatatttcctgagccccattctctgccacttgtgccttacactttaggttccagagggctaacttccttatggttctgcaaacctacagtgccgtttcatattgctgtgtctctgcctatgccgttacctaagcctggaattcccctacctgtgttggccacttggcaaaattctggctcactcttgatggccagtttgatgtcagccctctctcacccctcttctggcgtaatgctgtacctactacagacatttgttataatacttaatataccagatgaaaattatttatacacgtctttctcacttcctggaagtccctggagccaggactagctcttttatatttttgtatccctatatctcctaacacaaaggctagcaggtagcctgtgctcaacaatgctttgttgaattaaactgatttgagagcctcacacagcccattacttgacttgccacagaaggtaagagcccaacaaa

SEQ ID NO: 37012 - DNA, 1459 bp, Homo sapiens
aggtactttcaggtaccactgaaaggtactttcaatgtagtaatttattatttctaggatgcaatgaacaacagactgagtagtaaaaagcttccacaaattcaatgttcttaagacagagcacaggttctaaagcaaatctctgtttctaatgtaaactgcaattctgtgcacatgcctttcctccttgcatcaactttctgaaaacatttcttagttctttccacttattcatgaaagaacaatttttaaggcccctgaaagtaaaatttaccacccaaattcctaaaatgaatcaccaaatgccagatgaaggagactggtaactttgtatatcaggaaacaaaaaccagtctgcctgagtcatctctgtgatcaaagataacacagccacagccaaggcttggcgcaaacaaatagctctgcaagcgcatgccagaacctcatgtttaatggttttctcacattaaaatgcataagtcagctctgtgaaacaaggaagtgaaacctaggacactacatacataagaaatactctcttgagtttggtttcttacccttctgctccaaatccacttcaatttttggtagaaacacaaaaatgaaggtactgttttgtcaagagctaagcagaaaggtaatagctaactaatatgataggcttctgaaaggtttcatgagaaaattttaatacttcttggaggcctacatatttaggcctttgatccaaaatgaacaaagtaatcagaagacggcaaatgcctgaaaagatgtaacacaagaagtggtaataggctctaaaagaagagaaccctgttatattatttcatgaatactctatattcatggcttttttcaggtactacaaacgtaaaagagaagacgagtgggaattcatgccacatggcattaccatttacatgccacccattgcaccggctcgcagactcttccagagtgaagaggcagatgtcctgacatcctctcgaacccgtggacagaagatacataccagaaccaagcctgctccgtgctagccaggctcaacacaggaataacgcaaacatggggctatgtctttcaaaaggagtatctcctatcaacaccatccacctgccttggagcagacagggctcaaagaaaacattacttacacaggttctaatgagatcctgtacccacaatataagcaccttactctgaaacactgggggcaatggcaggaaaacccaggcctctgctttcacaagacccctcccaaagtttgtgtgtgtgtgtgtgtgtgtgtgtgtgtgtgtatacaagttatatatatatacacgcacacacacaatagttatatacaaaagttttacatataatatatataatagttatatatataatagtttttaatatatacaataggtttacatatataaaaaaatatataatatggccgggcgcggtggctcatgcc

SEQ ID NO: 37013 - DNA, 4677 bp, Homo sapiens
aaatttttacttgggctatcatattttttaattttctaaagctccttcttattcacagattgctcttaatttcatctcacctccctgagagtgtaacttactttttttccatctgttccctatattacagtatacctgcttctacggaattcccgtttttaaaaaatctctatttttctttctattgttgattataaattttaggtggcagctgtttcttggtatgcctgtagtacttctgtccgtcatacaaacacactttctctcttgcataagcacgtgctctcgctctctctctctctcacacacacacacacacacacacaaacacacacaacaatgcaaagagtaattctgtcagttaaaaacaggagcatattaaatgctataatgtgtaaaacaagggttagagagcaggctaacaagaagacacaagagaagcctatcctgaataagcagtattgcagaaaggcatttatgcaaaggataggttaggttctggcttatactcatccaaacacgctttccactatgtaaatctgaaaaacatcaattctaaatgcagaattaaaagatttttctcttcttctcaattcagctatgactaaggaaacagagacacaatagttactaaggaggcaggaaatccttccagctaaccaacttttacattctgttccttatggtcaaaacgttgaccacactgtggtagctctttttgactttatgaccttattactaagaccatcaattatattcactgttatttgtgcagacgaactgctcgattgccaaaagactacgctacagtgctatttaacctttcccaacagagactcattgaaactcatttggtaaaatgttttacctaaccttgcaaagatacttcctagtaaatatttgaggtatataaatacctccaagtagtcttaaaaatgtgcaaaactcatcattgttaaggcaaatactcatctaaattataaaatcacattaaaagtttaaaaaaagtcatgcattcagacaaaggtaatattccacataaactaaggcagttcaaatactatttatctgactacattcagcctacttccaatggcaattaaaaaataataatatgcacagcatttcattttagaaaaggctgctactacatcatggaatagaatgtgaaaccatgttccacagattatttattctgtggtggggtgggaatgaggaaatgcaaagtagagaaagagcaaaggtctagaaccagcctgaccagaggaataccacacagtggcagtgtaaccttgggtgattcattcaaccttgctaaataattttacattttcttttcttttctttttttttttaagcagagtctcgctctgtcactacattttgttttctataaaatgggaataatagtgcctacttagtggaattacttgagaaatgagataatgcatcaacaaatcacaaatctaactttgtaccttctgaacaaattacacacacattgttcttttgtcttggctcttgccaccaagtcctcttcctttccctcagcactttaaagatgagatgaaaggaatagagaggaaattagtataaattacaattaagttcaacacactcaagatactaagatactaagagtacaccagagaacataactcactttcaaacttacaatgcaaatagcttttaaaaatacacaaagtacaggcattgaaagcatgaataaaatttaggtctggcataaaaaattttacacagcattctgaatacattaacacctatactttgaaggaatcaaacactaaattttatatacgtgtgtgtgtgtgcacacacgtgccaaaggccaggaagacagctatgaagtgggatagaatgttccacatcggtagaaaaaacgtatttaggatatctacacacacacacacacacacacacacacacacacacacacacacacacacatgcacagtgagtgaggtgattaaaggagatgaaaatggcggtatacacaatgctactctcactctcctactcacacataataagataccaatatttggttttgatgtgcccattctagtagtaaaagtagacacttctgtgaacatatacacaaagaggtgcagatgcttcaataacaagtttatttgcttcttggaaaaggaaaccgtatttctcataattatttgtaattacaacagacttactagtagttgagtctctactaaaataatttaaagtcaatcttaacagttttccaaaaacaccttcaaatttgccaggaaacaaggagcctagaaaaatgactgatacaaagactaaataaaaacaatgaattgaaggaacagttactgatagttttcatatgtaaattctggcattccatcttatttttaattaattccattaaactggtgtttcataggtcagaggattttatgactatacaccaaaaatgttatttaaaattcagttatagggaaccgcccacaaatattttctaacacttttttcttttgtccaattcaaattgtttttgcttcacttttttctcctttaagtccaatttcattctttttattcacttccacttcctgtctttgcccttcaacaaggagtactccattataaagtctattccattctttctggaatctacatagcaccaaactaatctgcacatacactgaggatgagaaaggaaaaaaaaaatcccaggtgataggggatatccttacatacacacacagtctcactgtcctctacctctcgacaaaaaacaaaacaaaacaaaacaaacacaaccataaatagaatggccaaggcttatttatggaaaggaaaaagggtagcacaggataacatgaaaatactgccaaagaagccttcatctcctctggcctaatttaaatagggttactcaagttcatggattggtaatggatgatgttgcaagataagataaatcaaagagtcatcactaaaatattattttattctaaggacagtctgcgtcgtatgttttgacctaaaagatatgactcacagggagcccaggattccttttcctttcttccctgaaatgtgagcaaaagcaaaaaggggtgaaggtgccatataccaagagtccaatgccacctgaatgatgatttcattgtgctattcatcagatatgtaacttggggaagtcacctaacttctgagcctcagtttcctcatctattaaatggggataactatacctaaccaaattaacttcctcacatggttaccattaggatcaaatgagataagagatctgcaagtactttgaaatcaccaagttctgctgattcgaccgcctatctctcaattctattcacttttttcaacccctactgtcactatcctaattctgatcaccaacattttcatcctagcctacatctccggtttacaaatatcagaccacatgccagtgcccattcatgaagaaaatgaaaacaaccaaaacaacaacaaaaaaccccacagtgcaatgccgtaaattctgcataaagctaaggtattctatttaaatatctaatattaatttgagattcctaaagggggatgtatatatgtggttatgtatgtgaaaatgtcctttaatttatgaaatgattctgacatgtaatatgctttttaatgtacttatttaacaaaattaaagggttgataactgtattatgttgatcttcaaaataaaaaaaaaattttgctggttcacaaaacagaaaagtctaggtaccacttgtcttgtctacattattctaacaaacaaaattattcaaacaaacagatctctcagtcttgagcacaactttccaatccagccacatcagccaaaatgatcatactaaagcaaatcctgttatacctgtgtttaagatactttctttgctcccatgtccttgagttagctgacaaggtccccagctcacttcaggctgccctctctgtaccctgtgcattttcatcctgacttttgcacgggagcagtcaccctcacctccactcctctttcccaaataaatattgcacatccttcctctcacccattatctttcttgctctaggatgtcttccttgactcccccaatcccagattatatgcatttcccatgtgcttttataagtgtttacatcccttgttgtagaccttctttcatacatttgattaatacttactgagcttctgctatgtcaggcactgctctaggtgttgaagataaaacactgaatgaggcaaatacccaccctccaaagagctgatattctagtaagagaaaacagactagaaactaaaagtcaaaataataataaggaagtaaaatatccagtgattactcatccctgtatctcatgaacctagtacaatgcctgggtcctggctggttctcaaaaaatatttgttgaatgaataaatacacacatgttaaacagtgctgtgtgaatgtgagggactgactactgtgtacataggtccatactggctattaaaatctctcagagtctggcccaagcttccagaagccaaagcatgctgtgtcagttagggcattcactactgtagacttgttttttaaaaaactgagtttgcctactttttaaaaacaaaaacaaaaaaacaagtttgcaaaagtagaaatt

SEQ ID NO: 37014 - DNA, 951 bp, Homo sapiens
ctgcctagtaaattctcgggttccacaaattactttctgttaacttagattgttaactaaactggttggtttaatctctgaaatatttttaatataaataatatgttaaagactatcacttttccccatctttgctgagccaccaccatcttttggtagaactattacaatagcttcctgactggtcttcttccttccctcttgctatcttacaatcaagtctccacttttacctacatcaatcacatcccatgactcccctgctataaatttctttcatgcagagcttttcaacacagtagaagtcattatttcaaacctcaggtctgttccaactatatccatggaagctctggttcatccagccactttcagactcagatgagatgccacatcactggacatgcgatctggcttccctagcagctgcccaagggttgtgccaacacctgcccaaattgtggtaatgccccaaggatgaactttgaccagtaaaagacaaacatattgggctgttccaaaaggtggtagtttcacatggtctggctagaagatgcaccatgtacaagacaaccagctcagattttctgcaaggttaaggttcccttggtaatatcattcatctttccttgcctcacttccctttttctttcattcctgctggtcttggttagtaccactcaataaaatgttaggacccgggctttacttccagctctgtttaataagaaaatagggccaaaaccctagaaggtaggtaaaatgtaccttctttgtattcttaaaatacccaaacatctcctctacaatagcacacattctggagttggacaggtaatagttttgtgtccttaggcagagttatttcatctctctgagccttgttttcttcatctgtaaaatgaggattataacagaacatacctggataacagaagctactaagataat

SEQ ID NO: 37015 - DNA, 1213 bp, Homo sapiens
aatataatatataatattttatatataatatataatatataatatataatattttatatataatatatataaactatatatacacacacacatataaaacagataagatgaattctaacgaattcgtgacttagaagatagttttctgggaaatttacccaaaacagtatacagaatgaaaaaaccataaagtatgtgtgtgtatatacataacgatagttccatacctggaaaaagcatagcaaaattgtgattaataaaaaaacttacaagccacaggagatttaaaggaaaaaaaactggagatctacaaaggaacatcaattataccaaacacaagtttctcactggcaataacaaaagcagtgaaggaaaacaactgtccaccagaattgtataccccgttaaagtacattcaaaagcataggtaagaaaaagacaatctgaaatatacaaagattaagtctgccttccagagactctcaccaaaagaaattctaaaggatgtacttcaacaaagtacacctaaagtagtttcaatggggtgtctactagacatgccaaacttaacatgccccaaactaaactcctgatcttcctccaaaaacctactctacccacagtcttgcccatcctaataaaagaataacaaatcgatctcttcaggggctcaagccaaaaactttgtagttatgctctctctctcaaatagcaaatctaatctgtcaacaaaccttgcctgctctatcttcacgttacatccagattcagatcacgttttacttcctccaccactttccaagtcatcactatctcttttctgtagtatagcaatattgtaactaatcggtctttctgttttcactattatagtctattatcaacacagaagtaagagtaatccttttaaaagatgagatcatgtcactcctctgttcacaaacactccaatggctccccattttactcagagtaaaagccaaagttcttacacaatgtcttaggctgtctagtcctcacaacttctctgatctcatctacaactctttcctatgctcacactactccagtcataattggtttacctgatgttccttaaatacctaccctaagcccaagcctctcaggactttttcacctgacattctctctgccgtgaatactcttcctccaggtatttacatcgtggttgtacaactgctaattttagtat

SEQ ID NO: 37016 - DNA, 1465 bp, Homo sapiens
gtctttaacgtctgtcttgtaaattatgtgacttacttatctaatcccaaagattaaaatgctaggttgaaagttcctctaaaaacaaggcccatgttttatcaatatttttatcctagctatcacaattccttatagaaagcaataatcaataaacttttgttaaactgctaacctctgaaatgctatgaaattccagaaaaacatttagattctagtgctggctcaatcaccaactacatgtgtagctatagataaatcacttgattctcagtgctttagaatgaaaataaaataaaaatgctttgaaaattcaatgaacattccctgggttatatagagaagataatgactctaaaatacataagtagttcctgatgagaatgtccccaaaactcctcatcatggtcccatacaatccttagtcccttattcaagtcctcacatccctctcttacttccacagttatatgtttcctatttagactctggtaattatgtctaggttcacagtaactgtggcctaccatatcatattctcaatggtcaaagagagctcagtcaaacacagcatctggcacacagtagatgtttaagaaatcttttgttgaataattaaggagcaactagtgctggtgccagctggcgcacattagctgtgcctgcaggtaggcataaaattgacaaaccaggtataaaaagcagggagctggaaccctaagtcttctcaatagtgaggtcactgtgcctataaaaagcagaatagagttctgactattcaatgaaccttctgtctgctccccagcaaggaaagatttctttataaggaagtgatttcaaaactccagggttgctggtgtttatgataatgaaggaattgagaggtaaaaatgaaaccatgcaaggttcccaagaacaatacagcaaaccctagttgtttgttttggttcttcatcacacaatccagggcctagcaaggatataaaaagaaaggttctcgagtgaaacagtccttggttctttgagccaactctatgtagtcaccaaccacagctatggggaattccaaaatcctgcttttgttagtgaatgcctttccactaaataagcagacagcctcttgtctgaaggtattttgtttttatttggctatcttgtcgaattaatacaaaatatacagtgtctttagcctctgagtacattgtaaaattgcaaccttcttaaaaggggttcaaggttcatcataaacaactcagtaacacaaaatgttattaatctacaaaatatggccaggcgcggtggctcatgcttgtaatcccaacactttgggaagccaaggccggaggatctcttgatctcaggagttggagaccagcctgggcaacacggcacaagcccatctctacaaaaaatacaaagaaattagccaggcatggtggtgcacacctgtagtcccagctactca

SEQ ID NO: 37017 - DNA, 3786 bp, Homo sapiens
ttgtacaggaacactatgaaagaacctttcattatgtgattacagtgaaggaggaaagtcagacatgcctctgaatgaacacattttcctcctggagaaactggtgacagcacactgcttcacaggaagtgctctagggaatcaatcatttaagaaaaagttcagtagcaagtcatcttactgtcctgttgcttgcgaaaatttacctggatatgggaaatacagaaaattaaacttaaagaaaaattaaatgagcagctcacaaaggcagcactgtgccatgtcagaacacaggctggcaaggagaagaactgggttcctgttccagagctgccacaaactagctttgcaatcttgggcaaaccaggtaacatccagggttcagcttcctcttgtccaagagagctggataatatcatctctatgatccttccagctctaatggtttgtgaatatatcactgaaaactcagaattataaacaagccccatttcttctccccacacagcaacaaaaaaccccaaactgtaatctccctaccttttatactcctatatgggggatttaagtggccaccggtttaaacaaggagctgtaaaatcaggatgattttaaacggactgtcatctacattcaagtcatcaaatttcaaaatagaatagaattgtattttagactgtatggaatggctttcttcatccattgagagaaaagtagatcacagttactactctgaagaataagaaatgcaagttccacattctcccctctaactagggttgcattctgcctgcaagtcacttcactgcctccgtgtattcagacggcagtcacattcacctaaggcttgactcttaaactcatagttttaccactaggcacagatctagctttgccagggcaactatgctcttggaagggtgtacctcaggtgtggcccagccattccaatgtaaatgatgttcttctctgtcatttatatttttaactcttaaaggttttaagcacatgtaagtatatttaattattattaatttaaaggaagttcatggggcaaaaggttatgtttaaaagcaggaattctccagtaatgtaaataacactaatttcttgatgactttggatttttattgactcctaaactgagacatttctttagctaaagtcagcaatacgaagaatcaagtttttcataggggacggggttccagtgttagaacactgctattacatatacagttcatcgctcattcagtcatcagtttcttctcacgcctatgtatgtgaggttaccatgtgaatggcaacatagaaaaatgactggacctcattacaacggaaactaatgttttacagaaaaacagtcaggatcttattttttatttaagcagtcactggaagaattctttggtttataagaacctgtctttttgtgataattgtttttttttttaacaaacatctcttattttacattaattcccaattttaacacggctgtcgcacacaaattaaatacataagatttgggtgctatgtgaaaagtgtcaaggcaaaataatgttcataggaagctttcacgtcttagttacagtaaaagcaaaatacacttcccttaatttgttttttaaacactacccaacaaacccaaaaaactaaatgttttaacttgtccttggaaagagaagttgggaaatcaaaggcctctagcacatgtttacttcttagcaagatggtgaacatcagtgaagtaatcattaatcatagctggattcctcagcaaagatgttggcattggcactacagccagtcaccagcaatgactgcaagtaactctaggacactgacgcctatttgatttggaagagaataaggaacataatgatgcctgaaatgtcctgtgcgcctttgcctttcttcatctcaaggccttgcaacatcacaagcgcagctgttaaccagatgcatgcaacataagccacagagtgtgagaaaaaaagtattagcattatttccatggaactagtcatgtggttattatagaaataatcagcattagcatactacaatatttgttttgttcttgaattgtaacaccctagggaaaaagttgcctttatttttaaaaagttaaaaatgaaagtacatgttatatatctttgctgaaaaatggtgggaaatggatttgtcaaaaccatatggaaaggaagagggaatcaattaaaaacagaaatctaataaatctaaaatatttccaaatgaaatgcttgtggtaagctaacttcttgtaaacaccgcactcaagtcacttgaacagtcccagatggtgaactaactttgtggtcttaaaacaaaagtcagccaaaaaaaccaagactacaactttattatcaatgcagtgggaaacatgagatccataatcaaccaacatgttactttttttctttccaaaatttaagagatttgtggagttttactaaataagacaattttaagctaaagtttaagtctgtgtatgtgaaatggagaaataaaaattagagataaaactacagttaaaagtgaggtaaaatctacagttatttatataccttagaaaaaatttctaaaaatgccacagttttgaaatgtattataaagtctaacattctaaattaccatgaactttcttcagttaacatttgtatgattttattcaagaaaaattttaaacctttttttagagttgggttataaaaaaaaaagtgatttatgcgttgaccagaaattatacatggtggaataaacatgtgccttacctgctccaccgtcaataatccatcagaagattctggcacaggctgcatgggcagaagctggcacaacatgcctaaaagtaaagcaacttccttcatacttctccaacaacataccagcaccatctgcgcagttacatcacatgtttttacttctttaccttaaacaaaaaaaaacacaacgattgcaaccttgattactcatatcccaggtttctaaaaacaagcttattcataatttccccaagaataatctgcttgaacaaacccgatttgtcatgttatatttactcagaaggaaagaagctaacatttgtcgagcatgtgttatgagaagaaatcatgctaagtttttttttttttcttttttggagacagggtctcgctctgtcacccaggctggggtgcagtagcatgctcatggctcactgcagccttgacctcccaggctcatgcaatccttctacttcagcctccctagtagctgggactacaggtatgcgccaccacacccagttaatttttgtatttttttgtaaagacagggtttcaccacatcacctcctggactaaagcaattctctcgcttgggcctcccaaagtgctgggattatagacatgagccaccatgccaggcccagtattttaatttattattttcaaattaaattttaaaataaaacacaatattgttccaaaacttgtttaatctttaatttccaaagattaaacaaactctgcctctctgtcataaagtatgatatggatgactataataaatacactccttatttattttggtgagcatgactgttgcattagtaaaggagtagaatataacttttaaaatcaaaggaaaatacaaattatctttcaaaatatatttaattcccatggccaataagctataattagccttacttactctcttattctagttttaggagtatttttggtactgatatttttttaaaatccaagatgaactatt

SEQ ID NO: 37018 - DNA, 2024 bp, Homo sapiens
caatttccaaaccagtgcctggcacatagtaggtgtttaacaaacacttcacgaataaacaaattaattaacaaacatttgtcagagatgttctagaagggatatatgtctttaagggcaggaaggtggactatctggtacctaaaatgcattctacatctaagtgacattctacatcttaagaacctatggtctgtttgggaagtaagaaatccatacagtaatggcaggtgagcaaccacttaaccaaaaatggacgcagctaggaaagtgtcgacaacagaataatttgtaaagggatagtcagatctagaggaatagaggcacgcttcctaagaaagtgaccatcgtacaaagccagaagagactgggaaacctaactagggagactattctctggtgaaaggtaagcaagtttgcaggaggatttgctcttgcaattctgagggctacacaaaagcagactcggtaattatgcctgctcaaatgatgcctaaacgtgtgtcctgaagaaccagggtccccaagggggtaaatcccgtgtctaccgcaaggccagaaggtgcccagtaaattacactcctcctaggtcccacttactgcttccctttagaacgctgcttcactctacaccttcctggctgactcccacaaacattctctgggcgatttctgaaccacgtggagtcgaggaatgacagtgggagaaagtggttaaagtgctgtctccatggagaccttagcgaccggaaatcagtttcacagccgccgaatcctggcgataccaaaggatgggaattggtgtggctcgccaggcagccctagcaaaactggccgagccgagctaccgcgggtctggcaggcaggacacctgggagccaaacctcgtgcacgtcggcgtctgagaagagtcgcaggcgcctggtccagtcccggaagcaggtctccttctacggcgtctccgaggctcgcagcgcggtccacggtcgactaccgggtcagggcaaagggagggagagaggggtaacctggaggagtcatcgcgagaattgaccaaacgcagctcctccaatcaggagttcgaggaggtcgtgacgtcaccggggtggccggtagcaatccggtttagttaaccagccactgtaccgtcagcgccgcgcgttcctcatggcgttagggctgacgggccttgttgctgaggggccttcattcaacggtctcttgttgaatgaaaagacctcattctcttcacatgcttggacgcctgggaagcgcttttctcccaatccagaccttccacctttctcccactctgttggcccagtgcagagtctaggagaaaactacgtctgggactcgggaacgagtccagggagtttagagcctgcgagatggggcaggggtttgggcggcgactgaacggaagccacgagaaggattcggactaaaatgagtagtgctgaaccaacgtgtgccaaagcgcatatattcattcaatagataatgaactctactgtcagagcgtcgccaagcgctagccttgaaagctatcccctactgaggatacatgtattacgcagcacatacaaattgtcagatggttcagtccttgaaaaataaatacaataacggggtgtcactgggagctgcgacagtgggcaagatcaggaaagacctgatgctattatcaggagtattaatttggaaaatagagacatttcagttctctaaacgttaatgacttaagtttttaataattattttctgaattttttatatcagcttgccttggttttctttatagctttaccacataatgtatgtatcactatcttgtttcgttcaattttgaagcttttggaattgcgtatgtattctccagcaatttgcttctttcagcattgcttttcatattcacctacaggtggctgtagtgctcttcgcccaggctggagtgcagtggcgcgatctcggctcactgcaaactctgcctcccgggttcaagtgattctcctgcctcagcc

SEQ ID NO: 37019 - DNA, 675 bp, Homo sapiens
atcctacagtatgtgccttttaaatgactggcttctttcattaagtataatgttttcaaggtttatcaatgttgtagcatgtatcagtactttatttctttttaccactgaataatattccattgtaccatgtgtttttctcagcatagacaaagataggatgctgttccgctgtattctccatacccagacaaattcagtttgtcatgtttctagaaaaaggtgacagtaagtaaatattggctaagccttacaagggtggcagccgtgtttacaaagcggcttttcatgagtgactttattcactcagttcttttagtctaattagtatttctgactcacaaacggaagtgattctattttggcattctttctctctttctcctgcttggtctctactgacttgctgtgttaaattatgcaagttactgaaactctgtttgtttaactcctgcgtgctctataaaataagcccagtccagtctgcttgtttgccaaagctgtttgaagacaatttttcatatgatatgcatcatcagctcccacagaaggcaaaaggaatttgatgtgtgggggtagtctgggatcctgttcaaaattaatgctcatctggaagaaatatgaaagcctgatacttgcttactggacttttagttgtattcacttattgctttt

SEQ ID NO: 37020 - DNA, 901 bp, Homo sapiens
atctcgttctaggaggtaacaaggagttactaacttgggatctaaaagcaatcctaaggcttgaggccgagaatgagatgtaaaaggactcctgaaaactacatttcccatgatgcccgtctccccacgcaaccgcggccgcgacgtcgctcccatggcaacccagaaggcctcactcccagactccttgcggagctcgccgcctgattctaggctggtcactactccgagcctgtgacgtttgcggcagccaggccgtcgacgatgcccaggtattccctgaacccggcttgcgtgggaaaggctactgagagtattcctggagagaggaagcccaggcgggaccagctgttggaagattgtgggggtggctacttgccaccaggatatgcagggtcggggacctaggaatcagccttgagcataaagattctgccgcaaacaggaaagaaaagaaagttccctaggtagaaaagtgagagatttggaaagatcagcaactccacccattcaatgattgaataaaagtttcttgcaggccagagactacttccggagcaggacattcggcgatgagctagaccacaaagcctcctctccccaggggcctcccctcctggtgcgggggttcgcagtaataagcgaggggaaacttggaaggcactgtggaaagtataacatcacttttaaggggggaaacgggagagggtttgtaaactatattctagctgttcaattctatgatattcattttaattacctgttcacaagatattcctaaaccttttctcaacaatttatgcttaagcacgtcggggagaggggtcagggagtgcatcacagagcaggataaatctttttctctccttgggatagtgtggagaattgtcagctttccatc

SEQ ID NO: 37021 - DNA, 905 bp, Homo sapiens
ctggctaattttttttgcttttttagtagaaacggggtttcaccatcttggccaggctggtcttgaactcctgacctcgtgatccatccgccttggcctcccaaagtgctgggattacaggcatgagccagtgcgcctggcctagatttttctaaaaacaaacaagcaaacttagattttagttttatttgataaaatgagacgttgtacagaatctgtccttatatgagtaaacttatatatgctaagcactagatcgaaagccccagcaacttctcaggtggcagtcacgttgttgcgagggtaacctgaaaacagctgtcagctgggagtaggagccagggtttttttctcagtattcaccttcgggggctgttggagaagtaagcaaaacattttatgtaaacggtccagaagacttttgaaaaatatgccatgaatatttagaggttttatagctgtagcaaagtgagaggcatgttgtagaaacaggaaaatgaccttatgtaacccttattatgtttgcagcctggctataaggattagttggaagtcatccctgattaatatttatctaggagtcaatgattaactgttgttgttgataagaatatctgtttatattgtataatgatcacttttattaagttcatatacatcagtattattaaaggattagggtatttgtgagcatcatgagttttcacattcaaatctgtcttctctaaatgacttaaaaccataagaattttgtgtggaaaaggaaggcagccccacagtacccatatcacccttcattcatctcttgtatctcactgccagcagatcaccaattcctgtcatctcttggttcgagatttttttttaacctacctgaaaagttatgctgtcctaagtttgcctct

SEQ ID NO: 37022 - DNA, 831 bp, Homo sapiens
cttccagttaaagacaaagtttgcagtaaacaatttgtttattctttatgagttaatctttaaaaccgcaagtggtagataactggtgaactgaattagctttattagaaaaaaataaaacaagctgtaaagactacatatgattattaccatgaaaattcttcctagaatccaatgaggaagttaaaggaaaaaaaaaaacacacaaggaaaaattcttcctaagtctatataccattttgaaacatttaacatttaaattttagtaacttagggtataggtatgaaaggtacgctctgcaatttttctgaaaattagaatggattttcttttcatagcaactgtgaacttcagttatgttagccaaagggcattgattgcctcatcttgcagagtaaccacgttttatttgaagtagtgacaacctttgtacagttatttagacattgaacaacatgtaggaggccaagaggcatccccttagatggtcccttttacatgtcagttgccttgtgcaggatagccacctccactaaaatttatttatgaattgtaaaggtaagatatactccttgtgaaaaaattcaagagctatagatagatgtatataaaatagaaaatggaagtatcctgccctctccctatctgtgtgcttttttcatgtggcacacattatgttttcatgtggccactgttatttttgctggctgccttggaagccacctgtgaatgaacgctaattatttaatcagtccttactgggggacatcaaagttgtttccagttgtgctgagacagagcaatgggtttccttcttttacatccttgtg

SEQ ID NO: 37023 - DNA, 965 bp, Homo sapiens
attctgtactcttggtgtgatttgatttctgcatttttcataaatattaacaatccacttaagcaacacggacaaatacaatatcatggtcttcgtgtgaaaaaatatcctccttgatttatcaaagcctaattcactttgctttataatatctcacttcgtataactcactgcaatttataatgtgttttcatattgattatttccgttccttctcatgatcccttgaggcaggtggggctgaaatagtgatctcttttttataaatgaggaaactaatttagatagaaaagagactggcaagtggtagaggaagtttctgactcataggtcagcctctctccacgaagtcacgtgcgtcacagccttcatagtggtgtgacttgagcaaagtcaagtctgagcttcattttcttatctgaaaatggattgctctgagagttaaataattaaacacacacatatacttttatatagtagatgctcagtaatgcttttgctttttgacttgatttttacatttttaagtcaaagaaacagccttcatgtttccttggggacccagagattacttactagatcccactcacaccacctgcctgggatcatttttagccttttaaaattttctgccctttttgctgctgctttttaaaaatgtgtgtggatacattttttcctggttataaaatgatacttgtccattacagaacattgataaaatacagaaatatgaagaaaaaaattaaaatcaatatcactattgatattgattttagagatagagataattactgctatcatttggtgcatatcctttaagccttgatactctttggagcagtcttttatcctgcaggcttttttttttttgtctgactagtcttaattcctaagaataactgggaattgagaactgcagttcacactcaacagtaccaggtcagaaatgaactaatgcatgc

SEQ ID NO: 37024 - DNA, 1256 bp, Homo sapiens
ccaaaagatgtcacccatgtgtttttaaatgcatgtatgtacatggatatacaattggtacaggagtactggccataatacctcatcccatcaagataaaatttgtggttaatgcccacctataaaatcagaatactttaaagcatcccagcagggccttgaggatcccattgggattgtctgggagaattcagaagctcagctaattatgctctgataaagtagtagcagtgcgccagtttgtttgagagagatccctgacctcattctgatagtcatctctggcaagttcattgacccggccaaattgattccttgaagagtataaaacacaaaaacaaaagcaaaaatcaaatccactagactggtgtcatccaggcagaagtctgagatgagaaagtttaaaaaacattcatgatggggaatgtgaaagaaaaacttactatagaagtcaaaagggtttgaatgttcaggacaagggtaaccgcagtcattgaagaaatcaagcatttccgctggcgtgccacagaaaatcagctctccgaagctcaggatggcaattttgtcaaagagctgaccagacaacagacgtagttagtgtgtgatcacaagggtagcgatgcactttgaatgtctctgggaacactgatgcagggccaaggtcaggtattccttatggtcaccaagtccttatgggaaatgcatttcccataagcagtcagtccttcgatgaccttggccctgcatcagtattcttggagacattcgaaatgcatccctacccttgtgagcctaggctaccactgtgggtcatgctgcctcccatcctgacgcccagcttcatatctgggatagacaagcatgactggacctgggcgtaagtcccagccaagccaagtgagtgacctcgggcgagcaggggtgggtcttagtttgtttttttgttttcattttaaatctcagctcctcctctgtaaaaagcaaataatagctaactaaagggatactgggcggagaaagtgagtttttttggaaggaaatcagtatgatttcgtggaaaaacacagcctttgaagccaacttggctgtgaaaggctaatgctagctttttactattaacaactgtgtgatcttggcttaatttgttgttgttttgttgttattgttgttgttgttgttgtttctgagaccgaatctcactctgtcacccaggctggagtgcagtggcacaatcccagctctctgcaacctcctgg

SEQ ID NO: 37025 - DNA, 554 bp, Homo sapiens
gccactaaattttgggatacttttttttttataataatgaatttagttttttaaaaaaatgtgtcaagtatttgttaactcattaatgagggaaccagcaagatgacaaagctcattcaaaagaggatatgagaggctgggcgtggtggctcatgcctgtaatcccagcactttgggaggccaaggcggatggatcataaggttaatgccctaaagggcgataaaactatgacatttgcaactaaataatctgcaaagaagcatctaacccagagtctacgccctcctcaacagcaaataacaattcaaataagttggagttcccctggagttggatggctctgtgcaggcttgctttagactatactctagtgagactttgaacgtatatgtcatcatcttttgcctcgctaatgaagatttgatagataatactgcttgagataagacaccaatgaaattgtcattttatgcaatactatggagtaattcataaaattattttactcctttattcaacaaatatttattaagcacccactacgtgaccgacc

SEQ ID NO: 37026 - DNA, 3014 bp, Homo sapiens
tcaatgtggagtttaactcaagccaaatcctttttagaatcctccttcccaagcttacctgagcttcctaggatgcacatgatctgcccgctctccacgtacaaggagacatctttgaggatctgcctggtccactgctgccggcaagatgtgatgtcccaccagggcctcacgcggtggctttaaaggaaaccccaggaaggcaaaggcagcttggggccctggaaggggccacacccaggtccccagcattgatcctacctgtgccccaccccagtagtctccggacaggctcctaacgtgtttcagtctctgcgccctcctctgtagaacctggcagatagcgactgaggctgtctgccacgtagggagggggcctgtgctggagttgctctgaatgtcctgtccgtttggctgcgaggtggctgtccctgcattctttcaccaggtttcaagactccttgcattcgcagtacccccattcccatccacagagggcaggccgtagacactgggttggcagggcactgctgccactttgtttatgcccaggcccttccctgggcagggggaggggccattcactgtcgctccatgtttcccagcacagcccttctccctctcctctctccacccgatccactaaagagggagcccgaagtgcccagactggcacttaaagagtgaagaaaggcagcagaggggtgagcgccgggccccgcactcctgggggagcagcagcagcaagggctctgccttacctgacgctgtaggaggcatggaggatgcccaggctgtgaggctccggggcggtggcaggagccccctccagggagctctgggagcctctgtttacttggagacccatggaccctccgggggtcaaagatgagaggtcacccatggccaacaggcagcaaagctgggcaaattttctggtggccggaccctccccagagtggcttcagttggggagcccgtggcagactgccctgcctgctccacctgaccccggagtcccttgggacagcaggactgggacttggccacggagaccattatctgatgtacctttagccagcgcgtccttatcttgacagtgggcagaacacacacgtttgtaggtgggcttgccagcaaggaatgctgggagagacgggcccagggcaggaggccgaggtgtccctgctccaggaaacagagtgaagacactggccctggcaggcagcagctgggtctaagagagctgcagcccagggtcacagacctgtgggccccatggccgggaaggcggcagaggagagagggctgccgaaaggggccactccccaggatacctcggtgagtgagcaatgggaagtcggcccaggcctggtgggcgggtaggagaaatcaaacctttctctcttccctcaggagccttctgtcctagcaccacccggacatcaagcagtgtgaggacatggccgcaggactgtttcctgcatgtcaaagggcggaggggaacagattcagggtcccagaggcctctgaggtcacttcctgccctaagaaatgctcttttagggaaatgatgttcttttgtgtgatgtgggacaatttcactttttcttttttcttttcttctctttttttttttttttttttttttttttttttttttttttttgagacggagtctcgctctgttgcccaggctggagtgcagtggcgtgatctcggctcactgcaagctctgcctcctaggttcaagtgattctcctgcctcagcctcccaagtagctgagattacaggcacctgccaccacacctggcaaattttgtattttttagtagagacagtgtttcaccatgttggtcaggctcaaactcctgacctcaggttacccaccctcctcggcctcccaaagtgctgggattacaggcatgagccaccgtgcctggccagtttcgctttttccgaatgagactccatcatagaaatgtgctcacacatgccagggactccactggtgtctcctccatccatgtggctgtcaggttggtctcagtaatgaagtgatgggtgagacagggtgacagacggcttttgtgggaacatcagcatgtgtggctctaacaggcaatcgtaagttctgcgagaaagctggaaggagtagaagcagccaggtggcaggaggtggaggtatgtttccttcctcattttacctgagaagtgtttactcaagaaatagcctttgactgaattcgggatgtggcaggatttgaagcaggaggctaaactggaagacaagcgagaagcagatccccactcccaccacctcaccccatcctacctttccatctttgcctgttgtgggtaggagggaggagagaaagacaagcatgatcgaggattccacacccaatggggaaaacaacctggactggccttgagtttccaggacttgactcggccagacccaaggagcccaccatttctagtcagttctgcaaccaccacatctgaccagctctgctctctgaataccctgtggggcccaccacttcgggaaatgtttaaagcctgaatagaatagaaagtcagcgggactttgggaacacttcctgcctgggagggctgacgattcagccaccacagcttgagaggcaaagaaatgctaggaccacaccagaaatgcacgcaggccctgccatttctgcttcccttctgtccgatcctgtcactccaggtgctgagtgacggtctgcccgtaacacctgtgggtcttggaacaagaggatgagggtcacatttcctatgtctagatatataaaagtcatcagtcaagctataagaacagttaaataaaatagtttctatcctcttatcttgacatatcttcctcacaacctgaaaggccatgtgtaaattgagaaattctaaggcaacttggctagaatgcgctggtacgggggagccacttccagcccgagccacaacctgtcccccttttctggccccctcagctcca

SEQ ID NO: 37027 - DNA, 959 bp, Homo sapiens
ctgtttggcctcaggagatattaagccagctgcagggaagagaaagttaaaggcaaagagtttgcccactccagtcaggtcttctcagagcacagaggtttttttatagaactctctccggtccagagtctgggtctctttaccagaagctgcttggcttcaggctccaccagcctgaggttgaggttctctgggaaggtgccccgggagaagccccaaacctctctctgaagggaagaggagatgggcccttgtcagcactcctattttcccaaagccctgaggttccacctgtgcaatcccatctgttgccaatttgagatttaaccacgtcggctctaagaagttgctctcacctgttggtttccttcttgtcttctcctatgttctcagcagcttctaaaggagcccctcatctctcctgtctcccacagggcctccaggatagattgttctcctctgaaagtgacaacagcctgtacttcacctacagtggccagcccaacaccctggaggtcagagacctcaactaccaggtagaggcacgcctgggttcaaggggagaggagcaggcagggacagccaggaaattccccgggtggaaataaaagggtgggcccaacttgcaggccctctgcccgcaaggacagagtccagtccacattgatgcctcacgtgtcaggtgcaataggtgtcatcaatggcatatatcagagctggaggttgagaggcttgaaaagagaataaaactgttgtataaacataaaacaaaatgcgtgaacctatagaaaaatgtctctgggactctttttaaactatattttgaaataactttagattttggaaaaaattgcaaaaataacacagtgtttccatatacccattgtccagcttcccctaatgttaacatcttgcatacccatagtataattatgaacactaagaaatgaacaatgtac

SEQ ID NO: 37028 - DNA, 661 bp, Homo sapiens
tagagtatcctcctgcacgcgcgcgtgcacacacacacacacacacacacacacacacacactcccctccatttgacagatgaggagactcaaatccaaagaaattgagggattctcgtaaggacacatatttaatgcagagctagaactagaactttggtttcatcattctcggatcaagacatttctccctgggacacccttacatagtgctggagagagcattttatatcttttaattaatcatttccagaggtagagattactcaattttttaaacattctgctccaaacttttacacccgtctggtagataagttctgtttaccgtataaccaaagatcaaatgaaatcttatgtataaatgcactttgtaactgaaacagcatcacagtcatgaagtccctctcactctgtccctgtccctgcaatcctgacctaaataagaaaaaagtagatcccggccaggcacagtggctcatacctgtaatcctagcactttgggaggccgaggcgggcagatcacgaggtcaggagatcgagaccgtcctggctatcacggtgaaaccccgtctctactaaaaatacaaaaaattagctgggtgtcgtggtgggtgcctgtagtcccagctacttgggaggttgaggcaggagaatggcg

SEQ ID NO: 37029 - DNA, 1782 bp, Homo sapiens
cgtggccaacatggtgaaacccagtctctactaaaagtacaaaagttagcctggcatggtggcgcacacctgtaatcccagctactcgggaggctgaggcaggagaatcgcttgaacccgggaagcggaagttgcagtgagctgagatcgcgccactgcactccagcccaactcgcgcaacaccttcttaaatgctgaaggaaaactccattcaagagaacgcaggcaaaagcccaaagtgatcataatccagcgtccagctttaagtcatccgtggctcacccaaactcccaacccactcctcgccgccccatccctcgcaaaaagctaaatttccaatatctaaatgctaggtggttactgatcaccaacggtgaccgcacgtgggacaccacccaagctggccaagtgtaaggaaaagaccaccacccgacttcccaaagcagtcttcaaagcccccctcatcttcgttgaccatgggtaccccgagggcagtaaggtccaggctgaagtggcgggggcaggattcaagccggaggcaggccatgcccacagccgtgaccttctgaaggcgcttaaccctgtcacccgaaaacccctggtagggagcgtggtgcggagcccggggaggctaggtcctggggcggggagaagggtggcgagcacaggcaggacccggtccctgccggcacccacgaccccgggggaccctggcgccgcagcttgcctggagaaagggcctgggcactcacccggccacgggcccggcgcgagcggcgggcagataggaggcggcatgcagccggcccgggccgccagggaggaggcgcagggagagcgggaggcgcggggccgccccggcacgcagcaaccaacgcgcggatctcagcagggctgccattgctcgaacgtccccgcagcgggaagcacgctccgccagaaggacaggaggagcatgtgaccgcagggtagcctggcgcggcagagaccaactgccgggcgtgccaaatgtggggggagcgacggattgttttaggttggaagatggaaaaccgcacttctccgaggacagaagacccaatgtaatatttacataaacgatgttgcttgattcattatcgaagcttttcttttccgtcttccgtctccgatctgggcatcgtgttcattcgctgcacccctgcactcctctgttggtagagccgcaagaggtcaactcctcccaggttggcgcagaggcttgtgggaggccaactagtaaaaataccgagaactctcgaggagagccgactatgaagatcccaggacgtgggaaggtttcccccgcccccgagtgcagatgttgctgctaacgttcagccctgacgccatgtccaataggaacggcccttcactctcagaaacgcgggccggagaaaccgtggaggtcttttgcaccttgccgtttgcctcccaggttcaacatgataggatgtggattatcagggcctgggaacagtgtaaaggaacgcgcaggtccccaccctaagcgcgtacgcggggcctcgctttagaaaataaatgaattctaccaaaaatcctatagttttaaagctggaattgaactgactctcttccccaaccctccacccctaccgcgcctctcccttcagtaaatgcacatatacatgtgagaagtaaaagaacaatgtaattaagagtctccagccaaatatggggagaaaactggcaagttaaacccatcgctggcgaagtggctcacgcctgtaatcccatcacttt

SEQ ID NO: 37030 - DNA, 2670 bp, Homo sapiens
cagggactagattctacttacctgcttgcacgcaacacctggcctagtgttgtacacatggcacaatgcttaatgagtgctgcatagaagggtacgtagcagcacgaacccaccccagttccactgcatcatcattccagccaacccccgatgaccagtcccctctgctcctgcggacgatctcagctaagtaagcctgtagactctgaagccagggcatgtgggttcagatctcttctccatttactagtatgatcttgggttactcacctaacatagctgtgcttcagtgtcctcatctgtcaaatagaggtaacaataggacctacctcattattaggcagggtgaagattatttggctagtgtgtgtaaagcactaagagcagtagcgggtacacgggaagttctcagtcatggctagctgtggccattctttcaaaacaaaagaagtgttccttgagtgagccttatagccaaccttggaagacttggcttcttgtgattacatctcttctgactgtttaaaagtagctctgctctttcaagtttctctcttcctctctctaggggcctaaaccatggctctctggaagccattaagcatagcatgacctgtgctgtccatgtttatccaatgaagagtacctggactttattactctactgcatcagaggtttgtttttttgtttgtttttttttttttgagacagggtctcactcctgttgcccaggctggaatgcagtggtgccatcacagctcactgaaccctcgactttctgggcttaagtgattctcccatctcagcctcctgagtaactgggattacaggtgcttttgtagagatgaagtttcaccatgttgcccagactggtctcaaactcctgggctcaagtgatccacacaccttggcctcccaaagttctcagattataggtgtgagccacggcacccggcccagaggtgggtctctctcaagcacatgtttcagggattaaaggataatctttgtcccctgaccttacacaatcaaaatctgatgcttggttccaaactcacctttgtaatttccccccaggaccctggaagccccattcatgccagtagggtgttggtggcctatagtgacaccaagactgtttgaggtagacacagtgactcattggcacattggctttcatcagaagaaaatgacacatgctctaaattgtacatggaggcttgggtatgggctcatggaattgttcacattctcagagtcctttgtaatatctagtaccttacatttcttaaaaagagcttttctggggccgagcatggtgcctcatgtctgtaaccccagcaccttgggaggccgaggtgggtggatcacttgaggtcaggagcttgagaccaacctggccaatatggtgaaacctatctatgaaaagtacaaaaaattagtcaggcatggtggcaggcacctgtaatcccagttactcaggaggctgaggcaagagaatgacttgaatcccggaggcagaggttgcagtgagccaagattgcgtcactgcactccagcctgggtgacagagtaagaccccacctcaataaaaaaataaaaaataaaatttaaaaattgacttttctggaattagaaaaaccgtgtgggtctcaagcaaggcaagtctttcacaacatgtggaggaggtaaactctgtccctagtacattcatctgttcattcaagccctgtttactgattcatgctgtatttgttgagtgactattatgctgggcagtgtcatagccaaaagtcagacatggaacttgtgccctgggggctcacagttaaccggaggatacaggcaatacatgtagtacagtgcataatatgctccaatgaaggaagtacaaggaactatggggatatgaggctgggccatcaaactctgactgagatgagtggggaagtgttcctggaggactgatgtctgaaatgaaatctgaagaatgaataggagttaggcagtcaaaggagtgggtgcaacatgtttaaagcaaaggtcagaaagcaaatgagagcagggaatggggaagggcatgaaagatgttgggtgttgcacgattctagtgttacaatggcaagggtgatgagagataaagctgggaaggcaggcaagggccagagcatgacgggtattgtgagccaggtaaggaactggactgttctccccattccataaatattgtcctgtgtcccattcttcctgattcccagttactgtcagctgataaggcctaatactcactgggaaggtggggaggtgctgcattttagaaaggaccacagaggagaagtaaaacattttgcccaagacaatgagactataatggtgtaatgacaggcagtgggatggacattccgaaagtggggaatttgactgaaatcctcttcaagcagcactttttaagtaattggctgctgctgagactcaggagactgagttctttgttttcgtttttcctaagagtcaagtggactaatttttgcctcgtaagaacacagaagccttaactttgtgcattgtgcccaggcagtagccagcaagcacacaggagcagtttaaatagactgaaagcaaggggacatgtgtcacagggcctctcacagcagacagcacagagtaga

SEQ ID NO: 37031 - DNA, 2003 bp, Homo sapiens
gcaaatttctgcagctggcttgaatttctccccagaaaatggggtttttgtttctattgcatcagcaggctgcaaattttccaaacttttatgctctgcctcctcttgagtactttgccgcttaggaatttcttctaccagataccctaaaacatctctctcaagttcaaagttccaaagatctctagggcagaggcaaaattccagcagtctcattgcatagcaagagtcacctttactccagttcccaagaagttcttcatctccatctgagaccacctcagcctggacttcatcatccttatcactatcagcactttgatcaaagccattcatcaagtctttaggaagttccaaactttcccacatcttcctgtcttctgagctctctaagtctctaggagtaaaaagagtagagaaaggggaggtgacaccaaggttcattaaggtatattgacctgcaggtgatgagaagtcaatattgatttctagtggaaagttttactgtgaatcaaaatccaaagtacaaaagagttgtttgatgttttctatcacaatacagctcactgatgtgtaggcttggctataatttcattttgcctcctggggcaaagtttataacaagtacatttgaaggcagaaacatgttcttttccctaggtgggttgaaagggttgcctcaggtctggctgtgtcagtgagggctgtcatgcaaaaaaggaaaacacaggtaaccaatcctgcgtcttcctccccgttgctctgcgctgctccgaaaagtccccattctggctccctttttcttcttttttttaaaaaaaatttaaaagtaaactttaatgtcaaaaatgaaaacttggggagggcagaaagatcacacacacggcagccacttcacacttggagggttgcacagcagccgggcagaggtgctcctcacttcccaggcagggtggcctctgggcagaggggccacttcccagacggtgtggcggccgggcgaggcgctcctctcttcccagacggagcggcgactgggcagaggcgcttctcacttgccagatggtggggcggccgggcagaggctctcctcacttcagaaataagtcccagaaccaatgtctctctctgttctttgccccaacctccctgtcgctctggtcctttttcccgaagaagcaatagaagggaccctctctggaatttgcttatctgacttctaagaacgcttaaatgcaattgtcttaagactccctccctggggatctcatcaactaaccaggaatgatcaaccatgagagaagagactcaagtcatcaccatgccgaggctgacttttcctctgttatgcgggtagctccaagagattacccgcagcggggaactttagttgcataataagacaacctttgttcctgtgaagcaacctctgttccttacgtttctgtactggtggcctcccaacgccattcgttctccctaatgatttactaccccttcaaagaattgtctacaattcccatctcccccctcccttatgaaaaaaggggagcttctggactgcactgttttttgggtgatcagtctgtaatttcctcccatgcatgttaatgtttttatgccttttctccaatgaatctacctttagtcagttggttttcagtgaattttcagacacttccctggaggagacatgagggctttaggtggcaacctagggaggttacagggagctgctcttggcaactataactgtaagggagtaaggactaagcagagagagaaactgagctctggcactgttaataaaggcctccattgatcccgtggggagctctgaagctgggatagtcttttagaattgctctcaaatggctgcgtgcagtggctcatgcctgtaatcccagcactttgaaaagccaaggcagacggatcacttgaggtcaagagttcaagaccagcctgaccaacagggtgaaaccccgtctccactaaaaaataca

SEQ ID NO: 37032 - DNA, 1337 bp, Homo sapiens
actgatcatatcacatggtctagagtttaagtgcatgaaatttgaaatcagacaaactggagtttaattcccagtcttcacttttctaactaggtgaccttgagctggttacttaatccccaacccttgttttttttttagttgtcaaacaggggtaatggctgaacctaactcagatagttctgtgaggattaaatgagtcgctcttgtaaagggcctattacagggaatacctgccatatattaactgctcaataaaaattaatagttattctgatttctaaattttctatggtgaatatgaattttttatgtaataaagagtaaaaagaaaatcaaaacaattaaatttaatattaaagcaatttatccttaactacaatcagaagataaatatgttgttctaaagctgtgtgataatgtttgctttgtcatgtattgggggtgtgtgtgtgtgtgtgtgtgtgtgtgcgcgcgcaacccttggatgggagtggagttgaggaccgtgacgtgaccatttattaggtaatctcattcttccctctgaccctggtcctctctattccatcaaggggaggggataattgcatcatggttctccctggcactcacaacacaccatgtgttcgcctatatttagccaacatgaagtcactgaaactctatgcccactggaggcaatttgtgctttgttgtttgtggctcacatggcttctatcctgactgctctgcatagtttatgtccttagatgaatttaaaggactgaaaaccttttgttggtggaaaaactgtgtttggggagtcaaaactgaaataccaaatcaatgagatccttggaagcgtccctgagatgaatacctgatgtttcttgcaagccagggagacctcaattatcctcttctttgacagaaggagaaggaccagggtgagcaggctggggagggaggaattgtctatattccactcaaatggtaaaagcaacacgtccattcagcggctcccagttacaatgccaactctactctccttccagcaattagaaacgacacatggaggcccggcacagtggctcatgcctgtaatcccagccctttgggaggctgaggcaggtggatcacttgaggccaggagttcgagaccagcttggccaacttggctaaaccctgtctctactaaaacaaaatattagctgggtgtggtggtgcatgcttgtaattccagctactcgggaggctgaagcacaagaatcacttgaacctggaaggcagaggctgcagtgagctgagatctcaccattgcactccagcctgggtgacagagcgagaccctgttt

SEQ ID NO: 37033 - DNA, 1671 bp, Homo sapiens
cattcccctacctggttctcagcactttgaggtggtttgtaacgcagcaaaactgatccaaaagtaaaatgagtttgtgtttgttttcatcaagttaaaaaccaactcattttccttttgtgtatcatctgcaggggaaaagcaataatgcgcagttgaccttccccgaccccgggcccagcgcatttctggggcatctcccagcatgctgcttgtgtcctgcagaaagctccgcagcctccttctcgcattagcctgacgggaaagtaaattagggctattccacccctgcactccctcccccgccccagtcccagcgaagcccgaagcaaaaccccaaatcttgtagccctctgcgattagcctggccatgccactgcttctccctccaggactggaaatctgggaactgctttcattaagggtgcccagccttgaggattgtgtccccgcccagttttagctagaagttattctggcaagagttcacggtgtctgactccttttataaaaagaaggctcccaggaatcagaagccagacgggacagcgcagtaacgcccaatggcccggattacgcagccctcgttttcctctagctgaggtcacggaggagcttcttgcccctctgtgggtttcttcccttccccgcgcctttccagcgccggccagttctcccccagttcccttccagccgtcccaggtccgcttcccctgggcccggagccgccgcgccattgaggacactctcctcgaggtggcagtagagagccgttcactgcccagtccgctgacgtcaccttgtttacccggctccgggtcatttttagatctaagatcacaggatgttaattgggccaatgatttcccattcatttgggcaaaaggccctcctactgggcgttcggacaagtacgatgtccttcttgatacatattgctgcggggagtatttatttgcaaacacttgtagtttcatcttcaggagataagggtgctaccagtggctccatgctatgggctttttagggtcacttgagttttggagcctgaatgagggtggcattaactggggagagaagaaagggtagatattacagtggtgtttggggaggcatccttagagccagcagagagcctccagagggaatctgcctttttacttcaccttcccttccccttgtaaagtaaccactgcagtcagtcagcaggaaagcctttggactttggaacttggagggagaaggaaagcagctgatttggcctaattgtgtcctgattagtcgtgggaagacaccttgtaacttaggggccaagaggcccctgctttggatgctctcacccaggaattgggtctgaatgcctcagagccataaatcacacgtttcacacactggaacttttcatcccaacagtagcaagcacacactatttcttacgggtcactcctagctacccagctgcggatgaggaaaggtgaggcacacagcagctgaatgaccgagctcactctctcatctccaggccctgcctagttttagcaaaagtaaaagcatcaaaagcaccgggacgcctgctcttccagcgccaggtttggtgggtggggaatggaaggagctgggagtttgtctccgactgttccagaggcaaaataagcaaatacaagcaaaaag

SEQ ID NO: 37034 - DNA, 4441 bp, Homo sapiens
agaatacctctattacacttttgtttctcgtttggagaattaacatggcagcatcgtctaatttgatagctggaggagtcatgtccactttccccatcggcctgttaaacccctatcattcattcttgactcatcctgtgtctttgtgaagcctttcttggtaaacctatgcacaaggaagaccctttatgtcgtcaccagcccttgtgcatgtttcaattgtagtacctatcatcttgtactgcgattgcctaatttatttttgtatctccagttctacatacagtacctggcaaacagtaggcgctcaataactgcgaaatgaacaagtccatgtcaagagactaggctgggagttttaatatcaatgccgactgagaaacaaaatacggaaatgtcaagggctggtataaaaataatctctaatagcacaaaatcctcctgaagggaacacctgtcccactttctcacgttgctttccaggttcttccgacaccccaatttcccgcccactcttctccctccggggtacaggtcaggcaggtatcccagctcggcggctctgataggtcggcgatgatttcattgttagggaacatccgggcctttcccctccccgcaacacctccccagagcccggccttcccagtttcccactctcgcctgcgccccacccgcggctgaagcaaaacaaccgcctctcccctgcccacttcttgtcctcgtctgagtcgtcccttcccgtctccacgccgaagagaggcgtttagatcctccaatgagggcctaggaggactttcttagccaatcagtagccaagcccctgcaattccgggtgggaccaggcgtccacacctatagctggactgctcgttggtcccttatggcgcttcttttacgcgaggcttagaggtcaaatacaagggggcacggtcctcacagaacggaaaggatccgtacagactctccgggtttgaccgttttctaggacgaaccaatcgctttccagatacttccccgccttttgcgcgttcatttgaaaaaagccggtgtgacggacttggaaattggctcagtgactgacccgcaagaaagccagtgactgggggttcggatcacgagttggaccaataagaaaagacaatcgctggggccggggctttgctaggaggagcgcaggtgggcgttatttgattgacggagggctctacttatggctggtagcgggggctggtccctgacgttcgggaggtaggacctagcggaggcggggccgaataaagtaaatggtaataaagggttgggtctcacttagtgggcggtgtttgatggacagctgaccttgcctattgaaagtagccactgatgcccaatgggaaattagaaacccagaggcggggccgggtgggcggggtaaacgaagtacggaggtgccgagggagcagcacggggagggggagcggtgattgacaagactcccagcaaaccgggggccgtgagagggcgcgcggcatcccagtgggtggcagctggaggcggggcaccctgaggggcggggaaggactagggtgcggggagggggttgcaaaaggagccgagcggcttctgctcaatggcggaaaagccgccggtgctctgacggcctcgttcccctagcagttgcgggggagtttcctgccggcgcggctggagtctctgattctcagggttcggtggttggaagatgctccagagagacgaggctgcggcggaggaggtggcggcggccgaatcggcaacggcgctagggtggagagaaggcggcatcggcggcggcggcggcgtgaggggccgggcggtgtaaacagccccggaggcggcggtcgagaccccgagggggaagcggcggctgagtcagggtcgcgcctccgttggaaacttgggctgagtaccgcggcgggcgcgagcgaggcgccctagacatcttctccctcccttgcctcaggtaaggccgcccggcaccccgccggaggggaagcggctgaccggccgcgccgccgaggccccgggccctgggcaggttttcgcggtgctgccgagccgcggccggggcctctgtccttccgaatcctcgctgctttccctgctgccgcggagcctaggcaggggaacgccgggcctggctctcgggtataggccccttccccggccgccgcctccgctgggctgaggtctgggagaggcgcagggagagaatgggagtttgctggaacgcctggaagctgactgattctctcttccctccgcttcagtctgcaagcatctctttcacacgaaagcactggggctaccccaagccttggcgcttctcttcctggtgcatgccctgtttgaaaacactatcttttaccattcgtttcctcatcagcttctgccctactctgcgctccacttcacttccttgttaaatcgtctttctctgctgtctatgcgttctaccctcgccttccctccttagtggctttaaattgtgtgtttctcttttcttcgtaccccggcatctcttgcctgtcttccctagcaccatccttttcggatgtcattcctaacagtgaagttcttaattgaaactgccacttattgtcagtaccccaaatctaccggagccccattaagagtatagactgactagccatatgtggtaaatcagtttttcatagtttaagcctaacaaccttgaaaaaattgtattattaaacgtaaagtgtgaaaataacaccgaaaataattttttaaatgaaggactcagtgagtgttggaaatagttatttcttcattttttaaacttgcatgacctctcatatcagatttagcagatctgggacgtttgcccatcttattcggcaaaaaaagtgcttcttaggcgtttgatagcagcccaaattcatcaatattcaatttcttctaagaacaacttgaaaacttttttaaaaagagacgttaataactgggaagttgttttgatagtcacagttaaagagcttttaaaataggctccacatgtttaatgtatcaaaataaagttggcaggcatgttgtaaaaggattatttaggaatttgagtagtcttagtgttatgtagctattttaggaaaaacattctttttctgttaacaaacgtttacaactacggtgatgtgagaattactgaggcttactgtgggattaacacaggaactgtctttatttgagctactgcatggatgaagaagtggtaaattgttcagagtagacagtgtaagtcacagtatgttctaggagatggagaaacatgccatggacgctgaatgttaatagatgttatttcatttactttctctgttgtgcaatagcaaagttcctattgttggcctacttttaaatggggcatttctaagtaaatagtgagacaagttattctaattattatgatagtcttttccaagtgtacaggccttttaaaaatatagttgaagtaatggtaattttttaaggaaatgtttttgtaggtctgccaaatggacagtgtgttgttctaatcgaaattttaaaattaagtatttagaacagaatattttagtccacacattttcagggataatctttattttgtgcttcttctctcaatgccttctttgtctttttttttgtcttaatggttgttgtgttttcgcctcttcatttgtttttgctctcatgaagtcttacaacagtttctgcagtggttctttttgttgctgtatattagcacgagtatttttatttgagctttcatactgtaagatttccccagtttctagtacattatcctctggatttgttgaagtgattgttctctttgaagtgaccagcagagctttcaacaccgttttcttacactgggtgtctgatttctgtgaagactctaggaataggtgaaaggcctttcaatttagtcatgtcagtaaatactgttttatgttagtaattcacctaattactaaattccttaagattacatcatctgaaggaatagtgtagtgtccaagtaactgtgcttctaagaacagctgattcacaggttgacagggtcagaaaaagtggctcttgttgaaagttatcttttctataacaaacattttttatggaatcttttgaattaaaatatgatgctgattatgtcttggcagtcttggaagcttagaattggccacggtatcacttagtgattgtggtgattcattaaaaagaggctatataggccaggtgcggtggctcatgcctgtaatctcagcactttgggaggctgaggcgtgtggatcacttgaggttaggagttcatgaccagcctggccaacatggtgaaacaccatctctactgaaaatacaaaaattagccaggtgcggtggcgcgtgcttgtaatcccagctactcaggaggatg

SEQ ID NO: 37035 - DNA, 2022 bp, Homo sapiens
ttaatgtaggggtcattggtatctttagccaaggtgagttccaccaggaagatgctacatctttctatttatacaagtgtttttaatgtccccagtacagttttgtaattttctccatatgatctacaccgttcttaaattaattccttgttattttatatttcttattgctgtgatgagtgaacccccctcctcagtatattttaaatgtataccttcttagacaactagttttatttacttaccaaccccaatcctgcaagaaaaaaaaaaaccatatatatatatatatttcaatttctatcatatccaccagatggcagtcttgggcacgtccatctgtaaacctgctgagagctctggtgacaagaaaggcagtggctggcagaccttccaagcactcagaagcacgcggacaaaaaggtttttttgtaaacccgaacgaaaaataaacccagcattatataattatagtatttgtactgctgttaacctttaatcttataacccattagtggagacagagaaggactgtcactgtgcccttcaaaatcatattttttcctgtccatgtgataaacacctgtggcttcttggcagcacttttggtttgattccagggactcttatggttaaaggcaggctttaatctggcgttgttttccttctcctaaaagcaccatttaaatcggaagttactggatttctaaacggttaagaccgtcttccgactggtttttatcattcccagatctcttctgaaaggaggtggtgtgcatagttaatatgaaaggaactggcttgttctacgcgaatacaaatctgaataactcttatatattagacctttttttttttttactttagtgacttccagtatctatatttagaagtgtataattacttgagatatatatatatatatatacacacacacacacatatatagtgtgtgtgtgtgtatctatgtgtatatatatacatatacacatgtatttttagggcttttggcttttttagggcgggacacgtgaatctggcagttgagacagaatttttcctatagcggtgtaacagtgtacaatactaaactaatgaaatgtctttcactatcaacaatttacgtatccatgctgattgctttaacactagaaaaaatatgccaaaataaactacattttctaggcgctttcacaccaaaaacacacacacacagctgcttgcccatttgagaacagccaataaagcaaactctttgaatgatttgtggttttgtgtccccagaagttttaacagtagttctgaagatttgtcatttgtgtgtgcttcaaagatagagtaatacattttatagctgggcagatctctaactatatagttataaaatctcaaagctgagaaaaccctgaatgccagatgatctttcagcagcctctagtgtgagtgtcaggaatgagttcatttccatctttgatcagctctgcctgtcgtgttgcatctctgcttcttctcctcagttgtcttattaaccctcggggctatgaaaataagtatttaaaagctcctggaacccacaaaaaacactaagccttgagagagatgtagttgatctgagtcacatatgctaacaactttttatttccctgattattcttcctgttctgtacaatgactagagagaataaaactacatcaggtacaaaaaccacctgccttcttaattaatgacctttgttatagattaacttctcctttgttgtcctgcttcacttagatcagatgacagaaaacccatgactacaccctctgtaaaaggtgttcagtgtacctttcccaagagaaacactgcctgtaaccaaattgctgtaactatgtgccaaccttgtatgaaaaatgttgcaatcctgccaaaaactcctgtctctgcctatggaaatgaaaccttgagcttccttccttcagcacgctgactccattcctttggagctggtgctcctgggtgggctgtcctcaaactctgcg

SEQ ID NO: 37036 - DNA, 486 bp, Homo sapiens
gcactccagcctgggcgacagagcgagactccatctcaaaaataaataaataaataaataaataaaataaaataaaataaataagcagtgtgttataggggaaaagcccagatcccaggtgtcgaatgactctgtgctttggaattagtgaccttcagcctgcggtgtggcctctgacagtctaattctaggaagtcacatcaggattacacagaaagttactggagattgaattctagactcaagttgctgaatatgcatttgggactctgaactagaaggagaaaacacattatctgctcattatcctacaaagttctaaatacaaagtttcatttccacatgtcttctcagccaagcctagaattctcttctgtataaattcctgggttcctatataagtgaacaagggaaatagtccaaatttagcaagttcaaaggcagtctgagagtggaaacaaagactcctcaaatattggcacaaac

SEQ ID NO: 37037 - DNA, 1473 bp, Homo sapiens
gtgcggtgcctgtgacggtgagctgtgcggtgcctgtgacggtgagctgtgcggtgcctgtgatggtgagctgtgcggtgtctgtgacagtgagctgctgcagggaggtgggtcatttggggtctggctcctgcatctaaaatgggcttcttgatggttatttggctttcatgtcttagctgtctcatctatgaaacacagttggtggcaatatttgtctcatagggctgtttggaagattagatgagataacacatgcacgacacttctgtactcattgagtaaatattaacatattgcctactccgtgccaggccctgttctaagcactgggaatgcagcagtgaataaaagaagccttaccctcaaggagtctccaatatactgaggggaaagcaggcaattagccactaaatatatatatgttaggtggtggtgaatgccaaggggaaggggcatcggagtgtcaggtagaagtggctcttctatataaagtgtgtaggagacaccttcttatgatgagatgctgtttggacaaaaacctgaagtgagaaaggaaccatgtgactatctgggggaagagaatttcgggcagaaagaagaacaaatggaaaggtcccgaggtgagagtgtggttcatgtgtttcagggatggcatggaggccagagtgtagggttgccaaacttagcaaagaaaaatacaggatgtccagttaaattttaaatgaatgatgcaacatttgagacatactgctaccaaaaaattgttcattgattacctgaaattgaaatgtaattgagtgtcttgtattttatctggcaaccctaccagtatgctggagtgaaatgggttagggcgctgaagtaagaggtgggggctgatcatttctcacaatacaattcacaaaacatatcagctatgttcttgttcttgttcttgctgctcctatggctacagtgggcagaaacttaggggagtaggggagtcctctgagccaagtaggtgggaaggagaccctaacagaacggggagcattgggtgcctttccacagctcaccacgtcagccagatagagtggatgcaagctgtcatgctggagtcactaggggcacctagaacccttggtttagtttaattttgaaataacagtttaattgacatataattcacataccataaaattcaccccttttgagtgtgtaattcagtggttttagtatcttcacagagtttcacaatcactactaatttctgaactttttttttttttttgagacagtcttgctctgtcgcccaggctggagtgtagtggcatgatcttggctcactgcaacttgtgcctcccaggttcaagcgattctcctgcctcagcctccgagtagctgggactacaggcatgtaccaccatgcccggctaatttttgtatttttgtagagacagggttttgccatgttggccaggctggtctcaa

SEQ ID NO: 37038 - DNA, 2633 bp, Homo sapiens
gtctggcaacttttgttgaaaatcaattgaccataaatgcatgggtttatttctggactctcagttctgttccattcatctatatgtctgtccttatgtcagtaccacacactgtctgaattactagcgctttgtagtaagttttgaaatcgggaagtgagaatcctacaactttgttctttttcagtattgtttcactattccaagtcctttggatttccatgtgaatttctgagtcagcttgacaatgtttgcaaagaagcctgctgtggttttgatagggattgcattgaatctgtggttcactctggggaacatagccatcttatgttaagtcttccaattcatgaacatgagatgtctttccatttatttacgtgttctttcatttctttcaacaatgttttgcagttctcagagtacatgtcttgtacttctttcgttaaatgtattcctatagactacttatttttaagactttttttttttttactgtatatgtttggtgtttccagaatttgtatgaattgttttggaattggttctggaagtaagcaccatgagtgagggcaccttgcctccatggggttgtggggttgtggggttgtggggtgggtagttgtagacatggtcagcagactaactaggggttagttttaaacttctctggtagcctgtggactctcctcttcttcatcaccaaaactccttatcacccacgcctcatgctctccccacacattctatgtgctaagtgctgttcctggataatttaatgctcagaataagcctaatttacgaggttttgtgatcattttacagagaaggaaattgaggcttagataggtaaagtcaccatccttgggagtcatggagcaggactgaaatccagacactcggacttgagttcatgctcttaaccacaatcctacacctgctttgaggcaatgtatgtgtttccctctccatgcttcactttttctgcacagatttgtcaaggaggttttcagttataaattgataaatgtgagtataaaccagctggtttacagttggtttatcaggcagtagatttttccaggctccttgtggcaatagtgatgaattgtctggggatgtttagacaagtgtgataaattctgcaaaaatgtgccagccaatacattaattatttttttgactaacccagctgtgctcttccagatacccaagccgtggagtgtgtggacaggatccttatttactggtcttctggctgaaatccctcatgtgatgaatcattaatgcctccggttgagagattagactttatttgcaagactggtttagaagatttactattagaagtaaataagaaatgctgagaagctgagaggaaagcctctttgctcctggaaagggacctttggcatgaaggagacttctgtcaccctcctccccaccttacccccagcagcgcttgtttctgcaatagagttaagcaggttaataatttgcagctcagagggtttgtgtggaggcggcgtttggaatgacttgcttgcataccaacttgtactcctggagcctgagcccacttcctccccgctcctatcagattttgctttatctgcacagtgggaagctggcatgctggggaaatccagcagagagcaccctctgctgtccttctctttctcctcctctttgtactggccatcaggggacttggctctgctctgaacctcttggggcttgagtgctttcagctgaagaagtcagaaaaccttctctgaggtatcaggggtatatatttgtataatactttatactttcccaatcactttggtttttactggtcctccacatttcttatttgacaaatgaggaaactgagacacagagaggtgaagtaacccagcgggttagcagcatggcaaggaagagactccagatggcctggcctcgtatctggggtttggagtgatcctacacctgccatatgggaatgctgagccccagggtagggactgctggggagacccagctgagagggaacccagagcacaggcgtaggctccgttctgtccctactaagcatgatactgctggaggcagcagctcaattcaaaacacaattcgctcactacctgcttgattagccatctctatgcttgataataataattgtgccatttattgcacctcctctatgccaggcactttattataatcattcactcatttaatgataggtattgtgtgtcttgaccatgtgctaagggtgtgggggctggtaagatagatacctcttgtggccatcctggggcttatattctggggtgggaggtggacaattaaacaggcgattacaataaaatgtgccaagcggtcatgacagtaggaggtaggaatacacagggcaagcgcctaacctggacacatttgcagaggaggtgagatacctgaggaacaggcatgagctaagtgaagaggcatgggtgggagtgtttccagcagaggaaagcgtggatcgtgacacattagaggtgctgggagttgtccagtatcactgggatgtgatatatagagcagggagtgacccgatgagactagagaggtcactgggggtgaggtcaggagcaccactgaag

SEQ ID NO: 37039 - DNA, 2457 bp, Homo sapiens
caagatgcacaaataaaatgtaaggccatctctggtttgtcaggaggtagcttttattaaccttgattgctaataagtagttaagagtcagagagacctgggttgaggtcttagctcctacacttaactgtgtctccgggcctcagtttcttcatctgcaaaaatgaaatgacaccatttaccttctagggttgttgttgtaaagacaaaatgagacagcttaacattaagaccatacagtgcctggcacatagtgaccactcaataaatggcagttgctattatttacgacaggaataatctaggtatgttgcacaccgctgaatgtcattatggaagtcttccacaaaatgccccctggtatcaaaggtagaatgctgcgtcaaatttaccatagatcagatgcgctacgacgcccccgccccccttaatccctttccatgtcgcagcaaaataatgggcgattgggggtaggggagcaacactagtttactagccgacactagtaaaaaaaggggaaaaaagacccgaataacaaggacctgcaaaggtcctacatcaccacgttcccacagcctttatccatccatctttcatccccaagaagacagtatgcaaggctaggatgggggtggggtagataaatgggtgttctcaggagaacctattcgtttaccccgtgcaactctccaccccagggatgaggcgatctgaatgcaacagggagagggaccaggtgacacgcacgcagtgccgggacattagtcaaaaagcgaggacctggggactgaggggtgggtggctgggcggggggagaaaggggagaaggaaagagaccagcacaccccccatacatacgcaaattgagagaatcagtccggctctggacacaaaccagtgaaggcaggccggagaacctgaagctctcagaggggagcaggtgtcaccgcaggcaagtccagccgaagtctgcgttccgcagcccacagaacgacaacttacccagagccgcctagagctggtttgcagcacgccaatctacgtaacctcaatctagcacgagcaacaggcagatttcgccatctttgttgtggtcaaggagtcttcttgggttcctgggttctttagtctcgaaatatataagacttttcgttcttcgctagtcttctgagctcgagatgaagcacagaaggctaaaacaatgagggacagcgttccagtagccctgccacagctctctcatcctctggtccgccctcactcaagatggctaccagcaagaatggtgcaatggcgtgacagctcggccctggttgccaaggagatgcgagtaccggaaatgcggaattcggggagagcgcgcatgcctggtccggtggagggagggtgccgggcgtcacaggtcctgacagggaagaagttggcaggtcctggcaggggacgagctgcggcggtggcacctccgggtgtggaaggctccagtgagatggagtcgcgagtcgcggacgctgggaccggcgagaccgcgcgagcagcgggcgggagtccggcagttggctgcaccactcgggggcccgtagtctcggcgcccctgggagccgcccggtggaagctcctgcggcaggtaagggagaacctgctcgcctcacctttgcctctggtcactcctctctcacgtaccgggggagcgactgttcgcagttctttcctcttggcagctctgggagacccttctcagtttgccgggagccacctgcgaagctccccctcgcttcacctaagcgtcccatccaagaggaggaatcatgtggggttgggtggggagcgggacagccaaggctgagctcctgggaaactcagatcgaagtagaagaaccccttctagacatttttgtgcgtctgggggacttttccccttctcgccagtctctggtgcgcccgccgctccccactgctcttttcctgcttctgttttgcctccttccccagtttcttctagcttaactcccagcctggttcgagttaccgatattcgtctgcaccctctggccccgtcttttgcccagcgtggttgactatgccgggactgagacacggcatgcgttccctcggcatcttccgtacagcggagcgtgcaaggagtaggaaaagctgataccctctctcactgaggtctcaaagttaaatgattatcttgtagtttgtagtgatcagcgagattctccgtgtccaaggtgggctagtcaaagtgtgttcgtttttgaatgatggtatcttctggtacttcaaagtttctgctgttacttacaactccactcgtgcaagcttgacggaagttctgatttatgatcactcacattcttcgctcacttcttgaagtgaagtctggttattgtttttgcatagcagtgttatgcctctgcctgaagttttctgccgaaaactttactcaggagg

SEQ ID NO: 37040 - DNA, 2282 bp, Homo sapiens
attacaggcatgagtcaccacacctgtccaaggggacccacttataagatgatttctttgctcacatgtctggtaactgagctaggatgacctaaaggcttaactgggaccatagactatagagtacctgtatatgacctctatggggcttggacttcttgcatgattgtgctgggttcagagaagagcctccagagagcgagcatttttttttttttttttttttttttgagatggagtctcgccctgtcacccaggctggagtgcagtggcgtgatctcggctcactgcaacctttgcctccccggttcaagtgattctcctgcctcagcctcttgagtagctggaattacaggcatgcaccaccatgcccagctaattttgtatttttagtagagatggggtttcatcatgttggccaggctggtctcaaactcctgacctcaggtgatccgctcgcctcggcctcccaaagtgctgggattacaggcgtgagccaccgtgtcgaacacagagagcaagtattctaagaagatcaagtacaagttgtgtaaccttttctgacctagcctcagaagtcacagagcatcacttccactgaactctattggtcaaagcagtcacaagtctgcctagatttaagggatggggacatagaatataaaaaaattgggggctcatgttttaaaaccaccacaggggtggtaaaattcaaggataatacagtccatcttcgtagccagtaacattactccccaatccccccatcccataaccaggagttgcttttttccaggactaacgttggatgcttggagataattattttattaagaatgggaacatttctacccaaaggtgcattattattattgttttccattttgctaatggtcttctcctttttatttttcttctcttcttcctctttcttcttttttccttctcctcctcctttcttttttttcttcctcctcttctttcctttaccattcttcttccttcctcttccctcatcttcatcatcaagcagtgtacactggacatcccttagcatctgttttcatttagttttgcagttagctatgccttacttcatgctccagaaatactttttatatccctctgttagcctttatctcattctgttggaattatttgtgtatttacctgtatgtcacaataactgggactcctgatgggcaaaggccatgtcctgttcatcattaatccaccaggccttggcacagtacttggaatccagcaaatgtttttggaatggttaaatcattgaatggcttttttctgcctatcttctatgcaatagatattatgcctcctaagatcttttgtttttactttgagcagtttaagagcctctccataagtgcaaatttcataaaaaaaaaaaaaaaacttagcttgttaatcatcccttttgtattattttcattaaatattcatttaaagccttttattttatatgaggataagtgagattaagatagcacacgttagtagttatagtagtagtaatactggaaatttttcaggcatttatataaattttataggttagatgacacaaaatatatagtaaattagattattattttagaactgttcatgtttagcttgttgatgactgaaatccaacagtaactattataaaattgtcctaaaattactaaagagatattttttttttgagatggagtcttgctctattgcccaggctggagtgcagtggtgtgatctcagctcactgcaacctctgcctcccggattcaagcaattctcctgcctcagcctccgagtagctgggactacaggtgcttgccaccatacccagataattttttgtatttttagtagagacagagtttcaccatattagccaggatggtctcgatctcctgacctcgtgatccaccctcctcggcctcccaaagtgctgggattacaggcgtgagccaccatgctgggctgagatattcttttcttttgaaaatattactatacattttcacagaataaattttaattgtttctagttttttgagtataagctggtttataccatcgtatgtcatgcagttcttttcatcatcttattaggtgggaattagtgtacttattttatagatgagaaactgaggctggaagagggtaattcatttgtatgaggtcaacagctaataagtagctgagctaagattcaaatctggatctatcagacccaaaagcctcttaagcaatatgcctctttcccaagaattctt

SEQ ID NO: 37041 - DNA, 1237 bp, Homo sapiens
ggttggttttacaagatagaaaattagaaaataccaaatttttacacaacatagttgatgtaatgtagtaatcatgtattttatttctctggaaattgtatcctcacttatgaaagccagaatactattttagtagcatttatctatttaactttcattgtctgttgacagatgtatttagaaaatcaaagttaatgtaggataacctggtcgagttagcatttattttagtttctgttcagaaggtagcaaatattggtttaaccaaagctcaggggctaagataggtcaaatgaagtttatgagattccatacactttctggacaaaaatctactatactactcttggaaaaataatttgaaaaagacgtttttgagtaggcttaatgttcttaatttagtgctccccaaaagaggagtatgagaaaaacatttaaattttggtattatgttaaatacatcccatgtttatacctaaaatagtcaatgaaattcttttcctgtgtcaatgattatttcagtgattacctggacatttgggaaagttagcaattaatgccaagggttatttattttgtcactggttcagaaatgcctgtttatacaaatcaagacttccagcagcttgagccttctttttctttttgagctggtagagtcaatggttaaaggacaaaaattctacaattgattgagttacaaatgaatacagtgttaattaagccaggccattgtctttaaagtggagtcagtacattggaagtcagatttctcttgctgtttagtcaaactgcctaaggctgcaactgcttccttattaggttactagctttggggagatgtcattgtttgctgctgtagctaggctttctgttaaaaatcacagcatgaggcttaaactgctgcaaccattatccagtgctaacatgtcactaaaggtctgctaatagaacaagaggaaaaatatcaatctttaattttagatcagccaagtaatctgtagcacctgttcattttctctcatcaacccatttaaaacaagactagagtgattctttgatgggcaggctataagattctaatattttttgccttttcttatcagaggaaaatttagactttaagactaaagaatagaaaaaataaactgtaagtacatttcctttaaaaattttatttaagaggtagaattatctgatgtaatccaatgatgactaggttattataaataatttt

SEQ ID NO: 37042 - DNA, 831 bp, Homo sapiens
aaaagctttttattacaagccatatatatactaatagaacaacctttaacaatatatttttttgattcaccagaaaaggtgatcatttcttgatcacaagcagtaaggtttcttgtcctcagctcaacctcattataactatatatttgaacaaactaagatatcctctgaactgagtcacctcatcccagggttcaactgacatggggaattaccttattttagtcagaaagccttaattagattaggttggcctttctgaactttatgtgttgctacatacaggagttaaaaaccttgatctacacatatcacacaaatcaggagaaaacgaaagcagaaatgagctcatgtttctatatgcagctgctttgatgaagacatttcaaatagaaaccagaaaaccaaaagcacaaaactgaggagataatagccaatgaaggggagaagtgattaattcagatcaggaaaaaaagctgcagagttcaaagagactatgatgaaattattaggggctgttggagatgtaatccatatctccttgtcacatgtgtcctacgtgatagtgccgtgaatgtcatgggataaaattagtgccttacaaaataaacatgtttaaactttgtgaaaaatacccacacaagagactgatatacatacattcagaggtggacacatttgtctctagagggaaattcatctgctatgtggtgagagcagctgataatcaggaaactcaaagtcacattctagcagaaacttttattaatattgacccataactgtggctctgcaggagtttttaatctcattgtatttatgtagtgtctt

SEQ ID NO: 37043 - DNA, 585 bp, Homo sapiens
agtgagaacccaaggcaaaaactgtgtgtttcttctgtaatacttcctcagagtatctattgtctttcaaatggggccaaggcttctcaagggaaaggaaatactctaaaataaaattgtagggtgcaacataatttgtgatttgttttcttttatgagtaaaattacatggtattttggccacctgtttataactgtgtaggtcctcccatgaggaatattgttgggtccagaagaaaaatagacaagtaggaggcatgcaccgttctttcagataccatctgattaattgcctctgacattccctgacctttgtctgctccagcacgtgttgtcagtgacagaggccttggactgccagttttgctatctttgctggcagaggggcagaaccgacacttttgtagccactggcaagactaagccttcaagtggggaaaaagattatttctgggttgtctgaactgccaagttagctccccaaatggtttgtgccacagcaggtttgatcttttcattgcatcctgagttacatcgatttcctttggctttttgacatggagaaaacaagacataagaaaatga

SEQ ID NO: 37044 - DNA, 695 bp, Homo sapiens
acttgggttcttatctgcttactgagtcagagacccagcgactcctcaccagtgcttggtgagaagttagctcctacagttgtaggattccccttgacacaagggttgtagcttatagagagtcctcagatggttttaagaccctcagtgcaggggcccagccctgagaagtccttttctaatatctacccagatgctgttcagcacatacagtaatgtgtgcttagcagagaataccaagacatgaggtagaatctctgcccccaaagacgttgcagtctggttgtggagatataacatacacacaggtagaactatagcagacaatgtaaaatacagcccagtgctatttttatttgttttgtgaatctttcgaatttacgccttagtattggactctgtcctgattcaacaaacatttgttgagcaactgctatctgcttggcactgacgccattcctatgcgctgaggaatgtgggctaggagaatgaatatgcactaggagcactgtgggaatctcatagtttagcaggacagatgaacacatgaactcccaggaattacagtgcaatatggtgggtgccaggaaagaggtaccaggagaaagcaccaagagtgactgcctgaggaaggtttccctagaggcagtggtgtctgactttggtcttaaatagtaagaagggcactttgagtg

SEQ ID NO: 37045 - DNA, 539 bp, Homo sapiens
aaaaacaaaacaaaacaaaacaaacattcatcagcttcacagagtgatctggggccaggagggctgtcctcattcaacctggcacacaccttctgcaagtccttcctgcacacaggaatgtgagaacaaagcaggtggaaggccctgcccatgtggtgcttataatctagtaggggagacagagcatgtcctcaaatatgccagatcaatggaagaggaggggactggctgagggttgttagagatcagaagaaggagcaactaccttatgggagaggaggcagaattggtattagcctttgaaagttgtggaagtggaaagaaagggcataccaggggcttgaagctcatgagctgaggcccacaggaagatttcaggaaatgtttgacttggcaggaatgtggagttcaatggggtaaagattatccattcactcatctcatagatactccctgaatgcctaagaggtttcagacagtccggggagagcagcgaacaagatggacaaagtccctgatctcaaggagccaacacttca

SEQ ID NO: 37046 - DNA, 660 bp, Homo sapiens
ccaggaagggtcccttctccttctcacctccctccttcttggccctgctgccacctttctgtagacaatcatcaaggcatcaccctgcagttgccacataggagagtaaatcctgtacagggaattgggattacttctgacttgctgttttcttggcaactgcgtgccgttgggcaagtccacttaccctttctaagcctcaatttttctatctgtccaatggggaatcgtggcaatattaaaatatgttgtgtaaattctgggctctcttgtcattgagaggtgaaagttaatgtccctcatccttgaatgtgggccaaccttagtgactcacttgaagccaatagagggcagttgaaagtgacactgcatgacctcagagactaaaattagaaaaggccacagagcttttccctggttcttctgggacactcacctttggagcttgaccagagaagaagttcaaataccctgaggccggcatgctgtggggaagcccaaaccacaggaagaggccatgtgtaggtgttcgggccaatgtgcccagccaagttctcagctgacagtgggcaccaaccggtagaggactccatcttttagctgagggcccagatgtcatgcagcagactcaggagtataataacttcatttccaaatgtg

SEQ ID NO: 37047 - DNA, 539 bp, Homo sapiens
cccaccttggcctccaaaagtgctacgattacaggtgtgagccaccgcgcctggccgattttattcttaagtagtaatgattgcttattagtgggatgcagacacctattgggcactgtacaacttctcagaccttggaatctgactgaacattgcttccctcatctcctgttacatattgactttcattgctccacaaagatgtgacatcatcaaaaggaatgcagtatgatctaatgttgaaactgtgaactaccttgagctagtagtttgcacagtgtctaacagacattaagcatcatgatattaccctcaaaaatttaaaataatccacggtctccctacaaatttgctttggcatccagagtgggaactgtagcagtagtgtttgaaaagtacctaacatattgtagacatttaaaaaatggcagctattatgacttctctttgaacttttaaagtcacatttggttgccctatgactaaattgccgtgccaccaggctagactacagtctccctgaaggttgacttatctag

SEQ ID NO: 37048 - DNA, 688 bp, Homo sapiens
acatgagctgagcaccttcagggcaccaggaactgtgcagggtacattagtgagggcgggagacctggccttacagccaggagctaatatctccgtaggagaactgaggcttaaacagcctggccaaggttgccaaacagcccagcgcaccaccctccatggccaagctccactctctccctacagctgtagcccagaatgtggtttagtaccagaagactgatttctctttcgctgtatgcagaccaactgttgacgaggtgatggtccaggaagccgtggttggaaggaggtacagcaaatattgctcagtgcttagtcactgggcatgggcctcccaggaatgacagctgcaccctctgtcataacattttatctatctggaggcccaggagggactctgggagccaagattcctactggccccagcagagtacagggagaacattcagttcacaaccagcaggtggttcctaactttctgagaaggtaatgaaagttctggatgttctccccagaaatgcacaaaaacatatgcacatactgttttgcacacagcttcagggaatcacccaccctcagaagcctatccatggagccctgcactagtactttgatctaaactatgggtcctttagtgtgggtgctgagaaacaatgggcaaaacatatgtattctggggaatggg

SEQ ID NO: 37049 - DNA, 1602 bp, Homo sapiens
atgaatggtctgcaaagttacaacataattttatttcatatagaagttttctttctggtctatccaagtgcgaataagctaaactgtgatagaaccaagactgtctttggtgctatggggttgtcagggagcagggactctgttgcctttgtccagggcagaaggaacagctgtggcctgagtcactgatcttttccccctgggcctgggccctttaactctaaataaggctcctgcaaacagaaatagagaggcagatggaaaaaaaaaaaaaaaaagaatcacccaacatggttagatgttcagggcggctctcacatctcaggagcagtaaggaatagcactgagcattctatacacagcaattccagatgctaaggaagggacatgatgtagccccaggtctacaaatgcagcagcgcaggagccaggacggggcctcaggagcagtctgatgcaacagatattcagttcactgggcatggcttcttctagtcctcggccaagtggactctgagcagtgggatagggatgtggggggaggtggtgggggaagagagggttgcccagaagttgtggaatctcagcaaggatgccaagccagaggctggcttcaagcagccagacgtctgaatggagcaagctggagtcttggccattgtggggctgaggccctaggctggccagtgggggcaggacgcagcaggaacaggagctgcagctcaggaaccaggctagcactgtgctcagttacctgaagagtgggacaggcagctcaggagaccaagtctggagaccctcagcatccccaactgcagctcaggcctaggctgggaaatggggacaagcggagccatggcaggagaggagcctggagcagctcccgctgtggaagcgggaggaacatggagcagggcagctgggctgggccaggccgacccaggtgctgaaaggcttcttacccagaggaatgtctgggtctagtccctctccgtttaccaaggcactgtggggagaggcggcacgggctttcagagtcaggatcaaactccagcctcaccacagagctgggcaagttcttactatgccagggcttcctcactctttcctcgcaggagtgctgaaataactgaaggagagcagctcccaaagcctccccggtgtcctggggctccttcgccagcgctctctggatgaccaggtctctgacctcctcctgcctgacccaaccacagcccagcctaggcagcctggaggacaggggaccgcagcaggcctggacctgacagctgagctccctcccctcccccttgcctagccagagctggtttatttgaactaagaatttaaatgtaaatatgcaacatcccttcccctctgcctccgctcagcgggagggagcgtgtgtccacctctgtcagctgcagcaagagtgccctgtgtgcccagatcctatccactttgaaaagagcagaaatattagacacagctaaataagaaaacacagattattgctggagacccctaaggcctactttgtctgtgcaatagtttgttttacttttcacagaatttattttggctgcagccagattgatggtg

SEQ ID NO: 37050 - DNA, 4790 bp, Homo sapiens
gaacacattaaagaccacttaggaaagttgattccggctcctttttcaaagccaaatcttagacaccaaactaagttcaattacagacgttcattattccttgggtataaaagtctttttataaccctccctcattgtagggctgcataaatggagcatattcatattttccctctctctctttctctttcttccctttccttctctctctccctccctccctctctctctcacttgttgaaacaagcacagtaattgcattaccagatttctaggattaacttttggttcaaggaaaagtgctgagtttgagcgtgtatctgtaattagaggtggtagggtaattagctgcacacagctagacggtctgcaaggggcctagaagacaggtctatttgttctgtttcatcacatgatttaatcaaacagtgagtgccttgctcacaggcctcacaaaacaaatatttgctgattgattggttcatcaaacaactggtcaattcagttaaaccagctctttgctgtccagtaagccaaggaaagaaaaataattgacctaagtctttcactttccaaatggctgctttgctgccttacagaaacaactgcagaacagcacatggtggaggtgttgaaatccactcctttctttccctttaatggctttccaaaataaatagcattaaaaatcaataggctacaaaatgaagcccaaaatgaaaatctacaaaagatattcatcactttgtctacatgaaggcctgctctcaagcagcctgcctccttgggttcaaggtatgtcacatcactgagagatgtttaagtcagtgtatcccaggagcagagctatgttatcctagggaggcaccctctccaccaccagctctccagaagcaaatgcgaagatgcagtcaaatctctgggtattttgatgtggacctgatcacatctagatgcaaaggagacatgaaggccagatgctggtgtcctgccagcttcccagagaaacctttgctttctgtgccacctgttcattagcaggctgcaaaaaactggctggaagccccactctgcccattggtagaaatccccagtggggagtgcctatgagcaaggcattcactttattttccattctggagccgctgttcagaggatatttgtctctgttgggcccagaagaaagaagttcgccccatagtaaggcagggttccagctgtgcacagaaatgcctgcccggaggctctctgctgaggctgaagaatggcagggaggcagctttccatgaaaagcaatttaaagtgacatgatgttaaaggccggcagtccaaaaaaaaaggcaaacatcccatcacctgtgagtgatcccctgagcccggggaacattttttaaaaatctgtctcacaatcacccagtgtttaacttgaagtccatttgttaatttagtaaacacagacatgatattgacaatatgcctctaatccaggcaggaaggaagtatccggtgtcaggcaactccaggccctctctagtgcccctcacctgaagggctgcatgaggcgagacagctcagacagcaggtggaagggcaatggggtcaggggttccttaaccctctgagggccaggacactctctcttgggagtcggggaggaatctgtaaagatcctctcttcccatcacccttagcagtacaaagtggtttacaatttacaaaacacccttcatattttctgactaaagctttcaggcctgtcctatgagacaagttgtgatagttaatttcttacgtcaatttggctgtgctatagtgcccagatatttggtcaaacatcattctatatgtttctgtgaaagtattttttagatgagattaacatttaaatcaagttaaacgggctttgaggaaagcagattacactccataatgtgggtgggcttcatctaaacagctgaaggccttaacagaacaaagagttgcctcccagagcaagaagcaatgctgccggcaacctgcctttggactcagcccatgacttgcccctgagtcttcagcctcatggtctaccctgcagattttggacttgaacctctacaatcatgtgagccaattatttaaatctttttctctgtcttccctctcttgctctctgtctactatctctctctctctcacacacacacacacacacacacacaaacacaccccttgttggttctgtttctctggagaactctgaataatacactgaaagtgttttcagtcctgttttatgacgaggaaatgggcttagtgagactaggaactaacattgggctactgtggtataaactggtcactcagaatcagtgcactggggcaggttcacacacgatgacttcatcattcagaaatgtaaaagtccagggctggtaaagaacccaagaggacagggctgtggcccctgatgtcagacaaatatatgtcttgatcatgtcacttctgttcttgaagatttctggggcttgtgcccccacctcctacccccttcacccattgcttctttccacgctgctgattaaatctaccttctttcttaatttaaccccattttttttggtggtgtcatccacacaaggaaacatgcctgattgtaaagtttctggcaggaggcttctcctttaaatgacaattttaaatagcatatacacaatgctcagagcacaggagatacactgcatgagcagtcatgttagtggcatcctacgaatgtaacctgggctttgtaaaccataaggcattcaacattcaacaaaggtaaggagtcaacattattgttctaggttgcaggactgagtgaggttgagagaacacacaattcttaggtatgagaagcagctcataaaatcttcaagtccaaggttgaggctactccatgctgaaattttgtttaagtaagatggtatgagacaaaagaccctgaacttaagtaagtaaattctgaacccctggttcaatcacctttcttttccaaaccctctcacttctttatggtaaaataaatagggtccccttctttattaaggagaattgttttgattgcaagaaacagaaaccaactcaagccaacttcaacatgcaagtgcagttctcacagaacccaagggccagaacagctgagcctaaggcaggctctggaatcagaaaatggaaggccatgggggaacccaggagactctttttcttccccctccaatgacttctttcttgtctctctgtaaactcagtccacaaagtagaaagaagcctactcactggtcctaaatttgtatttttcctttgttcaaaagtttagtcaagaatggaatcttggctggacgcaggggctcatgcctctaatcctagcactctgggaggttaaggtgggaggatcacttgagtccaggagtttgagaccagcctgggcaacatcacaccaggctaatttttaaatttattgtagagataggggtctctacaaaaaaattaaaaattagcctggtgtgatggcacatttctgttgtcccagctactagggaggctgaggtgggaggatcactcaagcctgggaggtagaggtaagtgttatcagtcctgttttatggatgaggacacttttttaaaaagagaaaaaagaggaggaggaagaggaggaggaggagaacacgaaatataatctcttgttccttattccagattttaggctaagaaattctgatggccaacgtttaagctagatgtccactcctcgtccagttagctggtgggggatggtatcagttccaccaccatggctggcagacgcctattctcatgactcatggctgtagaatgtggaccatggcccccaaattggcaaccataccagcatttctcagacctgtctctgcatcagaatcatctggaaaacttggggaaaaaaatacagattccctaagcctatctggcacagagaccttggactagtggctgcaagcagtcttgtctacttttcctagaacattccaggaatagaagagaataatcagtacatttagcagtactgattagtacagtcctccctactcttccatccctacttcctcttaccccatccaaatgattctatgcaactgtttgaagacctgttttggggaaccactgtaaaatatcatcagacaatgcagaataagagatgcagaataataagctaatgaccttgtacacacttttcactgtgtatcaagagctttcccacttaccaagttcttcctgcccagctgggcattgtgctaggctgtttaatacgtatcacctcattgcatcctcacaaccccataaggtacatgcttttcattttcatttgacagacaaagaaaacaaagctcagagacgttaagtgacttgcgcaagccttcttagtaagcgacaaaaccacttacttatatatctgtctcctttggttgaccctttagtgccatgaggtcatgggtcagaggtgcctgcttttgcccatcccaggatccccaacactaagcgtgatgcctgacataggagaggtgctcaataatgtctgtgggtgaatgtcaagtaaatgaatggcagcctgatggtctttaggctgagccactccgcgtatcccagggagagagcttcccaaccagctggctgtgacaccttcccaagtcctgtgggcttctcggcggactgagctccatatcctttcagcggctggggcagccagagccctcagacctggaacgtcctctggctgttagcacctcatctac

SEQ ID NO: 37051 - DNA, 1114 bp, Homo sapiens
cccaagtgttgggattacagctgtgagccactgcacccagccagaaatgtttgcttttgttattattgccacacatatgcctcatcttgctcatttattccacatgaataggatttgtgtgccaatgagatgacaagcttcctgtaccctttcctccccaacacacacagacacccagtccagcctggtgtgctcaagcaagagcagctcagaccctgctcagccttttgcttgtgaagtaagcttgggcaaattattaaacccctgcaatccggcatggtcatttataaaagggagctaagaataacctgcttcacagagtggcatagaatttacatgaaatttagataaagctactagtaaatatcagcaaagctcagtgcctggcctactacaggcacttaatgaacgtattaatgaatatttgtagtaggcactgaatgaatgtttgttctccccggtactgggcaaacaacagctcagtaaacacttggcagcttcaggtcagtcctgaagagcatgtgttaaagggggtggtggcatcaagtgaccagccccaccctccaccgctggccacaccttccctagtgaccacactgagaaaacacttagatggaccgatgggtgtgaatcccttgagagcaaggctgcatcttctctcttgcacttgccagcatctggcacagctgggtattaatcacacaagacacaactccagcggtggcggccctggatgtctgaaatgctgtccagaacattgagagaaagccaaagaaggaaagctgccctcaaacatgcccaggatcttgctggagatggaaactaacaaggatggaaacatgacagcagaaaaatacagaccagtttgaagtctgcccacctgggagtcaagccacattgaaaatcaataaggcatcaaggccgggagctcggagagccgactggatacctgcgtgggcctcctttaaagaggtgaaagctttgaagttgcagacgaccaataaaaatacagctggcatttacagcttcaactcctcctgcttttgcttttcaccgtgttgctaaagctgcctacaaagctgctccaggccggactcttggcccaggttgacag

SEQ ID NO: 37052 - DNA, 572 bp, Homo sapiens
taaccaagagaagaactagactattaataaaattatccgtctctcattttaagacggagaaatatttctctgaccccatctgctttctaaaaaccaatcaggaaaaaaaaaaaaaaaacaagaataaaaatggaataaaaaactctggctaaatcaagaaacacctatgacctgaactttaatatttataaagaactgctgccaagtgcagtgaaggtcagaccagggtgagaaacaaagccaagaggccatgcttatggctgcagatcccacacagtaaacagagcacatttttccaagttagtgatgtatctggaggagcaaaagcaacagttccttgtttgaaaaagcctgaggtttaaaacctggctacagaattctctatgacacccttttgaaacaatatacacatgacattcctgcaagagaacattttgagaaagttcagaaagtaaggttaataggtggccttgaagctagcaagtcttgtaaattaaaattttgtaaagtctgaatccacaacaatacactccactgaaccttacatatgtaaggcctcgttttaagttagg

SEQ ID NO: 37053 - DNA, 760 bp, Homo sapiens
atattatatgaccaactataaatccacaagtctcaaatactaaagagttggtaattacatgatgagaaacagcttgattaggggagaggaaaggcaggctgtcaacaaacaaacagctgtttcttattgccaaccgataaccagatcatgcatcccaacaaactacagagtttgtttctgttgttgctgctgtgtttgtttttaagcattctaccctcttccactcccacctccaaaatactgagtcaatttagatgtgaaccacaacagaagaatcagatacacaaggataacaagtaaaacactatagacttacaaaaaattctgtaggtaataactaacagaagtttaaagtgtactttccaattcaactttaaatgcctatctttccctgtgcaacacgtcctgtcattactatttataagaggcaggcaatgggccttcacttcctcattcctggattatgaccacagcaacgctgccactctctctgatcctttgttttggaagctttccccattggctgcttctgtccttcctttcagcagaaaggaatgaacatgcttatacctgacaggtgtgaactaaatgaccttgagggtcccttgtaacctgaaattaaatgattcagtgaatatttgataaggttagcatatgaataaacaacaggaataaacaggaccttaacatcaaaggtttaaacaaagaactactaaagtgaatgaaatttttttgatttcatgaagtgaaaacactttca

SEQ ID NO: 37054 - DNA, 1105 bp, Homo sapiens
ttttctgactgagagatgttttagattctaatgcagtagaatttactaatcttttctttcatgatagtatttttaatgttatatataattttttaaatgatcatataattattagttttaaacactgaaagtaacttaaagttttagaaactgtaacagtgatttctgtgctaacacgaaaactagaaggtgaacttgaaactgaaatggatctagtttcactgccaaggtcaatgacatacacagagtaagcaaacaaaagataaaggaaattagatatgtcattttaatttaaggcattattggtaaaaggttcttcaaatcatgctatcatttcacatttcttttaaagataagtaatggtgttacactaggttatgtgtgtgtatacatggcttattacattgttggtgatttccaggaacttgagaaaactaaagctagtatttcaacataggaagcataattcatcctgaagggaaaaatacccagaaaagaaattttaaaacttgaaatttaaggaataaatagcaaattctaacacatgagttgggttcatacacctagtcaaggtcaattacttgttttccttcagttaggtctctgctttgtcacaagtgaatgaaatatctgaattgcaaggctaagtctgaatttcactcataataccctgtaaagcaaagattcagtacagcccatatcctgggccttagagtcaagggacaacattgcaaaaccattttggcagagaattcacctgtgtaaataatgtctcagttttagaacaatttcctctgtttcacctttgtgttttctctatttcaaaatactgcttttgtgtatggggcaaaaatccaaacaaaagtcacctaggtgaccgggcatgggacagactcttttctgtatcccactttactatgataattaaggaattaaaatgttttaaaagatttgagcaaacactgtagaacaggcaagaaaccttactttatttagacctaaactaaaactccatttaataatctctacatgttgactataaaacagtttgttttttatttttttgatttgtttttacatagaattgattccacagagcaggaat

SEQ ID NO: 37055 - DNA, 1832 bp, Homo sapiens
acagtttactcaaaggggaaagatatgtggcaaaggactatagcccagtgcctggaacaccaagactagtctcgtttcccattccacacacaatatgttaatgacatgtcacgtgaggggttcgaggaaagttgcctagagagttcccaattcattcctttcctccggttactgagcgcctcctacatgccaggcgcactacagaaggtgcagttgattcagacagggccaccatgaccgtgaaaagggtgcttcctctcccacctccgataattttaggtataaaaacaatccaggtaaattagccgggtgtgatgacgggcgcctgtagccccagctactcgggaggctgaggcaggcgaatggcgtgaatccgggaggcggagcttgcagtgagccgagatcgctccactacactccagcctgggcgacagagggagactccgtctcaaaaaaaaaaaaaacaggcttgcccaggcttttctatgtctgttatgcgctaagagctgcagcaatttggctgaaaagaggtgtcacgaggtagctaggaggggttttcgggtggtcggttgtgagagaccgctgacagtaaaatgtaatgaacttctcacttttaaaaaaggggtgttattgcccaaatgagcgctcagaacttttttaatggccccaaagatcccggagcccggacgccgggctcttgagaacccgcaagacgaccgccaaggcgcacgcacagctcaccttcccgcccggcacgtcagaagacccgagattccgtgagtgccaccgcaccttccggttcccgccggaagtttttcaaacgccagaaggtccgcctcgcttcttccggaccaagttagccacagacctccaaggcgcggcgctaccgaacggggcggagccaggctggacggaggcggggctagagcgaggatcccgagggagcgccggggtggggctggttcgtagaaatgaaaaatgactttttttttacgtgttatttaccaagaacactaaactcttaagcccacagatacagccaaataaattagattataaaagtagggaaataaggctgctgttgtctacattcgaatttagcagatcaaaaccccatggatttgttttagaaaattctaaaaagcagctttccactgctaatgacttatttccagggactctgagtactgaagagcctagcaagttattgaaatgacctgtgaccgtgccttgttgcagatctaccggaagtgagcatagattttactggataatttttgtgattgggggaaaaaaaaaaggattctttctaaatttagtaaatctaatcttctatatctgagattgttggccaggaaagatcagtttccgagattgtttagggatttttttttccttttaattagcacagtcgtatgttgcctttagtgatggttccagaaggcctagaattgtctactacaatcacagtctccttcacaatttatggtcctgaagaaatactagagaacaccttaccgttcaggattgtgggaagagaaaccagatcatagaaatcaacaacaataatgtactacttactattcacctacttttgatgttgcatttgctactcaggtttatggtaaggggttgtcttggtcaattttctgctgctgtaaccaaataccatagactggtagatttataaagaaagagatttgtttggcttgtagttctgaaggctgggaagtccaagacagagggcattattgttgtgtcaaaatatgatggagggcatcatactggggtaggggtgggggaggcatgtgaacccaattgactcccgaaat

SEQ ID NO: 37056 - DNA, 1756 bp, Homo sapiens
aacttggatttaactgtcaaatagatggcctgtggctctaatgcagcgataagaacagaattcttcactttgaaaagccaagttgctttaaaaaaaagttggggggcacagttttggcatacaccgagtgactgcatttgacctccgcctgcctggggcatgtggataacggcagtggtcccatgccgtgtggtcttcctcttggcttatccccctagctcgctgttgtcctagtggccatgtactatgtgcaggacactttcatagtccgttcatccacagagcagtcctagcctcttctaatctccacttaagagccaatgaagcttccagagcgcaggtaacttaagtcacacagcttgaattagactggacaatgagccacctttccaccgtggctgcactgtgaccctgggtcaaacggcctcatgaccagccccctccacgcctgtccccttcttgcccgggtctgccgccttttctgctccggggccttaggaattctcctgggactgtggctcccctctaactcccctccctcccagttgctttctgttctgctgttcttgtgggtctctgttctcctggctccaggcctaacggccgccccctccaaccttggccttgggaagtctcttggggcggagaagagaggggctgcctcctggcccccaccctgcgacccttcgtcccccgctaagccgggatggcaggcggactcgccggacccctttttagacccaaggctctcttcgcctctccatccggctccggccggggtggggtgacctgagggacccggtagccgacgacagagaaactagaccggccaggacgtagaagggtcgcttcccccaggctggtccggggctgagcggggcaccacagggagcggagacagcggaggcggtgagagcctcgggagccactggggcgagcgcgccagcgtccaccagagggcgctgtcggctcgcggagtggggcgcgggcggcctggagccccccggtgcggcccggcatcagagcgcgcagcgactttgtcactgcaggcttgccgggtgggttgcagaagagagaagagacccacccatcctcaaggcactcatttgggcaagaagggaagagacccacaagaagactatttcacactcttctcatttcaaatgtgtatagagcacaaagttgcatttaccatgtccaagataccgagcagcaccaacatgagtcatcctgggtctccaaatttaaagacctctagggaagtggcaggatcaaagacaggtaccaaagaactatactacagtatattagggagaggcaggaactccaacgagacgtgaggaagaagcggtaggagagttgagggaggagttacagcttcagctaggggatgaggcccggtgcatggaggacttgggccttaaagtgggacagattcgcagctttccaacacatgtgttgcaacagaacccgtggatttaagcagttctggttacacattctgttacacgcaaatgcttatcagtgacaaaaggcaatattccttgccctttagccccagcttgttgatcctgaaaggtaaattagaaataaaaatggattcaccaaatatccagaatgtgctagagatatataacctagtctgaacaatcagatcagtcattctgctaattggtaaaatatccacaggggagcctgggagacagctgttaaacttggttacaggtagcatcaaaccatccgccaaaaatacctc

SEQ ID NO: 37057 - DNA, 3757 bp, Homo sapiens
ataaactcagtagtataaatattttagtgcaatatttaaaattatttaaaatgtggatattgtgtccattctggattctcacatttttatttttaaaaaattgtattaaatctttatcttgattacgtttattggtaccctttacattttgcctctgaaaagtatctcactcatctcactttggtgctggctctgcttcccaaatgcattttcagaagatcaagccatatttgccactgccttccatcacatgccctggaaagggggaaagaggcttcatgagaatagcagagtggaaggaagaagcaaaagggaaaaaagtaataatcaaagaaataaaaattaaacagcaatgagatacccctgcttgtgctttgtcaaacggacatattttaagatatcgtatctccagctgggggagtgacagggtaagacaaccattgaaatcctggctttttacatcggagctacctagatcatacggaagactgaatcttagcaccatctctacccagctgccctgttcaacagggcaggctgcgagaaattactgtattaggaagctccagagcggttgcaggcaaaggctttgcctgttcttaggagatggccctagaacttttcggatcatttttgggacgtgtttgctgcacttgatatcctgtttttccaggggactgcctccttcctcgcctttaagcctttttaggcttttaagccgcaggcaatgataacctttacccactgaggaaaaagtgatcgggaggcgcgttttaaattttggtttacactaaccagacccgccagatgaacactcagcttaccacaatacctacaaattcccagacttgacttggcagaagggcgagggcggaggttttctttccccatttgcataatccccagctccccggcagcggagccgacctcttcaccgccgccgtcttcgcgggtgtcccagctgggccgcgccccggggcccagcgctccggccctgccctcccaggttcccagtctcgggcgcggggcagtccctcgccggccgccggcccggtcccggctcccagccgaggaaatttttccccagcagcccagggctctcctcacgtgaccagccgcggcggtagcttccagcgagagtttaaaggttacggaggaaattagcaaggacacagccactcgccccccggagggcgcgccccattttcccgcagcccggacggcggctgtcagcgcgctgatcagtgccgaagtcccccaaaggggcaccgataaggaccagcgcaaacaggaacagtcactttgcaaaaaataagcagaccacaaaccaagccggggctctaccgagctttcacttgtcaacaagttctcgcagcctgcgaagtccaggacagatcccaaaggggagaatgtccccaaagaaaggcaagagagaagaacagagtttaaaacttcacccgagccatgcttgtccctcccccttccccctcccccaccgccgtggatcacagcgtcccgggacagagtgacagatgggccagaactccgcagactgctcctgcccgccgcggcccgagtgggggtgggcaagggaagggtcccgaggcctctagggcaacagggccccctccactcccccatccccggctctaaaagacagtgttggccgcagggtccccgagagatacgcggcccggcggggcccatccatggccatccacggcccccggcacgcgcatccagcccagcgccgccgcaccccggggtcccgcgcggggtccccgccccccggctgacccgcccgccgctgcgaccccgggcagcctcgccagctctccaccgttgtctcctcggctcactttttccgtattgctcccccaaccggcaaaactttctatttccccaaacactgccgtgcgcgcgcgcgcgtgcacacacacacactcacacacacacactcacacacactgacgtcttttgcgcatttcctgcattagagggagggagactcgctcgcacaccgacagagggagaggagaccgcgggggagcgcgggctggcgggcggcgagcgagcggcagccgagagcggggacgcggggagcgcggagggcgggcgccggcgcccaggaggtggggccgcgctgagtcgcagtccctgccccgccgccgcgctgcgcaccgcccggtgctggcctgcgcccccgagccggatcggcggccgcccggactccgagcccgcgcggatgtgagattccgggctcctggcgcctcccgatcgccggctccggcgcggcgctgcttcgcccaggaggcggcggccccggctggccgtggggcttgtggatttttaaaaatttggctccgaggaggaccatttcctctcgacatgcatccctccggatagactgaacatccctccgttcacccccccgccccgcgcggtcagaggcaggcgctgagtgtgcgaagaggatccgggttgaaatctgcgcccccggttctcgtccccgccccgtcccaccgccccatccccctcccggagtcgaaatttcccgggattatgtttcggaaaggtaggtaagcgccgggcgcggcgcccgctttcccgcagtccggagccggagagccagcgaggcggcgaggcagcccccgcggcttgcagcggagccgacagctcgtcttctcttctggaggtgcagctggtggtcggggggagagacttgctccaaacacggacatcccccagctctcccccctccctgttttccgttaggaacccggcgaggaaatacatgcactggctgagaatcgcccgcgccagggcgcaacgccacaaggtgtagggagtgtgcggggtggggcgaaaggggacccaagagtccctgtggctcggagtgccgggccgtcggttcttcattcctgccctcggggcagacggagtgaccccggcccccactccccgccccgaccatggtagtgttcaatggccttcttaagatcaaaatctgcgaggccgtgagcttgaagcccacagcctggtcgctgcgccatgcggtgggaccccggccgcagactttccttctcgacccctacattgccctcaatgtggacgactcgcgcatcggccaaacggccaccaagcagaagaccaacagcccggcctggcacgacgagttcgtcaccgatgtgtgcaacggacgcaagatcgagctggctgtctttcacgatgcccccataggctacgacgacttcgtggccaactgcaccatccagtttgaggagctgctgcagaacgggagccgccacttcgaggactgggtgagtgcggcgcctccccgtcattccgggaacccggttgtggggtcccggggaaagactcgctggtcttgatcgtagggctccgggacttattgacgactggggtgtgtgtgcctgtaagtctcagtttccttggggaggtacacttcacttcatagttggggagaaacaggcattggcgaggaagatgagacttggaaagaggatgtggccctctgctccctctgtgccctccagttggtgggtgctgcgggaggtttgcaaactgggagagcctgggccactggtgctgaaggttggccgaggacccggctttcttccgcaggcgcgtggtgggctggctgtgtgtgattgtgtgtgggtgggtccctccgtccttggaaaggcacgtggagcctttgactgaaggcttcttgcacgtcctggctttgtcctgc

SEQ ID NO: 37058 - DNA, 731 bp, Homo sapiens
tcgagtgtgaaaggttgagtcaaggtttggacttctggcaggttctcgcctttggctggtgttccgcctttgagatggtcccactactttcactcagcgtccctaccccacacacatctccccctctacacagacactaagggctcctcatggggtttcattattggtttttagcggatgttcctctaactcggtgcatttcctcaagccaacgtctattccactatcatggggaaattaatatagaaatttcctcctttgtatcatcaatttcagaggatgtatgttcccggctgatggccctcccctctatttgcataacagcaggtaaacaatactgccacctagtgggagctcaaggtgtgaccttcggagctcctcctcctgaccccgggacattatttctattactgttaatatttaaactaatgggcagttctgagctcagtgctcttcccagtgagtggatccacgtggattttcacgtctccttctcattctcttaaaacttggagttacaagtgtcagagaagctgttttgtgtacgcagaacgattgaaacaggtgcagggagttttacctactttactttgacttttgctcacagcagtccaggtaggtaactggattcccgttttatacgtgaggaaacccaggctcagtaagattaagtaacttggaactttactgagcacctaacgtgcccaactacgtcctggactacctaggta

SEQ ID NO: 37059 - DNA, 1426 bp, Homo sapiens
cagactgccccagcctacgccattctctcccctgattgtgtcctacattcccctattcttagtttgcaattggttgtctcctgtcaggttccaatccctaggtgctttgtctttttcttcctcggtcccctccattagatctcagtaaacaagtgcccaagaagcacttcctgaccagtcactttgcagtggaagatagcctaagtacaaatccctcaggcaaatgtaaacaaccaggtgtttgtagccagactccatgcagggagatgttttatggatagaatatcccagcaactatactactttctatatcttatttgtaaggaataactagggaggttgttgaggaatgacatggatctagagtggaaaatcactacttctagtaactcctccttttagaactagtagattctagttctgcctcagctgccttccagttaggtgaccttgggtgtcatcctcaagtcccagtttctcacctgttaagtgggagcactggtatccattccacaaatcccatgccagccctgggctgaagagtgtgaatgccaagagctacaaatgagaagccaagagtgttgatggtacctttatggcgattaatgcaagacacatcccaagtacatttggggctctcatttaaccattttctcttggcctgtaaagagtactggaaaggcacaactttacttatgcttgtatttatttatctgtttgctttttatcacagctaccaaaatccctacagtcatcaaggcctggcactgcgtcatacagaagtttcatgtgtggactttcccagtgagagtgatttcaggatctgcttgaggggctttacttacctctttgctgggctcagccctgctatgaatatagaaggagaattcatcctagatgaccaggctgaatgatatttgttcactaccccctggagtgtcacgaggtttaaagtttttggagtgtcctggtgctccggagctgggaaagccatcagtgattgtttttcctggggatgagacagcatgggcttcatccctacagtgcaggggtggataacttggcacctcaccatccctaacacccagaggtgcctttttgtgtcaactagggagctggcaatctagcactggccagactccagacttcttgtgaaactcctggattttgtttgttttgttttctttccttagccttagattcatgccatatttttatgatcattatgccagggctttgtctttggagcaatcttcctttcctctgtgcactctcttgcacagcctattcctgtaccagggtatccccagcgccaccctgcatggccctagccccatggatcagatggccccttcccagccttctcactgccctgttacctcctcgatattcctgtccatcctccctccccctaattgttagaggt

SEQ ID NO: 37060 - DNA, 3283 bp, Homo sapiens
gggagccaagcctggggtagggaggtggaggaggctcttggttcaggacttccaaggctagtctgggataattcaccccttcaagcctcttgtaccctatctcacaggctgtgggcatacttcctttttgtaatatttagaagttggtgattgatggaaaggagggacagcatttaaaaatattatttatgtctagagttactttactcaacattgaatatttacaagtggaggtaattatctcccctaagttagagtttctaagggaagagacagaccaccatagcctggagtggacacaagcaacaaatgtgaattgagcagcctctaaatgtaggaccctttgctgggcccaggaggatggtgggggtggaggtatagagcaggccacacctctgaagggctacctgtggaacctacctggggactagtagtacaggtgagaagagagttcctgacaacccagttgaccctcaatgcccaaggggtgtctcagagggagactgctggaggaaggattgaggagtcaggatgtgccctaggaaagaaggtatttggagcccagcatgaggctgatttggggactggcatgtgtcgggggacttgggcaggatggtggccaggggagcccggcctgagcattgggcactggtggtggtaaataaggtatgattggaatgcaggccacagtacagaagtgggttgcagtgttgtggaaatgaatgtcaccctggggacagagggaaggcttgggcaagaagtgtcccgatggcagctgtattgtagatcagctaattgagattctatctgctgggtggattcatgctgaggagagtaagggaagacctaggagctgtcaggctagaggctgaggattggcaccagggacgagaatggaaccgaagggtgggcacagcagcttacagtgaagggcttgagggggcttagtgactgaggagctctgaggtgcggggcgtgggaggacctgtagccggcttcggctgaagggcctgggagagcagggtgcagaatgttctggcacctgtccagggtactctgtttctgagtcatttgtgtgtaccttttcagaaatggttgtgtaatgtccacacatatcagtttttgtagatatcaaatttgtgtgtgtacaaaggcacacagagacagggaagctaaatgttcctgtcacctccaaaagggagaatggtaattttgtattttgtagtttagggaaggccccatggcattttaacagcagccgatttacggaggatgaaacttgagccagcccgggagaaaagtgctgtgggctcttgggagaaatgagaaagcagcccacattgtgtacccacaagcaaccccagcagatgaggtcagcgcctgggggtgcaaaccctctggggtggcccaggtcctgcctgcagggtcgtggctgtctgcagatgtgtctgttgctggatgtggacacaagggtaactgccagccatccccaagtctgcacagtcactctcttccttgtgcctgggctggggtgccctgtaatgactctgggcatagagagctttgtgccatgggatttgcactttccacctgggtaactaagaacagcttggcaatttaagtggtggttggggtgcctttggaggtgctgtggggcaagacgtccgaatccgtgtcactcactgagtgagttccatcattgctaagacttttctatagatttctcttttctgccttagttaggagtgcttgctttttaaccttctgtctctgtaaggagagttgcttcttaactttttatttcagtaatgattcccttatgcaaaactctcattagtaattacccttctctcccactgtagggtatacgattggtatgggatggccaaaatataatcacagataagtgatggatctatttcattttttgattgggttctgttagtcactgccttgtcattaattcctgttaaacccccactcccaccccaattgaccaggtgccatgctaggcccaggggaaacaaagaggtatggactctgtccccaaggagcctgggctcctactgaagttgttccttgctgtcaagccgtgtgctccaggaaacttgtcaaggaatgaaatggactccactagggctttgaatattgggatagattcccaggcctgggattcttaaggcttgagaagtttgtcctcgaggaccacagccttcctgctacttcaaacgacacacctggatctatgagagttatcagcagtaacgttgagcctctgctctttctggatgaaaaggaactggaattggttggaaaatatttcacccctagtagctgagctgttgaattactttcgcagacaggctattgaaacttttggatctcattaaatcaggaaacctgccattcactgacagattaatgaattaaagaatcagagagtgacttgactttcaaggaaagtaagtggtggattttcttctacttgactaattgggtaccaggggatgtgttacactccagatagtcactccacagcaagaaagtcgggggtagggagcagaaaggaagccaggagtgggccatggtggcaggcactcccaacttcttggtttaaatgccaccagtaggcatcctaggagagcagcttccatctgcctgggacagagagcttccagtgttccatacctgtgcctctggctgatttcccaggttgttccctgggcccagttccacctctgagggcatgtccagctttgctgctggcagccacagaggcatctgagaggcatgtgctctggacaactgggtctgttccgtgctggcagagctttcgcagaggcctgcccagaggctcgcagctcctgggaggagcaaggatatggcgtctggctcagctgagatggactgggcattgcactcacaggatgtgctcactggctcactggctttccttggcactgcagggaggttggcaggcttatgtcacacaccctgcaggctgctgcagttccatcctgtgtagtgctgactgcactcccagctttctatgagggcacagcccagcatggctgtatgcaagtttactatgtttgttggtggagaggtaatcttgaggcaatcaaagagaatcagggataatttgcaggcttcagcaggactgttctgttgttaacacaattagttccattaatcctctccaatcatctaaggtaaacagacagcctttgaagtcagggcaaacatctttatgaagaaaggaaaggatgaagtgatcaactcc

SEQ ID NO: 37061 - DNA, 860 bp, Homo sapiens
acctgaggaacttggagcagctagagcagaactcctgtccccattccacaagtatactgaggacggagttagtgtgacagtaccctatgccaggcaccatgggaggcactggggagataatgtgaacaacagacaaaaagctctgccctcatggaacttacattctggttgaggagatagattgcagatacttgaaaagtcctagttgttaataatttataactgctaaggagggaaaaattaagcaagaaagggtgatatgaactgtagggggtggggatgctgggatgttaggggaacagggagccctttgcgtaactctggaaggaaacaaagtcagccatgcaggaatgaaagaacatcacgttgggcagagaaaacagcaagtgcaaagaccctgcaagcaaagaagtagcctgactggaacagagcatgaggaggcaaagggtggaaacgaggtcagagcggcagcagagagccagctcatgcagggctttgcagatcagttaggactctgaccttggctctgaattaaagctggagtcgtaggagggctctgtgcagaggagtggcctgacctgaggtttaacagcatcattctggctgctgtgtaagaatgggcagcaaggcagaaccagaggtcaattaagagccactgccatgatccaggccagtgatgacagtggcctgaatcagcgtggtggggataagaagtagttaggttttggatatatttgagcgggagagtggaatcttactgacatgccagaagtggattggagatagagaagtcaaggatggctccaaggtatttgttctaagcaactggaaggacagagttggtgttaactgatatgggc

SEQ ID NO: 37062 - DNA, 512 bp, Homo sapiens
ttagaatgaaaagctagaaaaaagttttcatttttttctagcttgggagaatgtttcccacgcattctggtagtggagtttcagggtctttctctttccccagttcttctagtgtagcagtcatagctacgcccctctcatagaactggggagagaagaacaataccaggaacgatggcaaccatttgtttttcaaagtactttgataatccctggagtctctacaacactctgaagataggcagggaaggtgttatcccgtgacagagttgagataaggggtcaatgtccagcctggagctaaatggctaatcagtaatagatagagggccccaggatccacatctctgcagctgcagggcctgggcactgccctggtggtgagctccaggtacaaggagggtgagagaggaagaaaagcacacgttgccatcatcccgggcctgcttagccttcacttggtggagaaggagtgctttgccttgggagtgggtgggggctggggttctgcc

SEQ ID NO: 37063 - DNA, 1431 bp, Homo sapiens
aggtcttcatataaaattgcagcttagggttgggcacggtggctcacgcctataatcccagcactttgggaggccaaggcaggtggatcacttgaggccaggagttccagactagcctgtccatcatggtgaaaccccatctctactaaaaatacaaaaatcagctgggcattgtgacgtgccggtaatcccagctattcaggatgctgaggcagaagaattgcttgaacccaggaggcagaggttgcagtgagccaagatcatgccaccgcactccagcccacacgacaaagtgagactgtctcaaaaaaaaaaaaaaaaatcgcagcttagctgaattcttgatagaaggtggtgacttagatgccttctcttctggtttgtctgctgtgtctgtgtgcacctggacccattgtgctctggaaagcaggcacactggagtcctggagtgcaggctggctggcgccttgcagtgcctggtgatggctggggtttggtccctggtctgtcccctggggttcccatgtctattggtgaggcagcagtgtgtgctcgtaggagaccctctgtcaagaggctctgttaggagccagcctgctgccctgcctttgaggctgatccttcaccctaggagggcaggcactgagggccagcactctggtcacgccaaggatgctatggcgacccactgaagaatgagctattaccctgcccacccctgcctgctgtgcccccaagcaccccttgggggttactcacttgccttcctggtatcaggttaagaggttattagaccttccatttattcactcaattcttttccctgctctcctgagtaatagctcaggaacccgtgccccagccatgctgggaacatgcttagaaagtaaggggaaacctttgggccagcacccacgtggttttgaatcactcaaggacaatctgcctaagtcactggcttggtggccgtgggccaagcaaggagtcatccagtagcgcctctgccctcactgtcctcctcctccaggtttctttaccgagaggaagccagcgggaggcccgacatccaaaacattgactagtgtgcccccgtgtggctctggtggaagggtttggaaaatgcagccaggttttcctaaccttacccaccaaggccggaggatgccctaaggacagcctgcagcccctgcagccctctttttgcgtaatctttgatttttcttgttattatttcttaacagttaagcgccttaaggcctcatttaacttgagttaaagaagtgtgattttggaggacccaaagattttccactggtgtagggaatgtctcctcccggctctgagagacttcctccaatccacaacctaccgcaggtatgtgttcttattaaaaggggcagggacaaaagctctgcctgtccctcttgtact

SEQ ID NO: 37064 - DNA, 2137 bp, Homo sapiens
tgaacccaggaggtggagcttgtagtgagccgagatcataccactgcactccagcctgggtgacaaagtgagactccgtctcaaagaaaaaaaaaaagaaagaaaacttgtaggtatatatcatcgttccaacaaaagctgccattatcgaacgcctactgtgtacctggtacttgataatgattacattctgtcactccaactctggaaggtagatattatcctcccccaccccacttttctttaaagaggtgaggaaactgaggctcagcaatgactgtggggatctgggagcagactgcaggtcttgctggacccaaggcccattcgccctccttgctgccatgctggcttctctacagtgagagtagcctttacgttacgcaccactaatgtcactcagagggtcccgacccttccccttcggcctcttcttgttctcctccctctgttcctcttggattctcaggagccagtgttagcccagaaatgaagaattaaagactgttcacacccacatagaaccatctgctctcttagcctcagggcagggctgatgggggtggtatttagtctcttggaggtggtatttagccccttggagaggtggtgcaaatatagaagctggtgtagatggcttggctggaggggggctatctggcaattcaatgcatcttgtgagttttggagaactagggtgactatatcatttatcctccaagaaaggacacagttgagaatgataagtgacactatacataattactctaagaaaacaggcaaaatctaggactatccttagtgacttggaacctacatcctccctacccactctatagatatccctgcattttccaccttgtgtctgtgattgacctgttgtgtccctttcaacatttcagcgcccacccctcaaacccccatcaagccttgcagcagctatttattcagttagcaaacttttcctggcctccaatttgcattctttcctaacttatgggtcccttctcttttgcctagatgctgcctttccctggctgtttgaccataaactcatggtatcatgccttattcagcaactcttagaacaaagtaaacaaatgtgcaagtttgcttaaattgagaaagcttatatttacaaagtcgtgccagttttctttctcactcatctacagttctctcaaacattggccctattcctgatgtattagattgcaaacccctgagggcagaggctgggtgttctcacccagttacacatggtgggcacctcattcgtaactctttctagcacattcagcgctctgccctctggagtcttgcggctgagtcaacactcaggaatccagcgcagtaggctaattccacgctggctctgacctcatccaaccctgctgtcccagtgaaatccagcccacagcaccctgccagggtggaggaggtgccgggctataaatctccccgttgtttcttctcccggaaaatataaaaccaaaaccaaacattatacattatgccctcactcacagagtcacttggaggcttcaataagacaagggatatgggtgtgtttcgggaaagaaatttgatacaagtgccaagtgctgttattgaagaccttaggcatttattttggtagcaccccaatagtgacaagagatgggcttgtctaaagccagcactgccaccttcccctgtgttcaccacttcattccctgatgtcttactgtcaggcagttgggccttggagctgcccttccttccgcatgttgctctttcatcatttcataccgtattctcctgtagagtagcatctgggcaccttcctttgtcgaggttactaagactttcaaagagacatttcaaccccaagtcactaagagaaaatgtaatgcagcaagtgattccaatggcagttagttaatgcacttttttttttttgagaaggcgtctcactctatcgctaggctggagtgcagtggcgcaatctcagctcactgcaacctccgcctcctgggttcaagtgattctcctgcctcagcctcctaagtagctgggactacaggtgcgtgccaccaggcccagctaattttcgtatttttagtagagacgaggttttatcatgttgaccaggatg

SEQ ID NO: 37065 - DNA, 5541 bp, Homo sapiens
tcctgccttaaacacatacatgcacacagatgcatgagagttgaaccttttacttcagattttccataataagtttgatctgggcctttgctgactgctgtgtttggagaaagaagatcatgtttatttaaaaaacagaagcattaatttcaatctttgtggcctcagtattgaggaggggactgacctggagagagaatagactttttcttcatggctaggtgttcctgctgggcacaggatggctcagatcagatttagggaacactttgatctgaaactttcttccttgcttttctcaagcagatacaaactttttgttcccagaggttaatgcctgtgtgatgattatatttgctccggaatcatctaacttaccctcttacctttcaaaattctgcatgaaacagccagggtccacacaaatgagctaaagtggggcctctggtcttctctctgtcacctccttatgttccctggcatgtgtgttgtggtgtgagagggagttgtctctatgagttttaattttccgggttttatttgtttgtttgtttgtttactagcagtctggtttcaaaaaaactttcagaacttcttgtcagaccccatatacatttaaaagaaattggcctctcctcttcctatctgctaatcatttttcacatcgttttttcatttacagcatttgggaaggaaagttcacttaaaaaatctttagaccacctgttagagaaatacaaacagaatgcttgttttctgggataaaggggggaaaacctccatttcatattttttaatgtgtgtggtatggtggaaaagacatgaactttggaaccggtctggccttgggaccaaatcgaactccaccacttaataactatgtacacctagatgagtcacttggattttcttagtgccggtttcctcattgtgtggtggaggtagtgatactaatcgtgtagaatcctttcgagaaatagagaaaatatgttttaatcacctgctataccataaatcagtgttccccaaccttttggtaccagggactggtttcatggaagacagtttttccactgatgggcagggagtggtgtggggggcagaaggggaagggcattagattctcataagaagcccccaacctagatccctcacgtgtgcagtttacaatagggttcccgctcctatgagaatctaatgctgctgctggtctgacaggaggtggagctcaggcaataatgcttgcccacccaccaatcacctcctgctgtgcagccaggttcctaacaggccacagaccagtactgtggtcccctggggattgggggcccctgctgtaaatggtgcctattatttctaacatcccgttttcagtggattttatcttttgctttagagatgccaagcacccatcagcctttgactgaaaaattccccaaatttagctcctgcctcactctccttgcagttcctacaatcctttctgccccccagttttcctacctgcccagcacaacctctccaaaaaggatctgagattcacctatgttgaacttataatggccctcgcagaggctttctgtttcaacagggttgaaagcctggcactaaggagtaaagcaaacacagaggggctggaagcaagagggatcactttattttttagaataccaggactttagcgtctctgaattcccagctctcaggagctaagtcagccttactcacttatacacaggccctggtttccatgtgatagtgattctaatataagctgacctatcatagcattgatccttcctctgcttctctccataggcaggagtgtgtaacaccaagtacagtagtcacaatacctacctcctttccccccccgatttggttgagcagtgaacaagtctcagagttaaaaacatttttccttgcaatgtttaccctgactttctcctgctttacctattacctcttgaatgaagtatctactgctatataacaagttatctcaaattcagcagctgaagatagtaatcaagatttattgtgtcattcattttccgtgagtcggtttctgtaaccccatagcctttagggctgcaatgcctatggcactaaaagtcttgttatttgtttgaggggggaatgtcccatttcacttggcacatttcacaccctttccatgttcaccaagtagcacctggggacaggcagagaccccatttagactttcagttcaggagcagctttagctgaggagccaggcttgttagcatttcagaggtgtagcagcctgccttggccagggcagtgctactccattgccaggattcttttttttttttctttgagacggagtttcacttttgttgtccgggctggagtgcaatggtgtgatcttggctcactgcaacctctgcctcccgggttcaagcgattctcctgcctgagcttcctgagtagctgggattacaggcatgtgccgcgaagcccagctaattttgtatttttagtagagacggggtttctccatgttggtcaggctggtctcgaaatcccgacctcaggtgatccacctgcctcggcctggcaaagtgctgggattacaggcgtgaaccaccgcgcccggctgccagggattcttaagactgtggtagacctcaaccccagcctcgcctttgctacctgttcccaggtactgcttaaaccaaaacctactgaaaaggcaagtgggtgactagcgtatgcagggcttagatttttggattaggaaagtgacactttctttaagtaaagacacaactcttgggctttcctgaggtcagcaaggtgtaggatggaaggtgaattttaggaaagaagttgggtaatgtagaaccattcctactttccccccagggccctaaagaatgtatacctataagaaatctggctgagatttaaggcagggcctgtggccagtaatatttaccttctagacaaagataactcactcatttgaggaatttggtcgctacttttacttcattagcaccaaggactgagctaactggatctcccttaagcatctgtggcctcagaattttttctcaggttcattaaactgaaaacgcccaccaccccccttccttttttgttcccctcttggcagttttcattttctccaaatggaagtttatagatatgcagctcagcatttagctgatgtttctcttggttgcagagctattagaaatagacttttttcctcacacagtgactattcttttcccaacattctcatatcactatagaagacagctccgggggagagaggagttgccaagccttaaggcccgaataactgggaatctggcaaatttcctggactatgatgtcccctggcctgggagaagtgccagcagcgggggtgtcagggagaggcactgtgctgtgtgcatgtgcgtgtcagagctcctgagccctgaaggagcatgagttcgattctgggatgctttcagttattaaaagcattattgcttttgaccttctcatccctctctccatgtgcagagttttggtcagtctcagtggaacataaaaactggtaagaaaaagtttaattgaagcaggtttttgaagccaaaggaaaagatataagttccacaagagctgtggccattatagctgtttctgtggaaagacttggggcttgttcacctatatgaagcttcctaagggacgtctatctcccagtgccctgccgtggggactagatgggcctgggtcgatagaagggaggatggaaggaaggcaagctcgtttcctgatcagtaggaaccaaaaaaccagggagagtagattgtgttatgtaaaatgagtccctctgctttctgggaacatgtggggttcatttaggtaattaccagctcagactgggtggcataataatcatctttacttgtttttatttatttatttttttagaccgagtcttgctctattgcccaacatggagtgtggtggcgtgatctcggctcactgcaacctctgcctccctggttcaagcaactctcctgcctcagcctcccgagtagctgggattacaggtgtgcgccaccacgcccggctaatttttgtgtttttactagagacagggtttcgccatgttggccaggctggtctagaactcctgacctcaggtgatccgcccaccttggccttccgaagtactgagattacaggcatgagctaccgcgcccggccatctttacctcttttatcctctgtctttctccatttcctttgccttaccattctttcattgccttttatctccattttatcttcagattccctgaaattcttccttcccaggtcatctaatcagaatacccacctggtcagcattctgggcgccctgccgggactccagatctcttgggaaagaccattatttttctttttaattctgactttaaaattagcaagtgctcaaaactgccttagtaaagaaggagtttgaggaactaaaaagttggctcactgcggtagtctgggaaattgtgcaggcacgtacctttgagaagctctgtggagcccaaggtgaggtagctgggagccttgtgacgtcgaagggtgtgatcttgagttcactttgctttagtctcatgaatgtggcctgccactgactgggtgatgtggaatggctgctacgaacagcactggaagggtgtgggtttttcaataaataaccccatagcctttagggttgcagtgcctatggcattaaaaggcttgttatttgttcgagggaggaatgtcccactctactcggcacattcacaccctttccatgttcaccaaccagcacctggggacaggcagagaccctactaagacttttaatcctgctgtccacaggcccgttttaatacagcattttagaagcatgagcagtggccagaacctggcctcatggaacgtgagctccattgtgctcaggtgcccgagaatgcagcaattgctcagtttcctgtgattcatctcagatcatcactggcaccaacagggattctggtcccacccttggctggtgccccacttggcagatttcccaggctgggagcactctttgagctttcagcaggtctgcctggaggctttttgctctgtggtttcctcctggaagtagtaatttttactgggtaccagaagcatgcagtaaagttccaccatgactgtaatatgtaactgtgaatggatggaggagggaatgaacgaatgggcgaatgaatgaatgaatgaatatagactagaggctagcaggcttcctgcttaagtgaaatcactgctcctcggtgcttctttgtgttcaacacagtgtgcttggcatcagaaaccatggggcagtgagattggggtttggcatcttcttttctcacattatctgtcaatcaccatgttttgactcagtttactctaatgctgctgtgcctaccgtatcaaagtctgagattttcactttttttttcctatgtagtgaacactagctgcagttttgttttc

SEQ ID NO: 37066 - DNA, 765 bp, Homo sapiens
acctgcctacagcctgtgagagattatcccgtgcattggggctgtaaaatattcattgatataaaaccttctggagtttgaagttcatagcctaattgaatcaaggagaaaccatccctggaatgttgttggaggttggggttactgtgaatcttgaagctgcttcagaggacgtctctgcttcgccttatttatgcctttgtgaattcttgttacatccccacagccaagttctccatttccatagagagtttcccaaaagttatccagctttgtcttggcctttccttgactcaagttcaccccttctgcagtgaggcagatgcaggcataaaacaacggacctccaaagagccaaatgggtcctctgggaggtcagccaaccttgatgttgcctcagaggtcacggcaaatgaactgtcatgctggctgagcacggctgagtgcatccagtgccagcagcgagcatcttttggagcggttcagaggtgaacgggcatggatccggcaactctggtgtgcagcgggcccagcgtttactcagtccagaagcacaggcagctgggaagccggtggtttccctcttctctccccttctccacggcaagctgcagttccctcacctcctgtttgtgccaagcaaccccccactcctgcagcatgagggagcacctcattacctaatactttttaggcaagtgaaagctttaaaaagtcactaaagagcattagagaacactttttcaaatgtcagcctatataatc

SEQ ID NO: 37067 - DNA, 3707 bp, Homo sapiens
aatctcagctcactgcaacctctgcctcctgggttcaagtgatcttcctgcctcagcctcccaagtagctgggattacaggcacctgccaccacgcccggcaaatttttacatttttagtagagatggggtttcatcatgttggccagggtggtctttagctcccaacctcaagtgatccacctacctcagcctcccaacgtgctgggattacaggcatgagccaccacgccagaccttataatgttaatttctgtctctcccaatccaaatacaaggtccatgaggacagagatttttttttgtctgttttattctctgtttacccagcatctagaacagtgcctgcacactgacatccaataaatatttgttaattcaatcctccgtgcatagttatataatttgcttttctacagtatgtcttggagtatttccaaggcagtgtacagacatctactttacttactagaaagagtccacattgtggatgttccgtagattgtttaaaatgttgccctcttgatggatgtttactggtttgtgtgttgtcgccattttaatttatgctgtcacagacatcctcatacataccttttcatgcatatgtgtgaataattatgaaagaaaggcccacagaaatcaaacaatcactttaaacccttgtctttttgtggttgaattatacaaggagggaattacataagggcacttttacttgtttgctttaaagtcaagccatgttaatggactgctttaccttccttttcattgacgtttaatttgtgtggcttgcatggtgagcttgggattctagttccctgttatctattgggtctggtctgagaggtgtcatttatgccactgtagtactactactttccgtagagttagaataactgaaaagcatgttgtcctgatttgtgcaaggcgtcgtggtgaacctggagataaaacattactttagttctctagaaacttgcactgtgcttggtcattgaacataataagtgaaatcataggcgataattcaggcattgagtcagaaataagtgtgagcaatttacaggcaagagagggcctggaaaggggtgtagggagaaagaatgccacaggagtgctttggttgactcagaatcctttgcagtaacatccacaatgcctggggaccatgagaatgtcccctgtacacgtggcagattggctgaaaattcagtctgagctttgatctgaggaatgctgggtagcagacaagcggccgatcgtggtccccggaaagctctgagtcacggttctggtgtgatcaggactccaaaatctctttctggtgatgacatttggcccagcatgaccccaggggggcatccctcttacctcctttctcctcattctgcgtgaacgactttgcggtcgttcactctcacacccctgccaacttccattgcacaagcacacaatttcccatttgcaaatatttgctctctgtctctgagcttggcatgactggaacctgttatgaaatcaaaccattgccctggctcaccctcaagggccaaattaccccaacataaagaaattcctgcagcatacatgggcctgggcccctccttaggagtggctctgtcaccattcccagaaggttgtctgcttgctttggaggaattcccaggagcctggcctgccttttgcttcaatctcagctataaaaagggtggaaacatggaaaccaagtctctccaaatgacggtaggatgtgtgatagaaggtgaaagtcagagtgcctgaaccccagtgtgtccccagacaacactgctgctgctgcaccacccagcacatagtaggtcctcaacaaatgtgtggtgaatagctgggtagtagtagaagagcgcttctctttttgtaagagcccctggcaaagcagatctatttcttcccggtacaactttatccaaatgaaaccagtgaaagtgagcactgagaggcattctggaaagagaagccttaaagggcagcctagggctgggagtggattggcagcaggggctcacggcctttggccttggtgctccccagtagtgttgtgaggggtgggggtgggtggttcatttggccacattaatgcaaatgcatctcaggtttcttttggttccaacagggacgcccactgtcctttgctggtctgtggcctcccagtgacacctgcagcctccaggagcccatcttgctcccgttatggctgcccagagtaactggagctccccttcctcaccactttgccctggcatttccagacttttcaaagcactttcaaagtcactatctcacatcgtgcatgctaactgatgtgtgattgagattttttttacatattaagatgagtacataactcaggggaaatagcagactttttaaaaataaaaggcaaagtcctcaaaaccaaaaccaaaaaaagataccccctttgccgacctgccagcccaagttgttttgtcaggacagacaggtctggcatttcaacaccagagggagctagtggtcaagttatgtagacaagttagttgcccttctcaagaaattctcaacttggctcttttattctcttttccgtcacttcacagagaggcagaagacagctttcatgggtttggtgggtggagcaggtgtggtgaatgagcatcaaagggcagctgatgcaatgaggcagggtagtggggacagaattctgggcacagtgctgttgcctggtctctgatcagcccgcggatcagagttattagtgataactccattagtcaagtcggtgccatggcctggctgcgctggagttttcttgtttgtttttgtcctgagaaagccaccctgccaccacctcaccccacccccacctttagcccaatgggcatcttgggttcagtagctcagttgaactgtccaggctggtctgggggggctctctccagacaggtgaccaggttatgtagagcattacggagatctggctgcttatcctgcctggcttcactccaggaacagttttggtttttaaacatttttagtagactttactttttagagtagttttaggttcacaacaaaataggtcaaaggtataaagattttccacaaaccttctgcctccacacatgcacggcctccctcaccatcagcattctgcaacggagtggtatatttgttaacggtcagtgaaccttcattgacacatcatcatcaaagtccatagtttacattagggctcactcttggtggtgtacatttccatgattttggacaaatgtataatgacatgaatctaccattatagtatcttacagaatagttttactgcactaaaaatcctctgtgttctgcttcttcatccctccctctctcctaacccctggtaaccactaaactttttaccattttcatagttttaccttttccagaatgtcctatagttggaatgatacaggggatagccttttgagattggcacctttcacttagcaatatgcatttaatgttctgctatgtcttttcacagttgctaactcacttctttttaaggctggataatatttcagtgtctggatataccatagtttatccgttcacctactaaaggacattttgcttgctttcaagttttggcaattatgaatacaactgctataaacatccatgtgcgggtttttatatgaacataac

SEQ ID NO: 37068 - DNA, 10199 bp, Homo sapiens
ctttttgtagttatcacccaatccttggatattttttccagtctttgttctctttattttttcatttttgaagctgctatggatatatcctgaagctcagagattgtttcttcagccatgtctagactactaataagcccatcagaagctttcttcatttctgttagtgtttttgatctctagcagttcttctgattctttcttagcatttccatctctctgcttatactgcccatttgttcttacatgctgtgtacattatccattagaacccttagcatattaatcatagttgttttaaattcccagtcagataattccagcatccctgctatatctgagtctagttctgatgtttgccttgtcacttcaaactggttttttggggtttttttgtttttttttttctttgccttttaggatgccttacagttttttcttgccagacattatataccgggtaaaaggaactgtcagtaaacaggctgttagtaatgtgagtaacgtgtggagggagggaaagaattacatagagctgtgattagggtgttttcatgaatttgtgcctttgagctgtgaacctcacaagtgctgttcagtcctcccctggccttagataggacaggatggctagagtgggctggagttggggatttccttgtccccagatcagtcggggtctgataaaacctcaatctctgataaaaaaaaaaaacaaccctcaacctctgataaaatagtttctcctaagagaagccctcgttaagaagagcagagtgctctgggctattttaaaaaatggttctctccccacgttccccacccccaacccccacactgaaatcctgagattttctccatatttactatgagaatctagttgagctcctgaagagcacgactctcaactgaatgtacaaaagtctatcaactcaacgactgggtcccccttagagtttttgactctcaggcttgtctgctctgagcccatttgttggttacagttacagtttttctaccccagcattgttcctacagaggtttctgcttcagtaagttgcgattctctgtattcgcctggttggctgtctaattctgggagcagcagtttcagtttgccctaggacttcacttcacttggtggatctcggaagagctgttgattttgtagtttgttcagcgttttgcttgttagaatggagtgctgctgacttctaagccccttaggtgccagacttcaatgagcaggttgttttcacctgtgatgtcttacaccaaggacaactaagtgaagagggaaaagcaaaggaattcattgaattcagactggagatctgaaagattcccagtccctggagggaaatataaatgtgacatttacttacttatctatatttagggtatacgtagaaaggatggctggaatgaagtactagaaacagtggttatctctgcaaggtggtttaatgaatgattttggttttgtatgatggaagacatatatatatatatatatatttctgtattttccaaattatatcttaaatgaacatgtaatacttcatgaacatataatacaatctcaaagaaaagaagcaacatcttaggccatgaacacttatctgtcttttctccatgtctccttacagtctgcaaaatgaatgttcaccgtcgatgtgagaccaacgtggctcccaactgtggagtggatgccagaggaatcgccaaagtactggccgacctgggcgttaccccagacaaaatcaccaacagcggccagagaaggaaaaaggtaactggctgtttggtggtgttgctggagcccttttcaggctagcatttctgtgctgacttccagagggtgctctggagtgaggtaataagattcctgggtttgaggtattttactcagaactgcagtacttaaagaaaaaaacaaagatagaagccaggcaggtaacattaatgtcttcttgagctccaaaagtggactgaaaacacagcaagcctcaagggttacgtttgccaaagaaacataaactttgagatgaggaatttgaaattccttctagaaaaagcttaacaactccatacaaggaaatggacttatctgcttccagaactggcatgaaagcaatgtcagtgtctgaacttcacccttggtatcattataatggagataaatgggtgaagaactggaaccacattcttttctagggaggaagccaagatgatttgtgatcataccagcactgagctgcctggggaatattgttaatgtctcacgacatgaaacatctgggccattctttggagaccaaaactgtctctatctctgtgacattctaaatatcagtaagaagagatccatttgccaaaatgttattttggtaagtcagggcccacagatgtaaacagggggaaaggcatccgtagcatttcatttgtaggctcttctttagccctggctcctagcctagaaaatttaagaggtctttgaaaagtaagttatgagaaaattagaaccatgttaacagggcagaaaatccgggtgaagggtgcagtggggcgtggccctcattgcccagtggcgaacatcctcaagccccctgctagaaaagcaagtctgactctaggtacctctgcaatcttccgcctaaatagtctccctgaattttgccctgaaatgtcttctaaaggcatttcctacatttcctggtcatcttgtcatgttagaagctacccgtggctcttccatgttgcttctcttgtataggaaaggttgaagggttcttattttcttaaacttctcctaccctgttttctcaataagcaaagctgttgtgcaagggttgcagaaaaaattctcttctctctggttgagataactgagactttgtgcttttggtggctcttctcagctttgtaaattccactggtggaaacaagacttcacttgttgacccaaggccctggaattgcaagcagagtatcagtacccaagaatgctagggccctgctgaagaggcaagctgagcaaacactctgtcatgacaacgttatgcaaacacatttaaaagctctagagagaacccttttcaggagacatggtttttattcttgtctagaagtaaattaagacagaatctttgtcatgaaacatttgaaagaaaactcagtacctgctgtctttgcgctatatttacatgggttgtcatgccagctgtgagacattgtctgccttgtcttggatttggaagaaccaacaggtaagaagccaacatggagaaattcaagaaggggcagggtggaaggctgagggactgtagtcctgatatttttattgctgggatgcttctgatgccaaaattgggaaaaaccaagttgtaactcaagtcactatgagaggttgggagaggagtgcccttggtctgaagctcaaaggcttctttgcaggaatatcagactttctggtgttttggtagccctcgtgttgccccttgcaactagtccatcatccagaaaggatgtgtgtgcacagcaggtagaccaagagttagtactaaaagggagcagaagtgtttgtgatctttgagtctaaaccactgatgttaatggagactcaaagtggatatgccagcatctatgcgaaggaacaaacctcactggaggtgttctattaaaatttaccaacaaatatcaatatatctgaaaatatttattgagcatctattatgtttcttactttgtgtaagtcactaggggcaataaaagtgccggacagagtcttacctttaagtatcctatagtctacttaagtggagaacacctcacaatatacacataaagatactaactataaaaagctgaataagatataaataagtgccaaacaggtgttagagacaagtgtcacattgctttgcatgagataacttgcattgcttggataggtggagggggacgttatggaagacatggggtgagctttgcttagaaaggtcaattgtatttggatagaattaaaagtgaacaaactgaagtctcttgttttcttcccttaaattggcaaatgaaaccttgagtctgtgctttcagaatatcaattcagcaagtaacactgggtattaggaacactctcttttttttttattttagcagtttttaatgaaagttatatgtaagatttattcctgaatcctctcaattgttttttccttgcatttgcccttctcttttcctacttggtgagatgtggctttccgttcaaagatctctttgcagtctttgtccagctttagcctggtgataaccaccttgctggggtagatacccacgtggatagttgaacattagccttttcctgctgtacccgtccaatgtagatgatgtatttcttcctgtaaacctggactacttttccagcttgctaacctttatggtgtcctcgcacaacccgaactacttcatccttttggatggggttggatcaaacattgtacctctgtctcagctctttggaatgaggggaagacatcatccttctgtgaatgtagggaaggtgcactgaaattccttttgtggttcttgctctggtcagacgtcacagagggatcgaacttcattttggctactttggcgatggctgcaagaggacagagatctactgaattcctgctgctctgggaactctcatggctcttatacggcatcttgatgcttttgacatcagaaaactctcaaccctcccttctgatgcctctgtccctgctttctctcctctctagctcattgctggtgccgagtccccgcagcctgcttctggaagctcaccatctgaggaagatcgatccaagtcagcacccacctccccttgtgaccagggtgagaccctcagatttgcttcctgacctctgagttctgccattggatggaccaaggagctctgaggcctctttaaccaagagtgagcttgttagctgaaatagctagcagccctggtgggttttcacacacccgttgcctgttgatttaacagttctttcattctccaagaccttcttgagggctgggcactccatggccatatctgccttaatttccttccaggccagggtaagaggagagcgagtgtatgatgttatggttatctgttttcccttgcctctgtccctggttccaagtgtactgcagagagaagggtacagctccctctcttaaagctcttgcctggccctagacctgtcaacaccactcccttgagttgagtttgacactccctcccccatcatcatacccaaaacctgagatcagcttgagtttggggctgggtgagggaggatgtcttctatcctggcctttgggtgggtgaggatagaaagatgaagctagaggagagactgagaaaagaagtgggaaggaggccagtcctaggcctgtttcccctctacagctccagatatctccttctgtccgactgtgcttcagacaataagttctgcagacataatttgcacaataataattctgcagccatccgagaatgatgaggctgaggagggacttacacttgcaaaacctcctgctctcgtgaccattatcagatatgcctggtaagggacatatgcatctgcagaagaggaataaccatcacagcctgacaatggtgccttggtttttctatatccctttttgtattcattatcctaattttatgcccatacccactctatgttggtgcttcattactgtcccccaggttagtgagtgggaagtgggaggtcagagtgtggaaaagttctgtcccaaggtttggagataagtcagtggtaagggcaagactgtacccatgctggctgagggacacactctcagaaaccctgccatcaaaccttccttggaggtcaccaccatgacccagaccttcttacccaggagtaaataaaagagcttcgggggtcatgcaccagccctgaggccacagaataattggtctcagtccctcttcgtgctactccaattaactttctgtgtctttatactctacctcattccaaatgagatttgaagcattcataagtagcctgatgtactctggggctgcagaacttgtagctattttcccagaccagtttgggggttttcacgtgttcctttctgaggctgagatcccctttgggagcttcagggagacagggtcatatagaaaagagaccccaggtaagagttcagagaccagggtttgtaggcctggctcctgccctgcatgctctctggctctgagctctgccattggatggatacagtggcaggatacagcggccccagggcctctgttcatcccacttgacacagacgccaggatttcccagtagtgatgttagcacagatgtccctctgagcgacattattacagaacagaaataagacatagtttctttttcttcccttgtaaagacacatagaaaaaccttttcttcaagctttgctgtccccaaacaactatgttttgccttccaaaattcatttaataactgaggcttttagctctattgtgagattaaaagttatttagtcaagctaagtgataggtggataactgctgaactggcaaggggagtgtctgcagactcagcagctttccccgtcttcaccctccccaacacgtctcagaggagccaaactccagatctaggaaagatctccggattccttgagtaagcccttatgggactctgtccttctgaaaagaagctgaagatctctttctgtcactcatgcctaattctcattcccaagggttaataggctatgttccccttccataatccaagttattcacaagcatcatttaaaatcggattttgctcaagatgcccatttccacacagaagagtgcgtgtcttgatgaatgagttgctaacagtaaagcttcttcaaatagaaaaggtcagaggatcatccagcattatctcccccaggtaattcaggtcataagctctagagcggggcacaagactgtctcgtagttgagaaattgtactgagaaattcccgccccattggagataagtttgcaacatgtcacttgggaaagcaattcttttgttaataataagcccattgctcattttgttagataaccttgtgtaagatgggtatttagaagaaacccggcaacaaggctgagtaaaggtttttagaaggtatgaaggtttctaccttcagtgatcagccaccgttctgatggctcagttgttgaaataattatatcaccagtgattactgtgatgacagttcttgattcgttgttctcatcttcagaggaaacttgaaggatacctgtgactctgcagaattccagagagggcccagatttgtgtgctttacctagaacagtggaataggctactagccaaagggggctttcagagagacagccaggtccagtgtaatctggagttgacaagggcagggaagggactgtgtcctcctcctctttgcatacctaagctctgctgcgcattaggtgccaataagagtgtggtgaacagatgaaggaacatacaaagggatgtcacactggatctgttgtgaagaaccagaaagaggactgagagcttacaggggaaagtctgagtgttgagtcctaatgtaacaggcttaagaggtatgcactaatgcaatttcttgttccccttggccctagaaataaaagaacttgagaacaacattcggaaagccttgtcatttgacaaccgaggagaggagcaccgggcagcatcgtctcctgatggccagctgatgagccccggtgagaatggcgaagtccggcaaggccaggccaagcgcctgggcctggatgagttcaacttcatcaaggtgttgggcaaaggcagctttggcaaggtctgtggcacacacgggtggaactgctggttttgttctactccttagcattgtttcgtctgtttgatctaagattgagagaggaacctttcagcctgatctcgttaggttttctttccttttttgtaagtgcaaatgacctgaggccaagtagataggagcgctggttctgctattaattggctatatgagactttcaagtagtgatttaatctctttggaattcaatttttctcatttgttgaatggggacaggaatcaagtgagatggtagatgagaaagcactttggaaagttttaaatgctcagtgttccaaatcaatagtagtgtcaatacatgtcttccctccttcagagatcagctgaaattctgtttttaatttgttatgaagactttgagaatgaatctctgccctcagcaaacctagggtttaaagcaaatttagcatgcattactttggaaggtaaatgttatttaactgatctttctggcatgtaataaatgttctgtttatcctttacacgtggcaagaaaatgggaataatcatctcatgcctcggatcagggtcctctgcccttggtgccattctccatatcctgttcccactgagatgaacacagtggtgtggggtgtggcctttagtatgctcaataaagcactaaaggtgatcagccaccattccgatggctgggtgagatggaaaaattaactcctgttcatttagaaagaagatgaaggggcagggagcagaggaagctgtttgcatttcacctgagatctctgattgttccctggttctgttcagagctaagcctgggagtcacctttctgggaccccctgagaagttctgggaggtcctgctctggggaccaggaagctcctgggatcacatgccctggcatgtcctggactcttgaaagcagcagcctgtaggtcagtcagctggcccatcccacctggttcccagccgtctcacctgcccctatctcaccctgataccactctggtgggaaggtaactggggtttacttaaatggcaaaagctgaagcaattacattctttagagactgactaaataaaaagaggtcctctggttaggcataactctgggacctgaacaggatgtggtctaattttgagcaagactccgagattctaggttttcatatagtgtaggcagaatgggaacttagatgactttggagcatttaggttatctcttaggaaaaatcacagccaaagtttgagccagttttaaagagtctgtaaaatacgcgggcgacaaaaagtcttcaggttaacatcatgaattccctcattaagtttctgatggctgctttttagctttgatgacttacattggaatactgtacttaggagttacttatttaagaagagaaaggcttgtgacgtttgtaggtaaatgagtgcaaaaatatcaaatgataggaacactttaagaacatagaactgttaattagctctcttgaaaaggaatcacgtttccagcttcagagttataaaagaaaccataaaggcaaacaaggacagattcaactacataaagatacatgattcttttcaatagaataaaataacagaaaattataaaacaggcttagaaaaccttttacagaaagtaaagggttagtatctttatatatcacatgtgtataaatttgtaagaaattaatatgatagcagcataattagacaaaggagacgtgaataatttacacgaaaagaaatacagtcagaaaacagttaattttaaagtttcattttaagtaaaaatagcatcaaggtaacatttcacacctattaagtgagcaaaaatactttttaagtgaaactactcagtattggtaagtcaccatgaaactccaacacttctacattgctagtggcacattgtatcacacatcctttctgaaaataggaaatgtgcaaaatgcttcaccctttaatctacttatgagggtttccatcttacaaatgtaatccaagagaaattgttttaattgtgtacaaaaatactcaatgcaacttatataatacttaatgattagatataactgaagtgcctaatttgagggaaatggttaaataaattatatttacttgaattgagtataagcaaccgtgataataatggagaccatatggagaatgtctgtaagataatgttcagttaaaaatagttacattattttactgtactgtaactgtaaaaatagttggtgtactgtaattgtaagtatgacaaacacatataaacatatgaataa

SEQ ID NO: 37069 - DNA, 2766 bp, Homo sapiens
caagttgctagtccatcatgctcctcctctcagcccatgactagagaatcctgaatatcccacatgctcctcacagcccctaccaactggtcgcaatttgcatgggagagaatgcgaacttatttttttaacctcttcccacccacacaaactcatctcacagcctcttagcaatagggtatctcattttgaacatttacttttcagacatttatttggttttttaaacttccagcaaatattaacaatgccagtgaatcctggtgttctcctttgcgcagtggaaataatacttcccttagaagactgccgcaagaatttagttaaaacatgtatggcctttagcacagtgcctggcatgtagcacacatacaacttttaaattgctttacaaagtcctttgtccatgatcttactttatcttcatggtgcttttgcgacaggcagggtcctgggatatctttctttgacagatgaggaaataggcacaaacgatgagctgggactggaactgagatctttccagaaccacgcctgtgcccttcctgttcctgacaatgttcattttaaggaggggagagaggacagcatttgtctatggaatgagccctggcacccagcttccgcctgggaaaaccgccatccctctcttaaaatgggcacgggtttgctggcaggacttgcccttaattatggtcaggccacctctttacccccagccttccaaaaccttcccgctggttgtccccagttgtacagtttgttaaagtctaccgtgttttttttcttgcatctcagtcatctccaaaagttccaggatgacttgggagtttttattggctaggctgaaaaaatgcccaggcaacaatggtgtgttgatgcttggagtcaggctggctagagcaagaagtgatttatgtaactctagaaggtcctaatcaggaagctgagagaaagggatgaagcatgttaatcctctccataattttctcttaagaatgactttagttagtcatgggtaaagtttatcttccaaggtgtgtgcttttgggatatcgaaagatttcatgtttcccagctgagacttccacatctgcaggctgccagtgttttcaactgtgagaaaagagctctctttcccaaaaattcatcatggactggaaacacggaggtataagttgaagtagccgtcagtggtgcttctaaaggtcagggtttcatgtatagaactggagccatccagttggaggagaagcccgttctcacctgtaatcagatgaaaaatgtagaagcatgagttggatggcctccacttatgacgcaatgacaagaagtcaacatgtagtatttacaaagatcagtcatttctgggaggattagagaggagaaaaggtgaaccaaacatcacttatggacttagtcatatcattttcactgatggtgatgacagcacgtcaacacatcatcatttggtgagagaggtctggtagccgttgctcatcatcttcctcactgggcgtggtggtgggaagtcccaccacagtgggtggtttccttggcattcatagcagaaccccacaccctgtcttctgatggcccttggacatggatcttgctgtctcagttgactattgcattgtccctcatggcagggttcttaaacattagtgtttttggatctcccagggagccggttaattggcaaattgtaggtcccaccccttgagatacagattcaatagggcttggggatctgcattttaaaatgcaaggtggttattggccacgctttgagaaatactgcctgatagtggcatagacacctactgttggagagagttgactttagaatcaatcagcaaatgactgcccaaggcactgtcctaaatctgactggatttgaaaaagatctgtaagctatgagccttatcctcaaaagtgtacgtatgaaatgaggtaagcagtgcaggattcgatagaatcagatgccgggctgctggaggagttcctagaagaatggagagtcagggcaactgggcatgggaggtggcatttcacctgagcctggaggactgtaggatttgcactgatgactcagaggggaaagagcatttctgatgagaggaacaaattgaggggtcaccagtgtgaggacaaccttgagcttgggatttcagtctgaaagcctatgtttcagtttagagaaagccgtaggctttctaatgtacctaaaacaggcaccaagtctaggcagatggccccagcccactgacagtgggtaaggacatagccttaagccatgctggagatgacaacactctaggcttttagaaatttggctctgaaataaaggatgtcttggggcatcccaagagccaagactgcggtctgtgagagtccaaacctgagtacttatacctcaatgttacttgtaaagtagttacagattttccaagcactcacttccatgttatccttagataggggctgtcacctaccccatagggttgtagggaggattaaatgaaataaattgggtaaagcacttacccaacagcaccaggcccatagcaagcatttaataaatgatagtggtgattagggctcttccccctactttcgtaaggagggggctgtgtgcccgtgtttgcatatttggtattgtattcttccttggtcggagtatcttccattccaactcctaattttgaaaacattgcatatagatctctagccaccaatccttcaaacctcaagcaacaccag

SEQ ID NO: 37070 - DNA, 1457 bp, Homo sapiens
tgtgagaaagcaggggtgcattgttaccatatgacatggcaaaaagggattacctgctaatgccatttggtttagtgatgccttgttacataaactactctggaggagttcaaatatccctcaggcgaacgcttccatccccaggttggtaacactatagctgagtattgttttatttgccatttttcaaaagagggagaaacatacccaagccattatccagcctaccaataatacatttcaagaaaacaaccgcaactcccaatcctttcttctgagggcaggatgttgtagggctattgttccttctcaggccactcttcaacctacagaaactggtctgggctacagtcagattacagggggtatcaggaggcctttgagagtcaggaagaaagtcttacagacagaagcccagctctagcaaagagggaaagatcactgcctttgaagctggatacatatgtggcctttaatttgagtgctggttggttgtcgttgggcaaatgactgaaactccttgatgcttattttctttatcttaaaaacataaaaaataaatgaggataagatgatgatgaccatcatagggttgttttaacgctgggatgcagtgatgtgtgtgcaagctcctggcacagcaacttaataccagtctcctctgtcctgtcttgcatctgctgaggatgaagaaggagagcagttgagtgtggccctgcctggctgggggcccttcctctatagttatcttctttataagccatttatagtcttggtataattttaaggaaaaaaaatcaaggcgctactttgcatttaaaattcatttttgaaacatactggcagcaaacgccacactattgcagttagggaagacaggagagcaaatgtcaggtcttggcaaagtggggtggggaattttttgagtgtgacatttgaataaagaaatctaaactaggaaaaaaaaaagttttccccgatcttatcatggtacaatgaagagttgtataaaaactgtttgtccctgctgcatgtttacttacccatgggcaggatatctcacgggccaaaagttcaaactactgctagctcccaagcaatgtgtgaacttaaaatgaactggcttcagaagaggctcgaaaaatgatttgatccacaaaggttctcacctcccaaatgttctaccaatacttgtcatggtctttggtgtagtattaaatatatacaatgatggaattaaggcatagtaacaacttcacacacacacacacacacacacacacacacacacacacacacacacacacattttccagatatttccttgcgaatgaccatcttattccattacatcaagcatctaggcttagccatgctttataatgataaaacggagctcttctaccaactccaaacagaggaatgacagaagatttagcatgtttttcttaatgttg

SEQ ID NO: 37071 - DNA, 2976 bp, Homo sapiens
tcctagatttatttctctgctactgggatggattgtggttgtgcttgtgggctgccatgcttgcaagcctgtgctgtttctggagttgccatttttacctactgaggggaggacatttaatttgagtaaatatgttagaaaacttgtttcacaacctggtcaacacacccattaaccatggctggaagtttcctgaaggcagggcctgtttgcctctctgaatacacacagtgtttagacacagaactgaacacaatgtctggctctcatggtaggtgcctaggggatgttaactaaattgaactgaactaggcctcaaaggatgagtaggattttagctggtagagctggagagctaggggcattccagggagaggatccacacaaaagaggagacgagtggaaagcaggaattgtgaagggtgaacagcaattagaccgtaatctggttacactggagggtacttggaggacagacagatggcagagcaccgtgaataccttaggatagtgttgtctaccttggcttcagcttaggatcacctggactcctttaaaaacatactacctcctggctcaccccagttcaactgaaattgaatcttcatggtggggcctgggggagcactctggggaagggttgagagccactgtctaggacttccagggacacttaacaggatgtagggagagccccacaccagaagacctcttgtactgtagattgctaacaatcttgagaaaatggcaaaatctgcctttaagtcttctgagctagagtttagaattttagagtaaaactagaaagaattgggtaatgatggaaagagatctgtttatgacacagagttaacagacaggactagtaacaatctgagcaggcagtgctaaagacttactaagatttcatctccctccctttcccttaattctaactaacctttgtactctgaaaatcgctgatttccaaaaagctggcaaactgacgaatctcagttttaaatgtagttcggactttaccctctatctaggtcacagctaaagctgccatatgtaccaggaatgagaactttgtaagttaatcagggcacggtttatatttccagcattcaaaataaatcattccgtttgcctgtcatattctgactttttgaaaatcatttctatctgtgagtaggtggcacgaggtattcatttcataagtaggtttggattcggcaggtcttcaagttcacagcagggatgcagtctccagtttttctcatatttgtaccagttgttaagccataggttttaaactaacaaatgattacccttgatcttaagagtactgggtatacccaagtccaaaatcagaattttaaagcaatattaaaacaaaacaaaatcccttttcatgtaatgattggctcattggtttttccttccataagtcaatatctgatgctttgattttcttaagtcatgtatatttatagagccacatacacctgttagacacacattgagttttcaagagagaaaaacacacttgcatatgtttccctgccctaactcagttcacatccagactggcttctagaagaaaggaaatttatagtgtggaaagttgcagcatttgcaggaactatgggaatctcagcacatagtcttagataaattttacaagtattggcccaagtaacccacaaggcagtgatctggatctgtttaccaagttaactgccaagtcacaaataatagctttttcccttaacttggaatgaacaacatagtactgaagtgtttccttgtgaatacctctccatatgcgtcatgacaaaatactgtatagatcagtttacattagattgtttaattaaatttaaaattctttaagctggaggaatttgccctaaaactgttctgcacggccaacaatttgatgttgaaaaaaccagcctccatgttaacatgtcggcttgaatactcttattttccacactggaaacttaccatgagcaattcttttcagaggttagcttttagttatcaaaatgggtgatgtctatatcaaagattgtaatataatttgaggtggcagtcccccttccaggaatcccattttatggtttgattgtgtttctcaatatatgatctgtagctgaactccaaatactgactactgggattaccagccaagttaatattaacattattgaaaagagtcggttaatgtgaaaaggaaaagtcaaaggtgttaaattagcagtttgttagggagcagtacttgctggtctttggagtgtgtgaatttcatcaattcttctggctgagacagggagtaacatccacagctgacacacagtctgtctgggtgagttctcccctcctgttcactctttcccccagcgtcctagtctcagaatgttgccactttttattcttgttgaacaggtgaggaaagtagtttctcctgtttgcttattgcctgggtcagttggagtttttcacaaggagcattggtaagaaaagaaaacaaacaaaagtaaacaggagaggttagagtccaagattctgttccgaatttcaatcaggactagccacagggtaaattggccagcagggcttaagaggtacttgcgccagcctgcagttctctctctttgcctctggaaaagcatggccgagacctgcttttaaagcccatcagataaacccctcttggtccttctacttaatttcaactaatggcatgagccctgagtggtattctcttaagtaactaatgggagaagaaatgtctccctggaggcttcttccatgttacaaaacaccagaggcgaagggtgggtgcacactctcaaaagctcagctagagacccccacctagttcttcctggctaatcaggaatggtaactccagcctgactgtgggcttcttcccagcatccttgttcacaggcacctccctggtcagggttttgattgccacgc

SEQ ID NO: 37072 - DNA, 998 bp, Homo sapiens
tcctttaactgtccttttgggagacttcattctcagggcaaaaatactgcttttacattgaatacatctacatgcctctctaggtttttatttgactacatagtctcttttgtggctaataatcctgctttgggagtagatctgatttctgaaaatcattttgtatccaaaataatgtaagcctgtaaaggaaaaacctgatttttctgagttggctttgaaatgatggattctgaaattaattctacatgaggtccagaaatcacatgggcagagatttccgggctccccatggtaccttctggggagccagaagttcagccaagctgggtgattactcacctttgagtcagacactcctgggatgggatcctcccttcacatgtgggtcctaagccagttctttttaccttctgatcctcaattttctcacttaaaagctgggatagtaatagtatctacctcacgggattactgtgaatattaaatgaggtgatacttgggaaaacacataggaagggcttagtaattgcttattattattactgatcccttacattgccataatgtggagccaggtacatagtaggtaatcactgaatctttgtcaactagttgcagggttgttgctaaggatgtcaggttttgacttgaaagtacacctgtatttaaagagtggggtcatctgaggtaactccaagactagaaaaacatttctaatcctcaatcctgtaaaacacttcaaaatggcatttgttcacctctaagatctaccctagctctaatagtccatgaaatcatgatgctgaattacataaaacaaggggattaatgtgaacaataagaaaaaatgttgaccaatagcatggataattgaagaataaatggtcagaaccaggcaactctagaggaaaagcttagaggacagtttcgtggaattatcaactggagagactcctttgaggttgtttagaatgacgacatcattgtttaacttg

SEQ ID NO: 37073 - DNA, 1176 bp, Homo sapiens
cctcccccagtcatagccaagggcagctgctgcatgctgcctgcagaccatgcttggctgtggcagccaccctggaccacctttcccctggggagaagaaagggtagaaagcaaagggagggtgagcatctggggccagtgcaggggcaggcaaagaagagcaggagctggggagcagtgaggacttcctccttctttgccccacctgaggcaatcctgggcagaagaaaaggcggagccttgcagcctgagtcagaaaaggggcaaggttcaagctggcttggaatcttctgaatccattcaatttatacaaaattagaagaagtccttcctcagacataacaaaggctttaaaaagagtgcttaggaggtggcatttggggtattttataaagttgggcttggtggctggcattggaggaagtcaaccaatgtgaaggcaggagggcagaggagcgcagcacacagggataagcacactggcttgcagagcagatccaccaagccttcaccacctgtaatcacctaccttcttccagcttcctttgacgtatttctgtaagggtagttgccacatgtgctcctcctaactcacagagctatgcaatggaactgtttaatggaattcacagtgctgagcgtggatcatgaactgggaggtgcttcccacacataaagaagcatcattgttgttccttttccaattagtatcaccattgtgctgatcgtgtgtgtcatgggggttggcagcactggatactacaaaatagggatagaggggcatgtgactcagtggggccccagctgtcagcttctcaaggactcagacatttgcaagtgggcagatagttcacccagttcccttgaacttggttccttcatgaagaaagtgagtgtgacaatgttaaagaccttctactttcacgcacatctcattagtccttcaaataagcctacaagcaggagcgtgtcattctgattcaccagataaggtcacagaccagcaaggtgactttaccaggacaaggctacaaccagtgctacaaactcaggccctgggtcctggcccagtgtttgtctcactgctccatcacccacagccagagctgggccttgaccacacacagtggccagggtgggggtgggagaaccctggtcccaggggctcagcttggt

SEQ ID NO: 37074 - DNA, 1865 bp, Homo sapiens
taattagaggttacagaaaaagagtatatattaatgatctatttggggtgacaaattacctcaaaacttagtggcttaaaaaattgtaaacatttatatctctttcagttcctgtggccacgagttcaagagtgactcagctgaatggtctgcctcaaggtttctcatgaggttcagctggatgttggccagggctgcagtcttcttaagactggctgtagctggagaatttgctccaaggcagcacactcatgtgactagcaggtttatgttctttctcaatttctcactatgtgaatctctccacagggtcacttgagtatcttcatgacatgacagctagcttttcccagagagagtaatccaagagaccaagaaaaaaggtgaaaggtcttttatgactacccattgatgtcatccattgtcactttcacaatatcctactggtcacacaggtcctcccttttaatgttgaaagggagtacacaacagcatgcatagcaggaggccaggatcattgtaaaggggcaaaaataatcaaagaaataatagaagaaaatttcctatatgagaagagcatgaagtttctactgcggtggattaaaatagactctactccaacgaacaacagcatgaaatttcagaacactgaaagtcaagagaaaatttcacaagattctaggaaggaaaaaaaggatgtcacataccaaatgtttagaatcaaaatggcttcataggagtggatgcagtggtgtgcccatgtagtcccaactatttgggaggttgaagcagaggatcacttgaggctaagagtttgaggccagcctgggcaacacagaaagaacccatgtctaaaaagaaataaagaaaaaaatagctacatactcctcaaaggcaacattgtaagacataatatataatgtcaaatagaataaatgaagacatatcctaaagcaatatatttaaaattctgggaaaaattactttaaacctataatttaatacccaagtcaaactatcaattaagttttagtgtagaataaagacactttaagatatgcaagttaaaaaaattatctcccacacaccctttctcagaaaccttgggaaaacagaggattcaggaaacaagggattcaatacaaggaagaggagaaggaaatccccagaatgatgaagaaaggatttcccaagacaacagctatgtgccaagtgcagagggcaaacagaacggactttaaaagggcagaagattcaggagattgtttcaaggttaaattgatagaacacctaatgtgtttaaacacactgagagatttacacaagtggggaagagtttaaagttgaactacttcagatagtgaacttagtgataaattcttcaaaaaggaaggcaatggaaaaataagcattaattccagacaaaacaataaactgtgcaggaaaggtaacacaaccaaagtttactatatatctctgctgcaactggcatttacaaagtcataaaaatgtgaacacagaatactgatctagtgaaaaatcataatataattatactgagagggcagaggaatgaaaagtatgcatgtatgtggtggtgcagaccagggattaaaagacagctaaatcttcattttccatagtgggaaatcaataggtactatcttgaactgaaaaatcaataaatagcaatataagcatgttatttagagatgtggaattaaataccaaatgaatcaactatagttgctgaaattggttgcctctggggagcaggaattaatgaagggtatggcaaaatttgtgctaattttcttaataaacctcataaaactggcctattctttcaactatgtttgtataaa

SEQ ID NO: 37075 - DNA, 1869 bp, Homo sapiens
atggccaccagctggtaccagatcattacaaacattacttttcttcattatcacaacaaccttgtttttttcttattataggtggcagaacataggacgagaatcaccacccagccagttataccagagccaggattcaaactcaagccatgatcttgcatatccattgacaaactggttctcataaccgccctgggaaatgagcaggaaaggaatgttatccccacttaagatggggaatccgggcatggaaagctctgctggggactccccgctgggcttcctgactcctaccctgactgaggttgttaccttgcaatggaggccaaagtcctgacaggcagtgggaaagatattttggggtagggctgtctccctggtgcttgtcagatctcatcttgtgaaacaattggttcaagttcactgggcccgggtgcgcagccttccctggctggagctgggaccctgctgttctgaaaagctatatggaaggagatttctttccttctctgattatcctcaccactaggtgggatggaagctgtctaccagagtctgctgcaggttaacccttcccctgccctcattcaaggacatgacagggatgttccaggtaaatgtgcccccttggcttgagacagcacttgtggtaatggaatagcttcctctgctatggcctgcttgtgttagttcactgagaatggactccctgtgggttcgtagagtgcaacaattgaagagcttgaataatggttaaccaggatgaagtcacatccgaatatgcgtcatctcaccacctcctttgctgcagtccgaaaaccccactgagtctttgttctttttccatccgtctgtctctcttggtatctgtctctctctttctcatcaccccttcagggtattgatgcttattgatactggattttctttctcactccagtttttcctgtctctatccacctgtctttctccctccagctctccctcactctctctccctccccttttcctcccttctagttccccattttgctggtctcattgtagacctgcattcatttacgattcattattcttactgaagagatcctttgatcttgtctgttaaaaagtaagtgagttgcactctatacaccaagaaaaaacaaaatcatctttatttaactttttttctggccatgggcctgtggctggggcaaaaataggtctccctgtttctggcacacacaccagcctccccaagctgcaagccagcccagtgggcagacacagctgcgaggcaggaatactgttacccaactcagggtggtgccagagctccgagtgcccaggcaggcctccccgccaaggcagggatcgctctgaggccagaggaggcccaggggacagagtcaaggctcctgctcacctggccctggggctgtggctggtgctggttagccacttcctccccttccccagcagggcagcaggagggttccactggagcccagccctgtctcagcttgacccctatacctggtgacatcccgcagcctgggtcaagctgtcaggttagcacgcagcccagttaaatgcactgggctaacatctggacttagagttatgtaatgtttttacctcataatattgtaacctagtagaggacattttatggagtctttagaggtgaccaaactgaggctcatggaggttgagttatccagttagtcagggatgaagctggtgctcaggactctggaattccttgcccagatgttcccaaaccaggttgcatgggctgctcccccaggcctgtttcttagggtaagtggtaacaagcatccccatcatctccagtttggagagcagccatggggcagtagtttg

SEQ ID NO: 37076 - DNA, 661 bp, Homo sapiens
gggacacatagaaaatacatgatggcatgtattcattgtatattatccccaaagggaagaaattagatgatctctaaggtcttttctagctttcagtgtctccaattttagtccatacctcccccatcagtttccactcagggaaactgatgcagatctagttaaggttcagtgtggcaggactgggatgacagtctgacctgctggatcttatatctagaattggtccatcgagtagaggggactgtgcttatggatttgggtttgtcattgagattagagtgccaagttaaggtggttattagggacaggattaaagttagaagaaggtgttgtttacacagtcaggcctagggttaaggccacatttagagtcaaagtccgctctggagttactgctggctttggcttgttggtcagattggaggtggggagtgagcctagggctcaggagtcttagatcagtggggacggggtgacccagcagagcttgtgcaatctctcatagcagctattcactcatattgggcatattgtttcccatcattaataacttcttttccttcactctctcccaggacttttctctctttcttttatcaatacagtgcaatatccattcattcaaaaagctcttcattaattaccctctaagtgccag

SEQ ID NO: 37077 - DNA, 5061 bp, Homo sapiens
aagttacacctgtgaaactcatgggtccttccacagccttcaaaaactaagggcgtcccctgtcctctccccagatgtcccttccccatcgccggtagcgagtgggagacagctcagcgcggggcaggggagcactgggcccggagatggaaggcagcgtcaaaagcgccgctggaaaatccctgagcgctaaccgttgcctgtgtgagcccttaaatctacaaatttccaacacctgtagcctttgggtttcccaggacttccatcgaccctggcggcagagagggcaggcctgagatgcagtgacttgagggcacatggccaactcttgtcactccaagatcacactggggaaccagactgacttctccaattctgaactcgccccggcctcgggcggctcaaagggcctcctctgccgcatccccgccaaaaccaaaccgcctggcacaagccggtaagcaaccaccctgctgggagagggaaggaagagtaggcgcagccctagatcaatttccttgcactgcttctcccagacggtcaagtcagctgcgtcccaccgaaaagggcgcatcgcccacgcccgaaacgcagccgctgggggccgagaaattatccccacctggcccgagggccagggacgcaggagcgcagcagcgtggaggggctccgcgctggcccggcgctgcccgcggtcctgccctcgttccaagggcacggcgccggtacgaggacaccgacgctgtggcgcaactgccgtcccccgcagcaatcccggagcccggctcccggccgcccctcggccctgcgcaggctgcctctccccgacgcggagtcccaccccgctacccgccgcccagacgacctcataaacaagtcctcgaagtgcggaggcaggaggcggggcgcagcgcgggggcaggaggcgggccagggtcagggcagaggctgcggccgcgcgtccccattggccgggacgcagtgagccgcccggagctcggcgcgggcggggcctgccggcgcgtgcccgcccacacacccgcgccggtgcccgccccccgccctccgcgcccgccccgtgcccgccccaagccggccgacggagtttttaaagtgggctgccggccgcgggagctttacactcgcgagcggaccgccacacgggtccggtgcccgctgcgcttccgccccagcgctcctgaggcggccgtacaatcctcggcagtgtcctgagactgtatggtcagctcagcccggcctccgactccttccgactcccagcattcgagccacttttttttttctttgaaaactcagaaaagtgactccttttccagggaaaaaggaacttgggttcccttctctccgtcctcttttcgggtctgacagcctccacccactccttccccggaccccgcctccgcgcgcaggttcctcccagtcacctttctccacccccgcccccgcacctagcccgccgcgcgccaccttccacctgactgcgcggggcgctcgggacctgcgcgcacctcggaccttcaccacccgcccgggccgcggggagcggacgagggccacagccccccacccgccagggagcccaggtgctcggcgtctgaacgtctcaaagggccacagcgacaatgacagctgacaaggagaagaaaaggtaagcgggcgtccgggccgatcagggggccggtccgaggccagggccgggctgcgcggggcaggcgcgaccgagagtggttgggagaagagtgctgagaggtcttcggagctcgaggctcggtttggagggctgtgagggggagagcatgtgcccggtttgggggcgcggatcagcagctttgcagtggagacttctgcggctcggaggagtcggggatttgcgcgcacggcgaggccaggaggccgagggagatggcctggaggtcggaggtgcttccgcggtgcctttgaaaatctcccagccgccccgcagcagattaccgtggccaccggcgcttggaaatgtttgtgggtgcatgtcctcgactttctctggtctctcattttggggcagcatccacgtctctatttttctctggattcgcggagtccttccaaatgcgctcctgtgcccgcgccgcggcccaagtgggcaaaggggggcgggaggcggagagcggctcagggacacgatcctaccgaggagccaggacccttcagagcgccccgctgccgggctccagaccccaccgaaggttggagaacccacttcctcgtgccgcaccttgactctggggagagtaggtagtgagtgacctggattgccctgcgggggcagatggttcggtgtgtaggaagcggacggcaacactggatgtccctggcaggtccgggtgtctgtctccgaagaggacagagaagggcagccacgatctgcccgcctgccctcgcgagcctctcggcactgggtgagaggcaactctggccatttcttgctgccctctcgccctctcccggccgctcccagtccagccgggcccggcgctacccgagcgagggttcgagccctctgcgcggccgcgcagaagcaggcagggcctcaacttctgcaaatgtgtgcggctcgccgcctgtcccctttctcctcctgtctccacccgtgcggccccagtggcctggagcttccagccccgcgcttggccgcggcttggcgaggctatgctgcgggaagctggaatccaacgcgcggccggctgaaccgcctgagccgcgggaaaccagcggcggagcggcggtatagaggtgcgaggatgaggaggaccgactcgctaagggagggaggtgactggccgggagggctcactgccgaggttgatttgctcttgttccaacttccactacgggactggagccagaaaccgtgtatcctccggtcgaaagcagcggttcccacctcggggcaccgataaggatttgataaacgggagcgaatcgcgcctgtcctggctcggcgcccgggcccttcactgcgggatcgctaggggaggggattgggccctgctcccctttcctggccgtagtcccccctttctcgtcaccgtcgcgccctcagacccaagacaagtgagggagccctgagactgcagccggcacattcccagggccctcggagcagtcctggggttccatgtcttttgaaggcagcagagcaaggaaaagactcttaagattccagtgcgttttgtaaaaaccaatcataatgctaataatgactgaaccatcgaaaagcaaagttatagacagcgcctgcagacgctttcgggtccggagccggggagggaacttgtgtattttacaactgcgatgcctatcgggaatgtggcaatcgccgaggtggggcctgacagtaatcttgacaaatgtgtgaagtgtcagctcctcctgcgctccttagcgccgggttttgtgcagttttgtaccgtatataccgagaaacttgggagcaggggaaaaatgatttcgacacacccagctacagtacctggttcgttagcggactgttggaaagagagaagaagcgggaatgggagcgggaagaacgttgcgtaattagactcccaattattggcgagagcggccgctttaagaaccactgtggggactgcctgcgaaacgccttggaggccgctgtgtgagctgcggctccgggctggtggccacgcgagggtgtccgccctcttcgacctgcctggatttttgtgctgcagaatggcagggcaaacagcgtgtccttcaccatctagagccccttaaggggttgtccaattcctattgggctaatcagtttgagactcatttacttttcgtgcctgggtctgtttgctggctgcaggcttctttagggaccaagatgtaattaaaatatgtgaaccaatacattgaaagttggtgttgtcatgtaagtgactgctgtagcttttctgagtgcctcacaagggcgatgtgacagtgagggggctctctgctgatgattctgcccactagttcttacattttgtgtttctttggtttagcagagcagtttcttcccccaaatgcaatatgggcagaacatttggaatattcgttctaacaatggcccgtcaagaagtgggcagatgattttgtcccagaatgttcacacgtcgataaatatgttaatgtttaataataaagagtttgctttctaaatgttagttggctgggtgtccttgatagtaccagttttggtggtagtgggcatttgcggtgacatcacagatgtcagaaactgaagcctggtgggtgggggtactgcactttcactcacctttttgtgcacgcatctatcaggaatgcctgagtcctttcactgggaaaaaaatgtggaaattctgggattcacggggtttgaggagtggttcaggcaaatgtaaatgagatccttggataatcagggatcaaagtccagtcccaaagccagacctaggtccagacaccttcccagagtgcttatacagtagtgctcagtacagggctagcgtggaaggggaattggagacacctggatctccaatctccccctccttctgacagctggacttagttgttcctcttctaaaatcaaatcaaactccatcattattccaactctgaagggaaaaaatattgctggacagtttctctcaatttaaacatatattttaaataaatattccctccacacttgatatgtttccattgtattaccagcagcgcaggatgatacagaattgatgtaacacattgttggcttgagtatttaagttttaattcatacagttttcatgaagttcaaaagaatgccatcatttcaagtttttttcagtggtgcttatagggagcctagaattattttataagagaccatggaaatcatctagtcagacttttctctttctggataaggaaactgatgccgagagaggttaaaagacttctccggtcacaaggaaaattagtgctgataagagtcagggctggtcgcggtggctcatgcctgtaatcccagca

SEQ ID NO: 37078 - DNA, 3031 bp, Homo sapiens
tttgcaggggccacttgtacgtcagcaaaactcttactagatgacatcactgccagaagttccacatgtttccaggaggcacatttcccactgcccccactcccccgaacttggaaagattcctcagttttaaagttataagtaatttccatgccagataatgatcctgtgaacagatccttttctcatgtggaaaaatatttcagaaagggtgtcttgtcaatgagaaaaatgaccccattgaaacatatgtttatttgccatgtactcatctgacgttttgtgaattctataaagccatggaagtggattgttagaagtgtctcatacacccctagtgacttcttgaactatccccccatccccagccatggaactctcctattaaaaaaactaagagataagtggtagcaatcttaacaaattagtgattttatctggttaggccgtgtaatcaaacacgtgggcaggaaagtggatccattatgttgtactcatgattgtggtgctgaaggtaacccccattgccctgtaggctgcccccagaagcagggggtacagccaatagtattcttagaagttaatcaattctgtaacgggttgagtgttttggtctcatttttagtccgaggtgccctgatgctggcctgtgactaaggggagtcagtggcttgttatgaataagaggacacatgagctgaatctgagaaagttcagaagcattttataagttgtttaaaatacatccattaaagtatatgattattttttggtaatcatttaaatcattgtgctgtgtgtctacccagacagtatttatctgtctctcgatgttgtattagtatagtattaaaaaaatacacacatttcacttttgataaaaactttgcatactgtcactactttgtataagttttttcctgactgcctctggttagggggcagggagcaagaagaccagcatgctttccttcctttatatttgggaaatggaggtgctgagagaaacaagccacactgtctgaagtaaaacctagaagtggacctggttgtccatggtgagggaaagcccatatgtaccaccttgggctccagttacaaggtaatgagccatgagcacaaaagggtgactcaaaattcaatgccagccattctcattactaatgagcaattacagcaaatatttacaggcctccttcctacctttatgacttcctgttactgaagcactttggagtattgagaaagattgtcctggaaaaatacgtcacacacagttgcaggaaagagtgcctttaagcacacataaaaactcggttacttggctttgtttatgaattccacatagaaacaacagaaaattgtgccttttgaggaactgcttgagaatccttccttctgcatttcaagacaagattttaaaaatcacatatatcaaatatatggggaaatgagacacaatgtttttagagagtgtctagaaataataggactgtgcaagttagtacagcaaaattttgggtcaaagcatgggtcatttgacaaactctctttatgaacattacctctgcaatatttttctaaatgaaaacaatcacacttaatagaattaatcaggatgggagctagaagcatataattcactttccacagattggagtaaatcctcataatgcccctttcctgtgtatttagttaaaaaagcactccagtgagattgctttcgcagtaagtttctgtaaaccactgtacccttgtatttctctcctgtgtttccaagagttctcagatgctattttcgaatggcagcgttcactccagagctggctgaggtcaacgaagctaattttggtgccttggtgcccagggtgaagggagagagaagtcctctgcagagccaaaaggactctctggggcctgggtttggagcagtgtggtgttgctggacacaccacatttcacctttagaacctttatttgtgtgcttgcacaacaaatgtttacccagatattaagataaggaaagtatgaaggtcacatttcactggtgacaagagagcttctataaatgtaaccatatcgttgtgcagcgggagtctgtcttttattctgtacccgggacttagggggaattattggtgggtggggcatgggagttgaggctcttcttggttttctggctttcttgctatcactctgtttgtcttgcctcagctgatgtgcgcctcccatttggtaagggcctttgtcatggccaagacatctaaagaaatcctagtctgtgtggctgggcactgtgtggtcccctgactctctggagtcttccagagttccatggaaattagtgcccccgtgcatttccctgccgactgactggaaggcaccctggctgctgagatcgctttcctggtcccccagaagaggtccacatggtgctgatcctgcagctgttttaggcctcctcagcgggattgtcctatcctcggagcacagagaatcttcagagtgggataggggtttcttttgtggatttgggtttctcttagggatctccaaagattagctagacactcagggcctcagtaaagacatgggtccttggtctagttttcttcccaagggcagccaccatggcagtgggagttcaccttgctgactgcaagggaccccacctcacctctatcgcccattcaccatcattcactgtgcctcctgagttcctaatacacaagcctcctcccacagcctcaaaggcagtgctgcagtactcattcccacttctattccctcacactagctcctccatctggatgcttttcccctctcttcctattcaaatagctcctacttttctattgtgagcccaggcttcccgaaatcttacacaaaatcactaagggagcgtagaaatttccacagtggcactcccactccctgcattactagcttttggttgtttgccaaagagcctgcttatatttccttgttatctaatgacactttatttgtttttgcctttctaacaatatag

SEQ ID NO: 37079 - DNA, 2654 bp, Homo sapiens
cattacatggttactgccatatcctcagggtttggggcagtgcctacacacaggaggtgctccttaaatgtttgttaagtgaaataatctgaggttgtcaggtctttgtcttcaacgttattatttcttatatttgttcagtgcttaattttttttcaaagctcttgatgtagattgaagcttttgtcatttttgtcatatagatgaaacaactgaggcacaaaaatgtgatcacaaaaccagagagtggcagtgcctacctgaacagctcccagacccagactctttccacagacccatgctgtctctcttggcaccttatttttctgtcgtggtgatgttattgtttgtcttatttggcaatgtttacaccggaggagtagaggccattgtgtgttggtggcgtctggaaatacacaagagagtcccaggagaatgccactgtcggttcttaccacaattagcaattgtcaggtcaggggcagtgattgggtcggtgtcactctctacatggctggctctgcgtgttgaaacaccactgcctgtacctccacagatgccaaagggagtgtgggtcctaggactacagccccatttctacccagccctggctatctctccactcagatctaggtcctttctgttcaggaaaacgtcctgtttgtgtagcctgctagacagcaaaggcaagtgccaatcagctggatgatctctctgggcctcagtttccccatcttcacaatggactagtaagtgggaaccagtcaaaattggctcagagatccccaatagggttctagctccattgtgaaataaatttcaagtggagcctcgtcctgactcctgttttcacatgctcccttagagggaaggaaggtggacgattaaagatgattggtcgggagctggaggaaggaactccccattctccaagaggaggttctgttggaatagaggggcagagacttggaagtcgctgttgggcatggcccaacccacttccatgacagcagcaagaccaccaccctcaagaaggaggtgggctggggtacgagaaggtgggctgcccagtggtttctacaaaaagggatagttgtgcttgcaggaggggtagtgtctccatctcctgatgccagggagaaggaggcaggctgctggggtgacggagagcaccctcaactaggtcacactgcactccctctgtgcctcagtttccacttctgttagatggctgatatgatctctgccctgccagttggattggggcttccaaaatatcaactactgcaaaagaagaggttgtggccactgtgactcatatacatgtacatgaacgtatctgaagttttcagggctgatactgatgtgaggcaacccatgcaggcaacccggaggaactgtgtccctcactctgagacagtgagaacggactgagccggaaagctgatggccgtgagaggagcaggtttgaaaatcactgaatgaagtcatgttgtacagagggggcgggggtgcatactgtgggacggaggtgagtcacagtgcataagtgttggggagtcaccttgaacttgggccagaagagtagaaatattgagacttgggtttatctgcctcacatcaggtacatcaagttctggatggctgcccactggccagagacatgaggtggacggctcccttttgctgccctgggaaggccttctgctggcttcggccccactgagcaaagtctgcttgttcactggagttcacacagactccttgccaggcctgcccagaatcctgtctcctctgacttcctgtgctcttgcataatatttccttgctccctgaatggctggccccagtgcaggagcagctcactcacactgctggaccgagggcaggatgtagagggagggcagggatctgcaaacgtcacccaggggtgctctgggctctgagggtggagggcaagaggggcagagccccctcaaattctttggaagattatagcacaaggggagttgggaaggccctgggaccatgtgcacacacatctatctccatgaattgtctctcctgtaaaattatttttaaagttgctaagttgttttcttctgattataaaaaatatacatgttccccataaaaagtcatagtaaaagaaggcatggagataaaaataaaaatcaccaaaattccatcacccagagataaccactgttaactctttggtgaacatacttttctctatatcatgaatattgatatataattacagaatacgggcatacttctaagatattgtaggttcgttccaggccactacagtaaagtgaatatcacaataaaacgagtcacatgatttttttttgtttcctcgtgcatatgaaagttatgtttatattttagcattatgtctaaaaaacaatgtacataccctttttttttttctttttgagacacagtttcactccgttgcacagactggagtgcaatggggcaatcttagctcactgcaacttccgcctcctgggttcaagcaattctggtgcctcagcacccccgagtagctgggatttacagacatgtgctgccacacccagctaatttttgtgtttttagtagagatggggttttgccatgttggccaggctggtctcgaacta

SEQ ID NO: 37080 - DNA, 4219 bp, Homo sapiens
agccaggatggtctcgatcttctgaccttgtgatctgcccacctcggcctcccaaggtgctaggattacaggtgtgagccactgcgcccagccctaattatgtttttatatgaattgcacaccccacagttcttagcaaggcccatgggcaatagatgcccaataaatatttatcatccaaaactacaaatcttgcttgtgaaaatacaaagcataggtgcatgctggaggtagggaacagtaaccctgagaacagactggtttaaggccatctctggccaaaccaagacacagttaaagggagcatttatgtccctgtttggctgtgatatgccctatagactggggcaaggctgtggcagcctggccaggatgaaaacgctcatccttgggctgcccctagatgccaaactttttccgtacaagttttcaaggcacattattaaaagcagttacgtaagtggggaactaactgcaccttataaaaggcttaacaggagagacagagtcctccatttggagctgttttgttaaatgttgagaatagagaagtccagaagtggttggtgtttctgctctacactgaaaacgaattgggctggagcccatctcacagcctgcctttctttcttctatctcacccagcttgggcacaggcttttgctatactgttggactgggcagttccccattgatagagatgttgtttaatatttaagtatgttgtgtagctcttaacatcgaaagagaagaaaaaaggtccagtttatctttagggtgagctgacctttccagatggagcagggaaatctcctgaggacaggaccctgggaggaatccacttccctgcttaaaaagcatggtgaggaaggttcccttgggcttgttggatccagtactctccagtgggcagtgctctgtatgttctaggttagagtcttagataatatgggattttaaaaccagtattgtattacattagagtattactgcccttgggaattttttagatagttccttttggggagagaactgttttgtcctatccattgcagatgggagcaagaacatacaaaagagcataaagaaaaattctgccgatgtgggcatttccttgaggctgagggactaggagaggcaccaaagggtgtccttcattcatggtaaaagccctaatagcctcagtgttagaatatcctgtaggcaggcgaaggatgacatgactcactttggtggtgacctcctagtagttcaactgagaatccaggcgggataagatcagtgcagggtaattgtatggtagctagtcaacctttccattgcttagccggagaattctggcttttgtgctggtgatgtcaggcaggtgttggaggaggagttccatgaccattttctctgttcctgccaacaggaaagctccattgggacatacacgctcacttccagggtgttttatattcatccatagctgctgcatggataaaaaatttggcgaaaaacttgaaatcctattaccatgatgatcattagaactcatgttagggctttttgtttttaaaacagggacacaaagaagaaacagaaggctgccatatgcaaggttagtgaaagccccttaccttcaccccatttaaatcctgaagagggaaagtagctaagctgtagtgatcacttcctgcaaagaaaaccataattatggcgcccagttattcttcataaggggaaaccttggaatagcatgggtgctattttgaatatttgagaaaacagtgacattcaatatgaaatggaaatgattctgtgctgctgggattggatcagttccttctaggcatcagttgcccctggggatagcctagttctccctcctgtgtgaatttgggaaacactagaatcttgtagttgttgctgactctcccaccagcagggaaccaacttatgctcttgggagaagcagggggagtggggaatctgcttttctctttaagcttccaatctcaactgcctaataacaagggaattcgactatcaagatttcctggagtggcttaagtatgggcgccaggatgcagtcttctgtacacagtgaaagaaaacgggggtaaaaaccatgatgaataggtgcagagaggagtggctagatcacctgcctgggggatgagcctcccacgtgactgtaaggttgtgcaagaattgggcaacatttggtcagggtggagaggccttgacaaagcatttgtactcccactagattcctatctcctccgtggggaaaaacaagtatttaaagttctacacagtgttttaagaggaagaaatggattgccttactaccctagcatacttcatttgtacatatttggagttctattcactaagcacccactgtaggaagggcactgggctgaagatcccagaaaattaaaggagacacctttgttcctgcccataggaaatatagtctagtgggggccaggaaggggtaagacgagcatacaggtgatcatactcaagacaggagatagtaaataccctgatatggaaatagggaaaatggttctaggggttttggagaggagaagtgagagggaggcggtaagcctgcaggccctggagccagactgcctgggttccagtccgagatttaccacctatgagttgtggtatcttggagaagtcacttaaacacattgtacctctgattcttcaactgcaaaatgtaggtcactgttgtacctatgtcagtagataatggtttactgcccataaacattggtctcagcttcaggaccagcaggggccgtgctgaccttgagctagtgacttacaacctccaggtctcagtttcctcatctgtacaatgaagagattagactggataaatgctaacattttctttattctaaagtgccgtgatttcatggttgaatatgtattaaatgcctgctgtgtgcccaatattgtgttggcataatgaaaaagagaaaaagtaggatatgtggtccctggcctcaaggagctataatctaagtgaggagaggacattaatatacaggagagtattagagaattagagaatattagaaattaaaagctaggtggtatgggcagtgagaacataggaatagagattttagaatggaccagagtagtcaggagatttgatagtgacctatctaatgtttagaaccacagagactttagacaggagctcagacttgtttacaaatcccatgaattctgaagcttggaacactgccattaatatttaaattaaagttgaactgcagaaaaacaaaagttacctatttggaatataaggtgggacaaagtttataaaactccatgtctaaaaccggtagtgtggatggaagctataaagaggctcaaaccagcttcccatatatccttggatgacaattccattagaatatagcccctggcacagagtaggcacacacaaaaattcatctgttgagtgacttgtggaaaaagtgttctgccctgttcagctttgaacagctgtgggcaccctggtggtggtctcagccccacctccagagggcagtgcacagaggaggccccgccagagccctcctgccaagtctttgggaagagcttaatattgcctcatgcctcctgagccagccctctatcaaaggtgaattctctgctcccaaatgttaacctacctccgggggggctacacgtactccctccccagaattgtctgaacttaggttttgagaaaacttggcaacagcctcaaatttttcttccagtctaactatcctatggtccccagagtccatatgcagatcgggctgttagtgaccctggcttacacaggtaaaaaagagacttaacaaaacttggcagagactgctaagtgccaaaagagtggtgtagacagtaagtgaggtcaccccggccaggaaattgggggcacctcctggaaggagggagagctaggagcttgagtgggtcttgaagaatgagtagaggccacgatggcaggtaagacaggtggaggcattaagtacttctgtccccatgaccagttcccccataccactcttcgttaaccaaacatgggaggtggcaggcccatttagatctggtgctttattctaagggaggaaatgagatgaaaatgacagatgaagtgcaagcttgaactccctggcctcaaccagtcactgagaatggctgccca

SEQ ID NO: 37081 - DNA, 8116 bp, Homo sapiens
tcattccctgttccctcctcctttttgttcataaaaaaaattatttttttccaaataagcaaaatggagtcaaactttgcatcctcaaaatgtatgaagtaaacattattcctaatgagcctctgggaaagtgctcacctttgaacttggccaaggattatgcagcaaagaaaaagtcttaagaacttgatagagtgttagagcttcctgggtttttaaagtcaagttgcatattacatttcttttccttaataggggcatttccagaaacccttcctggttgagtaggccagtgtctgaaagtgaagcgctaggattggttactgactctggttcagggattgtcatctgggtgcgaggcaaccacagggtaggaggcaccattgctagaatgctctttctttcctaggactcagcacctatgccgacagtccttgcaagacaggaggggaacgtgtaggctatcctatttatggtaaggggaggcctatggaaaaacaggaagatggtcaagggaagctggcagcaaaaaggcaatgagaccgaggagttgtccctgtaagataagctcttttccccttggagaccttgcctattaattggcctgtgctcatctctataggctttctattaaaacacacacacggccaggcgtggtggctcgcgcctgtaatcccagcactttaggaggccgaggcgggtggatcatgaggtcaggagtccgagactagcctggccgagatagtgaaaccccgtctctactaaaaatacacaatttagccaggtgcagtggtgggcacctgtaatcccagctacttgggaggctgaggcgggagaatcgcttgaacccgggaggcggaagttgcagtgagccgagatcacaccactgcactctgggtgacagagcaagactccatctcaaaacaagcaaacagacaaacaaaacacacacacacatccttcttaaagacaaaaacacctctggctgtctgcatagcttctgcctgcctctgtggaatattacacattttaaattccccaactattgcctcacagccaagaagttcacttataggcattgagatgaatcattcacagaatgacttaaatccaactaagaatgtgtaactgctgaacattctgattgaggttccagaccgtttgtgatgccacatgtttgttgtaacaggcagaatcatcagtaatactttgtttctcttttcttgaaactttccctccaagtttccatcttaatgctttaaatcatgacagaatcaaacaagctctgtgccctctgcccctgacccccgtgatggcatgagcttcaccaagcacccccattcccacagagatctgggataaaaggctttacagaatccagaatccagctccgtttctgagctgttatcgcttcatagcacaggctgtctttttctcttcctacacgtagagctaggcacacatagatgggtagtgcactgtccctgaactgaggctctctcaagtccaggctaccttctgcccagcacctacttagtgtagcttatcttttaaaataagccatcctgcaaagagcagggttcccagtggccttgaggtttgtcagaagttctctagaattggcaacttagctgtgacctcagaagtcttggctctggcaaagcaaggtctttgcgctaaaacaggctcagtgcccatggagataatcacctcttgtaatatccacacaatcatctcattgtcaaagcacaaggaatgcaaaaatagaagaaatgccacaatagggttgccccatggttcagctaaaccaggattctgcttccggctgagggcaccttgggacaccttaggagggatggtcccaagcattgttctggagttcagcccctgttggcaagacctgtcctcctacaaccatagcctcacggggcctgattttgccccatctttttgggactcctttaccacctccttgtcctggctaactctcctttgtccttaaattcacaactggggaaacccttgaggagtctttttttttttcctccccattttgggttatgtcatctttcttgctcccagagcacttgctcctgacttctgtagcaatggcctcaacactattgagtgtgtagtatttcttaggcatggttctctgcatacatgtatatattatttattcctcacagaggctctgtaaggcaggcactcatagacgctgaggtttagagaaacttaagtaacttgccccaggtcatagagtaagtgtccaagtcctcaagcccgggcagtcctgctgcatctgcatggcacatgcgcttggcctggtctgctcagtgtgtctccctgactgggctgtcagttcctggagggtagggatctgtcttcccttctctatccccagtgcctggcatgtagtagacactcagtaactgtcaaataaatgaaagccctggctcatcaaacaaagaccagatgtgatttaaattccaaggagccatactttttacaaaaatgctaaaatgccaagaagtactttttcattaaaacaaaacaaaactgttttagctatgtaagggtggccttttagaactctgactgctttagatctttcctctaggtggcatagagttgtggggtttggcagaccaccatgggaaaagaacagatgcatttgtcagaatctctgtggccatcagacgtcactccaatgaagccaaagctccgaggtttaaaaataattaagggaaataactaagcggagagacagaaaagaccacttcttagttgattctggaaaaatgaaccttttctttctaccaaccggcaccgaaattcagagtatcctggacacagctgagagactactcagggagagccactgcagtcacaccccacctccacttaggtctccctacactcactctaatcttctaaatcgtttaatcagacacggcgctgcctctgaggcttcaggactttcaggctgtttttttttccccgggcttaaagtctttctctgctgctgactcacatgttaattattgctttgcataaagtagaattagcagtgctcctgcactcacctgcctgcgtgttatacaactgttttatctgctggacagaactgagtgtgcaggccggcctgccatggtgtcaccagcggccctgtcttcagctgccagggcaatgagcatcgcacagaaaccaaccattgctttagaggctctggggaagaggctgtggggtgtgctctgcttgtcccaggaaaaagagggttaagtgccaagttttgaccaaaatcttataagaatggtccaggagtttcagttccctgtcacctgtcagtgttaatggacagaactggtgtttcacagaaaaaaaaaaaaaaatacgtgtgtgtgtgtgtgtgtgtgtgtgtgtgtgtgtgtgtgtgtatcaacttgttttctctttggctgctgggctggataatgaagtaaagatgacattatctctaataaaagtgatttgcagaaatcactgacgggacctcagtagcagagattcgccattagcaggctagccagataagaggggcagctgggttctgttaaccccctcctcgtctgatgtgtgtcttgcagggaagtcaaaggcggaggagtagagtagagtggactttttgaagtttgggctaatggacagtgttttttccaaagtgtgggctgttctttagccccacttgctgatctttagggatgtcattaggttttcatttttgttttgtttcttaggatttttgtgttagtggctttttccccctggggcttggcccattttctcacctctatgttatatcaccagaagggtggaaccctggccaagccctggcatcctctgccagaaatctgagtccaagcagggcacctacacatgtgaggtgagggctctgggccacgggtgttgggcaacagattgttctgtagtgtcgaggaggtgggatctgaggcagaaacctccctggcctcttaaggatgggacgggtcaggaggggaggggtctgcccttgtccggacttgttcacctgtgtcagtgagagctgactagcagctggctcacgaaacacacccatgatgtggacagcgggcacagccagctacttctgtgtgaaaacatccttagtatacagggatttgtttcctggggacagtgaggagtcatggggtgttaagcaacctagtgatgaatatagccaccatcactcgcctttattaatccactttctactggaagcactaaagcattggaactctgcaatacccccacagctgggggaccgtgactgatttaatcttcatgccagctcaccataccataactgaaagggctgtatgacactattattgttggagtaaggtactttgatacatgagaggtttgacattttgcctgtgccctcagagaaccttaaaactaggactaacaaggtgacggtgccttgcagtcaagtagcacagattgtctaagtgttccaggcaggagtgaggaggagacaccagtgtaggctcggtaagatgctcagaaaagcctctgtggaggtggcaggcctatgttggctctcaaactttagggtttagaaggtcagaaaggaagaagcacttcaggtggaacaaatcaactggggacatggctgggcagcagaaaggggtgcggagtttgggggtggcagggcatagtgtggtctggctggagtaagcgtggagctacaggatcgtaggagctaagtttggaaagggctgggagacctcaaggagcacgtccagcttggacttcatcatgaggatggtggggagcaattttcattttaaaatgggggagcgacaagctgaaaatggttttggggaaagagtggtgggctggcgagctgttccttgccccaagatctgactcaaattttattcttggtcagtggtaaagaaagtgaggggcaagggaaacaaacagaagatggggactaaggtctgtggaaataaataaaacaccaccagagccagaggaggcgtgtgccctgggtgaagtttgtttttcatcccatgggtaacatttatgagttactgttcagcaagaatgccttgcggaggtctctgtggactgagctgaggctccagcctgtggcagcccaggaattgctgccatatttagagcttccaacagagggtttcattttccttggctttggtgccaagaaaagaggggttctcacacttgctgtccagcagggccaaagcatgaccagcaggaggagcatggaggttgggttctggcactgcccaccacctggcacctcagccactaatcagacaacaggctaggcaattatccgggcatctgactttagctacctgtccttttgtttaaagccctttcgtgtgcttggcaccttatggatactcaacaaggtctgtttaatgaatgcgttctccccacccagattctcaatgccttgctccctgttctctagcctgtctcccgaccactggcacctctgcccattcccagtgtgtctttgtcatccctctgccatcctgattgcctccctgtatcctgctcttctttcaaagccaacctccagcagagttctccctgtcttctccagccttgcaggctttctcctcccaaactcctacagccctgactgttcagcccattcttcaggacttggctcttcacctctctgcaagctccctgaggtcaggcatagttgttccacatttcattctactgctcacagccccatcgtaggaagagagaatcattaatatatattgaatgagcagagggaataagccattgctgggggaaaaatacagttttatttcccaaattgctcaatgttatttgagagcatgataataaatttggaaaagacttttagcatttcctgtggcttttgatgacttctttacaaaggaatggaaatgtgcgcagacatctcacttctcatcagagcaagagagggcagaattgggggaaagcaagtgttcgcgctgtggcatgaatcagatcccacaatactagacatgtgaccatgtgaacaggcctcagatcaggattctttataaaggaagcccaggacagattctctaccagctctctcctctttcacttttcctctttctttgctttcctttttttaatagggaggggagaaggggttatgaggatgggggtaggagagtgagggatcccgtgctttctcccccttctcttgctgttttgaaatactttaaattccaggaaccagaagttctggcaacatgttgggattagtaaggcagatcctaggatatttcactattagcatgtgatcaagcatcagtcctgattaaaagtctaaacaaatgttttctttgaaattaaagtgtctgaaataaagaagagagaactgacccttaaaatcatattctgtacttgaaaagagttctgacaactgtctgtcccggttatgtgcacccccgccccccacccgcctttttccatccagaatgtttgacgacactgccaggggaatttctgccccctccttcctgtatatacccagtgctggcctctgaggcagtccagctctgttttctcatgacacagtgattatttttggcattgcagatattttttctaatgttattacccagcccccttcttggttgccttttgtggagcaatcttttgggtaactccctgtaaatttgagggttaattttagttcggtgtggtagaggaggcagtgggagagaggaggaacgacttctactccgaagcgccccacccccaccttaagaggagccggagaggtcctctcacgccctgctcatgaaagagcttgctttcaccagctctgtgctcaccattcatcctttctgccggcgggcttgaggatatggatatccagaggtgacgctgggggctgcacctcggggatggcatcttaatgacttgacttggcgggtgttagaacagccccattcagagtgagttcactccctgcgcagttggctcactcggcctctgtccatagagttctcttgttcacgctgcaggaggaaatggagatttccaagtgggaaggagccttcccgatgctttaactcttcactgaagggaagaggagctgcagagagcgaaataaaatctaagccgccccagctgcagcgcctgggagaggagcaaggctgggctggggatggaggccaaggcagctgggatcactttttctttcctccttgagagggaaaggaaaagagcaaagggcatttttgattgtctttcacaatcagcaaatatttacccagtttgtctgccctagcccaggttccactgaaggatacacgaaagtggaagatgttgtgtctgtgcccttcccctggtacttacagcacagttataggagtagaacgtttgcatagaaaagccaccaagacagggaggcctttaataagggcctatgagtagtgtgggcaggaagtaccctggagaatgttgctaaggggccagggacactgctggaagaagtagggcttgggctggtcctaaggggtgggttttgaagaaataggaaggaataaaatgatacaggtagggaagacttgaaggaggagagggacattaatgtagggcttagtaaaatcccataaagaaagctacaaagagaacaggattcttcctggccagagagaagattggacttgttggactttacgtgcctcagattaggatggcagcaggcagcactaaccctgccagatggcatcttcagtctcaagatcgcacgtgttcctgggtctctttctactcaaagtgtgaggtcacagactagtagaatcagcatcctctgagggttgttaggaaggcagaatcccaggcttcagcccagatcctactgagcctgcactgtaacaagatccctgggtgattcctggccacagcaaaggttgggaagtgctgctctgggtgactccacaggcagctgtcagcagcactagttcagaccccagatttgattcacagaggtgacaaaacaccaacagacacacacaccttgagtgtccgcagggtgactcttcccagatggaaaccg

SEQ ID NO: 37082 - DNA, 647 bp, Homo sapiens
gtgcactaatcccattcatgaggacttcactgtcatgagttaatcacctcccaacggttccaccttcagataccatcacattgggagtggggatttcaacataagtattttgaggggacgtaaacattcagaccttggcacccactaaggcttgggcttgatgaagctaagcacagggacagttcattatgattattcctgtgtacacacagcttttcccagctgggctggggagtccacgtgtcctccggttacgtaaggagctgggttatctggagccccagatgggctgcttagtaatcgaatctgctgctcttttctacaaggctgcctggggctgagaaggccagaagataagtatctccagtcaacccaagcagaattgaccattagagggccatgctgggtgagccccagacattactgtcagcgctgaatgcagtccaggccctctgctccagggacacagaccgttagagtaggtcagagagctggaggctcagccccagcggagcggaggttgggaggctgaggtatgagatgctttccaggattcctctttcagggaagtggcaagtgaaagcatttgtccctgttttaaccactccagtctcatgtcttctctcttctttgtcccctcttgtaga

SEQ ID NO: 37083 - DNA, 2108 bp, Homo sapiens
ggctcaggagctaggaactcactactacagaaaagagagaaagaggccctaaactaacacagggccgcaggaatgcagaggcagcaaggactgcggcctagagatgactagatatgggcacgggcaggacacagggtggcctgggtgaaccactgagccacaaaccaggaccggggagactgcagcatgagcaggtttggggctggagaagagagacaataaaataataggtgctaggccaagatctaggaactttatatgaattatttcatttaaatcccacatggggggacctttgagaagggcacagctattatccatatctatagatgagaaaactgaagcgtagtgtgattgaaaaccctgtaagaatcagagctgtgatgtggttttcagagcctgcatcctcatttctgggccccacgctgacttggagacacctgagggcagaggctgggcatctggggctgggcagaggctgggcatctggggctaggcagagaggcctgggctggaagctctctgtcgagccacaggagagataagactgagattggcagggagtgtgagagagtgaggaagaaggcaaggccggaccacgaagaaaggggctgtcacagagggtgatgggtaggcagaagtccagccagccaggaacccatcccaaccccgggatccagcaggagccttcctcagccctctccccagcccacagggaaggagtccagccctaaaacttggccttttgcctacctgccctgcccacagagcacacacaggcggcctggccctcctcccgcgcctagagctggttgcacaaccacctgagctggtgaggcaaggatagcgttcccttcctccccaagaggagtccagaggcaagggttaaaaggattaggctcagctttgggaaacaaaaccaactctaagtggaaaaacaccagccctcgctgggctattgtgaggcgcagtcatggttcccagtccatatgtggacagggcctaggatctgttgacaaaagtgactcaggcgtttacctcaggcccaacgcccgctggcccaggtcccgtctgggtgtgtcattggctcaagtgaggtcccatgaatacacacacacacacacacacacacacacacacacacacacacactctggagccaactctctgagttacccaatcccagccaattcacctgaagcacctggcatttctttcatcacccaacaggtcattgtgctgagctgtcagtgcagaggaggcttagctggctccatcattcacatcacaagcttcataaattcctgaggagagtgccaaaggccgagattgctgcagcactttcactgggggaagaggagaggctaagcaggcaggtggtcagggagagccaacagagggagaaattccagcctccgcttactccccctctgtcacttggttccaccacatgtagcggcagtgtctggccccagtgtgctgagagaaaaaagagaaaacacacacagagaagtggggatcacagaacatggaatgtgtgtcctcaagggcccttccagacctttaattagtgtggctctctcatttacagatgaagaaaccatttgtcagacattcagcgggtgaaggacaaacaagagacagaatccagggccttcaacgtcctctcagtgctcttgcccctacatcacacagactccagacaagcaggactggaagaggctaagatgaccacgagcctgaccccacacctgctactggagagacccacagcctcctcatctgggctcttctggccacatggcacagcctggtggggtaggttttactcattgtggcatctctggtacctggggcacagtaggttctcagaaaatgttgcatgagttaatctaatggaataccagtttatcccatatggaagtatgctagccgcttttttggaagccacgagaaatttaaagcagactttaaaaaaaaaaatcatgtatcacttcgcttcagcctgacaagattttttctggctggacaagaattcttgacaaacctgcatttaggcaggtaagttccccttgtggcatacctgaattgctctctctctctcccgc

SEQ ID NO: 37084 - DNA, 794 bp, Homo sapiens
aaattagccaggcctggtggcatgcacctgtagtcctagctactcgagaggctgaggtaggagaagcacatgagcttaggaggtcaaggctacagtgagctgagattgcgccactacactccagcctgggtgacagagcaagactctgtctcaaataaataagtagataatcaatcaatccatgaagccactatataaaaatgccaaggtgaaaatggaaaggcaactatgcatattgtagggtcatgaccccatgagatatgcgtgcatgtgtacaaatacataaaaggaaaaaattttaaagaccaatagttaaaaccatattaggggaaacttatttgaaggtcaccctcttccctttctccccatagacatctattctaaatttccattaaattcttaaaattgtttgcatagcaagtaatcatttaaacaaatatttgattatttcagcattattttttttttttttttttgccagcattaccttttagaggctggtttccttcccccagaacacgctcatgtgtaaactggggatggtttggctcatctgatttttatttgaagttgccatagcctgttcactctgaaggttatatgcatgggagaaacttcataacaaaatggcagtcagcctactgcttcattttcttagccaagaaaggatctaaacccttcacacaacaggaaggggcatgccagcccaggtacttaaaccaatattagcattcaccaaaaagtactggggcaccgtagccccctttcatagtgctgtgagcttaggcttcctt

SEQ ID NO: 37085 - DNA, 743 bp, Homo sapiens
acactgttgcagcctcaaacagaattagaattctgatagtatgagtggaggggggagatactgaattaagcaaataactggtgtatcatccctaattccttaggcccagctcccactcccttcctgagctgctgagccagaaagccttgatggggttgaaaccatcagatggagcacagccgtagccaatctgggccgggccactgctgcactctgctttaaggaagagtactgcataccacagcagggaggtcatggttttccctggccacacgcctggagccactctgccttcatcctcctgacctctgcctgaagcccatgacctgacacaatcagggcagcagactgggaagggcactcctctctgtgctgggtgccctcagcagagctgcaaggggaggcaagttggactccagagccccttcccttcctgatcccagatcccacagagcagagcccagagacagtcaggggactgtgatcatcctatggacaccaagctgctaaagtctatgtataagagattgcactcattgcaaaggaccactaagcttcagcccaaataatgaagcactaatagtaaagtttcaggcaggcttagggagagaaagatgggaaaatctctcctgttccctaaatggaatattgtaggctgccctcctgagcccaaggacaggactacagttggagagactcgggggcaggagggttaagccttgattccaaaggccactttcctg

SEQ ID NO: 37086 - DNA, 1300 bp, Homo sapiens
aatacaccagaaagtagactctatgtaactatttaaacttatgaaaacaatttaaatgtttgcacctaaaaatgtgcaaggggtacacagattttcaaaattcttttaggagtctgcaaggaaaatgtttagagaaccagggtcacggagctggcgcttccctgcaaggggagtgtacttagacgtaaaaccaagggctctggggatgggagggcaccctcaaagttagggggtaaactctcactggggctgggttggtggcaaaggagccaaggcgctccctcttcaccctagcaatactttcctctggtcttttgttttcttgttttattttcagcgttcctctaaaatcccattctctccactacagatgctctgccaggtcagggtgcgttctgctctgcgtttttccatcctgcctaaacggtacgtttcttcagggaagccctcccagccggccgcgcccccaccccaccccgacccctggctccccgagtccaatacggttttgcgtagctaggcgcgcgccgcttcctcctgttgactgtgactttgggccagtcctccctccccagctggctcctaagttttctcatcggtgtctgcaagtctgtttcctcggcagtgagatgtcgataatcagaatgaagtaagatgaaacctggcacggagcttggcctgcagccagaacagggcacctagttgcatttagcaaatgtttgctaattgtgaggctaaatcgtctcgcttcccagtgattagagaagcctgggcttcccagtgcccaggaaaccaaggagagttcccaaaccctcacgtatcctttgagtaacttgccaacttggggtgatgaaaacgcactcccctcctcccgccgccgctgggtcgggctctgaacgcacgagcctcggagctatgaggtcatacacgggtcacgtggccgctgtcgcatctgtcaactgtgatacaattactaagactgtccggacattcaaacctgctctctcctcctcctccctctccggtacgccggcccttttcacaccaagggaccgtctcaaaagtctaggctccaaatgctacgacgtaagaaaggaggagaaagagggaggaaaaaagtcgaagactacacttctcgttgctgccgtttgaaaactatgcctaagccccgttatttaaaatcctttctgccaaagcaagttggcatatgtattaagagccttttaaaaatcgtcatattctttaactcattaattcctgttctaggatgcttgcatatggaaatagtccaaactagagc

SEQ ID NO: 37087 - DNA, 2435 bp, Homo sapiens
aaaaagaaagaaaaagaaaaagaaatttcactgttctcacacagacctgtgtctgtttcaacatttgcacaaataaaaggagagaagcaagcagacagcctatgggacgctcagaaacaaagtgctttctatctccaatccctgaaatttgagagctttttctgtaactttttttttttttttttttttttttttaccacttggacattatcttctttgctcatgggaaagtgaggtttctgttgcggtctgattggtgcttccagctaaggcattcatgggctgacaggggggcattctggatagcccccctccccatcccacatatacaccaagtgggatcagctccagagctctaagtattcctggcagtcagttttggcaactctgtgggccaaaagaatgaggtcactgtcaccaatgaagtcaccactgcatgattcatcggacatcagttccccactgggaatgctatgacattcccagagcttctcctactcttagctcacatttatagatgagaaaacggaggcccagagaagggaagtgacatgctcaaggtaacactgctaaccagggtcagagctaggaccaaactcagctctcctggctgagtgctctccttttcaagctcctggatagaccctcctttcaggacacgagtccctgcaaatgctgcctgaacaaatggtcctgcaagccaagaatggggcaggccctgctctctttctctctaagagcaagtagcagaggccggtcttgaaccaggaactgaccttaaggcacttttctgccttcctcaacctgttattcagtccatacaaaatatcttccagattcattgcatctaaagcagctagcaatgcgcatacctagtcgcagacacgcagggccaaagggtgggtcctggggagaggctcaatgagaatctgcaaggaacttacagtgatttccgaagacttcctgggagagtggaaatcagattcggagtttgagagttcaggcctcctggatagtgaggaacgggaatacaacagtgagcatttccccaagtgtgctccaagtccttgagtactgggagcagctggaagcctttgggacaaccgcttcacctttctaggtctcagttttcttccctacaacctaagggtgatggtccagttgacctccgcgctgcctctcaatgctgcatttttctaacgctgtgaatcgatgaaaggaagcgattacctctagtcagcaagttgaggggaggggtgcggtgtcagcgcagagtgcacccccgccccaatgcccagtgttcaatgctgcattcttggccagtgaacaggacctggccagatgggtgtgttccggcatcgccaggcagaggggcaggggttgccgcctcgagcacaggccaagtttcagagcactagtgtgtatcagttctccgggattacaacggaatacctttgaggaacattggggaccgaaaggcgacctcggagaatgtggcctccagggggagcccaggtacatttgccgggtccggagccgacggggtatcctttttctggctggtgtgtgtgtggaggggcgtgcttcagtggttcaacacgctgtatctcccttagttaccggtttcatagtaaatgattaaagctcgtgctacggaaggcgtggggtggtggtggtgggggggaccacgcaataagccagggttcctgctttccagctcaaggaccgccaccaccccacgcgccttaaatttttttttttttttttttacccttttggtctctcctccttgatttctagttccgttgtgcacttagaggccgagaggatggctctggccttccgggtggaggtgaaatatgcatgtataatttggcatgactattgcgtcatcgtggaggtcgtcgtggttccccgagaggcctccacgtcttctcccagcatcggggcctttggacgcttccgggcgctgcgggcacttgcgcgaggagccctcggctccccaggcgactcccctcctcccctccgcggtcctcggctcctcctcctcctgcgcgcccctccgcgcggccctcgcagggagtggggctcgggtgcgccggcagggccgcgcggcggcagcaggcgggggcgcgtggcgcgggccgcgctcggggaggcgcctgggcccgccctcctccggggcgccgcgggaggggcccgggttggcgcggggcggggagagccgcctggcccctcccctccgccgccctccccaaagttgccgtctcccccggggccggccggtcttatgatccggcggatcctcctggggaggccgggccggggagagggcgcgggcgccgagtggcgggggcagcgggcgggcgcggcgaccggggccggggcggggatccgggcggcgaccgcggcggcggcagcgccccgggcccgcc

SEQ ID NO: 37088 - DNA, 1480 bp, Homo sapiens
gcatggctcacgggcccggcgcgctgatgctcaagtgcgtggtggtcggcgacggggcggtgggcaagacgtgcctactcatgagctatgccaacgacgccttcccggaggagtacgtgcccaccgtcttcgaccactacgcaggtaagcctcggaactgctgactaaggggccgctccccgggccgggaactttggagcaactttggcggagccccctcgccgcctccccagagcgcactcctctcccctcccccgccgcgccctctgccaggcggccggccccacccccgaagcttcgctcctggcaacccctcgcccgctgatccaccccctctcccacccgccccctacgcggctcctgctccccgcacttcctacccctcggcgccctgggccgtcctccttgaccttcccacatcccctttcctactgccccaaggccccgggggaaatattcgaggggaccgagcgagacgtggctacgggacttgggagaagggggtggacggctggggaccacatcacaccccggccctttgccggttcacagtgagctggccgcacgggaaaagggggtgacatctcgcggggagcgcccccacgcctctagctgggttgggagaggagggtccgggtggggagcgaaattgccccagagcccaggtcactgtgagcttctctccccgcccccacttctgtccttgcagtcagcgtcaccgtggggggcaagcagtacctcctaggactctatgacacggccggacaggtgagtgtcttggcctctggccgacgcccccctcctgttccccagttctttgtggctgcgaagggcctttggaaaccgaggtgtctaggtgggagggtgtgtctgcgacgggcttcccctggattaggtctttatttcttgtaacaagtcagcaaattaggaaaacaaacaaaacaaacagagccggataagccccccccatgtgaacccctgggctgtgaaagtttttgcctgtgtgggtcgttctgtgtggcgcctggtgtgtgggtcccaactcctgttgcaaagtggcagcagccaatcatgaagcgcccttatttttagttgcagatgaccaggtctcccccccacagcctctgtctggtccctcattggtgagtggtctgcctgcccaaggagcctgattggtgggaaatggcatcatctaatatgatgggaaggcatttggtcctggttatgtttattacaacatcattgcactctgggactccagtccctgaaaacgtaatttgtggtgttaccaaaggaccacagggaaaaaagaaaagaaacaacaaccatgtagccactccctggggtggggaggaagggttaggagtttagagtgaatcttggaggaggaggggttccccccggccctacttcagaagggccaggtgactttgtctgggttttctttgggagagattaattgtgcagaaagaagatgcac

SEQ ID NO: 37089 - DNA, 1915 bp, Homo sapiens
ttatggagaatattccagaaaatagaaatatctcagaaaaaaaaatactatacacacacacgcacacgcgcgcgcgcgcgtgggcggaggggcgcccactagtgagaaaagcagaaaggcgaacctgggccttatcctaatagctctcatttaattcacccaatgcttttcaaaggcagatattttactgataaggaaacacggcaaacaggtgaggtggtccaaggtcccatgcgctacagccatctctctggtataaggaaatacactaggcatgaaaagcaaacggatggcaagaagggacaaagggaaagtttcccatagattctatcttaagctgattgagggagggcaaggggatcaggaatccattctctcaacagatagcccttcagcgatttttctgagccaccctcggaatcgcagctgccagcagcagatgtggatgtaatacagtgagcaggacccaaactcaaatgtttgctgaatgaatgaaggaaccagagtaagcaaagagggaaccagcaccggttaggccctggcgtgcccccaggacgcctgcagaagtgccacgggcatgacccggcccacctcgctacgcaccgcagcggagagaaggctcttccgagcggcacccagaggagccttcgcgggcatcgccgcaccttcaccggcagccccaccccaacccgggtccctcgggattctgcccgagcctacgccggcgcaagcgtgggcagcgaggaaccagctgagaggcaggatcaaagagcatgggagttgaagacaagggaaaactgggggacagaggcgaaaactcggatccgaaagggggtctgtccatcagggcacgccggaagagtggcgctgagctgacggcgagcgccggcgggtcggggcgccaaggctcagggctgcttcggcaattcgcgggggtagcttgcacctcgtgaggcgagacgccgagggcgtccagcggggcttacctaactctccctcccgcggaagggaagcggggaactactgcctcctaccatcaggtacgacgggcggcccaggcccacgcgcaggcgcagggctgtggggcggagacccacgcctaacagccagtcgcagaaagggaggggcgggcaaaaggggcagcggctttccaggtttggggtaggcgggagtatgggcttagaagccggaagtgggttgacgtagcccggaaggggaatacttccaagttgtagtgttgttgttttcagcctgctgctgctgctgctgttgcggctaggggaaccgtcgtggggaaggatggtgtgcgaaaaatgtgagttaaggggccgcttctgcgggaggaggaggctgggagaacctaactgagctctcccgggaactttgctttctcgttgttttttcttcgcccacaggtctcagattctatccgctgtctttctaccctaccctttgaccatttttgcacctcccaacgaccatacagtcctatatattttgtactcagaatggtctcagttctgcacctccttgtctatttctgttgccttcccccagccccagatctcatcagctctcctcccatataaaaatgtgcagttaaaccccaacgacacctttctgtcttggcaattcttgatctttcctttctattcatgtaagaagtattgttctcctgccaaatgctagacactagaaccaaagactaaggactttgccttattcattctcattagtcattatgccaggatatggcttagagtaagcccagaagatgcttgaattgaaaatcaacgtaagtgcaaattattatttccctaacttaaaacctttaataaattctcagtgtgcagagaataatttggggattctatatttggaacctggcgttcaggaccctccacactaaggcccc

SEQ ID NO: 37090 - DNA, 475 bp, Homo sapiens
ctctacagctcccaggaatctgaggttcacaaggtgaaacctaccaggccaaacaatttaaaattggttttgttttgaaaatccagtaagtatgatggcaatgtcttgcagaaattcctcttttagtattccagtctgtgggctctggcagaagtaatagtctgctgcaaacagatcactcttttttgtttgcaaagtcttcgtaccagctgaatcacagcttgcttttcacttttcgtaacaccttgcaacatcgcaaaatatttgctggagtttgtgaagggcggctgcagaattagtaaactgaaaggaggccttcctttactcccacccctgtcagcaccttctgttctagcagaccgaaaggcagcttgagaactctgattgcttctctagattatgacaattcttggcaccatcgcccggggcaagaatggaagcaaaggaaacattatggagttttgcaggtgccagt

SEQ ID NO: 37091 - DNA, 3009 bp, Homo sapiens
aataaatgatgcaggtgaggcagtggcagtggcagtagaagtgaacagaagaaagcatttagtaaatattaccaacacgataaagttagaagaggtagggagatgttagagcagtgaggaagtggcatgaaaggttacttcaaggttcctggcttgggcaaataagtggatggtggttatcatcaaaaaaagataaggaacagatgagaaggaggagcaggttttgtgaacctcagagggtatatgaggtcccatgtggagacatcatggcttgcaagtgcagatgcccaagaggcacttatacctgcagatctggacgtcattaaacatacattcagctgttgagccatcagaatggtcagatcacccagtgggcagagagagaaacgactgcatgcccactaaatagaggactgagggtcagatccttgggcgtagagtcaacagagaacagatttagaaaggctaactgaacagaaagacaatctgagggtttagggtgttagaaaagtgggctgaggggtacatcagggaagagaaaaaggcttcatgtagtccacaaaatccaccgcaggagaccaagcaggatgactacaaatcgacctttgaacccggtcatacgggtgtcactgcgagccttaacagaagcactttttagtggattagttgggagaataacttagccagtacttgagggatgaattgaaataaaggatgagagctagacagtctcacaggagagctttttggtttattaagttgaggcgctggaacatgatcaaggttatgtctaacacttaagaagtgaccggtacgtttgtgaacgacgacaaggtttctaaaacactagtggggccgggcatggtggttcacgcctgtaaccccagcactttgggaggggaggccggggtaggaggatccctggaacccaggagttcgagattagcttgggcaacacaggaagacactgtctaccaaaaaaaaaaaaaaaaaaaaagccagcgggaagagcccttgcaggcgtgaactatgcttctcttcctccaccctttcagccatttccagggagggggcccttccatataaaatgcagacaaaacgacggagaccgacacccctccctccgatttgtgagtcatttttgtggcagctgggggcggggataggaatacttgaattgcaggaggtgcccggtttcccgtggatcttggaacttgctaactgggtggctccatgctgaagggcgctggagagactcattcacattttcctactcggcactcacgccctccattcagcactttcctctccttctccctaagacttgaaaccagggacaaagctttccccccactcctacttcaggttcaccttccacccacaagcccatcgcttgcccttctccgaccacgtgacattccccctcaatccccgagactccccgccgtcgacccctcccttcgggccgcagcccgctttaccccgcctctcaggcccacgtgaccgcctctctcccacctgactggctcctccctttccccggccggacacggcgcccgtcgcagctgccagactccaaaatggcagccgcgcagagcgcgcacccaagcggccggacctccccgactcccgggccgcccccgtctcgcgccctgcctccctccttcggccttcacctacccgcctccggattggccgctaggaatcccgcccctctaaagccctgcctgctattggtcacggtaggctgcccttcagagaggcgtgcccctgcccgccccccgccccccgccccgggaggtattttccattctggtgggggttggggggaggggggaggggaaacgggtgaagaaggggaggcggcagggaagggggtgggggcctggcgggggcatccggcggagctggggtccccgggctccgtccggaggaagcgacgctgcgctcgctgggcagtcggaggggacgggacgcaccggagggcaggcggactcgccctgtcggtgactgcgccgtccgggcccgtcctgcctggccgcaggtgccctggatgaggccgccccgcgcgccccaaacggtgagtgtccccgcggtcgcgcccggcccgccgcctgctccccggcccccgcgccgtcgtccgcggccgcctctcggtgccccagtgcccgcgcccggcgcattccgcccccggctgtcgcccccgcaccgcggcggaggcagcgccggcctctggctgggatgggctggccgggaaaaggactgctagcccgggccgcgagccccgtgcagaccacgccgctcacagtgggagcttgcgcttagtaggctctcgatgcatttctgtggaattgtttttctggttggaggaacgtggggttcctaaggggaagggggtcgtccggggccagtaggagggcatccgtgatcggggtcgtggtgggtcgcggggaggccaccggagactgaagcagttacacaggctgcagggaagggagcaccgaccaagtcacttggggctccaagagcccgatctgggggtcttcaaggtcgaggagaaaagatcctcttggggatgagggagggaaccaatgagtacatatgtgggaaatgaattgagtgccccgggaggtttaactaaccaaggtgggtaagggatgcggaggcgggagctggaagacccctctgcaactacttgggctcctaagagtctttgatgtggggtttgggcatccgagtagcagaagcggagtgatttttgtggagagggaattgcatttaaagaaggatgctaaaaaaacagtgtaaatacatcttggtttggttccgaactttgaaaggcttgagggattggagtcacaaggaaattttgacattttcttgtggcattccaactaaagggtgcctggctgctggactttgtcagttatcttttattgaaaaatatatgtgtatgtttgatggtattctatcagtcacaagtttttctggaaattatcataactacac

SEQ ID NO: 37092 - DNA, 1169 bp, Homo sapiens
tatgttgctcaggctagtcttgaacttctatcaagcagtccttctgccccagcctccccaaatgctgggattacaggcatgagctactgtgcttggccaattttatgaatcaacttgaactttcaagttttgttttcagggttttttgtttggggaatttttgtttgtttccagacagatacggaatagcttttagtttagggcctgtttgggcccaccactgaggtgtgcacttttttgtgtctcctttaatttccccatgtattcatcaaggtttattcatcccagctggttattgatcctggccctgtgtgaactctaaatcgttggagagtgtcccagtatttgttattttcttggacgtttttctttgtgtagcctcatggagttacacaccacatgtatgcagattggtatttggccagaaactcgagaagaccccttttgcatgtttttggagcactttctctgtgtaacttcttcctttgtggttcgatgccctgcaaattctagctgtctcagactttacaaattctgagctctgtcacgtcagcttagtgagactactgactctatttggcttcctctccctgtgttttggttctaggcagaaagctggagcaatcacagggctccccttgcttgttttccttctttaggggatcatgttttcatattgcctcttatctcgtgtgaaaactattgtttggtattttgtctagttttctacttgtttgtaactgcaggacaattctagactttgcttctggctcatgactagaattcagaagtcttctgccttcattttttaaggatattcatgccagataaacaatttcgggttaacggtttttttttctttcaacattttaaggtcatcatttcgtaatcttccggtttatattatttctgatgagaagtcagtggtatttcttataattgctcacttaatgcagtatgtatttttttctcatcccactgctctaaagatttctctttttatctttggttttatgcaattttgtaaattttagggttaggttacctctaatatagaggcatgccttttcagagtctgtgttgaaagcatggggtattcaacaaggtcttttcactctagcttagctgctaggaattttaatgtctcccggacctgtgcttacaagctt

SEQ ID NO: 37093 - DNA, 1205 bp, Homo sapiens
cttaaaaccatttagaacttcagtaaaaccatgaaaaagtgctgctttggaaatggagaaatattcaaaagtatggtgtgatgttttcaagtggattgtgattatagtctcaatttgttgatcttgacctctagtggacaggtgcaggcttactctttgttcagtcttagtaaatgaggctcaagggaaccctgtgttcacatctgaatggatgaaatgtaggtatgggtactgtgtcctctcttgcagtatgggcacaaaactgtctttaaaaaagagacaagtagataactaacatgtcgatcttcctgtgatgaatggagaagcctgtggataatacacagaacaaatgaacgctggaaaacactaaggctcatgtaattagagataaccgtatctgtgaaactaactacaggtcctaagttatatgatactgaaagtcgtttatttattttttaatgaaaaacaatacccttgaataaaccttggatgaagttttatgagatctttgggagttgaggtatgttggggttaggcaaattgggctgactcaaggtttgggggctgtcacccccatcatcttgatcagatcacagtttccaatgacctttgtttcttcctctcatgaagaaaacaatacctgcctacaccactgaattctatttggaaatcatctcagataagaaatgacagataaagtaccagtgattagttttcagaactgtagcacttggggaagaatggacattttgtaacatatgtatatgaattaatataagacagagcagatttacttaaaataatttttgagctgagaagctgttctttcggtaacatttttcttctgaagagctcagatttcatccgtagctgtggaactgctgtcagactgcctggcttgtgctcagcccagctacttattaactggtgggtttcttaactcttcccaggcgtggattcttcatcacctacctcatcgtggtgtggaaatgtaaactgaataatctttgagagatacgtaacccagggcccggcatagcatatgtgcttggtaaatgttaccgttttctttgtggttacatccatctatgcatgctagtccattcgtggaaatgcagtcctggaatccaagggtcctgatgaaaattgcagtctttcttttttctgcctaagccttggctaaaatatatattcagcaggtaatt

SEQ ID NO: 37094 - DNA, 1323 bp, Homo sapiens
tcagggggaatgggaatcaggtttgcccttgcaccccagggtagctggtgaaggctgtcttggataatcttcggcctctcccttccagactcttctttaagcatccccatcccaccttggtatcctagtccctctgctactcccgtgcttgccttcctgggacagtgatagttgcagttcctgctgacttggagtgcccctccgctctgtgtcctgtgagaaagcgggtaggttgatgagggagggcaggggtgggaagctggaaccctcctacgtgacaccctgttcacggtccctctatgtggacaggaaaggccaggccagagttggggggattaaaggcagtacatgagatctggtccatatcccacaatagcctggacaggggcctcagatttcctataagccaatccctttattttattaacaaggaaatcacggctcacagaggtgagggcaggagtccaaggccataccgtctgcacactggctcaggtcctggcgcccagcccagcgcccttccctcaccttctcactgcctggcagccctgcacctcccccagccctggcgcccagtgagccagcacctcgcatatgattacaattaccgtgagtttggcctgagcccagccgtactgcgagcacaaccaggcctggtcactggccaagtttccatctcagtagaaaaatgaaaaagttcaagggatgaatgttaatcccaaacacacgagtaggaaggagtggggtgagggggagaggcccagccaggatctcttagggcaacatcagtccagcaagagctccagagacccaccccaggggcagaaggcctctggctggccaaatttaggctgctttgtggttgtaaatgctgccgcctccagggcccgagatggaattcagctggtgagacttggctggtggtcccagccctcctcggttggctcctgccttgtgtattgttcatgaccttcttgtttctgtcatttacttgagcatctccatctcctgccatgggtaaggaaacaggcacagagaccaagggactcgcctgaggtcagatagccactgaggagtggaatgggctgaaacataggcctctgggcagccaggctgtcagacagcccctctccgtcagagctctccagagcagcctgggccttcctaggatgttcctgctcccttctgcctgccactctgctcagcgtccgaggagctacctggctctatctgccccacaccttgctgcatggccttggtgaggctctgaattccaccctggctgctgacttgtgcccttctaatgctgacatctcacatctt

SEQ ID NO: 37095 - DNA, 821 bp, Homo sapiens
gtccttgagcctttggagatgaaaaggttgtgtctttggcccttgggagtgtgcagttgaaagacccacttccctggcatgtggccactgaccctaaaagcatttaattttgtaagggtgacaagtccaagaaagataagaagctggaggttggagggcagattatggggaggaggagcacagagcaggagagacagctatgtcttgtgccccatggagctagcaaagcacctagactcagatccaatcctttcatgttctgtagacaagtctagtgatcccagggtggcagggaagggctagaagcagctcctgacaaaccacccatgtgtcccatagcagaccagagcctggtttcaggccttcggtctttagggtgaggatgtgatagccaaggccaaagtccagctggccggggggaatgtgggccgggtcctcgggagggaggttgtggctggggctgcaaatttgagagcacacattgaacatacagtaatgggtgactctgtgtggggatggagtggggctgaatgggatctgaggagagagaggtggggagggctgacctctgggaacaccgcgttctcaggaaacagcagttcctgttgtaaaacctggctcctcgcctgtgacaaacttcctgattctgaactgtacaatggctctcagtgctggcaccttcttgggaggagcaggaagtgggggtggcggggggacctcaccttagtgaagacctactgtgtgctgtcgttgtgcctcatgacatttaccgactccttcggaagcaggtgctgctgttcccactgtgcagatgtgtgagg

SEQ ID NO: 37096 - DNA, 718 bp, Homo sapiens
aatacctaaccaccaagaaaagattgtaccagtgaaacgcctccctctccaggagcctataagagtgcacattccctcacacctgcaccagcactggcctctatgatcctgcaaatgcttttaaaggagtcaattcatccgtcataagaaataaacattgccctctgctgcttaaaatatagcttcgcaggagaaaatccaaacttcctggggagggactgacatctattgaacagattctaccacatgtcaggcacaagataggtctgctctcattcagtcctgcaaggtagacatgattgttctcattcagatgagcgagtgaacgcttagagaagttgagtaatttgtccaaggtcacagagctaaggagtggccagagttaggctctgacctcgtctgaggacaaggttcatgctctttctccatgtggcttctgtctctccatctatgacacagaaccatctggccccaactcccgtcttccagcctcactccttcctccacccagccaggtccccgcgcggtagccacactagtgccttagaggagagtgtgccctgtgttagcccaggcactgctagatggtggaatcagagagattttaagattccttatcagtattttctaccttggcgatattttacctatttaataaacaaatggagggttttttaaattttaaaaaaacccattgccaagattctcttggagaaaa

SEQ ID NO: 37097 - DNA, 724 bp, Homo sapiens
gtggcaagggagctgacagggcgtggattccctctccgaggtctaggtgcaaactgctttggacacttcagggtttacagggtccacagcaccaccatcacctctcccttgtctgaccatcacttatgtttggggaaaggctaataattcctttccccaaagcaggtaagtctgagcgttttgattcttttcacattcttattcattttcgagtgattttggggtgtgtgtgtgtgtgtgtgtgtgtgtgtgtgtgtgttgtggagtttttctggtggccattttatacagggagaggtgaagaggagtcattcctggcatttgcaggaatgaaagagaagtgacacgtaaaaaccctggatgggatactaaggcctggaaaaggacattctgtgggacactgccgccatctagaggttcatctgtaaatgacaaatgtattaagagaactaaggggttcaatgattgtcaggattgacaataaaaatttcggcacagtgaaaccccgtctctaccaaaaatgcaaaaaaattagccgggcgtggtggcaggcgcctgtagtcccagctactcgggaggctgaggcaggagaatggtgtgaacccggaaggcggagcttgcagtgagccgagattgcgccactgcactccagcctgggcgacagagccatcactattttgaaattacagagattgagcccaacacagtggctcactcctgtaat

SEQ ID NO: 37098 - DNA, 1386 bp, Homo sapiens
tatcaagagcaccaggaaaggcagccagcaagttatatcagattatcagagaaagcgaaaaccctctaggagttcaggggaagaaatctcctccgagtggaggaaaatcagagaaggctgatagagctggtgacacttcagctgggcctggacagatatgcagggactgaaggaccacaggaatggtgggagcagagtggcaggtgcccacaagcgggaaagaaactacaagtagttcagctgggctgcagcctagagggtaggaagcagacaggacagaggtggctccaaggcctagacaggctgtactggacagggctttgcacactaggccagggcttgacatctcctgcagagaaagacaggagagtcacttacaattcatgaatgggaggtgagatcagagcttggtttcagaatgactcatctggcagcacagtggggaaggcatgaagtggcaaaagcaagactagaggcaggagcatggtagccaagggagtggtaaggcgggtcagatcaaggtctgcggcagcggacaaggttctgtacctcctgggtggtaacagtggcaagtaactacagtgagcgggcactggaaagaaaagttacagagaaatcaggatgccatcaggaactcccagggtttggccacacttggaattgtggtcaataagatgacagtcagctacagagcaagctcttggagggcagggagaactttaaccccaccagtattacccgccaagggtcaggcaggcctttaataattgttgattcaatggaaagtcttggtctgtcctagggctgacagactgacctcaaaaaggaaggtgaaggacagccaggtgacctacatacaaaaacaaaagacctgaccgaacactcacttcccaacaggcaaaacagattctgctagataacaaggccagggatttctaacaggtcaattgtagtccacagccccaaaccagcagtggtaaagacaaaccataaggcactggtcatcccctttacatgctacacacagggctcagctcagaagctgtagctgtctttgtgcctggggctgagaggtagaggtgttatagtccctcttacccatcctaaaaggctctcagggcagaaccctgaaagtgtgagtatgccaccctacaacacttagaaaaatttcccaaatccgtttttcccattaccagtattgcttcccatggccccctccttaaaggggacaatagtcactgggatgtctaacttccaggataggccaggcatggtggttcatacctgtaatcccagcactttgggaggctgaggcaggaggatcacttgaggccaggagtttgagatcagcctagacaacacagtcagacccccatctctacaaaa

SEQ ID NO: 37099 - DNA, 3384 bp, Homo sapiens
attagaaaaagagagagagagagaggaagaaaggaaagaaggcaggcgagggagggaaagatagaaaacagggaatctaactgccacctaacaaattaaactgctgacagtcaagagaaagcataagcaactccctctacccaaataacaggttgcatcatccatgctctaactacttagctcaaggccatgggctaacagcctgaagataagccccagctcactggccttctttaggaaattataaaggccaggctgaagaaaaacccaacggaggagaaatttctgcaaagggacttcagggcacaacccataccttgagacagccctcacaaggcgcagcctcagtcctgggagggcagtgctggaccatcaggagcagtgcgcctcccagtgccttggctgtcacagtgctcccctcctgctctgccagcctcttcctgtaccacagcctccgctcctactggttccatctgtccatctccaacttccttccaggacaggttcaaatgtcacctcaggattcttccagccaagaccaattgctctctcatccgacctcagtctgtagcctctcacactcatttgacctgaacatacgatcacaggttgttctccttttccatttttctcttttcctccctctctgagagtcaggaccctctctcctctggctctcatttaccttactgatctctgctgagctgacctggctcatcgctgaatcagggaagtgagtcttggcacctaggtgtattgttccctatcccacagcggatctagcctaagctggaacttcctttggaggcttccagtggtttgacctggcccaaccctttcttcctggtgtgtcatcagtcctatcagcactaagtttggggccagccttcctgccagcagctagtagcagcttctccctcaaggggcccttggttaagaattcaaacccaaagcagccaaactcaccaacatccagacatcctgtacccacagccaatgccaaagaaaaactgaccagtactttgtcacttacccctgtcatggtcctggaatgaaggcaagaaaataaccaacttcctaagctaaagaaacctctacacggactgagggttgagaattggttctgaaaaagcaggcatttaatattaataacttgatctatttgttcatctagggagcccaaggagcacccatgctgcatttatacatttaatgaccgtactaacagcacaaggtactgaagatagtactatgacctcgacaaactcctctcacacagattacaacctggtagaaaagagagaccggcaggcagacacccatggggtaccacgaaatccccaactgacacctgaaataacacataaaggataagaaggattatttcaaccaaaggacagtgcctcagacatagcgaacatactgaaggaacatgtaagcccagaaggaacttgttctgatctaagaaccaaaaaagattcagtatggttgaagacacagtacagtcgagacaaatgaatctaaagttaaaggaagacaggtcatgaagggctttgcaagccccgttcaagagcttggaagagcaatgagaatccaccaaagggtgataagggaatggggggacgcttctggtcacatgatcagatttctgttttaagaccatggctgtagcctctctgtatagaacaaactacagaggatgaagaagagatgcagggatcatcaggaagacaccgaggtagtccagagaagaaaaggtggcctgaactaggtagggcagggggatgggactggagaatgaacgtatccaagacaactttgcaagggattcgatgtgggtgggtaaaggagtgaagcaagtgagaatgatgcccaattctggcttgggcacccgggtggatggccatgcccagagagggaatacaacaggagatcagcttcccccgccgggcccgacaggacctgtggtctccccgagagagggaacaaggagcagagggagagtaaggcttccggcccgctgcttttgggccgggccaggagcagtgtccacccgacacagctggtcccacaggccgatcctcgggcccctagggaccagggaagggggcggagatctgcccagtcggccccgtctggctccagagcccccggtggggcacaggcttccgccccgggagacaggccgtgctcctagccggttaagcgtcccgagacggcctgggggcccagcccgcgcccccagactactcctgcctctcatcttgagcccaagcctccagcccacaggagaggcgccgggatcccgcccgctgcggagagtgcgctagttcactcacccttacggtctccgaagcagacgcgaagccctccaacgtgagcctcaccagcccccgtccccaaaacgctcttcctcggcttcgccccgccccccccccccccccgacctgccctgcgcacgcgcgctccctgccgcccgcccattggcgccgccgggcccctcccgctggcggcggcgggctgtgaggacggctcgcgtgagtccacgtgtaatcggcccgggcccagcactggcgggactgacgcagttcttctacctgctttcccaagggcgacactcggctccactccagttgggccgctggacgccctaggggcccggcagttgctaggcaacgccggaagccctcaggaacgtagttccacgggcgacgtaggatggcggatccggatggggcggaccccaaagctggctcccaactccgctcaccccctcctatacagggctcttggttcaggtctcttggttcgtcctgctgcaagttgggaagaaagataataggaatgctaattccttcttgatgaaacgaccacaacacgctggagccggccttggaccctacgtttcaagattggcctgcttccagcgtctgccagctccactgcacaagctgcggcagccgctgtccccgttcgcttccacgggagtcccagcaagactatgcgacccagttcaaataccatcttccatgtaccgttcgtgaaatcagcagcttttgacattcaagagaggacagattacttaaaaacagactcatgaacaaatagggaaacgaatacatcatccctgtatcgaattcatccctgtataatcctgcccttacacctgtgctcctatacaagattaacattcagtaagtatccattgacctgatggataaatgagtgtaggacggtcgttttgtttttttgttttgttttgttttgttttgagacggagtctcgctctgtcccaggctggagtgcagtggtgggatctcggctcactgcaacctccgcctcccaggttcaagctcttctcctacctcagcctcccgagtagct

SEQ ID NO: 37100 - DNA, 2519 bp, Homo sapiens
tacagttgtccaaaaacacttagggcagtggtgaagactccagagggaggacgtggagcaccttctaactcttaggagtctgctcaaaagtttgccctgaccctgctgtcttttgagtcttcagtctggaccatacaatgtgtcacttaaatgccggtggtttttggtttcgggtcttgctgtggcttctccagcactggtctgtgagctgcggcggcagcggggccgggcccctgtaagaggtctccccccaagggtggacctcggctgcccccgctaggccccgccccgtagtcctgtgaacttctgggcaccccacagccctgggctaaaccctgctaagcactccatagagctttgatcacagtcttagaccagcatgaagaaataaataaataccaaggtggtgaaacagcctaaagcctttaagaaatccagggcaacagagattccacagaggacaggtcaacgggttagggaagtcaagttggaaagaggaactccgctaaaataagaaaatacaaatgctcccagcagaggggcgtccagagagtcgcgggcctgggaacgggcctgggtcctcgcgagcatgcctggcccgcatcgcaacagggcggggcggacagcggcaggccagctcccgggaggctcgccgtcggggttggggcctgtcggccggcctctccccatttttgtgacgtgtcaggggcagcagcggtgacggggccaccacacaaagccaggtcgtcgggcagtggtctcccaggctaagagccccgatgggatggggagggggcgggaagcgaggcgcccccgggcgccggggctccgcgcgggattaaagtgagctccgactccgcggcgggggcggcggcggggggcgggtacccgggcggccgcgagcgcccttcgcgcgcctggctgctgtggccgcgctggcagccagcgagcccggctcgccgaggcctccccacgcccccgcgggggtggagccgcggccaggggcgggtccgcagctggcggcgccggggcccggggcggaggctgtggcagcagctgcagcggcggcggcggcggcagcgccaggagctgctacagcagaggcggaggttgctcctgtacgcgtacgggccgctcggccggagccgcagcccggaggcgccgggcggtgcgctgggagctgctggtgctgctgctgctgctgctgcccaccctccgccgcccgggcccccgctgccgcccgggccccggctgccgtctgcgcccccgtcgaccccgcccgcgagtgcgccccagccaggacgccgcccccggccgggtctccacttcttggccgcaccttccatgacagcgcccgcgagaagatggctgcgaagggcgcgcacggctcctacctgaaggtggagagcgagctggagcgctgccgcgccgagggccactgggaccgcatgccggagctggtccggcagctgcagacgctgagcatgcccggcggcggaggtaacaggcgaggcagcccgagcgcagcgttcacctttccggacaccggtgagtaagggaagaggctggctcgccggcagcgagcgcgcgaaacgcaccgcctcctccaggaagcgcgcccagacagtcctcggccgacagcgggcgcctgccagcccaccgtgctagtcttaagagcagccagggcagttaggaaggtccttctgccgcgagagaaaaatcacatgtggtttgggggcttggagggaagagaaacggcttttgctctgtgtcctttaggataatgtggctaactctgtctaccgtgaaatggtggtatctgcatatcatgagatcagtgcattggctggactctgccccccaccgcggtccgagggtggggtgtccctaaactccatcaggtgaagtgtgtctgtgtcgtctttgtccatagttctcgcaagtgacgttgaaaacggagctccgtccgaagcagacaggggcgagggtttgacgagctccagggtggggtggtggagaaatggggaagaggcttggccagcctcagtttcctcatctgtggcgatctcgggacacatccagctctagcagtcggtggctttagcagtagggctggtttggctgggccgggctcttgtgctggggcgggaaagcaccctgatgtggcagcggggaacaccccgccccagtctctaacctcaaatcctgttcctggggccttcagcttaccctccctgagtcctctctgtgggcacaatcacttaggaggctttgtggaaggaggcagggaataaatgaatacagatataaataatttttaaagactgctcagcctgttgaaggctctgagagggacagatcgtgatagtaatagtaatagtcaacgcttacttcgtgcttcctgtgtgccagacactgtcctgagcactttaatcaaccccgtgaagcaggtactcttgtttgtcccactttacagataaggaaactgaggcacagagcaactaaataacttgatcagc

SEQ ID NO: 37101 - DNA, 3160 bp, Homo sapiens
ggtagatatcctttcagaactaagagccttttttttttttttttttttgagacaacggagtctcgctctgtcacccaggctggagtacagtggcacgatcttggctcactgcaacctccgcctcccgggttcaagcgattcttctgcctcagcctcccaagtagctaggattacaggcgcccaccaccacgcccggataatttttgtatttttagtagagacgggttttaccatgttgtccaggctggtctcaaattcctgatcttaggtgatctgcctgcctcgacctcccaaagtgctgggattacaggcgtgagccaccgtacccggccgagcatttttttaaatagtgtaaatgtggctttataaaacatgccctgcattgtctaatttttccccagcttggtggaagctctgttgtaaactgccactggtcctccaggaaccgccactagccacaccccatcagcatgcctgaaatgtccttctctgcctcactgcccttgtctccatgtgcaggataatgataaatacgcataccctgtatttatcttgctcttttccaaagaaaagttcaaagctcttttctggactttgccctattaatgccttcagcatcgctgtgataggcagtgaggagtaggtgttattatctctccctcacccacgaggaagacgcagcccgagcagggaggaaatgagcccgtggcttgagaccagtgcagggaacgcagagtcactgcccagcttggaaggactgtgggccacatacctctgggatgtgtcatctgtggccctggcccagggagtggatggcctatctgggaagactagcaaatcccctcaaaagattcagctttggagagttaattaatagagagagcaggtcaggcgtgcagaggctgaatgggcccattggtagaggcattggaggagttcagctgaagggagctccctggtagtcaaggaggctttcaggagaaggtgggcctgagcaaggccccaaaggatagaagaggacctggttaggccagggggaaggggacctgaggaagcacaggcaaaagaggaatgtggatttacaaaggccagaaggaccagttgggaaggtgaatttggcttccccagagcctgtctgtgccacgcttcatttctcttggcttctgagagggcagtagatggtaaggagtgctggaggcttgccctggggtcacagggaccccagactcttacctccctacagggagacaggggtagcaccttcctgccagtgacaaatgccaggtgtgggatgagagctgcatcttcggggagttttatggacagattggtgcctgtgtggcgggagcagtgcccagggcctggcccataggcattgtgagccagctgaggacaggatcagaggcagggggccagagcaaatggcctgcagaggcgggaggttacaaggagaactggggccatgtccaaggtcagaactcacgtgccagggtggcacagcccagggccagcacagcctccctcaggcaacagcacaggatcccaagccacagtaggggtgatcatggctgacaagaccactgcaggccctaagggaggccctgagagttcctctgtgggatggagattgagatgtaagcaacttttgaaaaaggaggggaaagaaaacacgtttaaattcagccactcttggcctccgtgattctgcactttgacccatttctgataggaagaggatggtgacgcagcaggccctctcctcctcaatctgtccctctgccactgtagggggaggcataagctttagggtcctcacaggctgtttctaaggcctttcacctaattatgatttgcatatacatgtacacaagaggactcccaaaatgagaagcctggggctccacaaaacttaactccatctctgactccccacttgtgtttagaataaatgcctgagcttctgagtgccccctggggctgcagtctttggggggattcaggagagggaagacagggcctagtctgcaaggtctctggagtcttgctgggggcataaaacgcacacacatgaaacaattagggactcataggagaattttattgagaaccacaatgtaggctgcagaccatgggtgagagcggggagctgtcggcatgtgcttgagcatcaaagaaggctttctggaggaggaggggagttctgagcaaggtctgaggcaaacaaggtccaggttcagtgggggtgttcaccccaaggtaactttggggcaggcgctggtaacatgtccttgtcatttcagccacagtacatgtgtgaggccatgctgatcctgggcaaactgcattacgtggagggctcataccgagatgccatcagcatgtacgcacgggccgggattgatgacatgtccatggagaacaagcccctgtatcagatgcggctgctgtcggaggcttttgtcatcaaaggtagctgtgggcaccagcctgggctcccctccactgtgtgcagctcgttgcactctgactcccagggccctgctgggctcgtgtccagattcttcacccctggtagtgcccatgccctggcactggtgtctaaggtggatgccggtggcaaccggccatgttgacattgcctggtgcctgggacgttaggagactcagattctcgccctggctctgtcaacaacaattaccctactttgtgtacccttgggcaatcacctcttcacctcctttggcctcagtttacttgtttggaagatacggttgtaatacctgacctcccagggttaccatgaccaagagtcatcagcagaattgtgtagcaaggttgagaaaggtttacaaagtatgacctctcactggcaggctggctctgctgactggcgctggccccagagcaggtgctggatgctgtaggagtctgccactcctcagttatttgtcgggcacctgctgtgagtggcccagggagcaggggctgagacccagtgatgaacaggtcagaaccagttcctggaggagctcttagccttccagggtcaaggggtgctctggaggggatttagggacatgggtcagtgatgtaggaattttatgagggggctgtggacagcccagctgggggaatcgtgccatttaactggaccccaaa

SEQ ID NO: 37102 - DNA, 1115 bp, Homo sapiens
tcattctaccttgagcctggcagaccttagtcattggtgcctaatttagggttcactgtggctccatggatggagcacaggccccttgagaatgggtcctgcccccagcgtcagcctggccggctcgcgttctccttcacctcacacccagcgccagggaggtcctgatgccctgaccgtggtgcacatgaactgtgcagtgcagtgacatgctaggttgtgaagctgctgtgcaaagtcaaaaggtgaaatgccctcagcagccagaaggattatgatctgcagattctcctctccccgcccgttgaagatgggcttctttttttactgttctcttttggtcagtgcaaccccaaggtattctgctgtcacctggaattgtgtggctgattaaaactttttaaaaagaaagaacactacgctgcttccaggacaggatatgatagcatacttggtttttgtgtttttagccctggtatggcgggaattcactgttgattttggcttccctctccaaggggtgtgggctgtgtgcctcacatggacaggagctcagtccctgtggcactgctgtcttggccccaggtgagaggctggcttccagatggagaaggaggagcaggctgctaggggatcaggcctcatccagccagagacctggagctagtcgacactgatgcttttagctgaggggtcttggaattaatccgttttccctggattcattttttttttttttttttgagacagtctcactctgttgcccaggctggagtgcagtgatgcgatctcggctcactgcaacctctgcctcctggcttcaaatgattctcctgtctcagcctccagaatagctggaattacaggcacgtactaccataccctgctaattttttgtattttcagtagagatggggtttcgcaatgttagccaggctgttcttgaactcctgacctcaagtgatccgcctgcctcagcctccaggagtactggagttacaggcgtgagccaccatgccccgcttagattttttatttgtaactctggagaagggttaaacccttacctaagaggttattgtgagcatcacttgaaaatattttctaagtgcata

SEQ ID NO: 37103 - DNA, 2346 bp, Homo sapiens
tgatacagaagccaaattgcctgtgttttttgttttttttttttccgttaaaaaattgtgttggccgggcgcggtggctcatgcctataatcccagtactttgggaggctgaggcgggtggatcacctgaggtcaggagttcaagaccagcctggccaacatggcgaaaccccatctctactaaaaatataaaaattagccaggcgtggtggcgcgtgcctgtaattccagctactcaggaggctgagacaggagaattgcttgaacccaggaggtggaggttgccgtgagctgagattgtgccactgcactccagcctgggtgacagagcaagattccgtctcaaaaaaaaaatgtgttaaatatacataccatagaattgaccatcttaaccacttttaagcgtacagttcggtactaagacactgttgtgcaaccaatctcctgaactcttttaacatttgcattattgtgcaaccagtctccagaattcttttaccttgcgaaaccaaaattctatgcccgtgaaacagcaacgccccattccctcctcccctaacccctggcaaccactcttctattttctgtttttatgaatttgattacgcaagtacctcatgtaagaggaatcatacagtatttgcctttttgtgtctggctcatttcacttagtaaaatgtcctcaaggcttatccatattgtagcatgtgtcagaatttccttccttctgaaggctgaataatattgtattgtatgtatgtatatgtggcattttgtttatgtgttcatctgtcaatggacacttgggttgcttctacattttaactattgtgaataatgctgctataaatgctagtgtactaatacctctttgagaccctgctttctattcttttgggtatatacctggaagtggaattgctggatcatatggtaatatctatttttaaatgttctaattttaacagagtgatctgtgagggttctttcctacctggcctttcggtttccccccgagagctgaatgaattgcattttttcgcttcttcccgtggctgcagggtacccaagtctgggattcatcttccgtgggtgctgcagctgtcctcgtgccctttgacaggctgggtaggtgggagggaaggggttctgttgctgaggatgttttctgttttctacctctgcatccagggcccaaggctccagggttccaagggtggggcttcttggaagggcggctgccttggatgtgatgagtcattcagactgaaggagttgggaccagcctggtgttgggcctgaggctgtgccaggatcagcttggctccaaatcgaaagttctgagttaatgaaaaagcaagtcctcctcttgcaagggacctttcctagagctgggtattggcacagaaaggcccttgccggtgggaatcacaaggcagtgcctgccctgcagggctgtgttacaaccctccgatgcctcaaggactgggcgcagggcagcccaccttcatcctggattgagcactgtagtctggccgtttgtgcagaagcgctcacggggcagaaggtaaagaaaagaaacccaagcctgcagcacctgggtgggcttccagtcagatgtttgtggacaggaaaatagaccttatcaaccaggggacaaatacaaggttcccggcccctttttatgggcagaactgggtgactggactgtgaccttgcttaggaaaagccactgccagctccagaaactttttggccctgtgtatattggaaattgctttatagaggaccgcctccgtgaatgtacccctctactttgaacttttatttctctgaatcatgacagctcccttcaaaaaggcattatctccattatttttagataaattttcatatggtgacatgtacaaatcttaactgtataatttcatgaattaggccagtgtaaatatccatgtgaccagtaccctaataaagatacagaacatttctatcaccacagaaagtccccttgggctcttttctaattggtctccaccccaggcaacctctgttttgtttttgtgttttttttttttttttaagagataaagtctcgctatgttgcccaggctggtctcgaacttctgggctcaattgatcccctgcctcagctcccacagtgctgggattacagacgtgggccaccactcctggccttattttctattgatatagattaatttgcttttttgaataaatgaaatcatacagtatgcattttttttatgtctggtttcttttgcacatgtaatttttaagtaattcatttgtgttatgtgtatataagagtttgttttaaaaaaa

SEQ ID NO: 37104 - DNA, 2294 bp, Homo sapiens
cctcggcctcccaaagtgctgggattacaggcatgagccagcgtgcctggcccaggaaatattttttaagtagagagggaggaactcctttgggctgtacacttggctacgtgaatatgctcattcatctatgcatccgtctgcatgcttcctaaaccctaggccctggccatcactggggtgcaaagatcagtcggaaatgggtagagaggatgatgacaatgcaggaaaaaggcacatacttaggagatgcagccagactgttcaactggtttagacacagggaggcttaactctacctggcagggtttcagagaagaggtggctttgctttgagcttttttttaaattgaaatgggtcttgttctgtcacccagctggagtgcggtggcataatcttggcttactgcagcctccacctcccgggctcaagcaattctcccacctctgtcttctgagtagcttgagtcacaagtgtgcgccaccaagcccagctaattttttctattttgggggggacggggtttcaccatgttcccaggctggtctcaaactcctaaggtcaagcagtcgcttgcctgggcttcccagtgtgctgggattacaggtgtgagccacttcgcctggcctgctttgagctttcaagaaggatgggatttggggttcttggagaagcatgatggggaggcccctgcggggagtggaaggaacaaatgccacacagggaaggtggaggcccacagaccattgttcctgaattcacagctttgcggtggccagccctctggaggcttggggctggcagcttgaactagccagtagctggcatcacccatcccagtgctggacccggaggtgtggcaggagggagcccagcctcagcacatctctccggggactacaaggcagctgtgttgaaacagatccactccatgtcccctggaattggctgtgccctgccacctgcagttggtctcctgggccaggcctctgaacagttcgtaggttcgccccaccttcctgcaaggtggataggctgcatgtctggggagcaggggctggcctagctctggcagtgagcaacgaggcctgcctccttgattctttctcggttcctcttccccctttagtcctctggaataaggatcctccccctcctggttgtgagtcatttggcagtcgttgacacccagtgtcctgggcacctgggtctttgtgttgagcaaggaccttcatgttctctgcccgctttcctccaggccaaggcaaccgaactttggatctggtcacaccccagcctggcaaagggacaaggtcactgaatctgtgtgcatgggaatgtggctaagaaaaacaataataattccttaccttatatttgcagagcactttgcactttgtcagacatgaccaggcttgtgttttttcatccagccagcaaatgcttgtccagtacctactgtgtgccaggtggtagaaaagtaaacacgattaggttgatgtcttgaaggagcctacagtctggggaaacatatgaacaaataagtataagaaatggtgagtcaggaatatgtatagactggggcttaaaggaggaatgtttggttataccagggaatatcgggaagggctttgtagaggaggtggcatttagtgggtcagaatatgaacagtaattttgggtagacctggtggggtggatacattccaggcaggaggaacaacttgagcaagtcaagaaggcatcctacaacctagcagttgggagcaggaggttagttgtggatatggcaggtaaggtgagggatgaggctggagaattgataccaggagggcctggtgtggagcttccagaagttggaccttactctgtagcagtgtggacccctggagagttttagaaggatccccctggggattagagtgagactggaggcagggaggccagttaggccgatgtagtcatccactcaggagataaaacctgaaataaggtaataggaagagaggaagggaaggtttgaagtgctgaggacttggtcattaggtggatgttggggcttatagggcaggaaacagttgaggattcttccattatacatctcttcagtaagttcatcttgagcctctacttactacatgtaaagtacctaaagtgtactgtgtgggcacaaagatgggacagacattgattcttcccgttgggaaccaatagttcagaaggacagcactctctagtcaggtctatattagctgcaagtgacaaaaaaaaaaagaaagaaagacaggaaggg

SEQ ID NO: 37105 - DNA, 577 bp, Homo sapiens
aggagctggagttgcagcctgtgtggctggactgtaaataatttctgtgcacctttcctcataattgtggctaatatatgttgaatacttaatacttaacttcatgccaggtagaatgcaaatgcctttctgtataatcctgtgatgcaggaactaatacaatccccattttactgaagaaaggagaggttaagtaacttgcccaaagtcagagctcacaggtgtagaccccatgagcctggtgctgaagctgggtctgtccagcccatggcaccacgcccagcacaaagcctgcccatggcatgtctacatcagtgagcctgtgtaataccacattgtcccttggtcacagtgatatcctcgtaggtgaatcatcagtttcagtattttttttaaatgcatttgttgttaggaagttaaaaaataatataaagataccttagcccagggtttctcagcctcagtactgctgatattttgagccagataacttcatcatgggactctgctatacattgtaggttttagcaacgtctctggcttccacccactagatgccaggagcaccatcccccca

SEQ ID NO: 37106 - DNA, 1782 bp, Homo sapiens
attgctggaccccagacgctttccttggagcttcaggaaagcctgggcctccctgtctctggctaagcctgagactgctgcccagttcctcatcagaatgtctgagggatgttaatttcctccaggagtcttgccctattgattcagtagctgattcccccagatggctcttgccccttgctctgtggctgatgacagggttcctaattgagctagaactgaaggcacaggcctgaaaggaccatcaggaattgggaggccccagtgcaaaagagccctcggtgggtgggggtggagggcgtctcttcccctcaccgccactagagggcagccgtggactctggttggagcctcgccccaggcagttcggccacctggttgccagaagggggcacctttctgacatgttttttggggaggcgggcaatggctgctggggccagggtccagactatgggggaggctccagaaatgagcttggttctcttttgcatgaaacagctctaggggtgaagcagtgggggcctgaaaggggagggggaccgtgcagtgccagagaagctggttgtccctgtcagtggctctaactgcactaggacaagtgcctgggcatctcccaaggacaagaatgtgagcggactctgctcctttacccagagtgggcaagagcccatttctctctgagttggtttttcccttccttccgcctagacctggcagcacctattctttgctctgggtccagagtgagcttgggccgtgcacattgaaccaggtgggcagcaggttttgtgcttgttcttttaattttgttttaattagtaaagcaacatgtgctcactgcaccaaaatcaaacaacagagaagggagtggctgtgttttctaagggagttccccagggctttggcaggttgttcaggccggtgaaagcactgtccctttccgcgcgtgtgtgtgtgtgtgtgtgtgtgtgtgtgtgtgtttgtgtgtgtcacctttccagctggatgccgagttggagaggcagcaaaggcaccttagaaagcccagcctgctgtttggtgtgacccccatgaggggttccatcagtaattttgccttgttctagtagccacctggtatctgcagggctaggggaggacaggagtcagactgttctcacaaatctggggttccagggccacagtcaccgaacagcgaagctcattctgagagcctcctggtgctctgtgtcatgctttggggcagagggtaacctctgaggcccattccagcctctctgaatgcacagcctttgtctactcttagcactacctcctcaaccttccccacccccatccccggcctcactagaaaggaaggagcccggcacctggatgacatccttggtgccacaggagggaaatgtcacagccctattctgaggctgggggtgaagaggaatcctctgtttgaaacagaggatttgggtctgcgacaggggtgaacagtttgatgaccatttgaacttcacctgaccttgtcccctgattcacccgttcagctgttgggatctgccaactagctatgctcttctgggtctttgactggtaacctttcatacacagttagcagtactggccctggaatgcggacatctggccagggccatatgcactagtatctgtttaggttccattcagccatcagttccatgtagtttctcattctctgtttcagctcaaacccagtcttccccaaatatttttttaacacttactgtgtgcagaatacttggctaa

SEQ ID NO: 37107 - DNA, 685 bp, Homo sapiens
cctccctcatttactgcatcagccagatgtcccacttcttggagcagggtttaagttgcacttggcctaagtggtggtaggacacagaggacctgctgccacccagccaggacactgggaacaaggccgtgctgggccacctgaggtgagaggatgtgttgctctgtcaggggagttagggggagtcttgatttctgccttctgcccctaagggcaggtgacactgagtgtaacaggctttgtttctcagaaccctgtgatcccagatgagggacccctaagtaacccacttccccctgttccaccttagggtctgaaggaaggcaatttagaaccagcccaaggctgtccccctgcagacagcaaggaagaagctagagtcctggctgccctgataggtgactcacgctgtgtaaacaggttcacaaaggattaggaaaaaattgctgggtgatgaagggaagcttcagtggtgccagcctagggaggttcccatcactgggctttcacctctgtccatccccagcccatcagaggcagggctgaccacaggggtgggttcaggttttcctgcatccttggcctccttcagacgacagcacatagttctgcttgtggcctttgccagcgtgccgagcactgctgttgatggcttccttctccccaaagctaaagaaaggtgctt

SEQ ID NO: 37108 - DNA, 3500 bp, Homo sapiens
tctatataccatttatagagatataatactatatatatggctggggtggggctgagaagtccatgtaccgccagactatggtgagtgaccatagggtatgaccattatctctttgtaagtaagtcaatactgttccccacagatgaaacctcagagcatagaaacccatggattagcaggaaatgtcactgagtccattacaggtcagggatcactgaaaaatgtcattgctcttcgattgacactgctccctgcttcctcagctgctctgcatttgaggagaagccctgtgtgcctccagctgttgccaaggcagttaattaaacaaccggtccggtaaatatcactgcagcaaaataacaaaaaccaaactccctttgtcctgacctcatcgtccccagtaagatctgtatccacaggacacttaaagtcaccttacagagggctatcccagtgcctgaggcctattagaggcgtctcttttcagccatcagtgttagaggccatctgcatgggatcccagagcctgcctcgggaatggcagaagctggctggtgctgggcgtgggctttgcctgtttcactgctttcagggaggcctgccacaggggaggaaactggtgggggaatggacccctgtccatgtgagctggtccttgtgtgagagccacagtgaggtcccagcccttgagtcatgtctgtcactgacctgtgccacctgcagcaacttactcctcttccccttgcctgtttgctcatctgccaaaagacagacacctgctctctctcccctggcttgggaggtttattgtgagactcaggagagggcacacagtcgatggacagccgtgtttgaaaggtggcagtagggaggggagaggaggctgcccaccaacagcgtgaggctgtatcctgggtccccagggcggcagtgcctggggaaggccaggtagtccaggaggtgctggcagccgaggctgggccctgacagaggcagggaaggaagctctggggaaaggttagtgagctccttggctgcacaagaagtcgccactcccatacaggcagcctctaggctcccggagaaaacccggctttcgtggagtggaacttttgaaaagccttctgaattcaggggttagaaagcacagcaaagaggatcttgatttctgtgctgtgggatgacctttagttagtggagcttgggtttaaaaaggcaaaaaacgtgatgaggcagagacagacagccccacagggacagcataaacctcgcacggtgggaaccagacaccccgagcagcttcctgaaatcctgtgggcttctgactaagccctggacacatgtgccagccgggctgtccctggccaagaggccaggcctgcagggggcctcagggggcagcagctccctatccaggcctgggtttcgggccaagccgcggaatgtgaaaggtcccgtgcacgcttggagatgcctgtgtgagtcctttcttcttgttttgggtatgagaggcagctgggaggcccgaccagggaggggcaggaatatgaggtgaaggggaatgggccactgataagcgtccttcctgaagccatgggctctgtggggcgatggttttaggtaacaaattccttgggctttagtcaggccgcttgtagtgaaggtcaccatagtaaccaaacaaagttcctcagctcatgatgggagctttccaataaccagcctgtcacggctcccgtcccaggcctggcagtctgccaggctggttttgaaagcccaggccatacataggtcaagggaagaacaaacaatttccccttcccctctccacagtgggcaaggccacctcttcccaccccctggaacctccgtcggtcagggtaggccctcttgggagtttctgctggcccagtactggtcccgggggacttggaaagtcctgggggaagctttcagagccccggagaccctccccagtacaggaataatatgggcttcccgacaagccagagcacgtgcctgtaaacaaatggaaccacacagccttctgccccaggaaacctagactgttttggaaaatgtttgagctgataaccaggcattagctggagccataccttgactgacttcagctaaggctaacgttggagctcaagggcactcctgggatctacctggtgtgcctcacctttttttcaggtggcgcttgttgtatatttctcgtggtatattccaatgagcaggggggatgagtcccggggcttctgttaacattcctgacttaaacccagtgtgtttatttgattgttcttattaaggacttgtagtacatcaaaaggatgcttagcataccaacactccagtgagggggtggaatcaaaggtattaacacaaacatagtttatcactttgctgggttcattaaacacgtttggctgccacagcccctgaggaagacaccagccatgggggaaccttgcaagccacgtggcagagggaagtgttaagccagtcataatcactggcagcgccggatccttccccaaaggtcagttcctcattagctaagctgagttgacattcagcatttcccttcgtgggttgtcccgtgagaacctctgtggccttgctctgtgtgacatgtacaggtgaaagttgatggtcatcattctccagttagtggtctgcctacattcagacttctagggtagatgacacaggttgttttgtttgtctggggaagagaggaaagaaaggaaagaggaaggaacatagatactttcaggttttgttttcaaaggtgatggtaaccctttccttctggtacttgttgctttctctgcttgcggcaggggctggaggcaggaattgtggcccagggcacatggttctctgtagcaggggaggcccagccccaagacaaagcctttttgcgcctgggagaaggcctgtgtccacaaagcagagctgacctctcctctgcagtgggagatcttcaggtccctgggggtctgacacagggcagagagaccaaggcaattgcttctttgtgtctcagccctggctgggaacctgcctttgttcctaaggtaagaagaacctaagcgtcttcttttgggaagttcttccacccctgaatggccatgaaaaggcactgtgtggtttacatttaagtctttcaagatcaggaatttgtgtttgggaagtcctctcaaggtagctggaggtagctgcagggagggaagccgagacccggaggccagttgtgtcagcccagaaacagataagaatgccatgtaaccctgcagccagctgcagggtaggggcaggctgctctcagagcagccctggggcccttcaccaggtcagggacagtctttgaagtaagaaggcactaacttcaggaaaccaaagctttcaggctgttgatttttaaagcttcaaagtgagatcacgttaaatgaattcattaagaggtggaggatcatcatgagccttat

SEQ ID NO: 37109 - DNA, 1195 bp, Homo sapiens
catccttcgatgccgatggcgtggcaagggcgttcggccttaaaagacctcagtgtttacttcacatgggcttccacagcttaaacaggaaaatgcttgcaagaggggtcacagcgagcatgctttgcccagagcccagttcctatagctttatgcatctccttccatcgtcttcctgtcataagcctgtcttaggtcctaggagtgaagggcctagttcaacagaccaagaagctcagggctttctgggagccttcagaggcacctggcctagaaacttgcttcttgggatcgggccggcctgcggcttcaaagcaggagtcccttccctgtgtgctggagagctgaatgcagctgctacttagaggtcatcacagttcagcctggtggaagttcgtgggacaggtgactttactcctgttgtacaggtgtgggacctgtgacatgcccagctgggtgaccacagagcttggactttggcttgggtttctaattcctgggccagtgtgtattcactttgagtaacgacacagtgtgaggctcgaggacagtactgtgaccattgctcttctggaatggctcttgtcggagggcataaatgttgaaagctgctggatttcggtattcaggcgtttcgatcacagagactctcctcagtgatactttttggccttgcccagtgactgtcccctgggatggaggccctccacccccaccccagtcaggaggagccagaagattccacatctggagcccactgttcctccccaggtcctgctttcacagggaggaaaactttgcttctggacagtttggaatggaattggccagcgctctgcttgtcagctgtgggagtccggcccacactgcagctatggggaatcaagtaacaggctccaggactaggcagatactgtgtgctcagcactgtgccagacgctgggggagggcagcggggccctgcctgcaggcacttgcagaccaggtggggacgcacgatgaggcacaggacaagataaacggtggtttcaccatccataggccgggctggctgcacactgattctagaatgtctgacattaaaaatgcttgatacgccagtcgcggtggctcaagcctgtaatcccagcactttgggaggccaaggtgggtggatcacctgaggtcaggagttcaagaacagcctgacctacat

SEQ ID NO: 37110 - DNA, 2555 bp, Homo sapiens
caacatagtgagaccccgtctaacaaaaaattaaaaaactagctgggtgtggtggcccatgcctgttagtcctaactactcaggaggctgaggcaggaagattgcttgagcccaggagatcgaggctgcaatgagctatgatcacgtcactgcactctgcctgggcagcagagccagaccttgtctctttaaaaaaaaaaaggaaatttcttttataaaagggcagcttttcagagctactctgtgtctgcagtttctcggaataaccaactcaaaatataaaatatgccaaagtatattttggggtggcatattctggtctcaaacagtcatattttagggtggtgtgtcctgagccccaagtgtgtgtgtgtgtgtgtgtgtgtgtgtatatatatgtataaagtaattaagtgctaatggaacacagtgccagacattcagagaaggacagcgtggtcacatagggacatcttggaggagggctggagccgtgggattgaaatagtttttttagtctcagaatcctttattcaagtggtgttttaggctcagttggtttataagacaggtaagcaaggggaaggggagcctaggcttgcctactctatccccagccccgactgccagcagcctccccccagcttcccccaggagtcacagcgttctggtgaggctgtggccacagcttcgattccccctggctgtgagggccccagaatgtcacccaccagtcctgacggcatgccagggctccgccaggcttcctgaagaaatgggctaagcattgataggtgggtgaggagaagcagctacccgttgcagtggacaggatggagagggggcctgtgctccttagtcagaagagcagctgagttgctccttctgagggagtggagttgtttgctgatccctgttggaagtgggagaaagttctgcagtgaactagaggcaagccagcagaggcacagataaccacatcctgacatcaggaaggctgtcttagagggggttgtgcacagcccccatggggatacagaaagccagagggcgacatctggttaggagctggctgaatgtcagaggggaaagggtgatctcagcagaggctacagcagaagcacagcacggatgagtcccggagcctgttccgaggctcagggagctgctaatacccatgtgatcagtgtaccagcgcccaaggtcatggggaggatggcaggaagggagggtagagccagagtgggaaagctgtgaaggccatacagaggcacagaaggtgaggaccacaggtcagggttctttgtggaagaaaatccctctggcagcgctcacctgccagcccaaggaaatctcaggagcaaatctggatcctcccaggatcctggagtgaaagatcagaccagagtgactggtggagcacttgccccagcccagaaaggatgtggtcgggttgagaaaatccgctctgggccactcatgctaatggaatgtcagcagctgcaaaggtacagcctgcctttggtagaacttactgtgatgccagctcagttttcatccacttctttgccaggcacatggtgtggtcgggtctgccctagacccattccggccctcaaagatgaagaaaatgagaagggggctctggcagagagaagtgtgatgcctgcagagggcccggggaatgcagcagggctggcctgcccagggagctgtccccagggagctgtccccaggaaccagcccagcccaggggacttggctgactgagggaggggctttcccacctcactgacacctgctgcttcaaccagctgccccaccctccacaccggagcctcttctctctccctgactcccagccaagtcccactccaccctgcttttcaccaaacaccagctccagcaagacccctttcctgtttcttcccctgtactgagtctgatccaaaaattcagcccttgattctctgggcagtgtgtcatttatagcgctctaattgttgtctcgaaggcagccattgtgttttcttcttcatattcccgaaagcacaggcccctgatacttatggagtgttggatcctttgcaaacctgcggaaggagagtacagtggcaagaccagttgtccccagcagttgcccactggggtcattcctactcagggctgtgtcctgccagctgtgcactcaggtccgtgcagtccatgctagggggatcccggtttctgcccttgggacctgataggcaagccaggtggtcgttagttctatgttccaagatgggtgcagggcatcctaagaattgagagaggtgggatttaaagccaggcttgggatggatgaaaatgaagaggagagttggtatctggggggcaacccgtgtgcagggtcaggaaaggcattttggggatgcagtgaggaagaaaaatacttgtccagaaatcccctcttctgaaaatcctggggcaaattccaccctcttcattctctaccaagttgcaatctaagagacaaagtatggaaagatgggcagagagtaaggacatcagagggc

SEQ ID NO: 37111 - DNA, 1288 bp, Homo sapiens
gtagcttagaactgtggcttacatagcattttcaaccaagagcatacaatttaaaagaagcaatgagacaaagaaaaaggacttggagtctctggggatggcaaattgtgggaagacaaatcaatgggaaactaatggtagacaaaggccagttagcagcgcttgttatgtagattcctttgtgccatctccaggctgataaggttctaacgttgtcttctgtgatcaacctttgtccttcctggttgagaggggaggaggaacacccttataaatttatatcctgcttttaggcaaatagggggagggcagagagcttttcttttctctgcttcttctcagttgccttcagctcaaaacagtccttacgcccaagtgacatatttgggggtggcatgttctgctatccttcagcagcccctgaagaaggtcctagccctggccacagagccacccactctccctgccctcagcttggctaaggagagtgtggacactttggtgcagcttgtctgcactgcaagagacaacttgacaccctcaagcatgagtggacaagcgaggtgtctgggtggcactctgccctcttctcccaggggcagactctggagaggaggagtttcctggtccctccccttccccagcccctcccctcctcatgctttcttcttggtgagggagctccaggctctccagaacctctccctgtcaggcaccccagcagtagtggggagatggctctgcatgagctttggctaatttggtaattcctgggatgcagttactgaagcattcctggcatgtgacccagcttcttctctccccaaatgcccctggaaagacaggaagacagtgttgttatctgcattcctcttgatgacagagtgacgatgaatgatttccctttattggttccctcttgctgccagtgtggagcaggccgcctcattctttaagtgggtttgcaggatcaagagcgtgggtatggcctcagagcctctcatccctcaccccaggctgtggcatgagggggcacatcttaaatccccagaagctccctactgccacccctggtacctcccaaggcgggacctgagtcactgagggccagagctctgcccatccaagcccagagcctttttaggtgctctgggactctaacaagaaggctctggtctctaaggccaaaaggatgaactctctggccacacagagcttcacccatcaccccctccgcctgctggctggccctctcccccatcatggagggttggaccagatatgagag

SEQ ID NO: 37112 - DNA, 1386 bp, Homo sapiens
ccacagcctcttgactgacctggagggctgggccaggcagtgctccaggatgggtagaggcccctacagacctagaacctgataccagcccaggaaggggaggagaaaaggcccagccactggccagaggagacggctggcaaggaagtcaatttcttggaggttcgtcaggctgcagagtcccccaggatgtgacccatcgggcccctggccgctggtccctgcccctctgaaaacagacaacccttagccccagctgaagaggcctactggtgttcttctacatctcacttgtaaaggaccccagaagagaaagggacaggtactcactaccccaggagacccccacctaggttgggctccttgtgagtctgggctcttctcagcaggagcctcttcttttgaggcccagggggctctggggtgaacacatcccaccccagcactgggtggggctggaagggtttgctcccctccccacatcagggaagtaggaccctgtggctttggagctgccctggctccaggaggcctgtggtgatgggagtgggaggttttcagcctggagaggcgcctccctccctcccgttccaggtctggttggacaggttgaggctgacacacctgagagaatccggaatgccagagagcctggagctgggctggaatgccagcctccctggaagggtgtgtctatgttccagggtggcgttagggagggccctttctgtagagcaggctcctcccagcagccctggtgtccccaaacgcaggctccagggaccagaaggctcctgcagcttccagctgattcctggcttcccagctggaaaggctgttacagaatcccaggaatgtgccctgagctcagaaagaaaattcccaaaataacttctataaatacttgagggcaggggtggggagggagggctcagcctggcccacagctggcctagcgccaaggctgcttcccagggcaggcccccctcaaaggaagaagaagcatgcacacccctagacctttgtgctgctctgcccttggagggcatcatcaggcactgaacttatgggctgggatggtgtgcagtggaattctgaaaaggcaaggcccttttcccctcatcccctcccaggccacagcccctggccacacactgtgcctctgcagatgacctgggtcccacagggaggctccccactgagtgtgagcccagaccctagcaagaccttaggccccttaggttctgcacctgcgtggccgtaagaggcagggcttgccaagctccacgtgggcagcatccctgatcggaggtccacatctgtgtgtgtgtgggtgtctctgggttccctggctctgcatttgggctacatcctgagctctgagcc

SEQ ID NO: 37113 - DNA, 5325 bp, Homo sapiens
agagatctattttttttctggaattctgttagaaaagtaaagaaaaagcaaatgctgttggtttatctcagggtgcccaaagtggttatagtcaatttttggtactaggaaaggcacccaatgcatttcctgacttttaagcatttccttgttggaagcagcagagggccaggccaagttgctgacagtgactttgcaggttgaataaagaaacccttggaggggaagcaggcttgtctgaagcagcatgtatattcactgggcatgtagctcccacaccagccttgagccaggccctggacaggaggggctgttgcaggatgagggaggccagagaaggcatcgaagccaagacctgggcccacctggggagggatgtgggaaaggaaggatgggagggaggaccctctgggaaaatgtggatttgagctggtgagagtgttgctaaggctgggctaaagcctggagagggtaggaggaggcaagaggggtccaggcagggctgatcctggcctctgacctgtccagggcgacccctgaagcccctgctgcctctgggcattgctgggagaggccaaggcaggactcacgtctgaacagagatcccctcgggcattgctgatgggccaccttcagctgcagggaagaagcctaggagaggaggcatgggagggacctgggccttgttcagattggccacctctgctgagaagtccataccagtacacccctaataagttatgccacataccaacgtactgtggatattataacctgcattaaaacaactctaaagaacgctgctcatttacacagaagctctgtttcttcctgtaccccagggggtcaccatagcacccccaaggctgcagccacctcattttgaagacagctgccctgaggcttcccctcaaacccagggctgttcttggccgtctggactcttccctcttgccgcgcctcccggcggcctggcctcccccagtgcccaccctccgcgccacgctcagccagacattgctgtccccataaggaagggctttgcttgcagcctttgggtgcccagcttctcttgctgtggccttattttaaggtaacacatttacaagcttgagtgattgaacacttggtatcaaacttcttgtcatgtaccctaacccccagctgatggcctccttgggcgagaagtacaggccaccttaggtggcagggggtgtctgccagcctgggggagaggcttagaaactcatcctgccgggaggggaatggagggaatgtggaaggagggaaggctctgccttcctcttctgacgggaacagggtttcccaagctgaccttaagttggtcgaatgttggagagtcacgcagcggtggagacctgctcagggccccaggcactgccttaccccatttgcccatctgcaggccctgtgctcacaaagaaaccctcactggagagtgaggcacctggctcctgtgtctaaacacaccatgctgggaccagggttagagtctggggacagacctcagactgcctctcaccccctcagacttccacccacgtgccactttccaggacacagctcccacttgtgcacttacatatgaatagtgtttcctgcaggcacaaatatgaatggcatttcagccgccaccacccagactcctttctggtaccaaagtgctcattgttgcactcctatcccccacccagcactcagatgtcgtcactgtgcaaatatttcttgggcttgggaagcctctgactaaccaaacctccccatccgcctagactttgatgatgacccacgggcagggagcctcatgcctaagtggcctgtgaaactgacccatgaggtactgatccaaaggatcctgagaggtcagggagttcctgactcgaaaggatccccccaccacccgtcccctgccagaaacttcttagaattttcatcaagctctttcagttgcaaagaacagagacaccctgaaggtaactcaaaagataagagggagctcactggagccctagggcaggaaatggagtgcccaggcctggggccaaagcagccacacaccgtgaaggagacagcagggtgacactgcagtcaccagtctgagcttgaaggtgcagctctaccactacgagctgtgtggccttgagcaagtttcttaatctctcttcagccgtttcttcatctgtacaataagaatggtggtatagtgcctgctctgtggattatgattaagtgatcctagaacagtgcctggcccatagtaattgctcaatacacatcagcaattatcactcaatacacgtgagcaattatcttctctgcctttgctggctccaccctcctcttcccgctactgacttcacggagaggtgctgctcccctagaaccatattcaacactgccctggccctccagccccactcctgactgacctaccacctacagcactttggccactcccctcctaatggctaaatcttgaacgagaggatctgattggtcccactcatatttccatgggtcactaggcagcccgcagactgattttccttggataggtgccttctcttgatccaatcagctatgaccaggagccatgggcctcaggacacatacggctgcttttgcagctggagtgctaagtgggcaatgccctgggcccttctggtcccctgcctgtgtcagcccatcacgccatgccatgtcctttctgggcaatgggtacaatgcaggtccctctagagagggcagacaacagaacacagccccttaaacaccctcctttctccttcgcatcatcatcaccttagggtccatccatggaggggctcctgtcctgcttctggtcttggaatgaagatgacaatgggaatagtaacatgcctcctgcactgtactgctaatacgatgcttcacttaccagtgaactctcttctaatcactcctttgattgggaacctctccaatcgacaaccttgggaggtgggttttgtccccaagaaaggtgaagagatcacggggcctccactctcagtgacttggtacagggcagggcctgggagcacagggccttgcccttggaagacactgtgtagtgccgcctcacccattctgggcagaggcaggagcctccccaaatcgccggagcagaaggacccctctgggatccatggaaattcgcatcaccaggagtcctctacgggagtgcccaggagaggaagatacatgggtccaggggcctcttgggtgcccggaacccccacttgccagccccgccccaccaccagcttcgccccactggctgcagaggaatgacagtgctctgcgatgcctactaccccagctcctctgcagtgggagtagaggacccttaagcagcggtcacacaagaggctggacattgccccaaatagggtgttcagaagatgcccgaaagcatgggcagccatgggaactgcgttgggtcgtggggccccacgatcctaaccactcgctgatggcatcgtggctgggttccagaaccagtatgtcccccatgggctggcccacagcctcagagatgctgacacccccacataggggcccccaacacaggtgggggctgtcattgttctcttgttcttgttcccgctcaccctcagtctctcactctcttaactgtctctggaatttggcaagaagtccttgtggacttctttaaaaacacgtatcattgtttcttgaaccatttgagaacaggttgcataaatggtgccctgttccccttaatacttcagtgtgtgtttaccaagaacaaaggtcatccctgtatctaaccacagcagagttaacaaataggacattcaacactgccactgtgctcttatctaatccaccacccctatttcaggttaggcactagttttccttagagtgttcttctccagctcagggtcacaccctccattttacagccagctccttctgctcctctaatctggaagagctcctcctcctctccctttgccttttgtgatgctgacattgccgaaggctgcagtggcctggcctctgcagtgtgacagtgaggtaggcagagggaagcgggggcgggggggcagcagggggggccagggggagcagaggctagaaagcagctgaagccaaggggctgagagaatggagaatcattgattggtaggagctagaagataaaagcaaaactgaagggcaggtgaatctctgtgcaggcagagctctggaaacaaaagaaatggccacctacttgcaaggtgcatagagatgatggaaacactggagctccattccgtcctgaatgagctttccaactcctgcggcctaactgcgggcaagagtcccatctgcctcctctccttatacggtggcccccatgaagactggagggaccctgagtgtgagtgtgtctgttcctggcagccctgcacatccccagagagaggctcactctgcttccctgcaccatcagacaagcggaagcgggacatgttgcagaacttcaccgattgcttttgtctgtggcacccacacccactcagagagcacatgtgccaagctgggaatggggcaggcatgggagacttcctgaagagcagcagctctgacccctgaggtggggcccatccccacgtgaaggtcaggagcacagacggtctccccaagggtgcacacagctgagcagtctcctgccaccctgactgtgatctctcatttcagcctgggcccagaaggaagaggccattgcaagcttcctctctcttgtctgtgccaggcctgagccatctcaggagcacacagctcactccccagcccccacgcaagggccagggctcagtggctgtagtggtggcatcctgcccagcacacacactccccccctaagaacacccacgccaagggtacagggcctggtgcaagctgggctgagcccacagaggcccctcctgtcctgggggagctaggagaagggctgggtgctctctcccatgcagagaactttctgagctgggagccccacccttctaggtgcttgtcttctttcctttctcttctttcttccttccttccttccttccttcacttgtttctctccctttcctttccttccctttcctttcttctctctccctctctttctttctttcttcttttttttttttttggagacagagtctcgccctgtctcccaggctggagtgcaatggcgtgatctcagctcattgcaacctctacctcctgggttcaagtgattctcctgcctctgcctcccgagtagctgggagccaccct

SEQ ID NO: 37114 - DNA, 586 bp, Homo sapiens
tatgtatcagaaaaaaaaaaaaaaaaaaaattctagcacatctataagctatatttgaaatgttatatttttcccaaaatgttacccacaagtaaaacatatttgaggaggttgagactgggacctacttaaattatcttagcttccaaattccattcaagcagaaatcaattttctggtttactcagccagactgtgtttattaattctttttctgttccccttggaatttcaaactatcagcttagtttttaattgaattcattccttaaatgctaaaacagttggaatgattccgcagcgtttcacaatgctggtttgagggcatagtctatgccacaggtctgatactttcgaacttttaaaggtgactgaaacagatcatgtaacgaccatttgtatctgtacagactcctggttgtctaatcctttccttattctttataggcctgtcaggttttaagaaatacagaaacgaaatatttctgacatcaaagaaacccacttttttttgttcccactatcaggaaagatgtgtgtgtctcattttttcactatatatacaactaagagaaacaataactgc

SEQ ID NO: 37115 - DNA, 3276 bp, Homo sapiens
tctctttgtgaattgccagctcatgccctttgctcatttttttttttttttgagacagattctcgctctgtcgcccaggctggagtgcagtgatgtgatcttggctcactgcaagctccgcctcctgggttcacgccattctcctgcctcagcctcccgaatagctgggactataggcgtgcgccaccacgcccggctaatttttttttgtatttttagtagagtcagggtttcaccgtgttagccatgatggtctcgatctcctgacctcatgatccgcctgcctcggcctcccaaagtgctgggattacaggtgtgagccaccgtgtctggccaccctttgctcatttttaaccggaatatttattacaattggattgtaaaagaccatgactcattttcaccatttgatacaggtgataaagccagttagtgatcagcactttctggaaactcccttgcatcttcacagtggtaatactctacatttttttgcattgactgaccttgttcagtaatgattcactggctacaggctgagacagcatcaccatcttctccctgtcccactaactgtagatagattctggaaccatgttctgactggcacagtttaaactgacttcaggttgtcctgaagttaccctagcatgttgatttcaagcttatactttaaaatcctccatttaagtcactagatccatgtttctagttgaaaatataaatgatgcatttcaaatggtaatggacttctactctgcaaggtagacttgcagaataggacaacctttctctaggactttggacaatgcatctcgaaagacacagacttcaacatatcctttccttaacaattccactctatgactaaccacaggggatggctgaatatattaggatatgtccatatacaagaaaactatgcagctattaaaaatgttgtatagactggacatggtggctcacacttgtcatctcagcacttggggaggctgaggcaggaggaggactgcttgagtccaggagtttaaaaccagcctgggtaacatagtaagaccctgactctagaaaataaataaatgaacaaatgtataaatacacaaaaataaatgatgtgtaaagaatacatgaaaaagattaataatatatttctaaaaagaagaaattctggtttctgcaaatgacatgctaggttatttattcgggcgattaaccttcccactgctgaccactagaaatgaaagataaaatattaaaaaaaaacaaacaaaagagtttttttgttttttgttttttgagatgaagtcttgctctgtcgcccaggctggagtgcagtggcgcaacctcggctcactgcaacctccgcctcccaggttcaaacgattctcctgcctcagcctcccaagtagctgggactacaggtgcgtgccaccatgcctggctaattttttgtattttcagtagagatggggtttcactgtgttagccaggaaggtcttgatctcttgacctcgtgatccgcccgccttggcctcccaaagtgctgggattacaggcgtgagccaccgtgcccagccacagaagagtttttaaaaagatatggaattgccaacaatatagtaggaaattacatgatcctaaactaaaagacagcaagaagccaaggaggtaagtggcttaattttgtctagagaatgtttgctggtccagactaaattcaacagaacacagctgagtttaaaggaacttcagagccctggaagaatccaggggtcaaagtctgggcctattcatgataaagggaggaaggagtctaatggaagatacccactggaatttgagaccctagaaaggtacttcctgaaagtaaactctcccacctcactccactgccaaggggactgcagagagttgcctaagcaagaactgagagggagaagaaacccgtccctgagagattataaccatgggctgtccctttcatgaattccagcccaaattcacaatgctagggtgatccaagaagacataaacactgcattttgagttgtaccagactggtggctcccctatatattaacagaagccaaagcaaaccttaggccttggggaattcacaaaaatacattttcaagagtaacgagcaatacacagttaaagacaatcacatacacataagaaaacaaaatgagtaaggcccagtcagatttcaggtatttgagtaatcattaattcattcacaggttcaaccaatattaatcatcagacactgttctagacagagatataataatgagcaaaacagataaatattcatgtcctcatgaagttccattcatgggagaaggcacattaacaaataatcaatgtaaagtgcaagtaaattatatagtacacttgatagctatagatgccaagaaaaaaatataagagccaggtagggaagatctgaagcgttgaatagtaaatttaaatggggctcattgagaacatgacacttgaacaaagacttgaagaaggatagagagtaggccatccagatatcttggataagagtatcccagaaaaagggtacagtgaaaataccttgaggtaggagtgtgagtgctaagttcaagatacagccaaaaggacaagtgggtcaggaagagagtgacagggagtagtaagacaaagtcaagaatgaagccagttcacaatatccctgctggccttgagaaaagccactcagagatcacactcactatcataccgctttaacctagtggttctgaaccaggagcacggcaacgtctggagacatttttggttgttacaactggaaaagtagattgctaatgatacttaatgagtagaggccaggtgctacaatgcacagaacagccccccgccccacccaaccacaacaaagatttatcctgcccaaaacgtcagcagtgccaagcttgacaaaaccaggattagacatacagatgtataaatcaaaaagggaattggccgcaatggctcactcctgtaatctcagcactttgggaggccaaggcaggaggaccacttgagcccaggagtttgagaccagcctgggcaacatagtgggaccccatctctactgaaaaaaaaaaaaaaaggaattggatatacaagtttggaattcaagaaaactatctaggtggcagatacaaatttggtaatcaccaacaaatacatggtgttcatagccttgagtgagactggatgagatcaccattcagagaatgagcagagatggagcagagg

SEQ ID NO: 37116 - DNA, 5802 bp, Homo sapiens
aaaaaaaagctggtaacgtaaaattgaagagccaataattaagttcaaatacagagtttgtaaaataaaaaatgtatccacttttatccctaaagtccaaatcctccgccaacaaatatttggtgtgaagtcagtcacagattgtttacccaaggaataaggtttaaaatccagtaaatctgagttatttactttgtattaatagaagctacattacttcagtttattgcattttgcaggacttccaccatttctgaaaggaagggcaacctggcatgcgtggcgtggggggaaagcatcaagttctgagtcacaggccagtatcccagccctgccatttaatagctgtgtgaccttggacgtggtactcctcctctcagtcaacttcatttgtagcacaagaataacaatacttaccttgcagggttgttgtgcaaagtgagatgctatgtacaaagctaacctaaagagttaaatgataaccattatttcatataaattaacaaagaacctacaatgttaaatatcaacctgactagctcaatttccacaccgaatgtagacatgcatggcatttattaagccctttatggtaagcttactctattcaatgttaactttgtttaagctgagaaaatttatgcaaactaaatccacaaggtgcaacccagcgacagatgcagcggacatcactttaaggctaaaaaaaagttgagctaaatgtgtggcagacactgcagcctgtgtgaaagttgaaggatcccgtactctgtacaggaagggagacaggttcgttctctctacatgggttggggggggggggggggtgggaaatgggactttgggaaggctactatatatgaaacatgagaagccttaggaagaaacgaggatgttagcaatttaggaaccactgtccaattttgcttggaaagtcaaaatttagggacctcataccatcttgtctaactccctacctccaagcaaatgcaatcttggaagagatcacaaaaatgagcttcaaggaatgaattaagcacccaagagaccaaattactcacataacctgaaagctctcaattttgcttggaaggttgagaagctttttgtattacttatccagagttcaggttttagaataaacttttaccagcaatatccagattaaagcctactataaatcaagaagacttcctagcactaactttcccaactgctacaaaggcgaataaatttggttcttccttgtttccagggagtgccattttcttagaagaaccagaagaattatacttttgggaaaactcaagctcattaacatgtatgtttatctcagtaaagtgaagaagaattcactagagagatgacttgttcttactcccttatttctgtagctattgacataattcttcccactgctcttgccactccagagaaagttcctaggcattagtatactctcaggttcctccctagacctcctgtactagaatgttcattttggagaaccataggtgatctgtcaacactaaggagcacgaccccgtattacattagtgacctgaagtgaatacattatgtacctatcaaacatttcctacatgccattcaaaagtatgcatgaatactgttggagtttatctagtgaaaggtggtgttcttatctgaataaatgtgtgagcccataggcttgaaatggaacgcaaactgctatccttcatccattcctgtctgttcattcccatcaggtgctactttgatacaacaaggattcctatatgaagttttttctacaattatggaagccaggatatttgttttacctgtatcaaaagcaatctaaattatttcattagggtaaaaagacacctaattctgaagaatagtacttacatagcatctctcaccaaaagatcactggaacaaaatggcttcataaaaattagggctattactaaaggcctaaattctagctgaagctagagctttctatattttaaaagagccaaatcctttgatcttctgagcctaacagaaacaggcgttggcacttataagaacaattatttagactcaagtgacaaaaattttctacctttttacatcttttacttacctaatcaccctgcactcaaagtcctcttgaagcaatcccgttttcaatgagcatatgttgattacatgtaaactcaagagttacatgagcaatcttactttacttccgtataaaattttttatactttaacttggggtcctaattttttttattttttgagagacagggtctcactctgttgcccagggagtgcagtggtgtgatcatagctcactacagtctccaactcccgggcccaagatgatcctcctgcctcagcccattgactagccaggactacacgcacaggccattatgtccggctaattttttttaattggattcctaatgtaaaatctcagtcctctaattataaagttatgtgaaggcaattttcaaatttactgtatctgtcacaaataatgatatctgtcaatttttattaagattttttttttcgactttgtctcttatagtaagagctgtcaatttaacagaaaacccccaaagcaccagtgatgcaaacagtaactacaaaagcttaacactgggcaagggaccacaaatgcgtagataccaactctaccaagaaaaaatctattcgaattactgattcaattatcaaaactgattaaagaaaactttacccttcgtttatttaaaaaaaaaagcttactccacaacttgtaatgtttattacatatgcctgtaactacatctttaagaaagcaaatgtaaccagcacattcaaattcagaataacatttgaagcatcaagatgaagcaaatccatcaaacgtcaatgaacgctagttttatttaaggtgaaatcgtctccccacacccatacaggctggaggtttcagttggcaaggatccctaactcctgtttaagatgtcaccttgcctcctggacacacccatcgctgtaaccacttggcaggaggaaccacaaagtaagtatcacagatcaccgccctcattaggtgtttttttttttttttttcaggaaagaacatgatctcccagtctgaggtgaccggaaaatgcttttaaaaattccctgctcctcccccgcatacactcttccatcacagtatttgacagacaaacatcatacaaacgaagtgtacgtcaagacgacctggcaacttctacacggaatttaggggtcgttttcaaagcagcagaaggggagcaatgtttttatgtggtcgtggttcttgaacattaggactgcacgctgttttcaagcatagaatagggacaggggctcttcaaaggcatccatccaattgttacaagaccgactttcagaaggcagtcactccggagcctgcttccctccggcggtgaacaagaaacgccttgtagaaccctagctggagccgaacactttccctaacaagatgtgtattgcgaggacgcgcccctgacttcaagggtaagactaatttctttcaacgacagacactttaaaaagcaattttttttaaagcatccggcctgggtggtggaagacgccccagggcccagatggagaaggaagattagggttgccagagggggatgggaaaccgtcgaggcccccctcccccgcccatccccgccaatggccccgcagcgccaaggagatctccgcagtcctgcaggtgccagcagagcagctggagctcgagcggggccgagcggggcggcggctccgggtcccgcgaggcgctcgcccgccccgcccccaccggccgctccctgcgccgcgcgggctcggcccacacagcgcgccgcccgcccgcccgcgcgccccctggatcccggcacgcggaggacgcgggctaactgcgacgccgacgctcgccccagggccccgcgcgctcctcccgccccctgggcgcatggcggccgcaagcggacaaaggcgcttcctggcgcccgcactaaccgtcggtcgggtggattgaattcgccccctgcttgacctttccagacgcccgacagaaggctctctacgctccctctctcccttccttcactttctctccttcccgtgcactgggctgtccctcatcccggacccatcctcctccagccaagcccccgaggagcttcaccacctcgggaactgtgcgtccggccctcaactcactagaggaagcccccctgaagagaatgggggtgggggagcacctgcgacacaaccgtcgccggcatccctggcctctttcgcgccatccctctggcagaaaccactccttgaaggtgtaagggaggcgagtttcctttgtttagtcagttcgctccagtctcttccccccacaggcccagcgccggcagctcagcgatgcactcaccatgctgcaagcgctaccggtttccgagacgcgaccacacaaccactcagctcgctctctccactcggactaattcgcctcctccgcccccagcgcctcataaacacctccctccgccagatccctccgccgcatccagataacggaacatcgcaaacgagtcccggccaaccccctcccctcaaactcttctcgggacccctttcttcacagttatttggtcgatgaggcaagagatcaaggaaagtgggcgaacggatgacgtaagtgggtttcatttccagcgagccgttaaaaggccggtggagcggcccctgaggggcgctactttgcggcgcggaggagcatcgtggcggcgatgcgtcccccgttggtcgttgagcctgcctctgattggctggtttgtacctgcaatgcgtcactgggactcgcagccgccgccgggacgcggtgcggcttctgccgttgctgctcgggccgcgctgtcctggcaactgcgccaggcggcagagtcgcctgctttgcgcttggctggagaaccttcctcttccacgtatccttccctgccacactcacccactttcccgccccttattgaggggtagacgaaaacaccttaagccgataaagaatgaagctgaaagattccgataaacgcgtaccctgaactcagctttttaacctagtgttttggcctcatggaagccgcacgttcttcatttcacgccctcacaaaacccatgtaaatctggacacgggcaaatgtagctgttcagctgacaggctaatctcaaagggtatttcgtttatacttcctcttcgcgttctttgccaagggtaatttaccagaaaagaaaagtaactcaaaagtcacagtatccgagcttcagtgggattagtatctcgaaatggccccttgttatcgtggggttaaagggttctggattggacagagctgggcatgagttagttgggtccctctctcaggtgcaagaccttgggtgagtcatttaatttttagcctcacttgtaaaatacaggcaataagacctatctcgaaagaatattgaggaaattagaattatgcaaagattagaattaacaaagtgttaaagtacctggcacagggtaggactccaacaattggtcactataatatgccttccccttcataggaaatttgcccttttggatttctaactccacagatttaaatgaatattttaaaaaccacataaaaactaactgcttggtcccatccaaaataaacaaaggcgtacatacctgaaatatttaacaggtggatagtgaacacctactgtgtaaactcggtttgattataattgtaactatagaag

SEQ ID NO: 37117 - DNA, 1578 bp, Homo sapiens
aaagttgaatacctactatatactaggtaccatgatgggcacctggaagatagaaagacaaggaagacaaccagaacattcagcccagtaagaagtaaagcaaggttggggtgcgtataatatcttattgtggatgtgatcacaagtggctgagctttaggattgtctgaagcatcttggaaaagagaattattttccattgggaggtagaaaatgacaaaatgagatattctaggagtttaagaagaggagacatagtttagggtttgaagtgaggacatgaaagtaggcctggtggccctccagtcttttcttcctcctctacgtcaaggggcaggttcccttaagattggagtttgatttactttaattgtactagtgtagaccaactcattcctgaggctgctacacacttatgagtgaatcatttaactatttttatttcattgctagactttggaatttattgagtcaacttaaaatcttaaaaacaatacatttggtcagtttggcctgtggcccagtttagtttgaacagagatatccacatctcttcattggagactgcttcacagttattgaattatggagtgaacataatactgtcattaacagtacaaaatcatttcttccaataatgatgttggctaatgacttcctctccactagaactttgtatccttcattctgaagttttatgatgcagtaaaataaaagaaacagtaacaacaacaaatggagtttcctgaagagaggtagaatcttaattcttcagacagttagcttttgtagctctttagacattagttttaatacattaaaatatgccaactagccttgagggagttaaaatagatggcctcccaaggttcttcccagccccagcattctgagatatttcatctaggtattgatccctttttcagtgatttcacttgtgcagtatgcctttattccagtaagcactgggctgtgaaagttacacaatccttttgcaaaaggattgaagttgaacaggtttttacaatatggcaggctcctgaagggctatcttcctggaggttccagcccaaccaacaagctgcctctttataccagtctgtgctatgtagttttataaattgaaaatggaaaatttccccctgactttgagggcagtatatttgtagttctgtggtatgtgatgatctaataccctgaaagcctgttaccattcgacaaaagctgaggtcaattatgattccccatcagtgacccacagcatctctcatgcttttctctgcagtctattttgaagagcagtcactgtaacatttttaaagggaaccagaattattattccaatgataaactgctacacagacagacattcttttatgattcattgaagtgcaggtcttaagaggttatgcattctgtctcagtgtttattaaagagagtgaagacaaatagatcagagaacaaatcaaacattgcacatcatagatgccaagcacaacagaataatcctccaatattaatatataggctacataatcccactgtgcaaaaacatgttttattcaggaaaacaacaa

SEQ ID NO: 37118 - DNA, 4512 bp, Homo sapiens
attcttagcacatattctgatacccttaaaatggcaatgaaataaaaagctgaccctggggaacatgtcatacccaacatgttaaataggatgcccagggccttggttagaaaataaagagccatgctagaattgtattgaaaaatcatgatgacaaagccctttccatttaaaaatcacagttcatcaacatcatcgaatcaatggctggaaatgaatggagaggtggtctcattctgctctctgcttggcacccagctttggataatgcattcacgtcactagctacaaatcaggccaagagactctgctcagcaaattccctaggacagcagggtttctcctcggcagaggcccaagctgggctgaagcctccctgctgctgcctgctgcagaccttcctccccctgatccactctcagcctctgggatgtcggctgtcccaggaaatccaaaatgctttcccttgtaggagcttgaacacatgcaatctttctcaacaccggggctgcaaaggccttaaaacatttactcctcccaagtctgccttattaaacgatgtgagagatttttcttaagtgggattctctgactgaggttgctgtttgaaaggagacctgtggccatgtggggcaagtctgagataggctctatttaagccgagcacttcacgtcattccactctgccttgttttcagttgagggaagggagggatgatgattcctcttgggggaatgtgggaggaaaggtaaacagtgcacgtgaacttccaagagctgcctagaaccaagaaaggcacattctctccttcccattcatggggcaaatatttaccgagccaggactctgcatagcgttgcatgtagctcggtaatggcttcacaggacccagagttttaggactatggaggctccctgtattcacctagttaagcttgtatggggaatggggaaaaaagtatttcatagacaggcagacctggtttgaatcctatggcaccacttaataactgttgcctttgagggagtcacttggcttctctgagcttcagtttcctcgcctgtactttacaggataatagcatctatcttggagtgttgctgtgagaatgagagttagtgcatgtcaagtgcctagttcagggtctggcactgagtcaacacattttctaccatcctgccctcactgtctgccccctgccctcccagaccccttatcgaagggtctggaggcatccagcagtgcagcccttagtcactctcctctcttgggcaagccttacttccatgtcagagttgccaggtctttgagagcaggagctgtatgctgctcagctctgcattcgccccaggaccagccgcagctccacggtgggcggtgctggcaaggcttgcttgagaaatggaggagaagccagtctctctctctcactctttcttcctctctctttccttctctgttaccttctctgctgcagtcaggcctgcagccagaaaaagcccagatctcctgccattgtttcctgcaggctccacactcctgagcagctgaggaggggagaaaaacaaggctgttaacagggggtgcttctttagcttcctgagccagcccacattcccagaggggaagcttttggggggatgagggaagaggagagggtatatatccaggagttctgagagagtgccaagccactcctgagtctgtttcctcccccaacattaaatcaacacagtgtccccaaattcacagcacccctcctccttctgggtgagattaagggagttaagtgcctttactgagcactactgtagcctaggcactatgcatgaggatttacagttcggcttagttcatcctcaaaacatagagatatagagtacatcttattagctctgttttacaaatgaggaaaccgagactaagagagattgaatcgctcccccaagctacagccagaaagtaccttggctgggatttgagggccccaggctgtctgactctagagcccaccccctcagcttcagcaggctgcctccctccccgccacctgctagggaagcagctgactcatggcttttgattcattcagttctcttctgcattaacattgcttcatcctaatgaacaaatattgcattatgcatttctcactttgcaaacatctacatgaggctgtttgcctgcaagcccaaaaaatcactgcattttcaggtgacatcttgacaggctggcttgtgggtaggttaaaaaaagaatcatagaatgttagagcccttaaagatggtcctaaatcagagattcttaggctagggttcaaaagcaaacctcaggggagtctccaaagccctgaatttgtacatacatgtatttttcgtaggataaaatttcagtactttcatcagattctcagaaaggtttgaagtctcaagggataaaagctgtccacagtttatccgagcaagggcctcacattcccaggcgtgctgctgccactgttgcatgagccagcacaatttgtgatagagaaaaccctgagctcaacgccagaagcagaatctgagctctgaatcttctggcaaacattttaaagactcatgaattattaaaacggctaattaagtcaaccttcaccagagaatatttgcttttccccctcatcattgagctcactgtgaaactttacttcactccatggtttgcttaagcacaaggtcaatttctttcgttccttctttgctggtctcagaaggagagctttgagtggcctgctgtggtgtagagtagcagcctgctgtacctcagtgtacacagctgggaggctctgaacccattttctcttctctgccatctgtgatttggctccatgcagcctatcgcccaccttaggcccacactctttattccgcccagtcactgtcctcagtggttcacatccgccatgcctgttcctacagctccccctcctaccaggatcaccctcccctctagcatgctgtaattggccttgaaccaaaaaatatgccacgatcatcaagtcagcctagccctctattttgcagtgcattaaccaggtctctttttctcccttccctccacaactaaatcctactttcaagacccctcttccattctacctcctttgtgaaatctcattgtttcatctattttgattttatctattttcaactagatttaagctcctcaagagcaagaacttattttccattcttctatttaccaatagcttatgtaccaagctagatgtcatacaaaaattgtattaatcaagaagtaggcttttctccaccctgcctcatccctaatctttgaaattggccacttgccaagacagtccattgcaaaatgaaaatgtagggccctagctggggcaagaaactcaatctcctccttcccataggcccactctcccaacccagggtcaataggtgattccttaagagactacagcttccatgccaggatgcagcaggtacttgaataagggatgggtgagagggctccatcaagtcaccagccaaatgcactgtggcagtgccagcccaggacagggatcgctgctaccttgctctaccctgacgtgccagggggcgcatacccaaccttccccatgcctgtgcccaggcccctgccaggaatagagggcaacagtggaacacaggcaccccccactaatgcaacctggctgtcaccccaggtggacagtgacagcaatcacagggctagggtagcggggaggccaggtgggaaagggaggctgggtgtggcccggtacgccaggaaacagagggcagactgtcagtaacccatcctggggagatgagaagtcctaggaaaccaggatagtcaaggtttcaagaccccaggcacacgcttcattgttccattgagcttcacttactgaatacaaactcaaagacaaaattactaagaatttgaaggtggtaatgcagagcactaaatgtcaagagttgcatcagtggggattggcttgtgttacactattgccctctgtgggcccctttttagtgtggagccctgtgtgactgcattagtcacaggcctatgaagctggccctgcttcccagtctgtttcctgaaatctttggcataactctacctgtaaaaatacagaagaacagtgagtaattcacttagggaatcacagagctaccctaattgcgatgagtgtcactgtttgtctcttctatacttatatgtacacaagaactcatgactcggaaatatacctgtaaggggatgaataaaattggccagtaatattaatattgtaataataatattatttaatattcagcaatcagatatacagctttggtagaaaattctgtgttttttttttaagttagccacacctacctctcctttccccactgaagtcattctcctccttatcttccacaaaactcgagaatctttgatgtttgtcagaatagaaatggttaaaacaaattttactcaattccta

SEQ ID NO: 37119 - DNA, 989 bp, Homo sapiens
gtttgtttctagacatgaaactgaaaggctattttgatatatacaaaaatcataatttttaaaatcagaaggaagcaaaccaaaacaaagtgcataaacatataaatatgtctttggagattcattgcataaattccccagaaccttttctcagaagtatttcactttgcttcaatactgccttgcattggagaattccacaaattttctattaattgcccttgaaggtgtttgcttcctggaagaagcacattataagttatggaaacagaaaaccacgatatttttgtaagaatctcagcctgagtttggggcctaccgcaagcatctgaagaatagcttgtgccagccacaaacccatttgaaggtctcagggtccctactcctgggtaatactatcaccaaggtgaaaggatgcgaactgaaatggccagagatcgctctgagatagattttgctcattgtccccggacttcccacagatattcccctaggctcaggaaattctatctccctgatttcaagtgctgcctaaaatgtaatgatgcagaaacagaatttccctgagctctctctgacctccccttccattctccactcaaacagacctaaaaaacaaatgtacggaaaatctcctactggcccatgaaaactcgttttgcaaccccttaactctattgcagcagaatgttttaggcagggctggcaaagcttatcttcagtgtttatcttatttccccacttccgcctcttcacctttccttacccccttcccctatcaaaactcactctcaggacagattatgttatgagtcatttatgctttgggattcatttcaatgccagtgttttctcttttccagagatgattatgtttttgactacatttctcagtttaggcatcaactgtctggggaagagaagaataagaggagcaagaagcccatctttgtatctctgaaatattacaatagcaccaacgaccattt

SEQ ID NO: 37120 - DNA, 1148 bp, Homo sapiens
atttcagggcttctccaaggttctgttcatcagacatgaaggctgattaggtaccgatcatcctttgtggtcattttacctctaaatcatataaagatacggagactttgtagtgctatccataaacaggtatactttaaaaagttatctttccatgtgagagaacattgatctacaaggctcttcattcttcttgttcagttttgtctatcaatactccttcagccaaatctcatttctggctttaatgggggctcacaactcggctgatatggtcacaacaactggtaaggtcttgagacagcctggcagccaggtcactgctacaatggctggatctctggtccgcagtgtcagggtttcctgggtaactggcagggaaagactgctgtgctggagctccctgggccctgagcaggacctaactgcaacttttgccctccaggattctgatggcatcaggactgtgggcagcaacaaggcctgctcaggtgctgggcacagagcccagacaaggaaggctggagcaaggctgaatgcagattaggggacgggcaggggattaggtaagactggaaagtatcactagaaatctgtcagacagcaagggaagtttgggagccagatcagaacagagtgataggtgaggagtccatctaggaagacactatgtggaaatcggaaggcaacctgttgaaagcaaaccaggaaaatagttttaaaaacagccaattcatttttgacaaaggtgtcaatgtaagtcaataggaaaaggataatcttttcaacaaattgtgcaggaataagtgtttagtcatatgcagaaatgaacctcaatcattacctcattccatacgtaaacattaacttgaagttgatctgtagaggctgaccgggcacactggctcacacgtgtaatcccagaactttgggaggctgaggcaggtggatcacttgaggttaggagatcgagacaagcctggccaacatggtgaaaccccatctctactgaaaatacaaaaattagctgggcatggtggcacgcacctgtagtcccagctacttgggaggctgaggcttgagaatcgcttgaacctgggggcggaggttgggtgacagagtgagactctgtctcaaaaaaaaaaatt

SEQ ID NO: 37121 - DNA, 907 bp, Homo sapiens
aaccacagcaaagcatcgggactcccaagagttcatggcacagccaggcgcagtggctcacacctgtaatcccagcacgttgggagggcaaggcgggtggatcacttgaggtcaggagttcgagaccagcctggccaacatggagaaaccccatctctactaaaaatacaaaaattagccgggcatggtggcaggcgcctgtaatcccagctactcaggaggctgaggcaggagaatctcttgaacccgggaggtggaggttgcagtgaccctagatcgcaccactgcactccagcctgggcaacaagcgcgaaactctgtctcaaaaaaaaaaaaaaagagagagttcatggctcaaagtccagctccactgctacactggttatgctccttctgccacaacccccatccttgtctaccctgctctgtgcccaagtgaccgacctcttcagattgcatcacccagtttgccttgggctctggcttctgcatgggtttggctatggaaggagtgggagggatgggagaggcagagaaaagacaggtagagatttttttttcctgttcccaccttgctttggagcctgatcctggcagtggctgtgtctctctgagactcttaggtctaccccatggttctagttctcacccctcatctctggctgcactcttttcactccttgacctgttaggcttggtggtgttataaggtaaatgcacctgagagtagtaattttttttttttttgagaaggagtctcactctgttgcccaggctggagtgcagtgaggcaattttggctcactgcaacctctgcctcccgggttcaagcaattctccatctcagcctcccgagtagctgggactacaggtgcgcaccactatgcctgcctaattttttgtattt

SEQ ID NO: 37122 - DNA, 699 bp, Homo sapiens
gtaagatgggaataatagcaataatatgcctaatagagtttttgtgagaattaaatgagattatatatagacattgggcttagcaaagggcctggcacttcgtaagtgctaaaaaaaaattagtcattgtcaagaatgttatcgctacacccatctttttccatctggttactcttctcccagctccaacagagcaatggcccctgggaggctaagagataataactcaccatctacttctgggagggtaataaacacacccaagtagctcacattaacgcagactccgatcaactcttgcagcccggcagagtccagaggctgctggaggcaaagggcagaagctggggagagccaaggggctggggccaggtggacttcgagcagacagcctgcagaacagtgccagtggcttctttgggcagcactttttgggcagtactctttgacataggcctggcgaagctggacatgactaaatacccgtttgtagaaggcaaaatagtcggaggagaccctctgttttgaaaacccaccagcactcctaggaaatacaatctgctgatgttagaaagcagatgtgtagcaggagagagggtaacaccaagggaacgggccagctggtccgcaggagtgttcccaaggccatagcatgccttggtgacttcttctaggtctgggactaccctgtatcaggct

SEQ ID NO: 37123 - DNA, 2346 bp, Homo sapiens
aaggaacaccccactctaatatgactgtcattggattccagcctcctttgggcattaccttttgtttcagcctttcataagtgatgacagagatttgggttcacataacccctgttttgaggaaacatttatcaagcacttactatgtgcttgaaagaacacactgttctaagttctttacatgaattatctcgatgccataactgctattattatctccatgttacagatgaggaagctaaaaaattctagtgcagttgctatctatagcgaaatgctccaaagagatgttttgaagactgttgaaggaattgaggagattggaaggccaagatctgaacaaatgtttggccacacagtaaatacatggcaagctggcaggatgtcctttttgtctagctaaagagaaagtgacccaagggaggggctatccagaaagaatattggattgggagttgtggaacgtgggacacaaggtctgaacttatcactgatcaatagaccttgaccaattacctctctgggcctaggtttcctatcagtgaaataggggttagggggctggctctggacacccaagcagcttgacacatatttaccgtatggccaaacacttgctcaggtcttgcccttccaatctttgcaactccttcagtggtcttagggacgctgctttagagagtaaccgtaccagaaatgttcagtttcgtcatctgcagtaggggtcagagtaatgacctaaggttcaatgaggccactagttactggccctgggttctgcagagcagctggcggtggcattcctgggaaatgagctggcggttgccacagttgggctctttccctgaacagctggtgtggagagcaaagagggggtgggggacaggataacctctgagtctctggccaactgcaatgtctattaagggcggcccagttggctgctagccaataacccatgcctgtgtgctttgcaagttgtagtctctccttttgaaggtctctctccagaagatgaggaaggaatttgtctcagtccacttccacacctgtccacctgagctgggcgttagcctgagcctttgcctctgtatggatcccgtgagtatcctccttcccaaggccaatgtgtggcccctcacatgggttccaggaccacaatgctttcttgagcaggctttgggtggtgatggtgggtggtggtctcagggaagatcacactccctttcttcacactctgttccaagcacagatacgggatctcttgtttttccaagattgtaaggttaacaccttcaaggctgaagttattggggctggcaaaagagagttataattacagaaaaaaaaaaaaaaccagttaagttggaggctgcctatgaactctcctggagtccactggcccatggcctggggtgccctgcttgccttttccctccaggcctgtcaggcctgccatttaatggcagagctcacttaacttccacagagaggaaggccttcagccagatctctcctctctggcgtccaggtcccaactttctatttacccaagagataagaggaagtctcccctcttctcaggtgactggggtagctctgtctgccactaaccacatgacagtcatttatattagcatacagagccatttatttcctcttgtctcaacctgtccattccagaatcagctctgagcctttcctctgcataacgaaaaagcccagtgtttttcccaaaacaaaaagcagtcttttcccttaggtggattgtcccgcttcctcttgctaaacaataaacagctgaagctttggaattgctgtgtgccttgcttcaagccttcaagcttgcaaggatatcagggtctgacatgagagcaccccaccatataagtaataatcagacatgtacaaccatatgtgagccagtcacagatggaggcagaaggtgccagtcagccttcagaagcaggtccttccaagagtcaaggttttaaactaagcatacaattagaacggccttccagtctttagtacatgacttcatcagtcagcaagaccaaattacccctgtgtttatttagaaaaaaaaaaaaaggcaatgacctatgaataaacagcacttgacattgaaaattgctacattaaatacccagctcctctgcgcgattacagcagcctccggagctctcccaaattgtcacctaggatgaatatgacagcaaacaatgctttaaaagtaagtaatctgctctataattattttagtggctgcagccgccaaccggcaggatcacttatgaaaaaggatgcagtcgttccttattaaaaatgcatgaatatacagtc

SEQ ID NO: 37124 - DNA, 879 bp, Homo sapiens
agggctggcaccagtggctctgctgtgctctggacggttatttcagacaccctgctaacacggaaagctgggcgaggctgagatggcctggcacattgaatttacctctgtgaaaactgaaaaaggaagatttttaaaaaagattataaaaaagacacttcctagtaagccagccacctcctctgcttgtgaaaggagcctggccctgttttggggggtggtactgaaaggagtgggggagaagttgaggccctacctgggccctgaggctctgggaacgcagaggccattttcatccagccttcagaagtttccttttgtggcatgacggtgttaaaaatattcctccctgaaggtgcaaccgcggcagagcagatgtccctgactgagcacttgggaaggagctattaaaaggaatgtaattaggttgtcatcctggggcctccgagccaggcttccgaacgccgtctttgttgaaagttttccagacgtcaaatatttgcagaaccaggtttaccaaaaaggttgttaattcccagtagaaatgggctgtgtgcagcagaggcaaaacaatgctgcaggtcaaggttggccttttctgggtcctttcccccatgtgggttccatcctagctccccagttccctctcccctcctcctccacactgccccctccccctaatcacactttgctcttagggaagcctctatgagtcatttaccccttagcactatgaatgtaagcccctgagcccctctggcacccccaggagtgtgggattcaggcctgagctctgtacactttggggaacaaaaggcttcatctccttttataaaatggttgtcatgcactggagtggaggtggaggagggccttccc

SEQ ID NO: 37125 - DNA, 2066 bp, Homo sapiens
ctgagacaggagaatcccttgaacccaggaggtcaaggctgcaatgaggtatgatggcaccactgcactgtagactgtgtgaagcaaaaccctgtctctaagaaaaaaaaaaatgcagggcacggtggctcacagctgtaatcctagcactttggaggccagggcaggcagatggcttgagtccaagagtttgagaccagcctgggcaacatggcaaaaccctctctctatttatatttttataaaataataaataaataaataaataaataagtaaagtttggaagtcaattggagttaggatttggtaattagttatcatttaatttctgagtgagagccaaagagctgccagtggctagatatgatgaaggccatcactttggtctgaaatttaaagtgttctgttccagaggcctgcctccttcactatgtggagccagagattcctcccctctgactgattcctgctgagagagcaggttgagtatctaccacataccaggtgtaaagtctggcatacagggtccaaaggtgtcaagaacatagccctctacaacgaaactggggaggccaggcctaagcctaggcctgacatagcccagtgactatgggggaaatcataaatctcctagccttagctttcctggctggtatatgacccaatgcctcatggggctgtttgaaaagccccaaatgatcacggaaggaaagaactttaaagggaacctgctctttggcagagcaaactgttccaaagggaactacaggcagggtttggcaccctgccctcagagaaggctggtatccatcctcctttcctccatgaaactccaagctttcttgcccttgccacgcccaccccatctttcccaagaccatttccagcagggactcatgcctcttaacaggaactgacaaagaagtgacacacccctaaagctttccgggcttctggtgtcccccaccacccccaccacacacactccagccagccctgggctgcagtgtgaccaatctcatgagtcacttggataaagtgaggactcaacaaatatttatcaaatgaatgaatgaatgaatgaggcaacgggtgagtgagtgtctccatgaatgggcagccactccctctgagaatgagactgcttcttcattcaggatgctgagtgctcccacaggaagtcactccagatttttctgatgagtgctccatgggggagacacattccctgttttttctcaagccccatgtgttttattttctccagaactccattgtgggggctgtgtcctacactcctttgggaccttatgtactagactttatacctggtatgtagtcggtgctcaataaatgtatgatgaatggaagggggaaagaaaaagattagtaagacttggaccctaccttccaaattattacaatttagctagagagaaaaggcaggtacaaaagtaccataggacaaagcccagtaggataattggtaccaaaaaaaaaggggtcaaggagtgaatgccacattcagagctgggaaaactcattatgggctgaaaaagtcaggaaatgcttcctgaagggactgaatgggattctcttcctgaagcctggccttgaaggaagagaaagatttggaggcaagtcaagggaggtgttcttgatagggaaaaaggggatgggcagctcgccagaggaaggccggttgaaattatgttactttgagtcgatttagtggagcaatggaagagtccagcacgtattgtaagatagtgtcagggaggaaatataattttccctgtacccttctgagtccttagctgggacccctgtaacagaagacagattaacaaggagaaacaaacagggctgggtgcggtggctcacgcctgtaatcccagcactttgggaggccaaggtgggtggatcacctgaggtcaggagtttgagatcagcctggccaacatggtgaaaccccatctctactaaaaatacaaaaattagccaggtgtggtggcgggtgcctgtagtcccagctattcaggaggctgaggcacgagaattgctt

SEQ ID NO: 37126 - DNA, 2120 bp, Homo sapiens
tgtaaatttatatccggcttttaggcaaatagggggagggcagagagtttttcatgtttctgcttcttctcaactgccttcagctcaaaataatccttgtgcccaagtggcatattttagggccgtgtattcggctacccttcatagggtggggcaagaccatgcagaacattgaaagctaggataagagatttggatcaagtactagcaagggcattggaacagtggcagaagtgaaagggaacgtgtgaggtgtgggaagatggagggagagggctccaggtaagtatcatagcaacaggagcatggcaaagcctgctggtcccctgggacccatcagggctggccagagctgggtcttaggcaaacagacaaacagatccctagatcactttccatttctttttcttttctttcttttctttttttttttttaagcaacggggactggctatgttgcccaggctggtctccaactcgcagcctcaagcaatgccaccatgggctaccgtgcctggactactctccatttctttctttcattcatacaaataatgattggctctatcaccagccagagcctgcagaagtaaacagggcagatgccttcccacattccccaggggccctggactctactctaggcccccatcccagcgcccaggcctaaggcttgaggctaccgaggcctaaggcaatggctgggggtgaaatcagctatggcttctcatttgcagcttccctgtacaaaaccgctaatcttcactcccgggttccgggcccacgtcctccagaccatgcccctcacccccggccaccaccctccccgactgaccacacctggaagggaaggaagggtgggggtggcctgcagagggtgtggcgagatctggacggcctgggggcgggggactaagttgaccggaaatggggctaggccgcggccagggacggcagcagatgatggttgaggagtggcctaggaaggcctccctgacggcgcccacacacgccccgcggcaccgcgaacacggctgacagggcagttgggcagcgaggtagtcgggaaagagcagggggagcccagcggctccgttgcgccctctgtcggccgccagcctccattgcacgcggcgccgcccacctgcgcactgggaccccggccctgggccgaccaggaaccccttgcgcccgcgccagctcgagccctgttgcacctgtcgtggtcaccgcaagcctctctgggagaaggcaggtgggaatgggagccttttttgtaatgggaatagaagcattctcggaagtctcctccccaagggcacttaggagccagcattacccagtgcctgcaattccaccgttagacattcccttctttggaggggtggagaggcgatgtcttcaactcttattggttattacggtaaggatttaccaaatgtgcctaggagagagcctggagggggtgagtagtctaaatcattcattctgtccctgagccaggctttcattagcactcatttgccaaggccgttctgaaggtgacccagcaccaacagccatgctgtccaactgccagggtcgcgaaaggctggtttctcttgcggtgatttgccttttattaatcaccggatagctgagccttcctcttccaggaagtctgccttgacttttgggggtaaactcctgttacaagccagggttctctgtttatttcccacgagatttgcctggtatcaccagagtccaggctcgttcagtgcccgggtcagaaagcccccatcagctgggacacttctctaagggaaaaggagaaggggaacatagagttaagggagcagactcgcccatttcctgccgtcaaggtcaaggacacactccccaagggctggttgccttggcctcacattactgatgaccttgatgaccttgtgaacacccaccatctgtttccagagagtatccaggaggtcccataagattgtgaatgctctaaaacttaagttagatggtcttctctgctcagatccctgcaatggttccccacgccacttggagtaaaagctgagccttagcctgcatggccctaagcacttggagctaagctcctatcgctgttc

SEQ ID NO: 37127 - DNA, 1262 bp, Homo sapiens
cccagctacttcagaggctgaggcagaattgcttgagccccagaggtggaggttgcagtgagccaagatcatgccactgcactccagcctgggcaacagaagcgaaactctgtctgaaaaaaaaaaaaagtgatcagatatcaaaggtagggaattcttgctcaactgacttaggattcttgtaaaaattggatgatgcaagccgggcaccatggccaaagcagaaggatcatttgaggccaggagtttaaaaccagcttgggcaacatagtgagactcccatctctaccaaaaaaaatatatttttttaattagctagatgtagtaatgtgagcattagtcctagctattcgggaggctggggtgggaggatcccttgagcccaggggtttgaggttgcagagataacacagaaacccaaaagtcaagcctagctggaaaagagctcagaagtgcctgagtagagtttggtcaagtagagaatttttgtcaaaagtgaggctggaatcccaatgcaaaggtctgattccaaaatagggtcgccaaatttagcaaaactattgcgctggacataagctaaaaaaaagtatacctttccacaaaagatggtggcctagggaaaaaaatactatttgtttatctgaaattcaaatttaagtacatgtctcttttcaatactccttctctgaccttgcgtggtgcttgcctttgggattagggcgaggggtgtgggggtgccggccactgaactggaagaccaggggccagaccctggagcccagggacagtgggaagatgaaagaggggctgcaaagcccagtcgcgcgagcttgttccggcgcctggtcaagagtgccctctggtggccacacggcgccctgcacccgcaaccagcgcagcccaagcagtggggacccggcctctgaggcggacacctgttcttggttctgacctctactaagagcacaagtccgccccgggactgtagagaaggaagccgggaggacaggacaagttcagagccacctgggatagacttttcaaaccagttgtcttaactggaggctctgatccgctccctgccaagggtcagccactgtcttgccggggcggctgatctgcaagatcctcatacccctgaattttcaaggcccgaaggagcaaacggctgatatctgctcttcctcaaacctctcgctgcccaccaccctcctggcccctctgctcacttccagggtgtgggaagtcaaatcaaaactgag

SEQ ID NO: 37128 - DNA, 808 bp, Homo sapiens
ggcgattctggtaatttttgtattttttagtagagacggggttttgccatgttggccaggctggtctggaactcctggcctcaagtgatcctccttcttcagcttcccaaagtgctgggatcacaggtgtgagctaccacacccagctgtcaggtttcttatttatgtgtctcagctgcaggtcaggcagatggctctgctgatcttggttgggctccttcacacatctgagggtcagctactctggatgtgctctgctaggctgactcagatctcctccacattcctctcccattcctcatccttccagcagactagctggtgtgctctcatgacagtggcaggaggccaagaaaaaacaagcccaattgtgtgggaaggcaagaggaagctcccatgtgcttttcaaacctctgctaacatcttattggccaaagcaagtcacatggtgagccagagacaaagtgggagggacttacaaaattacaggaagaaagaaggctattgaattgggggccattaaggcgatgagcttgccataagggctaaatatacacaggcattgttcttgagtgttgagtgtacagtggtaaacaagcctttaacacctgaagtgcagtggagaagagcaatacataaataactaagcaaaattaggaagttgattccatgaacttgtggaccaagtgattggtgcacagatgagagtaacaagtgaggctgggccgggtagctcacgcctgtattcccagcactttgggaggccaaggcggtggatcacatgaggtcaggatttgcagaccagcct

SEQ ID NO: 37129 - DNA, 1688 bp, Homo sapiens
ctcatagcctcttagctttctttcttttttttttgagacggagtttcgctcttgtcgcccaggctggagtgcagtggcgcgaccttggctcactgcaaacgctgcctcccaggttcaagttattctcctgcctcagcctcccaagtagctgggattacaggcgcatgccaccacgcccggctaatttttggatttttagtagagacgggggtttcaccatgttgactaggctggtcttcaacgcctgacctcaggtgatccgcccgcctcggcatcccaaagtgctgggattacaggcgtgagccactgcgcccggcctctcatagtctcttagctttctaaaatttgaaaaatcctgtaaagacacacctgggtcaaagggctcagataacggactgtggcccttaagtacttacgtcacaggttattgagaggatcgatttagttaccagatgtaaaatgctgggatcagtgcctggcaaaggaaaactttgtacagctgcaggctttcaccatacacaacagcatcgctaacgaatgctattacaatattcatttagcgtttaccaagtgcctactctatacaaatcttgagaatacaacgtgaaggtgaactgctgactaaagtttggtccctttcgctccgtctccttgcgaaaatgctctaacggcaggaggtcacgcgagcgctggacgcgtttctccccgcgagcccctttccgaggcctttcgggtccccccggttatccccgcccgggcggtgcgcgcccccgctgttcccgcttccgctccagagaggcagggctttccgagcctgctagccccgcggccgcaactaaccccgggtcggagtgttccggcccggccagccccgcggcgtgagggaaggggagctcagcagttccccgcgcggggcccaggcgtcggcggcagggcgggcccctcaccgccagcgtgccagccccgcccctacccaccagtgtgccagccccgcccttccccacgtcgccgcgcgcccgggggcggggcctggcgcgcaccgcccgcgcacggcgaggcgcctgttgattggccactggggcccgggttcctccggcggagcgcgcctccccccagatttcccgccagcaggagccgcgcggtagatgcggtgcttttaggagctccgtccgacagaacggttgggccttgccggctgtcggtatgtcgcgacagagcaccctgtacagcttcttccccaagtctccggcgctgagtgatgccaacaaggcctcggccagggcctcacgcgaaggcggccgtgccgccgctgcccccggggcctctccttccccaggcggggatgcggcctggagcgaggctgggcctgggcccaggcccttggcgcgctccgcgtcaccgcccaaggcgaagaacctcaacggagggctgcggagatcggtagcgcctgctgcccccaccaggtagcggggtgggggtggggtcgaaggcgggggcatagcggcggggcgcttggaacccggcgaggggaggctcgcacagggggttgggggggtgcacggcctggccctgggctcggaggaggcggggccgcagagttggcttgaatgagtgcaggggtcgagtctggagcatttgggggtgtagcttgtaaacagggtcggaggagagaggctgtgcaggaagag

SEQ ID NO: 37130 - DNA, 3967 bp, Homo sapiens
acttttaccaattatgttgcacaagatctccaactgccttgaaacatcacattctttcaagcaacatatagcaaactgctttctctaagactacctttaacagtgactggtgaaagccttttaaactattttccgattaacatctccctccttcatttgttaaatattgtgatcaagtataacaatgaaaccgtttttaaggaaataatgtataattttaaaaaacatttaatctcaatccctttaaccaatggaggtgtgacaacaaacgcatgtaaaattaaccttaatccgccaactaaaacacgcaaaatgtctcctaacaattctcctcctccttaaaacaacaaccgtacacataaatacggttctgacctctaccactactgcgaacagctaattaataaagagaatggttatgtttggagaccaaggtgcaacaccccccctcataaacctcccaaaataaccacatcatccaagtagaactgaacattatttttgctaaagcaggatttcaacctcggggagcctcagcccttagacaatggtggttaccagacagtgctaaacagttgggtccaaatgacacatttcactaggccttggacacaacacacacacgcgcgcgcgcgcaaacacacacacacacacacacacacacacacacacacacacaaaatatcccaaggggccagttctaagcaaggggcgttcaaaccccactaggagacggagagtagcaccgcggcatggggggtcgctcggggaggacaggcgagggggtgtcgatagagcggaagggtaactgcactgcacacgagggagggggctggaaatggccgatggattctatatttatttatttaaaggtcttgatttaatgggtccttcccaggggttcgtaactaaagacaaactgcgcagcaaacactgtggggttgggagaggagtcgctgctccccctaccccgtgaccagggacgggggggcgggggaaacaagttcccctgccaacaccacagaccaccccgattcccctctcccgctcctcctcaggaaggggtaggctaacacagaaaagagggggaaaacaagttccccagccaaccccaccacccgatcgctcccagtcgctccccccacctaccactagaaagaggcagactaaaccatggaaggcggcagaaaagggagaaatcacgccgctcgccttccccccggccaccaacagactcccgcggggtctgtgagcgagcggagaagccaaagggatgggtgggggtggagggtgctgagcccccgaaaccaaacaaagcgcggcctgagcgagagcccaggcgagaagggaagccgcggcttttcctgccggccgggcccggcccgggctgacactgcggcaccgggggacccgcctccgctcagcttgggtctcccacccccagggcgcgcaggccgcccccgcccgcccgcccgcccgcccgccccggcctcccttcccgcggtgcccgggaaggcgggcggttgggaggtagcgcggccttaccccgctcgccgacgttgttccgctcctgaggcagcggcggaggcggcggtggcggcggcggaggctgctgctgctgctgctgctgcggcggcggcggaggctgctgctggggcggctgctgctggggcggctgcggcggcggctgctgcgggggctgctgctgctgttgctgcaccgggcgcggccgcgacactcgcctgggtctccggttggcggctcggacggagttcatttgccgggctgaggtggcggcgttggcggagggacacacacacgcacacgcacagcgagcttcggggcaggagaaaggggtggggagagtgggagaggggggaggaaggagagggggcgaggggaaggggagacgctgagggcggagggggcgagcgggaccccgagtccggagaaaggcccgggtagacagacggagaccgagcgaggccggccgggagggcctgacgcacggggaaggccgaagccgccgggcggggcggccgcgagggacgaaggcagaaagacgggcagaccgagagaaagaaagaaagggcgtccgccgcttggggatcccgaggcgaagcgcggcggcggcggcggcggcggctgaagagacagatcccggtcccgccgactcgcgagcggcgtctccggcagcggggggagtgggcgggcgggtgaggaagggagaaaaagagagggagagaagggagggagggagcagggggcgcccggctcttttttttccctcttcctcccccccacaccccctgaaagagatttctgtgaggaatttttctctctttcttcggtctcttctctctcctcccccccttctctcctcggcgaaggggaaatgagtgtgaagggaggagatagggggaaaaagaggcgtcgtccttcctcctccttaaaggaacctttcctcctcctcctcgtcagccctgtcgccgctgcttctgctgctgctccgtggcaggaggagccattgacaccgccggagcctccactcgcccagtcggtccctccccgccgcggggctggccgggggcgcgggggagggccgcggggcggcggggggaggggtgggtgggcggggaaaggaggggcggggattccgtccaggcggccaatctaaggcgcccgtacaaccttccggccaatggggcctccgctcttatcgcgaagtcccttcaacgccctgtttcctctctcgggtttcctccctcccccgcctaggagggggaaagaggaaagggggagtgtggcggggcgggtgataatggggaggtatcagggcaaataatagagcagggggtgggcgaagagagcgccagtgcgtagcgacgattctgggagaggaggtgctcggaggaaagggcgggggttgctgatgtaatggggagaagtgattaatccttcggttcgccgtttcagcttcccccctaccccaaccttcacccgatttttttgagctgaaaaaaaagtggaacgagggagccaatctttggtaactcgggttttctgtggtaggtgggttcaaaatctgagctgtagggagcgctagagatttcgtgccctttagccaagctgagggtatttgcaaaccctgaagatttccgtctccgagctttgggcttggtaagcgaagtttggagtcggtgcctaatcgtatatcatctaaaccttgaaaaggctttgacctttggccaatttgatttgttctttgaagaagtgtatacaatgtgtgggaaaataatatgtgagaggagagaagtaaatgtgttgatgttgtgattgtttatgtgatttaatttttaattttttttttttaggtcccacaaactgcaaggaaaagaaaaaccctcaacaggaattacctttatacctgatgcccccaacataatctctctccaagggaaacgtgtttttattgccttgcggctgaaaatgtattctcgattctcccccttctctcttttgttgtgcattttttggatgtggtaaaactggcagtttatctgattatctggttttcagaactttgggcgatgtctctgagtgtcatcagttgctctctaggtttgacatagataattaagcaactacaaagcgtgataaagcttttgagagggaggaaaatgtattttggaaggagggagagacgcaaagaggcgagcctgtgtgttgagtcccagacttggtgtgtgactacaggcaaagtacttcacctttctagatgtcagccccgcccccctcacctcccaagtttaaataagaacttattttagactacatgatcctgttttcaatttttaagagttctgtgattttgagatgatctctctttagtccagaaaaatagagaaacgtaggtctatgtttgtttctcaaaaaaatatttgaggaggacagctgttacaaaaca

SEQ ID NO: 37131 - DNA, 2148 bp, Homo sapiens
aggcttttggtttgtctacgctgttcttcagcagcagagctggggatagtaggaagcagtgcgggggaagctagctcatgagcaatacgtgtaaggtgcatagccctgagcgtggcacagtgcagccttaatcagcgccacttttctccctccacgcaatcccttttccagggaaattgcatgggtcggaacgttgaacagcactggtaggtctggaacaaacactgctcacctccagacagagtgaccaggctagggcctcaggcttgtactgaagcctcctaacttgactgccggagcaaaactctactgggatcaggtctgtggaggaagcgcttctgatttgggttcaaattccttactatctatagggcaagtgaggagtagaggagcagagtccagaacacggtggagagacccagtgtgataaggaaggtccctgacactctgatgtccgaaaagtgtgtgtgtgtgtgtgtgtgtgtgtgtgtgtgtgtgtaggtggggtctgttgtgtgccctctgctgacattcttactttcacgtcatctgagccagcctgggcagggtggaatgtatgcactggttcctgtttagacccaagccaactttgtgctctgagcccctcagcactcagaaacttgtgttttcctgtctggaagccagccttgtttctttacccggagcggctaagatgattttccctgtaagcctccctgctagccgtagatttcacatcatcacagcgacacctagtggccaagtgtgaaagtccatccggccccccctcctccatagaggctctggaagccaggggaggaggagtttatggattccagacacttctgcacttcacatacagcttccaggagtcagagctccccacgttgccaactccgcacagctcagctcttaatcacatcctgtcctgagttgccctcggtttcatgtgtaatcatttaaaatcattttatctacccaattataccaaggatatgaggctagggctattagaatcacatctctttagagttgatgacctacttgtttttcagatgggaaatgcagatgccgaggggtgaggggaattcccagctgctgaaaagtgaggtttggacaagaacccgcgtctcctgagcactcccagggcggggcttcccgtggcaccatgccattcccttgcatcatccacagtgcctgcacacagtaggtgcctggcacacagaaggtcccctatagacatgcctgactgatagttcatagtcttctatgcttgccactgaagtgagtttcacttgttatctgggtcatctcttacttctcagcctcttgggagttccgatcaattaaagtgggcactctctccatagtaggccattgtctttttcatttataaagcacactgtagattcaggaaagacgaaatgaagacgagacacacaatttaaagtatctcaatcccagcatccgttcagatcaagtggctacagtgggcttcgtaagcttcagctcagcgcttcttaaactttcacatgcatctaaatctcctgggaatcttgttccaacacatattctggttccatcggtctggggtgggacctgagattctccatttctaacaagttcctcgaggctgttgaggctacccttgctgccaaagctgggaagtgcactttgaggagcaaagatgcagataactacctccaccccagacaactgcttttgagagagcccacctcagcccctgctgcagcccctctgacctggcttcaggggaaaagaaaggcactaaagcaactgtgagcactgtgacccctcggtgagtcatcccaagtctctttcctcaccatatccactgtccggaagctcctgccctcaggcagtctgaagggaaggcaagattgaaactgaacaaaaatggcacagaaaaggagaggtagacttgctgctgatgtgcctcacagtgttcctgaggaacagccctgcttggttgccattttataattaggtactcatgacatccccataaaccacaggcttctctttttaattataaaatgtactttaatttatacagtttaattataaggtacgtttattcacattttctttttcttttcttttctttcttttcttttcttttctttc

SEQ ID NO: 37132 - DNA, 4797 bp, Homo sapiens
cactaaccagagtgcgtctctgtgctcttaatcattggtttgtctcatgggaaattggtggaggattgacgcctcgtacgagttggttttgatggatttaacacagagcccctcagtgaggcttgcactggactctccaaagagcagggtagcttttaggaagacaacgcccgtgcaattgggagaggacagaaccgaggtatcttcagggaacgtgattttaaaatccagttcctagcaggttggggaaagaaggaaaggtacgtttggaacccaagaaagttgtgggcatgcggatctggccgttgggccagtgtggccacccagtcctgccacaagatggcgacagtccagctggaaacgcctgccggggtccctcggtttccagctccggaaggactgcccccgccgacacaaagaaggaatcttccgaacgggaaaggagcgtgcggtcgccctcccggcggagattggaagaggtgctgacaaaggctgcctggagaagtgggcagcctccttctcaattccatgggcttcagcttcatgcagctgattcccctttgcagggattttgtgcaaaagcacccgagaaattccaggtttgaccccaccctctgcccagaggccggccagatgcttcccggggcggtgacattcccaggattccggcagggggagtgggagcttcccggggcggggcgcggccaggctgagcccggccatgcgccctcccctccctccccggccggcgcccccggctgggcagggcgaaccccaccagccccacccctggagccctggagcctttggggttcaggaccatggacctgaacacccgagaccgcagcgctccgaggccctgagtcccagtggcaactacaaaggcgcttcctcctctcctgccgcacagtttgcctggggaaagatctagaggttgtctgtggcttgggggccggagttctctttgtcttatttttgtttcgttttgaacatgaggaaccaccacacccgcgtttgtttcattcaggctggtgcaaacttgctttggaacaaagtgttaggaaacacagattcccatctagaggttccaaatgcagtttatgagaccatactgggctgcagccctgggccctggccagactggcctccattgttcaactcttggccggactatcgcagccctgggcagatccttgctcctccagcccgggtcttggctagcacccgggataggagagggaagcccagaagagcggggtcactggccccagcctgggcttagcgggctcttatctgccctcccttctgggctgtggggtaagaataatagtagcaaagatcagccaggcggcggtggctcacccgtgtaatcccagcactttgggaggtcgaggcaggcggattacctgaaatcacgagtttgaccagcctggttaacatggtgaaaccctgtatctactaaaaatacaaaaattagcggggcgtggtggcgggcgcctgtaatcacagctacttgggaggctgaggcaggagaatcgcttgaacccgggaggcggagttgcagtgagccgagaccacgccactgcactccagcctgggcgacagagcaagactctatctcaaaacaaacaaacaaaacaaaaagcccgggcgcggtggctcacgcctgtaatcctagcactttggaggccgaggcgggtggatcacgaggtcaggagttcgagatcagcctgaccaacatagtgaaaccccgtctctactaaaaatacaaaaattagccaggcgtggtcgtccatgcttgtaagcccagcgagtcaggaggctgaggcaggagaatcacttgaacccgggaggaagaggttgcagtgagccaagatcacaccactgcactccagccgacagagcgagactccacctcaaaaaaaaaaaaaaaaaaaaagtagcaaagaccatgggttgaacatgccagatacgattaccttatttaagcttcgtaccactgctatctcccttttacagatgaaacaaccaaggcttcagatgttgagtagcccaaggccatacaactcttaaatagtggggctgggatttgaatccagatctgcttttctccaaagcaccaagctgtgcttggtacctccttatgtagttcctacatccccagtgtgagacaactgggttatataaagaaatactgggtgcagtggggtgcttaaacatcaacatgggcttttaaatgtgggccggagaactgggctagtctagtctgccttctttccttccttcaacaaatgtttatgagtgcatgctgtataccaagggcttatctagacattgagaaatcctaggaagcaaaacagaccacacttactaagctatgtgacctgagcaaatcaccaaatgtgctagttattaagcaattgactttcacaccaacttgccttctgtatgtggctttgagatggtgcatctaagactctgcaaaccacatttctcctttgccgctagtccctgtgaagctctgccagggtgctagatagagggagactcaaggaaggagaggaagaggacactcttatttctgttgccttgctatccctgtcagcttcaccctagcatcagcagtaggttctggcctccggttttcttcagcactccctgtccagtgttgtcatgtcatcatgccccctcaaatgtttcagcaccgggaggagcagccacccctcctctccagtctgagcccaggctctggggtcccctcctctgatctcctaggttttcatagcctaaccttttcccctttgtttcccagccctggtgtggtagctgctttctacagggactatctctgtgttaccacaatgttcactgttttccagcccttcaatatctataacgagtggtatgcttgtaaatatttaacaaccaattctctagaaaaacaaaaaccacaaagaaaccaatttgtaatgtgtgccaattcccataatataaatcattcaccatggatagttttaaattatcaacatggcatccctgaatttcacaagctggtgtgagcagatccaggatacaaatgctggcaaccaatatcccctatattaaaatgtctgtgttgaagtacctagtttcatttctgttttcaggactgggccctgattgataacacctcagcttctgagcatctatttttgggctctgaaatggaattactaccatttcttctaatagagctgtttggataatatgaaacaatataagtaaaacactctgaaaattacttttaaaaatttgagaccataacatagtttctagacgtttccactgaaggaagtgaagtcaggatgatgaaagtaggcaaagcattttaatgatggctcacagaggtgttccaggtgcttttagaacccaggatgacctcagagcatgggtggagcctgatgactcagaatcagagaggcagtcatatcagtgactggattatgatgtcacaaggcgtgtgtgtggatactttgttcttcaaggattctgagactgaatattgtgcaaaccaagaaagcacataaacccaaagggcaaacaatttatgtaattcaactaataccacagatgtggggcagggttgaacttttacatgaaaatctactcagttgtacaaaggaaataaaactgtagttttccataactggctaaacttttccctcaagatgtcaacccactgagcaccttgagaaggaaacagtctttaaacttgcaaaatcactaggatctccatttctgccatttaagtaacctctttggaatgacttagagtgtgcgccaatgctcagtcttcccaatctcctctccctgctcctttccagggtcacattctagggtatgtgggagtgtatatgatcttatggcacagggaggaggcctcagattcacatgtcctctgccttctccctcttctcttgcctgatcatctagttttttgtctcttcctgacacaaataccggattctcagacatgtctttctgatgtaaaagcaaaacaaaacaaaacaacactacatgctgaggcttcttaatcctgaccccagattttggctatctggtcaggcctcaaccccttcatgtcatccaaataggacacttgggaactttcaggtactctgtacactacacgtaggctatagggacccagggatgctgcctctgctgcttctgccttctttgagactacccgtcactgcccctcactgttgggtgtagtgaagctaaaagctaggctcctcctagaagcctgtggactccccagaccatgcctgggaatggagccaccacatccagttaacctgggctccctgatgcccagctgggtatctctacaccttcgtctccttgaggttcagcaagggaaggctggctagaaccctggcagtggcatctaaccaactctgtcttcttctggatctgcctatgttttcctttctcatgcttttacctcttcagaatgaacaaccctcaccatagcctccttcctcctgggggcaccaggcttcctggctaaatggctaagaagaatcctctttatgctgtggaagaagctttggtctgagttgatatgggagcctcagtaaaactgggcattatgagttactgaggataaaaatacattgggttagtactctcaaactattgccccctttatatatatatctatatacacacacatatatatacacacatacatacacatatattcaatatattttatattcaatatatattgaatattatattcaataatat

SEQ ID NO: 37133 - DNA, 1106 bp, Homo sapiens
aaatttgttaaaattgtttcaagaataatcagaatatacaaatagccctacaatcataagagttattctatcagtagttaaaaatattctcataaagaaaactctaggcccaggcagttctactggcaagttctatcaaatatttgaagaacacatttgttcagtgttacacaaattattctagagcttacccaaagagggaacattccagagctaattttgtgaggcttgtataaactgtatgccaaaatctgacaaggtaagtatgagaatagaaattacagatcaattccactaatgggctttgattcagaattctaaacaaaattttaggaaattgaatcaagcaatgtattaaaaagaccaaagaaaaacaaaatcacacaaagaaaaacagactgctaatttttcttagtaaggttaaatttccattactaatagaaaaaaagccattagaaacttaagatcctatgaatattttgggaagaatttaatttgaccccagtgtaaatggaattggatcaatacatgtgatctttaaacagtgttattacaccaaagtaggtatattttaaatcaacattaattatagaatttgaaaaaaacaaaatttataccaaaaatttagtatgtttttgggcatacgattttagacactaaaaagggaagaaacattttatttgtgcaaaatcaacataaagtaataggtatttttctctctttaaaagaaagaagtgaaaatgaaagtacaatattttatatggaattgtatggattttcttaagagttgttaaatgaacaaatacagttcttttaatttgtttttgttattctttgtgagcatgttgttttattataagtgcatttcatagttttaatcataaataaatgtctgtgaaatgatttcttaaaaaggtaatgcatcatgagcaagttggtttatcccagcaaagaaagattggcttaaacagtgaaaaatcaattagtgtaattcaccatgataacacattaaaggagaaaaattatgtgattatctaaaaagatgcaggaaaataacttgataaaattaaatatccatttatggattttttaaaagcctctcaaac

SEQ ID NO: 37134 - DNA, 410 bp, Homo sapiens
caaaaagaaaatattaattactcttaaacatatcaaagaatgctcattctcctttctcataacaaaagaaatgtaaatttaaacagcactgaaatactatttttgaccatattggcaaagataaaaagtttgataacgcactttgttggctttgttggcttaagcttgtgggaaagcggcactcatgcctgtaggagtgtaaactgatgtaacttctgtgaagggcaatttggcaatatctatcaaagttacagaatcacttgtcatttagcccagcaattccacttctaataatttatccagatataatcactagtttgtgaaattacatatatacatggttactcattgttacattgtttacagttggaagagattagaaagaacctacatgctcaccagcagtggat

SEQ ID NO: 37135 - DNA, 1910 bp, Homo sapiens
cttacctttgagctggacatcctgggaaggaaaaataattcaatggtcagttccaaggggtgagctaaatgtaaaaccagagccctaaggtttgtgttgatagcaaagtacagagatgatagaggagcaggtttggaggaggtaaactagtgatgtccccagaggcaaaagaattgaagaatgttttaaaggagagtcagtaagcaagccactggttggggaaattccagatccctggttcttccttcgctttccaagcatgattgccatcaccaatacccagccctgaactgaatcacgtggctgggcccctgctacccagtctcagacttccctgagctgcctaccaccctgcctaaatttctgaaggcctccgattcccaccaatcatgaagtacatgcatgtacctccaacaaccagcattgtgtggccatatttttgggatgcctttgcaggactggattcactgctagcagctgcaactttatcagctctccagtgagtcttccccccattgatttgttctggcctctagatcccagcttcccaggtcaatactgttaaccaaagggaaccacaccctatggggcctcataagctggttgctatatgaaattcatatgtcaagttagatagcagtttctgcctagagtgacttgtctgtgaaaacagctaacctgaaaccacataaaaagtggatcaccatattgttgcaaatttaattcagagcaatgaacaccaatggtacaaatatttggacagtatcaggccaatacaagtacaggccctgttatcagatgtcagaaaaagagggcaggtaggttaatggataacaactgtcagaggttaggacagatcaaggatatgtcaggttaagcaatcagagtcctgtgatatataaatctgattctgaggcaaagtctgccccagatcacacattgccaaggcagcatgtgatccgaattgaactatgctcaaaacttctcactcaactaaacaattataggtggctaaagagggagcaagggagtggcagaaggttctaaacctaatagtaggtacatatgcagcttggtgtagtgaagaaagcacttgactaggtatgtagacctgagtatggtcctgaactcctctctatgtcccttattccagaaacctccaccctgatcccaaaccttgcccagtggggtcttcttgctttcaatttagcaagcagaagtttgttctacatcagtcctccacctgactttgatggcctagagtaggtatttggcccctttagatctgcttggtaagggagcattcccgggattattgacaagcaatcaccattagtgatcttggcaacacttccattcctgagagcaaatagcatgtgtccttagcagctgaggcccccatctgaggtgtttaatttccaaagggaatcttggtgcatgttgggcctatagaaacttctagctaagaaaagagaaccagttctctatatatgaaatgtcctggtcatataactacaatgagacattttaaaccagtttctctttttaaaaaagaaacagaaatttattttaaaagaggaacgaacagcactctggcttttgaggactttacttttccccaattctgaaggtcctgtattcaatctgtgtattgaaaactgtgttttacttttcctggggaagtggcccctgccctggttgtccccaaaatgtcagcaatgtgggtaaatgctagcaaagtagctgtcttctgctttagataaaattctacctgatcttttttctcctttctccctaacacaagtcagcagttagcataagaaaaaagaatccagaattttctaaacatttgacacattaaaagtctcaaaactcatttgctgttgaaatgttgaggtttttctaccaca

SEQ ID NO: 37136 - DNA, 743 bp, Homo sapiens
ttaccctagcattcaaagcccttcaccgttaggtcttattgcctactagtctcctaaaggaactcatagttcaagccagagagatccgatcactgcttttacaaaatatcttatatgtttcctgatcctcatctctgcttctgtcatttttccttcctttccacttacccaacagttacaattctttaaacacctagctcaagtccttcctccctcataatggaagattacagagccagggagctcttcctccctgctatatttgcatcacctatttgctatctgctcccatcatttggcgtgttgtcttatgacaggctttgtatgtatttttaacttgttttctattctgctcatgtacatatttaccttttcaactttgatgtttaactttaaggtcaaggatcatatctaccattgtattagcacatcatgactcacaatacttactaatttcaactaattgacagtttaaagaggaggcagagttcagtgactcatgcctgtaatcctaaaacctggggaggcagaggcaggtggattgcttgagcccaggagttcgagaccagcctggacaacatagcaaaaccccatctctaaaaaaatataaaaattagctggtcatagtggcacatgcctatagtcccagctactctggaggctgaggtaggaggactgcttgagcctgggaggtcgaggttgtagtgagccgagattaccccagggcactccaacctgggcaa

SEQ ID NO: 37137 - DNA, 3858 bp, Homo sapiens
acagtgccatctcccatggtgcatggggtacatgagtcatgtgggcatggctacctacacctagattcccaaagatggagcccacatagcccagccagagggccatgacaagggcaggaccaacaaagggaatcccccctaggacactgcctagtggagctgtggggtcagggttcagttgcgaccccagatgtgtagaactatctgcatgtgcttctagcctcaggaatctcaattacaacccttgaaagctgcaccgtggactgtgaccagcaaagtcataagggtagggccaaccagagctttagggacccaattcctacctcagtgtgtccaggaggcagaacattgagtcaaagaagattattcttgagtcttcaggcttaatgttatccctgttgaatttcaaacttacttgagacctgttacgccttttttctttcctatttctccctcttggaacagagggagaaatgtctattccaccactgtattttagaagcatatagcatgtttgatttcataggtttgcagctggaaagcaatttgcctcaggatgaatcataccttgagtctcatccatatctgatttagatgatatttagctgagaatgtggacttcagacttttgagtcgatgctggaattatttaagactttggggaccactgggatggaatgagtgcattttgcatgtgagaaagacataaattttggcgggtggggggggggcgggcagggcctgaatgctgtggtctgaatatttgtgtccctcggaatgcatatactgacatcctaacccccaaggtcatggtattagcaagtggggcctttgggaggtgattaggtcataagggcacacttctcactattaaaattagtgtccttataacagagaccccagacagctagctagccccttccaccatgtgaggaaacagtgagaagatgtccatatatgaaggatggtctttcttgatcttggacttcccagcctctagaactacgagaaattaatttctgttgtttataagctaccaagtatatggtattttgttatagcagcctgaacagacacactcctaacaacctccccagcaattttgaaagcacccaattccctattttaaatgctcttctgcctattttaatagcagagtggtttgtttcctgaactgatacaattgataataaaaattttcaaacagaaactgcaaacctattttagaatcattaaagtaattcattttatttgtatctatcctatacactgaatgctactaaaatgagtgttaagtggtttaaaaatggagaactatctaggagattctcttctgtttgtactaactactggcacatttaaaaaaattacacatcagcctgggcacgatggctcacacctgtaatcccagcactttgggtggtcgaggcaagtgggtcacttgaggacaggagttcaagaccaacctgagcaacatggtgaaacccctgtctctactaaaaatacgaaaattagctgggtgtggtggcatgtgcctgtagtcccagctactcggaggctgaggtgggagaatcacttgaaccctggaggcggaatttgcagtgagccaagatcatgccactgcactctagcctgggtgacagagtgagaccttgtctcaaatacaaaacaaaacaaacaaacagaaacaaacaaacaaaaaacacacatcaagtcatgggcagcatgtttaactttatttttaaagtttatccagaatatagaatgactgaatgagtagctattaaggattattttctataaagtaatatttttacttaaaaaactgacaaaaatgaacatgactggcagaagaacagtggcttactctactctctaagaaatgcctggtgacatcagttaaaaggtatgccagagactaacagctgggtcactccaagtttcactctctttgactcagcatcctgaaatgactctcaacaggctgggaaagccattaaaacagctcctggcccatagcaataacaggctttttacctttcaatcctggtgatcctctgggagctgatgacaattctgaattttgtctctttttacactgtttgcaatgtgaatttgacagtgagtaaatgaataaaagggagtgaaacgtgggaaatttatcctttgagtaccactgagcacttggtattatatttgcttctgaggcagcttttcatatttacagttaatccagtgacatttttggctgtgcttttagaagagaaaaattgatggctaagagggcaaatgactgagaagtcacagccctctctgcaaatgcagacacgcaaatttacaattttctggcagacgacaaacagcaacaaacattcaagcctacattttcagaggtttactctgtattaaccaggtcaccatacagtgcagaataagatagaattgctttgactctcaggccttttaaagactggttggagccttctaatgcttgaccatatgtgaattatccacttggtggattacttgaaattcagccagcataaccccaagtgaactgctctgcctaagttatatttagaaaaccactcacttatttaaacattagactactcaaaaatttatgggctgaatatatccaagataaagtatataactatatatatataaacatttctaaaagtaaaaggattttttttttggtcccccaaagttttggaattaaaattatttagagctggcagggtccttaagacattttgtccaagagtttcattttatagctgagaaaacagacacgatgaggtttactgacttgccaagcaaaacagttcattgttaaattaacatttttaaatcacagcttcccttccattatcctgcacataaggaagtttttggaaatatttttagaattgtctgtgatatggaggaaataatccaaggccacaccaaagctccctaagaacagagttggactccacgggtgatgggctgatatgctggggtatgcagttgcgggaagagcctgccaggtgttccttcacttgtccttgttagcccacactacaagaagtcctcagaacctgtcctcactttctttttattttgttttataactcactcagactgcttaattgtccttatgctatctcttttctgcaagtaaacctcagttgccttctgtgaactatggaattttagggaggagttggacccatgagtacggagaggcaaccccacacactaacagaaagtaagcaccagggctgctggagaagagaggagagtacagttcacagtgtatatttaatgctgctgagcagctgggcatcagggattgtgagactttacaccccagaagttgctcaatagtggtctgtggggctctgctagaaaccagcaagggagccagcagagaaaagggagtgcagccggtgaacaaatcccagaagctcatctcaggactgctggctacctttcaggctaatgacctatagctgagggcttgcatctatttgcagatgtacttagattttaaaaggaagtctgtaccacctgatacacattagcatggctgctatttttttaaaaaagaaaaaacagaaaataattattagtgaggacgtggagaaattgtagcctttgtgcactgttgtaggaatgtaaaatagtgcagccactatagaaaacagtatggcagttcctcaaaaaattaaaaattgaactatcatatagtcaagctattctaattcttgatatacacctaaaagaattgaaagcagggacttcagcctgggcaacatggcaaaaccctgtctctacaaaaaatacaaactttagccgggtgtggtggca

SEQ ID NO: 37138 - DNA, 786 bp, Homo sapiens
gcagatattaatgatttgttctaatctgcttgtatagtagtccctttttatccacagagggtatgttccaaaacccgcagtgggtggctgaagctgcaaatagttccaaaccttatatatactatgtttttatgttcccatacatacatacctatgataaagtttaatttgtaaattaggcacagtaagagattaacaacaataaaatagagccattataaaaatatactataataaaagttatgtgaatgtggtctctctctctcttaaaatatcttattgtactgtgccatgggaaatcacagaaagcaaaactgtgggtaagcgggggactgctggtatttggggttttccagggatgctttatcacctgattttattgtaaatgtttttggttttgctatctagtggatctgtttgttgttatgttaggattttgagagattaaaaaactgtcattgctgttgtagtcccagaatcttctcaatcctaatacattttttggatatatatttaaagaacaacagaattctcccacacaccgcccaaaacaacatgacctcccgacacagcaggttgcatcacagatcttggagctggaaaaagcctcaagagatcatccggttcagctccctgtggttaggcaggaaaagcaccatcctaaattcagaataggtaacagaagcactcagaaattaaataagaagtagaacctaatattgtttaatggttttaaattttggtgtttttttatagtgttcatacaattgaaaatctaaatgtata

SEQ ID NO: 37139 - DNA, 3079 bp, Homo sapiens
ctcaccttctactcagagcctggacacacagtgaacatgctcagtcagtatccgggcttcgtataccttttcttttagtctactcaacacctttgtgagataggtatcactactctagtttttgaagatattgatagagaaactcagagatttaattatcaggatcatattcgtagcaaactagagccttagtgctgccacttctcatacctttgacgggtcatttttctaagtctcagtttccatatctgtaaagtttccacttctaagcctccgtttccgtatctgtaaagtttccatgagttagatagggttctcagatttagtaaaacgaaccaaaacaaacaggaagtataacccaaacgggatattcttatatttttaaaaaaaatctccatttttctgaaattcaggtttaaatgagctctcctgtatttcgtgtggcaaagctatgttattattatggatatgacaatggatgtgaagtccttagcttctgtaaatcctatgcacattaaattttggatttgatccgtaagtctttttttccctactgcaaacacagtgacttgtttccacagaacatttcagtcaagccagagtaacactactttaagttacagcaatgctttaccgttcctaaagcgctttcaaagcccaggcaatggcggaaggtcttgcggaaacccacataacgtggggtgtcgaggaaggtctcctcagcccgggcacaggcaccgagggccgtactgccctgcggcagcctagccccgcccccgcgcctcctcgaccactcagcggccgcgccgcgcctccgccgcactcctataggtccttcctcggacatgcgaggcctttgcattttcccgctttcccctgccctgctcagccctaaacccgcaccggcctacagcgcctccaccctgctttccgtgtgagccccgcccttccggaccctgcatttcacccccaccccagccgccgtgccaggcagccagccggaacccaggcccctcccttcggtaggaggtgggcgggaaccgggaggggccggccgagcccccttcctcggggtcgcgggaggcgggactggagggaggggtggggctaatcgccttggcgccgcgttgccatggcagcggggaaggggagggagggggaggaagcgagcgggagggggatgtggtgctgccggggccgccactgcagctgctgctgcctgctggttgccgcgtcttcccggaggcgactgctggaagctgcagggaacagctgcggtgctctgccatattgtgtcttccccggccggtccctcgcctcccggccgagctgacggtgagtcccgggcggagcggtcccctccagggtcggcgctccccgccccagcccgcggcgcagctcccgggcgcggaggcagcgcgagcgacccgcgccaggcgtggggcgcggaggcggctgtcccgtgacgcgcccggacatttttgtccagtgaggaatttgcgccggcgcgggggtgtccccggcgcgcgtatcgggtggtgtgtgggctccgggggatgtcgaactgaggggagtgtggcttgtgaggagttaggagtttttcctgagaggtaatgaccgcccgggaggggctgtcgcgcggcggaaaccgcggcgaggggtgtcgtctctccgggaaggcgtggagggggccccaaggaccctcagggctcggctcggggctggaatctgctgttagggaagtaccccaagcacctcggagcctttgcaacgccccctcctctggcttgaagtggagcgagacatgtcgggctcggagtcctcgtccggccccagttgggactggctgggccccgccaagtagtgcacggggaggtgccgggggcggccgggcgttgtggtgggcagaggcgggtcccgggtgtgtgtgggagcgaccccggcaccctctcgcccctccaccgcctcgagggggcctcagagggtggctgtcttgggagctactgtttcagcgctgcaatatggacacttcctgttcgccgcctcctttggggccgtggttacctttgccttttagtcctctttcctggcaaggtgagaggtctgcggtggaagaggccttcagcctttcaagtttgccccactgcagcagcagcctgtgtggaacccggcaggacggtggtagttagcggaaagcagcccatgtgctccgtgctccatcctccactacttaactccacccccttttgcacctttgcaaaatgcctctttttccactgcatctctcgggagttggggtgtctgcttcgctgacgacccacactctcgcagtgttcttgcactggatttctgctttaaagtctttttacagcagtctctgaacttcattttctccctactgggaaaaaagagttttagcgtgcaaagaaatgaccacagactttctttctcctaccccaactccgaggtgaggggaggagggcagttaagtatttacaggttagttgaagttgtttctcctatcttttttctgattgtgacagccacgtggccggctgagtgtaatagagtgcgctagcggcactaggggctgaggtttctctggtagccaggggctttgtaactgtgctgtcgcctcgcatgtacatttatcttggtgggagaagctgaaccattcatgcctgtacctgttccatccgaatcttaagacttacctctgttaccttgcagttctcctaaggtgtataccgacgttttttgccgttctctgctgttttgttgatccatctttaaaacctcagcattattaggtaccatcatagagtgatggggaataatagagtagtgcattatggagtttgccaactttgggaaaaaatattacttgaatttcaaaaccattaatgagagattctaatgcaatcagaagtaattgcattatctggatttctttttgatagttttagaaaaatctatttttttctttttacataaaaattgtgatctaaacatacgtaaataaaattaccagtgaaaatacttttttagggatgaagtagtgatttgatttgtgtatatg

SEQ ID NO: 37140 - DNA, 3478 bp, Homo sapiens
gaaccatgatatcgccactgtactacagcctgggtgacggagtgagaccctgtctctttaaaaaaaaaaaaagactcttgcctcctcatggaattcacagttggaaaggaagggcatttattgaactaaggagtagttcagagtaagtagagatgatgcattttaaagcctatgacatagaatctgtaatgtagtaaaatctcagcaaatgttagccactgctgtttggtactttctaatttctagatgtaatggaagatagatggagatttaagtgacaaggcaaaagtgagacattagaaattaatcactcccttctttaactgaacactgggtacactaaagagtggttttttgtttgttttttaaggaagcaagacattattcaattctcattcgtcatgtttttaagtctctatgaatagagagactttgataaaatgaataatttggtcacttacatagtacaggatatcagttctgaaatacattgtgtgctcatatatgtgaatgtttatttatgtgtggttttcataagagattgaaacagaaaccaaatccgttatcgtttgatcttttcctttttacagtgttgtgatgtttcaagttatgggtgcacaggagagagataagaactggatatggaaagaatgctgttaagatttaaaatgaataggatttgagtcattggtgctcatgggtgttgtgtacatactgttgccagcacatattgtggttagagttttgtttctggagtcagtctgcctggatttaaattctgacagttccacttacgcttaacctctctgattaattttcctcatcaataaagttgaattaataatagtgcctaccttatagggtttaattgacagttaattgagatatcatatgtaaattgtttagcacaatgcctgggcactaaagtattatctaaggctgttgctaatggagtgctctgaggctaactacttctggtggtagctcccagaatccagataaactgttctacatctaaaattaactagttttctcttttacataactgacataaaaagtagaaataaaattagccggttttcagaattcttgaagtaacctgccatctatgtcttaagcaaaacaaactctggaggtaccccccccccccaattatttcagttacacaagcataagtgggttgaataggataatagtcggtttttcactgaatttagaaatgagttatctttatgagccattgaaaattaattaaatagcacattagcctgttgctttcttctctggtctgttattgtctcatgataaagtttttgaatagaagggtgtttaaagtgcaaaacaaaaataatttgagaaaatagaaatgaaaaaagaatagtaacagctatttttcgctctccttgaaagtacagggacagttcataccttactaagagaatgccagccttgaaatgtcagtacttgagatgatatagaatgcagagtttaaaagtactgggattttaaaaagaaatgataacttatagtgaatttaatttagctaatgataaatttagtgaataagaagtgttatcttgttagacttacggaagtatagagtagaatggttggtaaccagatatgggtggtgggggtaggaggagggtgtagggaagggggagatgttagtcaaagagtacaaagttctggttacacaagaggagtaagttctagtgacctattgcatagcatgatgactgtagttaataataatgtatatttcaaaattcctaaaagaccatttaaaatgttctcaccacaaagagagataggtatatgaggtgatggatatattaattagcctgatctaatcatttcacaatatatacatgtatcataatatcacattgtaccccataaatatatataatcattatttgtcgattcaaaataaataatgaaataaaaatgttatctctttttagtatgacgtgctgtaaaaatagtatacatagtttctttttatagtaaatatttgagatttgaggaaagggtttattttaaaatattgcttaaatatttcaaatttattattttcaagattcaactatttgtatatagtaaaatcatagattcttaagatacgtataaagtcttatagttcaaagaaatagcctgtccactttaagtaataatagccacttcctattaggtgattagtgtgggctaggtactttactaagtatttaaaatacactatttaattgtgttaatatcacccatacacctggtcctataaagctgcactttatttacagccatttcaactaatataagttattttccttgtattataaccattagtatcttcattatacaaatgttgtgcttaaatattatgtgggacaattgattgcaaaatttctctgatttggggatatttacatatgtattttctttttcccagagtttaagaatctaaagtattacattgataattgtttcctttgttgcagaactgtaagagtaaatgggtccagtaattggaatgactccagataagagagctgaaaccccaggagctgaaaagattgcaggattaagccagatttacaaaatgggaagcttgcctgaagctgttgatgctgccaggccgaaggccactctagtggacagtgagtcagcagatgatgaactcacaaacttgaactggcttcatgaaagcactaatcttctaacaaacttcagcctcggaagtgagggtcttccaattgttagtccattgtatgacatagagggagatgatgtgccatcctttggaccagcttgctaccagaacccagaaaaaaaatcagcgacttcaaagcccccatactcctttagtcttctcatttatatggccattgagcactctccaaataaatgtttgcctgtcaaagaaatttatagctggattctggaccattttccatattttgctactgcaccaacaggctggaagaattctgttcgacataatctgtccctgaataaatgttttcagaaagtggaaagaagccatggcaaggtcagtgtttatgaacattgctatatttggtgaggtggggggactaattaacatggagcccttaaaatatctggaaatcggggagacaataagtagtcaagtcaaattacttcagctgaactgaattatattcatttgttttcacttgagatgttttaaaatttcttaaatattgatataaatttagcagaattatgttttgtccactataggtacctagattagtctttttattattttagttctttgtttctagtttctgtagtgttcctataactatcagcatttgattctttattcaatatgataatctctgccttataatcaaagtatagaccatttaaattaatgaaattgatatggttgggtttaaatctatcaccttgctatttatttgattttcttttccacttttcctgccttttgtgg

SEQ ID NO: 37141 - DNA, 585 bp, Homo sapiens
gtatgttcctagatccagatagatgtgtgacttggtaaagttagactctctgagcctcatttttacttcagtttttgtaactagtaacctttagtaaatatgacttactaaataaaagccaaacttgttaacatggttttcaagaccctccccagtttggcttctgcctgtctttgcagttttttttcttcactactccatgatctacccccacaagactacttgctattccagtatactataaatagtccttgtttattttgttcctctatctacactgcattttcgtaattcactttcagtggagagaacatttcctcaaagcccagctcagaagtcacctctcaagcatttcctgcttttttgtactcattttgtgtttttatagcattctgtttgttacctttataacatacatatcccagttatgtatagatttgcttctcccactagggaagatatgagagctctctgaggtcaaggccttagtagaatagtcacttaagactgtgtgtgtgtgtgtgtgtgtgtgtgtgtgtgtgtgtgtgtgtgtgtgtgtgtgaaagagaaaggggggagtgatat
